United States Patent Application Publication US 2023/0272434 A1 - sequence listing, part 3

SEQ ID NO: 3385 - protein, 1093 aa, Adalia bipunctata
MRVHYIATDLAIEPGKTYRQHLAEIWEDVCPSRPAYAQLLSNRVRWILKNQKLSRAELEIIKASCYPSEISQQQNDSAQELALRRSSPRVRRSGIFNREENNCAVECCFVTNLVRFSGMAAENRPRIPRVQHSKGVFNTIKSLNTILPKHLENVHTLEEVVDLVYAAAATTCELHGRLVGQQSAPKPSTSPPWKIRLDAKITTIRKKVGVLHAYLNTPNPSTKVLKAVRRVASECRIKRRDPSFRDKISYVCDTLKQKIKALGNRIRRYNERVKRYRNNKIFFQNQKQFFRDLERDSEEAADHVEPDIAHKFWSEVWSENVSHNDHAHWIEEAQSQIPSVHMENIHITETDIREALKGSNNWASPGPDKLHNYWWKYLTSVHGILSRLLHGSLSDPSVIPDFFTLGTTHLIHKDGDPKNPKHYRPITCLPSVYKILTAVLTRYISKHLRDNNLMAQEQNGGRIRTKGCKELLVIDYILTKQARKKLRNISVAWVDYRKAFDSVPHSWLLRVLKMHGVNEQVSNLLGCLMRTWRTSLLIRTGDDTMESKIIKINRGIFQGDTLSPIWFCLALNPLSMLLNNTIYGYTISKGRNIRINHHLYMDDLKLYAANPDQLKRQLEIVSSFSDSIRMQMGVDKCAVLDVKRGKIQNTEHGTTLMNNTTIPALSKNESYKYLGIKQALDIKTSEMKVLFKEKLYKRVSLLLKSKLNSRSLFTAINIWAIPSIAYSFGVLTWSVTELREIDRALRVLLTKYGVHHPHSSTIRLYLPRQQGGRGLLNLETMHDEAVEALRKYFLKKNSPLFLAIREADEKSSALKLSEPELRNSRRSMEELINDWNAKALHGRYPGHLKREDVDKVESLTYLRAGYLFPETEGRLMAIQDQVMPTRSYLKHIAKRNIPTDRCRKCSQAPESIQHITSSCSILAPRDYLDRHNAMAKIYHQQMALKLGLLQQEVPQHLYQPKTLLQNNRYKLYWDATLITDRGVAHNRPDLTLFDLERETCFLLDVSIPADDNISKAYSEKITKYADLAFQLRELHSLKSISIMPLIVSVNGLVERHLLENTRRLSLDRDIISTSQKQVMLGTARIVRKFLQGP

SEQ ID NO: 3386 - protein, 1094 aa, Adalia bipunctata
MLMRVHFIATELAVDSSKTYRQHLLEIWQDIRPDRPAYAQLLSNRVRWILKNQKLSRAELETIRMTCFPLETTEHQNLDAQEPTSRSSPPRVRRSGLFVRRDESDAVERPFLANLLRFSGITPEKRPKLPRMQHSKDVLESVRCLNSILPKHLKNVDNLTGVVDVVYAGAFTICDMYGLVQQHATRQQPTEPPWRLRLERKITVMRKKIGPLHTYLSVSDPTTKLTKAVRKVASEFRVKRRDPHFKEKILVVADTLKQKIKALGSRIRRYNERVKRYRNNKIFFQNQKQFFRDLERGSVSTIDHVELRSAHQFWSGVWSGHASHDRGAYWIDEAQERIPKVGMGEMSITEEDIRWALKRSNNWASPGSDKLHNYWWKYFTSVHRSLAQQLQKALLEPTVIPEFFTSGITYLIPKEGDLSDPKNYRPITCLPSVYKILTAVMSHYINKHLRDNNLMAHEQNGGRIRTKGCKELLVIDHIVTKQAQKKLRNISVAWVDYRKAFDSVPHSWLLKVLEMHGIIKQITNLLENLMKTWRTSLLVRSGDKLMESERISINRGIFQGDTLSPIWFCMALNPLSMLLKNTNYGYIINKPNNISISHHLYMDDLKLYASSSEQLRRQLEIVSRFSDSINMQLGIDKCAILEVKRGKIQDTGHTTTLMNNISIPNLNPNEPYKYLGIRQALSIKTSEMKDLFKEKLYKRVNLLLKAKLNSRSLFTAINIWAIPSISYSFGVLTWSATELKEMDRALRGILTKYGVHHPHSSSIRLYLPRHQGGRGLLSLETIHNENIDSLREYFLGKNSPFFNAVRDADQGISALKLSQAGYQIPRRSVDEMLEELSAKALHGRYPGNLKNRDVNKVESLTYLRAGYLYPETEGRLMAIQDQVMPTRMYLKHITKQNIPTDRCRRCSQAAESIQHITSSCSILAPIDYLDRHNSMAKIYHQQMALKLGLLKSESPQHLYRPQTLLQNQRYRLYWDATLITDRGVAHNRPDITLFDTTEETCLLLDVTIPADDNITRAYTEKIVKYGDLAFQLRELYNLKKINIIPLIISVNGLVERHLPENTQRLCLDNNVISASQKQVILSTIRTVRKFLQGP

SEQ ID NO: 3387 - protein, 1093 aa, Adalia bipunctata
MRVHYIATDLAIEPGKTYRQHLAEIWEDVCPSRPAYAQLLSNRVRWILKNQKLSRAELEIIKASCYPSEISQQQNDSAQELALRRSSPRVRRSGIFNREENNCAVECCFVTNLLRFSGMAAENRPRIPRVQHSKGVFNTIKSLNTILPKHLENVHTLEEVVDLVYAAAATTCELHGRLVGQQSAPKPSTSPPWKIRLDAKITTIRKKVGVLHAYLNTPNPSTKVLKAVRRVASEFRIKRRDPSFRDKISYVCDTLKQKIKALGNRIRRYNERVKRYRNNKIFFQNQKQFFRDLERDSEEAADHVEPDIAHKFWSEVWSENVSHNDHAHWIEEAQSQIPSVHMENIHITETDIREALKGSNNWASPGPDKLHNYWWKYLTSVHGILSRLLHGSLSDPSVIPDFFTLGTTHLIHKDGDPKNPKHYRPITCLPSVYKILTAVLTRYISKHLRDNNLMAQEQNGGRIRTKGCKELLVIDYILTKQARKKLRNISVAWVDYRKAFDSVPHSWLLRVLKMHGVNEQVSNLLGCLMRTWRTSLLIRTGDDTMESKIIKINRGIFQGDTLSPIWFCLALNPLSMLLNNTIYGYTISKGRNIRINHHLYMDDLKLYAANPDQLKRQLEIVSSFSDSIRMQMGVDKCAVLDVKRGKIQNTEHGTTLMNNTTIPALNKNESYRYLGIKQALDIKTSEMKVLFKEKLYKRVSLLLKSKLNSRSLFTAINIWAIPSIAYSFGVLTWSVTELREIDRALRVLLTKYGVHHPHSSTIRLYLPRQQGGRGLLNLETMHDEAVETLRKYFLKKNSPLFLAIREADEKSSALKLSEPELRNSRRSMEELINDWNAKALHGRYPGHLKREDVDKVESLTYLRAGYLFPETEGRLMAIQDQVMPTRSYLKHIAKRNIPTDRCRKCSQAPESIQHITSSCSILAPRDYLDRHNAMAKIYHQQMALKLGLLQQEVPQHLYQPKTLLQNNRYKLYWDATLITDRGVAHNRPDLTLFDLERETCFLLDVSIPADDNISKAYSEKITKYADLAFQLRELHSLKSISIMPLIVSVNGLVERHLLENTRRLSLDRDIISTSQKQVMLGTARIVRKFLQGP

SEQ ID NO: 3388 - protein, 877 aa, Coccinella septempunctata
MPNPSKKVTKAVRKVASEFKIKRRDPSFQQKISVTCDRLKQKIKVLGSRIRRYNERIKRHINNKLFYKNQKQFFRNLMHENSTEDGHLDSKLAHQYWSGVWSEKATHDVSACWIDEAQSKIPNVQMEDIEINEGDIAEALRRSNNWASPGVDKLHNYWWKYLKSVHQPLAKLFQKAFTDPSVIPEFFTQGITYLIPKQGNLDNPENYRPITCLPAIYKIFTTILARQINKHIRRNNLIAQEQNGCRLNTKGCKELLVTDYIVTKQARKKLRNISVAWVDYKKAFDSVPHSWLLKVLEMHGITPQVIGILKHLMRTWRTKLTIRDGEQVEESEQIRICRGIFQGDTLSPVWFCLALNPLSLLLNNTSYGYVIDKRANTRITHHLYMDDLKLYAASLEQLKRQLEIVAAFSDSINMRMGINKCATLEVKRGKMQDTGQQTTLLNNVTIPTLTDKQTYRYLGVQQALEIKTSEMKDLYREKLHSRLNLLLKSKLSSKSLFNAINIWAIPSITFSFGILTWSTTELREIDRNIRTTLTKFGIHHPHSSKIRLYLSRRQGGRGLLNLEDTHGKHIENLRTYFYKNNSPLFQAIRMADDNLSALKLSSRDYHPTQRNDEELKHEWRSMALHGRYPGHLEKEEINKTESLRYLRAGYLFPETEGRLMTIQDQVMPTRMYLRHIAKQDIPSDRCRKCSQAPESIQHITSSCTIMAPRDYLDRHNAMAKIYHQQMALKLGLLQHEIEQHLYCPQTLLQNERYRLYWDATMLTDRGVAHNRPDITLFDKQRESCFIIDVTIPADDNVSRAYAEKLNKYGDLAFQLKELYNLKSMSIIPLIITVNGLVEHHLIENTERLKLDLNIISQAQKQVILYTTRIVRKFLQGP

SEQ ID NO: 3389 - protein, 1094 aa, Adalia bipunctata
MLMRVHFIATELAVDSSKTYRQHLLEIWQDIRPDRPAYAQLLSNRVRWILKNQKLSRAELETIRMTCFPLETTEHQNLDAQEPTSRSSPPRVRRSGLFVRRDESDAVERPFLANLLRFSGITPEKRPKLPRMQHSKDVLESVRCLNSILPKHLENVDNLTGVVDVVYAGAFTICDMYGLVQQHATRQQPTEPPWRLRLERKITVMRKKIGPLHTYLSVSDPTTKLTKAVRKVASEFRVKRRDPHFKEKILVVADTLKQKIKALGSRIRRYNERVKRYRNNKIFFQNQKQFFRDLERGSVSTIDHVELRSAHQFWSGVWSGHASHDRGAYWIDEAQERIPKVGMGEMSITEEDIRWALKRSNNWASPGSDKLHNYWWKYFTSVHRSLAQQLQKALLEPTVIPEFFTSGITYLIPKEGDLSDPKNYRPITCLPSVYKILTAVMSHYINKHLRDNNLMAHEQNGGRIRTKGCKELLVIDHIVTKQAQKKLRNISVAWVDYRKAFDSVPHSWLLKVLEMHGINKQITNLLENLMKTWRTSLLVRSGDKLMESERISINRGIFQGDTLGPIWFCMALNPLSMLLKNTNYGYIINKPNNISISHHLYMDDLKLYASSSEQLRRQLEIVSRFSDSINMQLGIDKCAILEVKRGKIQDTGHTTTLMNNISIPNLNPNEPYKYLGIRQALSIKTSEMKDLFKEKLYKRVNLLLKAKLNSRSLFTAINIWAIPSISYSFGVLTWSATELKEMDRALRGILTKYGVHHPHSSSIRLYLPRHQGGRGLLSLETIHNENIDSLREYFLGKNSPFFNAVRDADQGISALKLSQAGYQIPRRSVDEMLEELSAKALHGRYPGNLKNRDVNKVESLTYLRAGYLYPETEGRLMAIQDQVMPTRMYLKHITKQNIPTDRCRRCSQAAESIQHITSSCSILAPIDYLDRHNSMAKIYHQQMALKLGLLKSESPQHLYRPQTLLQNQRYRLYWDATLITDRGVAHNRPDITLFDTTEETCLLLDVTIPADDNITRAYTEKIVKYGDLAFQLRELYNLKKINIIPLIISVNGLVERHLPENTQRLCLDNNVISASQKQVILSTIRTVRKFLQGP

SEQ ID NO: 3390 - protein, 873 aa, Adalia bipunctata
MHTYLNAPNPSKKVTKAVRKVASEFKIKRRDPSFQQKISVACDRLKQKIKVLGSRIRRYSERIKRQKQFFRNLVHEDSTEDGHLDSKLAHQYWSRVWSAKVTHDASAYWIHEAQSRIPNVQMEDIEINEGDIAQALKRSNNWASPGVDKLHNYWWKYLKSVHQPLAKVFQKAFADPSVIPEFFTQGVTYLIPKQGNLDNPENYRPITCLPAIYKIFTSILARQINKHIRRNNLIAQEQNGCRLNTKGCKELLVTDYILTKQARKKLRNISVAWVDYKKAFDSVPHSWLLKVLEMHGVTSQVIYILRHLMKTWRTKLSIRDGDQVEESEQIRIYRGIFQGDTLSPIWFCLALNPLSLLLNNTSYGYVIDKRASTRITHHLYMDDLKLYAASLEQLKRQLEIVAAFSDSINMRMGIEKCATLEVRRGKIQDTGQQTTLLNNVTIPTLTDKQTYKYLGIQQALEIKTPEMKDLFRKKLHTRLNLLLKSKLSSRSLFNAINIWAIPSITFSFGILTWSTTELRELDRNIRTTLTKFGIHHPHSSKIRLYLPRRQGGRGLLNLEATHGKNIENLRTYFFKNNSPLYQAIRKADENISALKLSSRDYQPAQRTDEELKHEWRSMALHGRYPGHLEKEEINKAESLRYLRTGYLFPETEGRLMAIQDQVMPTRMYLRHIAKQDIPSDRCRKCSQGPESIQHITSSCTIMAPRDYLDRHNAMAKIYHQQMALKLGLLQHEIEQHLYSPHTLLQNERYRLYWDATMITDRGVAHNRPDITLFDKQRESCLIIDITIPADDNVSRAYAEKLTKYEDLAFQLKELHNLKAMSIIPLIISVNGLIEHHLIENTERLKLDRNIISYAQKQVILSTTRMVRRFLQGP

SEQ ID NO: 3391 - protein, 1075 aa, Harmonia axyridis
MRAHYIATYLATDSGRTYRQHLMEIWECICPSRPTYVQLLSNRVRWILQNQKLSRAELENIKTGCFPHIPEQQENQTEPPPRRSLVGVRRSGLFVRRDQDDTLERHFLENLMKFSGIAPDKRPRIPRMYHSKHVLESVRALNIILPKHLETINELKEVVDVVYAGAVTICEIHGKRIGLPTEPPWKMRLEKKIISMRKKIGVLYTYLNTQNPSKKTLKAVRRIAAELRIKRRDPGFKDKINFFCDTLKQKIKALGSRMRRYNERVKRYKNNRQFFQDRGRFFRGLEQDGYQGNERLDPGTAHKFWSGVWSEKCVHDERAYWIGEAQAGMPQTQMEEVNITESDIAEVLRKANNWASPGSDKVHNYWWKYFTNVHTTLATLFQKSLSDPSIIPESFTLGVTHLIPKDGDRKNPQNYRPITCLPAVYKILTAVITRHINKHLRDNNLMAEEQNGCRINTKGCKELLVVDYILTKQARKKLRNISIAWIDYRKAFDSVSHGISGPVVNLLKYPMTAWRTSLLLWSESGAVESEEIWIRRGIFQGDTLSPIWFCMALNLLSRLLNNTKYGYIIDKQRNLRISHHLYMDDLKLYASSPDQLRRLLEIVAAFSDSIKMQMGVDKCAMLDVRRGKIQNTEDGVTLMNATNIPDLNANDSYKYLGINQALEIKISEMKKIFKEKLYKRVNVLLKTKLNSKSLFTAINTWAIPCLTYSFGILTWSQTDLREIDRTIRTILTKYGVHHPHSSTIRLYLPRQHGGRGLINLETTHGKNINSLREYFLSKNSPLFRAIREADSNISALKLSNSDHREAVRTLDELVDEWSSKPLHGRYPGHLKSKNINKSESLTYLRAGYLFPETEGRLMAIQDQVMPTRMYLKHITKQNIPSDRCRKCSQAQESIQHVTSSCTILASRDYLDRHNAMGKIYHQQLALKLGLIQNEEQQHLYQPKTLLQNQRYKLYWDATLITDRGVAHNRPDVALFDMERETCLLLDFTIPADDNLTRAYTEKLSKYADLAFQLRELYKLKSISILPLIISVNGLVEEHLIGNTDRLCLPREVISSSQKQVILSTTRIVRKFLQES

SEQ ID NO: 3392 - protein, 921 aa, Harmonia axyridis
MEFSCRLIYIYIYTYIYIYIYIYIYIYIYISMRKKIGVLYTYLNTQNPSKKTLKAVRRIAAELRIKRRDPGFKDKINNFCDTLKQKIKALGSRMRRYNERVKRYKNNRQFFQDRGRFFRGLEQDGYQGNERLDPGTAHKFWSGVWSEKCVHDERAYWIGEAQAGMPQTQMEEVNITESDIAEVLRKANNWASPGSDKVHNYWWKYFTNVHTTLATLFQKSLSDPSIIPESFTLGVTHLIPKDGDRKNPQNYRPITCLPAVYKILTAVITRHINKHLRDNNLMAEEQNGCRINTKGCKELLVVDYILTKQARKKLRNISIAWIDYRKAFDSVPHTWLVKVLELHGISGPVVNLLKYLMTTWRTSLLLWSESGAVDSEEIWIRRGIFQGDTLSPIWFCMALNLLSRLLNNTKYGYIIDKQRNLRISHHLYMDDLKLCASSPDQLRRLLEIVAAFSDSIKMQMGVDKCAMLDVRRGKIQNTEDGVTLMNATNIPALNANDSYKYLGINQALEIKISEMKKIFKEKLYKRVNVLLKTKLNSKSLFTAINTWAIPCLTYSFGILTWSQTDLREIDRTIRTILTKYGVHHPHSSTIRLYLPRQHGGRGLINLETTHGKNINSLREYFLSKNSPLFRAIREADSNISALKLSNSDHREAVRTLDELVDEWSSKPLHGRYPGHLKSKNINKSESLTYLRAGYLFPETEGRLMAIQDQVMPTRMYLKHITKQNIPSDRCRKCSQAQESIQHVTSSCTILASRDYLDIHNAMGKIYHQQLALKLGLIQNEEQQHLYQPKTLLQNQRYKLYWDATLITDRGVAHNRSDVALFDMERETCLLLDFTIPADDNLTRAYTEKLSKYADLAFQLRELYKLKSISILPLIISVNGLVEEHLIGNTDRLCLPREVISSSQKQVILSTTRIVRKFLQES

SEQ ID NO: 3393 - protein, 1103 aa, Adalia bipunctata
MEENYLVMRAHFIAKDLAERSSKTYRQLLVEIWGDIYPSRPVYAQLISNRVRWILNNQKISRAELHTIETSCYPNVMMREETAEGQHTDARKSLPRVRRSGIFVRREPEDTLESQFMSNLVKYSGIAPGGRPRIPKLECSRHVLQLIDSLNIIITRHLSNDNSLEELVDIVYAGAVTICETHGRKIGQNTGQQHHKKTHDVSPWEERLQNKIIHLRKKIGVMHTYLNAPNPSKKVTKAVRKVASEFKIKRRDPSFQQKISVACDRLKQKIKVLGSRIRRYNERIKRHINNKLFFKNQKQFFRNLVHEDSTEDGHLDSKLAHQYWSRVWSAKVTHDASAYWIHEAQSRIPNVQMEDIEINEGDIAQALKRSNNWASPGVDKLHNYWWKYLKSVHQPLAKVFQKAFADPSVIPEFFTQGVTYLIPKQGNLDNPENYRPITCLPAIYKIFTSILARQINKHIRRNNLIAQEQNGCRLNTKGCKELLVTDYILTKQARKKLRNISVAWVDYKKAFDSVPHSWLLKVLEMHGVTSQVIDILRHLMKTWRTKLSIRDGDQVEESEQIRIYRGIFQGDTLSPIWFCLALNPLSLLLNNTSYGYVIDKRTSTRITHHLYMDDLKLYAASLEQLKRQLEIVAAFSDSINMRMGIEKCDTLEVRRGKIQDTGQQTTLLNNVTIPTLTDKQTYKYLGIQQALEIKTPEMKDLFRKKLHTRLNLLLKSKLSSRSLFNAINIWAIPSITFSFGILTWSTTELRELDRNIRTTLTKFGIHHPHSSKIRLYLPRRQGGRGLLNLEATHGKNIENLRTYFFKNNSPLYQAIRKADENISALKLSSRDYQPAQRTDEELKHEWRSMALHGRYPGHLEKEEINKAESLRYLRTGYLFPETVGRLMAIQDQVMPTRMYLRHIAKQDIPSDRCRKCSQGPESIQHITSSCTIMAPRDYLDRHNAMAKIYQQMALKLGLLQHEIEQHLYRPHTLLQNERYRLYWDATMITDRGVAHNRPDITLFDKQRESCLIIDITIPADDNVSRAYAEKLTKYEDLAFQLKELHNLKAMSIIPLIISVNGLIEHHLIENTERLKLDRNIISYAQKRVILSTTRMVRRFLQGP

SEQ ID NO: 3394 - protein, 1028 aa, Adalia bipunctata
MMGEETAEGQHTDARKSLPRVRRSGIFVRREPEDTLESQFMSNLVKYSGIAPGGRPRIPKLECSRHVLQLIDSLNIIITRHLSNDNSLEELVDIVYAGAVTICETHGRKIGQNTGQQHHKKTNDVSPWEERLQNKIIHLRKKIGVMHTYLNAPNPSKKVTKAVRKVASEFKIKRRDPSFQQKISVACDRLKQKIKVLGSRIRRYNERIKRHINNKLFFKNQKQFFRNLVHEDSTEDGHLDSKLAHQYWSRVWSAKVTHDASAYWIHEAQSRIPNVQMEDIEINEGDIAQALKRSNNWASPGVDKLHNYWWKYLKSVHQPLAKVFQKAFADPSVIPEFFTQGVTYLIPKQGNLDNPENYRPITCLPAIYKIFTSILARQINKHIRRNNLIAQEQNGCRLNTKGCKELLVTDYILTKQARKKLRNISVAWVDYKKAFDSVPHSWLLKVLEMHGVTSQVIDILRHLMKTWRTKLSIRDGDEVEESEQIRIYRGIFQGDTLSPIWFCLALNPLSLLLNNTSYGYVIDKRTSTRITHHLYMDDLKLYAASLEQLKRQLEIVAAFSDSINMRMGIEKCATLEVRRGKIQDTGQQTTLLNNVTIPTLTDKQTYKYLGIQQALEIKTPEMKDLFRKKLHTRLNLLLKSKLSSRSLFNAINIWAIPSITFSFGILTWSTTELRELDRNIRTTLTKFGIHHPHSSKIRLYLPRRQGGRGLLNLEATHGKNIENLRTYFFKNNSPLYQAIRKADENISALKLSSRDYQPAQRTDEELKHEWRSMALHGRYPGHLEKEEINKAESLRYLRTGYLFPETEGRLMAIQDQVMPTRMYLRHIAKQDIPSDRCRKCSQGPESIQHITSSCTIMAPRDYLDRHNAMAKIYHQQMALKLGLLQHEIEQHLYRPHTLLQNERYRLYWDATMITDRGVAHNRPDITLFDKQRESCLIIDITIPADDNVSRAYAEKLTKYEDLAFQLKELHNLKAMSIIPLIISVNGLIEHHLIENTERLKLDRNIISYAQKQVILSTTRMVRRFLQGP

SEQ ID NO: 3395 - protein, 1095 aa, Propylea japonica
MVMRSHYIALDLVETRNSTYRNLLLETWKEICPERPAYAQLLSNRVRWILDNQKLSRAELECIKSGCYPTIMRQETTHSSENVRRVSSAGIRRSGVFLRQPREDDTERSFSSNLMKYSGMAAEKRPEIPRLIYSRVTRDLVARVNIIISRHLADVETLEDLIDVMYAGAVTVSEALGKRIGHHQGASKPPTIPPWKLRLEKNITALRKQIGVVHTYLNTATPSAKLVKAVRKVASGSRIKRRDPSFKEKLAVVSDYLKQKIKALGNRIRRYNERTKRYNNNNLFYKNQKHFFRSLETTDGVKCEELEPEAARDFWAGVWEKGGTHDEGAYWIAEAQENIRGEPMEEIQVQKPDIIETLKSTNNWASPGPDKLHNYWWKYFDSVHEKLTLLIQGALNNPASVPGFLTQGITYLIPKDGERKDPKNYRPITCLSSLYKIITGVITKHLSRHIREHNLLTEEQGGCREKTKGCKELLLIDHIITKQARKKLRNISIAWVDYKKAFDSIPHTWLLKVLEMHGVARNIIQLLRHLMTTWRTTLRVRAGETLIELPPIKISRGIFQGDTLSAIWFCLALNPLSIILKNTKYGYIINKIRRITISHRIFMDDLKLYGANPEQLRRMLEVVAAFSESVGMEMGVDKCAVLNVRRGKIDDTMEGTTLSNHITIPVLSKDASYKYLGIKQALEIKTAEMKKFFRERLLGRVALLLKAKLNSKSLFMAINIWAIPGMTYSFGVLNWSITEIRALDRDVRSMLTKYGVHHPHSSTIRLYLPRHQGGRGLTSLEDAHAKNVNDMRQHFLKNNSPFFRAICEADDGISAVKLAEAGYQLSWPSAEERIQEWSAKALHGRYPTHLQSRDVERAESLTYLRAGYLFPETEGRLLAIQDQVMPTRMYMKHIAKQVVPTDRCRKCAQGAESIQHVTSSCPILAPREYLERHNSMGRIYHQQIALKLKLLQDEVEQHLYLPKTLLENQRYRMYWDATLVTDRGVAHNRPDVAIFDKEKKTCLLLDFTVPADDNLARAYSEKISKYSDLAFELREIYQLTSVSVLPLIISVNGLIERHLPENTRKLCLDQHVISSSQKQIILSTTRIVRKFLQGP

SEQ ID NO: 3396 - protein, 1096 aa, Adalia bipunctata
MVMRAHYIATDLVETRNTTYRSLLMEIWKDICPDRLVNAQLLSNRVRWILGNQKLSRAELECVKAGCYPDIIQQEAAASSQAARTRSSIGIRRSGLYIAEREPDTTESSFVGNLVRFSGGAADKRPKIPRLKYSRSAYDQVRKVNSVLLRYTTDVNSLEELVDVVYAGAATVCELLGQPIGCRRATPGASSTPPWKLRLEQKIKTMRKKIGVIHTYFTAASPTNKVIKSVRKVASESRLKCRDPSFKEKLATVSDHLKQKIKALGNRIRRYNERVKRYRNNNLFYRNRQQFFRTLNEDINKKETDCLEPKAAHDFWSGVWSRESSHDEKAYWIEEVQQKIPGECMEDITVQPSDIGEVLRRSSNWASPGSDKLHNYWWKYFNSVHEKLAQLLQEALNNPVMVPDFFTLGVTYLIPKDGDKKDPRNYRPITCLSSVYKILTGVLTKYINGHLREHNLMTEEQGGCRERTKGCKELLVLDHVITKQARKKLRNISVAWVDYRKAFDSVPHTWLLKVLEMHGVSLKVVELLRHLMKTWRTSLLIRSGDSLIESEQIKITRGIFQGDTLSPIWFCLSLNPLSIMLKNTKYGYVINRSRQIAISHRLFMDDLKLYGANSDQLRRMLELVAAFSESIGMEMGVEKCAVLDVRRGRIEKTEEGVILMNNLEIPVLDTNVPYKYLGIKQALEIKTLEMKKLFRQKLLTRIGLLLRAKLNSKSLFTAINIWAIPSMAYSFGVINWSTTELRGLDRDVRSMLTKYGVHHPHSSTLRLYLQRHQGGRGLLSLEDIHWKGVSDLRQHFIKNNSPLFRAIREADDGLSVLKLSDPQYQVPTYCVEERIGEWSAKALHGRYPSHLGSGEVHKVESLTYLRAGYLFPETEGRILAIQDQVVPTRMYMKHIAKQNIPSDRCRRCSQAAESIQHVTSSCPMLAPRDYLDRHNAMGKIYHQQIALKLGLLKEESQQHLYQPRTILENERYKLYWDATLVTDRGVAHNRPDVAFFDKQERTCLLLDFTIPADDNLARAYSEKITKYSDLAYQLREIHNLKAISILPLIISVNGLVEKHLPENTARLCLDPIVISSSQKQVLLSTARTVRKFLQGP

SEQ ID NO: 3397 - protein, 1100 aa, Coccinella septempunctata
MDDNCMVMRAHFIAVELAERLNTTYRRLLVEIWNDICPDRPTYAQLLSNRVRWILANQKLSRAELEYIKKGCFPSIMLEETEDPPETGRRKSSYGIRKSGLFVGEQEDGVIERSFEGNLMRFSGVAAESKPEIPRLKYSKMAYELVRKVDSVLPKHLTSVTTLEELVEVVYAGAVTVCETLGQRIGHQRDTPRTPTIPPWKLRLEQKITSLRKKIGIIHTYLNSGAPNTKVVKAVRKVASGARIKRRDPSFNEKIAIVSDQLKQKIKALGNRIRRYNERVKRYKNNNLFFKNQKQFFRTLEGEDAVDADQLRPQDAHGFWSGVWSRQGVHDERAYWMEEAESIIPNTTMDDIKVQQLDIVEILKSCNNWSSPGSDKIHNYWWKYFTNAHEKLALLLQETLNNPSLVPKFFTLGVTYLIPKGGDRKDPKNYRPITCLPSVYKILTGVLTKNINKHLREHNLMTEEQGGCRARTKGCKELLVMDHIITKQARKKLRNISVAWVDYKKAFDSVPHTWLLKVLEMHGISKKVIELMRHLMKNWRTSLNMRSGGSMIKTGPIKINRGIFQGDTLSPIWFCLALNPLSLILRKTKYGYVINKNRQVSINHRFFMDDLKLYGANFEQLKRMLEIVASFSESIGMEMGVEKCAVLDVRRGRIQETEEGAILMNNITIPALSEDTPYKYLGIKQALEIKTPEMKESFKKKLLSRVGLLLRAKLNSKSLFTAINIWAISGMAYSFGILNWSLTDLRGLDRDIRSMLTKYGVHHPHSSTMRLYLPRHQGGRGLLSLEDVHGKNVCDLRQHFLRNNSPVFRAIREADDRISALKLSDAEYQVPRYTEGERIEEWNSKALHGRYPAHLKSEDVNRVESLTYLRAGYLFPETEGRLLAIQDQVVPTRMYMKHIAKQAVPSDRCRKCSRAAESIQHITSSCPILAPKDYLDRHNSMGRIYHQHIALKLGLLHDEIPQHLYQPKTLLQNQRYKLYWDATLITDRGVAHNRPDVALFDKEKETCLLLDFTVPADENLARAYSEKITKYHELAYQLREIHKLKSVGVLPLIISVNGLVEKHLPENTERLCLDRSVISSSQKQVMLGTARMVRRFLQGP

SEQ ID NO: 3398 - protein, 1095 aa, Propylea japonica
MVMRSHYIALDLVETRNSTYRNLLLETWKEICPERPAYAQLLSNRVRWILDNQKLSRAELECIKSGCYPTIMRQETTHSSENARRVSSAGIRRSGVFLRQPKEDDTERSFSSNLMKYSEVAAEKRPEIPRLIYSRVTRDLVARVNIIISRHLADVETLEDLIDVMYAGAVTVSEALGKRIGHHQGASKPPTIPPWKLRLEKKITALRKQIGVVHTYLNTATPSAKLIKAVRKVASGSRIKRRDPFFKDKLAVVSDHLKQKIKALGNRLRRYNERTKRYNNNNLFYKNQKQFFRSLETTDEEKCEELEPEAARDFWAGVWERGSAHDNNAYWIAEAQENIRGEPMEEIQVQKSDITETLKSTNNWASPGPDKLHNYWWKYFDSVHEKLTLLIQGTLNNPASVPGFLTQGITYLIPKDGDRKDPKNYRPITCLSSLYKIITGVITKHLSRHIRKYNLLTEEQGGCREKTKGCKELLLIDHIITKQARKKLRNISIAWIDYKKAFDSIPHTWLLKVLEMHGVAGNIIELLRHLMTTWRTTLRVREGETVIELPPIKISRGIFQGDTLSAIWFCLALNPLSIILKNTKYGYIINKIRRISISHRMFMDDLKLYGANPEQLRRMLEVVAAFSESVGMEMGVDKCAVLDVRRGKIDDTMEGATLSNHITIPALSKDASYKYLGIKQALEIKTAEMKKSFRDRLLGRVALLLKAKLNSKSLFMAINIWAIPGMTYSFGVLNWSITEIRALDRDVRSMLTKYGVHHPHSSTIRLYLPRHQGGRGLTSLEEAHAKNVNDLRQHFLKNNSPFFRAICEADDGISAVKLAEAGYQLSWPSVEERIQEWSAKALHGRYPTHLQSRDVERTESLTYLRAGYLFPETEGRLLAIQDQVMPTRMYMKHIAKQVVLTDRCRKCAQGAESIQHVTSSCPILAPREYLDRHNSMGRIYHQQIALKLKLLQDEVEQHLYLPKTLLENQRYKMYWDATLVTDRGVAHNRPDVAIFDKEKKTCLLLDFTVPADDNLAKAYSEKISKYSDLAFELREIYQLTSVSVLPLIISVNGLIERHLPENTKKLCLDQHVISSSQKQIILCTTRIVRKFLQGP

SEQ ID NO: 3399 - protein, 1096 aa, Adalia bipunctata
MVMRAHYIATDLVETRNTTYRSLLMEIWKDICPDRLVNAQLLSNRVRWILGNQKLSRAELECVKAGCYPDIIQQEAAASSQAARTRSSIGIRRSGLYIAERDPDTTESSFVGNLVRFSGGAADKRPKIPRLKYSRSAYDQVRKVNSVLLRYTTDVNSLEELVDVVYAGAATVCELLGQPIGCRRATPGASSTPPWKLRLEQKIKAMRKKIGVIHTYFTAASPTNKVIKSVRKVASESRLKCRDPSFKEKLATVSDHLKQKIKALGNRIRRYNERVKRYRNNNLFYRNRQQFFRTLNEDINKKETDYLEPKAAHDFWSGVWSRESSHDEKAYWIEEVQQKIPGEWMEDITVQPSDIGEVLRRSSNWASPGSDKLHNYWWKYFNSVHEKLAQLLQEALNNPVLVPDFFTLGVTYLIPKDGDKKDPRNYRPITCLSSVYKILTGVLTKYINGHLREHNLMTEEQGGCRERTKGCKELLVLDHVITKQARKKLRNISVAWVDYRKAFDSVPHTWLLKVLEMHGVSLKVIELLRHLMKTWRTSLLIRSGDSLIESEQIKITRGIFQGDTFSPIWFCLSLNPLSIMLKNTKYGYVINRSRQIAISHRLFMDDLKLYGANSDQLRRMLELVAAFSESIGMEMGVEKCAVLDVRRGRIEKTEEGVILMNNLEIPVLDTNVPYKYLGIKQALEIKTLEMKKLFRQKLLTRIGLLLRAKLNSKSLFTAINIWAIPSMAYSFGVINWSTTELRGLDRDVRSMLTKYGVHHPHSSTLRLYLQRHQGGRGLLSLEDIHWKGVSDLRQHFIKNNSPLFRAIREADDGLSVLKLSDPQYQVPTYCVEERIGEWSAKALHGRYPSHLGSGEVHKVESLTYLRAGYLFPETEGRILAIQDQVVPTRMYMKHIAKQNIPSDRCRRCSQAAESIQHVTSSCPILAPRDYLDRHNAMRKIYHQQIALKLGLLKEESQQHLYQPRTILENERYKLYWDATLVTDRGVAHNRPDVALFDKQERTCLLLDFTIPADDNLARAYSEKITKYSDLAYQLREIHNLKAISILPLIISVNGLVEKHLPENTARLCLDPIVISSSQKQVLLSTARTVRKFLQGP

SEQ ID NO: 3400 - protein, 981 aa, Propylea japonica
MKYSGVAAEKRPEIPRLIYSRVTRDLVARVNIIISRHLADVETLEDLIDVMYAGAVTVSEALGKRIGHHQGASKPPTIPPWKLRLEKKITALRKQIGVVHTYLNTATPSAKLIKAVRKVASGSRIKHRDPSFKDKLAVVSDHLKQKIKALGNRIRRYNERTKRYNNNNLFYKNQKQFFRSLETTDEEKCEELEPEAARDFWAGVWERGSTHDNNAYWIAEAQENIRGEPMEEIQVQKSDITETLKSTNNWASPGPDKLHNYWWKYFDSVHEKLTLLIQGTLNNPASVPGFLTQGITYLIPKDGDRKDPKNYRPITCLSSLYKIITGVITKHLSRHIRKYNLLTEEQGGCREKTKGCKELLLIDHIITKQARKKLRNISIAWIDYKKAFDSIPHTWLLKVLEMHGVAGNIIELLRHLMTTWRTTLRVRAGETLIELPPIKISRGIFQGDTLSAIWFCLALNPLSIILKNTKYGYIINKIRRITISHRIFMDDLKLYGANPEQLRRMLEVVAAFSESVGMEMGVDKCAVLNVRRGKIDDTMEGTTLSNHITIPVLSKDASYKYLGIKQALEIKTAEMKKFFRERLLGRVALLLKAKLNSKSLFMAINIWAIPGMTYSFGVLNWSITEIRALDRDVRSMLTKYGVHHPHSSTIRLYLPRHQGGRGLTSLEDAHAKNVNDMRQHFLKNNSPFFRAICEADDGISAVKLAEAGYQLSWPSAEERIQEWSAKALHGRYPTHLQSRDVEKAESLTYLRAGYLFPETEGRLLAIQDQVMPTRMYMKHIAKQVVPTDRCRKCAQGAESIQHVTSSCPILAPREYLERHNSMGRIYHQQIALKLKLLQDEVEQHLYLPKTLLENQRYKMYWDATLVTDRGVAHNRPDVAIFDKEKKTCLLLDFTVPADDNLAKAYSEKISKYSDLAFELREIHQLTSVSVLPLIISVNGLIERHLPENTRKLCLDQHVISSSQKQIILSTTRIVRKFLQGP

SEQ ID NO: 3401 - protein, 1100 aa, Coccinella septempunctata
MDDNCMVMRAHFIAVELAGRLNTTYRRLLVEIWNDICPDRPTYAQLLSNRVRWILANQKLSRAELEYIKKGCFPSIMLEETEDPPETGRRKSSYGIRKSGLFVGEQEDGVIERSFEGNLMRFSGVAAESKPEIPRLKYSKMAYELVRKVDSVLPKHLTSVTTLEELVEVVYAGAVTVCETLGQRIGHQRDTPRTPTIPPWKLRLEQKITSLRKKIGIIHTYLNSGAPNTKVVKAVRKVASGARIKRRDPSFNEKIAIVSDQLKQKIKALGNRIRRYNERVKRYKNNNLFFKNQKQFFRTLEGEDAVDADQLRPQDAHGFWSGVWSQQGVHDERAYWMEEAESIIPNTTMDDIKVQQLDIVEILKSCNNWSSPGSDKIHNYWWKYFTNVHEKLALLLQETLNNPSLVPKFFTLGVTYLIPKGGDRKDPKNYRPITCLPSVYKILTGVLTKNINKHLREHNLMTEEQGGCRARTKGCKELLVMDHIITKQARKKLRNISVAWVDYKKAFDSVPHTWLLKVLEMHGISKKVIELMRHLMKNWRTSLNMRSGGSMIKTGPIKINRGIFQGDTLSPIWFCLALNPLSLILRKTKYGYVINKNRQVSINHRFFMDDLKLYGANFEQLKRMLEIVASFSESIGMEMGVEKCAVLDVRRGRIQETEEGAILMNNITIPALSEDTPYKYLGIKQALEIKTPEMKESFKKKLLSRVGLLLRAKLNSKSLFTAINIWAISGMAYSFGILNWSLTDLRGLDRDIRSMLTKYGVHHPHSSTMRLYLPRHQGGRGLLSLEDVHGKNVCDLRQHFLRNNSPVFRAIREADDRISALKLSDAEYQVPRCTEGERIEEWNSKALHGRYPAHLKSEDVNRVESLTYLRAGYLFPETEGRLLAIQDQVVPTRMYMKHIAKQAVPSDRCRKCSRAAESIQHITSACPILAPKDYLDRHNSMGRIYHQHIALKLGLLHDETPQHLYQPKTLLQNQRYKLYWDATLITDRGVAHNRPDVALFDKEKETCLLLDFTVPADENLARAYSEKITKYHELAYQLREIHKLKSVGVLPLIISVNGLVEKHLPENTERLCLDRSVISSSQKQVMLGTARMVRRFLQGP

SEQ ID NO: 3402 - protein, 904 aa, Coccinella septempunctata
MTLFIYIYIYIYIYIYIYIYIYIYIYIYIYIYIYIYIYIYIYILLICIKCKDPHFKERITVVSDHLKQKIKALGNRIRRYNERTKRYKNNNLFYKDQKQFFRTLEAGDEGEIGHLEPDKAHSFWTEVWSRESTHDDNAYWIEEAQQEIPIQPMDEINLRQSDIPEILRGSNNWASPGPDKLHNYWWKYFNNVHEKLALLLQNAINNPTLLPGFLTQGVTYLIPKDGDKKDPKNYRPITCLSSVYKILTGVLTKYISRHIREHNLMTEEQGGCREKTKGCKELLVIDHIVTKQARKKLRNISVAWVDYKKAFDSVPHTWLLKVLEMHGIAGKVIELLGHLMKNWRTSLFVRSGDVLAETEQIKINRGIFQGDTLSPIWFCLALNPLSIILNNTNYGYVINKNRQVTISHRLYMDDLKLYGANSEQLRRMLEIVSAFSESVGMEMGVEKCAVLDVRRGKIEDTTEGVSLMNNITIPALDKEVPYKYLGIKQALEIKTPEMKESFKEKLLARIVLLLRAKLNSKALFMAINIWAIPIMAYSFGVLNWSTTELRALDRDVRSILTKYGVHHPHSSTIRLYLPRHQGGRGLLSLEAVHGKNISDLRQHFLKRNSPMFRAIREADQRLSPLKLSDSEYQVPQPSAEDLIAEWSAKALHGRYPSHLKSREVEKVESLTYLRAGYLFPETEGRLLAIQDQVVPTRTYMKHIAKQEVPSDRCRKCAEAAESLQHITSSCPILAPVEYLGRHDAMGRIYHQQIALKLGLLKDEVEQHLYMPKTILENQCHKIYWDATLVTDRGAAHNRPDIAIFDWERKTCLLLDFTVPADDNLARAYTEKITKYADLAFQLREMYKLKSVNVLPMIISVNGLVEKHLPENTKRLCLDRNVISGSQKQIILSTTRIVRKFLQGP

SEQ ID NO: 3403 - protein, 1095 aa, Coccinella septempunctata
MVMRAHFIALDLVETRNTTYRNLLLEIWNEICPYRPAYAQLLSNRVRWILENQKLSRAELECIKTACYPTITTREVTGPPEESRRKSSIGIRRSGLFLKTPEEDTLQRSFTGNLMRFSGVAAERRPRIPRLRFSRATRDMVMKVNSILPEHLANVETLEELVDIVYAGAVTVSEALGQRTDHQQNTPRSPTVPPWKLRLEQKITAIRKKIGVVHTYLHSATPNVKVIKAVKKIASESRIKCKDPHFKERITVVSDHLKQKIKALGNRIRRYNERTKRYKNNNLFYKDQKQFFRTLEAGDKGEIGHLEPDKAHSFWTEVWSRESTHDDNAYWIEEAQQEIPIQPMDEINLRQSDIPEILRGSNNWASPGPDKLHNYWWKYFNNVHEKLALLLQNAINNPTLLPGFLTQGVTYLIPKDGDKKDPKNYRPITCLSSVYKILTGVLTKYISRHIREHNLMTEEQGGCREKTKGCKELLVIDHIVTKQARKKLRNISVAWVDYKKAFDSVPHTWLLKVLEMHGIAGKVIELLGHLMKNWRTSLFVRSGDVLVETEQIKINRGIFQGDTLSPIWFCLALNPLSIILNNTNYGYVINKNRQVTISHRLYMDDLKLYGANSEQLRRMLEIVSAFSESVGMEMGVEKCAVLDVRRGKIEDTTEGVSLMNNITIPALDKEVPYKYLGIKQALEIKTPEMKESFKEKLLARIVLLLRAKLNSKALFMAINIWAIPIMAYSFGVLNWSTTEVRALDRDVRSILTKYGVHHPHSSTIRLYLPRHQGGRGLLSLEAVHGKNISDLRQHFLKRNSPMFRAIREADQRLSPLKLSDSEYQVPQPSAEDLIAEWSAKALHGRYPSHLKSREVEKVESLTYLRAGYLFPETEGRLLAIQDQVVPTRTYMKHIAKQEVPSDRCRKCAEAAESIQHITSSCPILAPVEYLGRHDAMGRIYHQQIALKLGLLKDEVEQHLYMPKTILENQCHKIYWDATLVTDRGAAHNRPDIAIFDWERKTCLLLDFTVPADDNLARAYTEKITKYADLAFQLREMYKLKSVNVLPMIISVNGLVEKHLPENTKRLCLDRNVISSSQKQIILSTTRIVRKFLQGP

SEQ ID NO: 3404 - protein, 923 aa, Propylea japonica
MKYSGVAAEKRPEIPRLIYSRVTRDLVARVNIIISRHLADVETLEDLIDVMYAGAVTVSEALGKRIGHHQGASKPPTIPPWKLRLEKKITALRKQIGVVHTYLNTATPSAKLIKAVRKVASGSRIKHRDPSFKDKLAVVSDHLKQKIKALGNRIRRYNERTKRYNNNNLFYKNQKQFFRSLETTDEEKCEELEPEAARDFWAGVWERGSTHDNNAYWIAEAQENIRGEPMEEIQVQKSDITETLKSTNNWASPGPDKLHNYWWKYFDSVHEKLTLLIQGTLNNPASVPGFLTQGITYLIPKDGDRKDPKNYRPITCLSSLYKIITGVITKHLSRHIRKYNLLTEEQGGCREKTKGCKELLLIDHIITKQARKKLRNISIAWIDYKKAFDSIPHTWLLKVLEMHGVAGNIIELLRHLMTTWRTTLRVRAGETLIELPPIKISRGIFQGDTLSAIWFCLALNPLSIILKNTKYGYIINKIRRITISHRIFMDDLKLYGANPEQLRRMLEVVAAFSESVGMEMGVDKCAVLNVRRGKIDDTMEGTTLSNHITIPVLSKDASYKYLGIKQALEIKTAEMKKFFRERLLGRVALLLKAKLNSKSLFMAINIWAIPGMTYSFGVLNWSITEIRALDRDVRSMLTKYGVHHPHSSTIRLYLPRHQGGRGLTSLEDAHAKNVNDMRQHFLKNNSPFFRAICEADDGISAVKLAEAGYQLSWPSAEERIQEWSAKALHGRYPTHLQSRDVEKAESLTYLRAGYLFPETEGRLLAIQDQVMPTRMYMKHIAKQVVPTDRCRKCAQGAESIQHVTSSCPILAPREYLERHNSMGRIYHQQIALKLKLLQDEVEQHLYLPKTLLENQRYKMYWDATLVTDRGVAHNRPDVAIFDKEKKTCLLLDFTVPADDNLAKAYSEKISKYSDLAFELREIH

SEQ ID NO: 3405 - protein, 932 aa, Coccinella septempunctata
MMYAGAVTVAEALGQQIEHHQGSPRPPTDLPWRLRLEKKITALRRKIGVVHTYLNSATPTAKVDKAARKVASESRIRRRDPTFREKLAVASDHLKQKIKALGNRIRRYNERTKRYKNNNLFYKNQRQFFRSLENAEGKDDETLDPKAARDFWSGVWARESAHDENAYWIEEAHQKIPSVLMEEIRVQKSDIVETLKRSSNWAAPGPDKLHNYWWKYFDSVHDKLAILLQDALNNPASIPGFLTLGVTYLIPKDGDRKNPKNYRPITCLSSLYKILTGIITKYLGKHIRDHNLMTEEQAGCRDKTKGCKELLIIDHIVTKQARKKLRNISVAWVDYKKAFDSVPHTWLLKVLEMHGVADKVIQILGHLMKTWRTSLCVRTKRSLIESPVIKISRGIFQGDTLSPMWFCLALNPLSIILKNTKYGYVVNKSRQVAISHRMFMDDLKLYGANPEQLRRMLEVVAAFSESVGMELGVKKCAVLDVRRGKIEDTREGATLTSNITIPALSKEVPYKYLGIKQALEIKTPEMKQSFEEKLLARVALLLKAKLNSKSLFTAINIWAIPSVTYSFGVLTWSTTELRALDREIRSVLTKYGVHHPHSSTIRLYLPRHQGGRGLTSLEEAHAKIVSDLRQHFLKNNSPLFKAIREADDGVSALKLAEPGYQLPQRSVEERIQEWSAKALHGRYPTHLQSRDVERSESLTYLRAGYLYPETEGRILAIQDQVMPTRMYMKHIAKQDVPSDRCRKCAQGSESIQHVTSSCPILAPREYLDRHNAMGKIYHQQIALKIGLLQNEVEQHLYLPKTLLENQRYRMYWDATLVTDRGVAHNRPDVALFDREKGTCLLMDFTVPADENLAKAYSEKVSKYSELAFQLREMYNLKSVSVLPLIISVNGLIERHLPENTRRLCLGQHVISSSQKQIILSTARIVRKFLQGP

SEQ ID NO: 3406 - protein, 1095 aa, Coccinella septempunctata
MVMRAHFIALDLVETRNTTYRNLLLEIWNEICPYRPAYAQLLSNRVRWILENQKLSRAELECIKTACYPTITTREVTGPPEESRRKSSIGIRRSGLFLKTPEEDTLQRSFTGNLMRFSGGAAERRPRIPRLRFSRATRDMVMKVNSILPEHLANVETLEELVDIVYAGAVTVSEALGQRTDHQQNTPRSPTVPPWKLRLEQKITAIRKKIGVVHTYLHSETPNVKVIKAVKKIASESRIKCKDPHFKERITVVSDHLKQKIKALGNRIRRYNERTKRYKNNNLFYKDQKQFFRTLEAGDEGEIGHLEPDKAHSFWTEVWSRESTHDDNAYWIEEAQQEIPIQPMDEINLRQSDIPEILRGSNNWASPGPDKLHNYWWKYFNNVHEKLALLLQNAINNPTLLPGFLTQGVTYLIPKDGDKKDPKNYRPITCLSSVYKILTGVLTKYISRHIREHNLMTEEQGGCREKTKGCKELLVIDHIVTKQARKKLRNISVAWVDYKKAFDSVPHTWLLKVLEMHGIAGKVIELLGHLMKNWRTSLFVRSGDVLVETEQIKINRGIFQGDTLSPIWFCLALNPLSIILNNTNYGYVINKNRQVTISHRLYMDDLKLYGANSEQLRRMLEIVSAFSESVGMEMGVEKCAVLDVRRGKIEDTTEGVSLMNNITIPALDKEVPYKYLGIKQALEIKTPEMKESFKEKLLARIVLLLRAKLNSKALFMAINIWAIPIMAYSFGVLNWSTTELRALDRDVRSILTKYGVHHPHSSTIRLYLPRHQGGRGLLSLEAVHGKNISDLRQHFLKRNSPMFRAIREADQRLSPLKLSDSEYQVPQPSAEDLIAEWSAKALHGRYPSHLKSREVEKVESLTYLRAGYLFPETEGRLLAIQDQVVPTRTYMKHIAKQEVPSDRCRRCAEAAESIQHITSSCPILAPVEYLGRHDAMGRIYHQQIALKLGLLKDEVEQHLYMPKTILENQCHKIYWDATLVTDRGAAHNRPDIAIFDWERKTCLLLDFTVPADDNLARAYTEKITKYADLAFQLREMYKLKSVNVLPMIISVNGLVEKHLPENTKRLCLDRNVISSSQKQIILSTTRIVRRFLQGP

SEQ ID NO: 3407 - protein, 1038 aa, Propylea japonica
MVMRSHYIALDLVETRNSTYRNLLLETWKEICPERPAYAQLLSNRVRWILDNQKLSRAELECIKSCCYPTIMRQETTHSSENARRVSSAGIRRSGVFLRTPKEDDTKRSFSSNLMKYSGVAAEKRPEIPRLIYSRVTRDLVARVNIIISRHLADVETLEDLIDVMYAGAVTVSEALGKRIGHHQGASKPPTIPPWKLRLEKNITALRKQIGVVHTYLNTATPSAKLVKAVRKVASGSRIKRRDPSFKEKLAVVSDHLKQKIKALGNRIRRYNERTKRYNNNNLFYKNQKHFFRSLETTDGEKCEELEPEAARDFWAGVWGKGGIHDEGAYWIAEAQENIRGEPMEEIQVQKSDIIETLKSTNNWASPGPDKLHNYWWKYFDSVHEKLTLLIQGALNNPASVPGFLTQGITYLIPKDGERKDPKNYRPITCLSSLYKIITGVITKHLSGHIREHNLLTEEQGGCREKTKGCKELLLIDHIITKQARKKLRNISIAWVDYKKAFDSIPHTWLLKVLEMHGVARNIIQLLRHLMTTWRTTLRVRAGETLIELPPIKISRGIFQGDTLSAIWFCLALNPLSIILKNTKYGYIINKIRRITISHRMFMDDLKLYGANPEQLRRMLEVVAAFSESVGMEMGVEKCAVLNVRRGKIDDTMEGTTLSNHITIPVLSKDDSYKYLGIKQALEIRTAEMKKSFRERLLGRVALLLKAKLNSKSLFMAINIWAIPGMTYSFGVLNWSITEIRALDRDVRSMLTKYGVHHPHSSTIRLYLPRHQGGRGLTSLEEAHAKNVNDLRQHFLKNNSPFFRAICEADDGISAVKLAEAGYQLSWPSAEERIQEWSAKALHGRYPTHLQSRDVERTESLTYLRAGYLFPETEGRLLAIQDQVMPTRMYMKHIAKQVVPTDRCRKCAQGAESIQHVTSSCPILAPREYLERHNSMGRIYHQQIALKLKLLQDEVEQHLYLPKTLLENQRYKMYWDATLVTDRGVAHNRPDVAIFDKEKKHAYCWTLLFQLMTIWQKLTRRKYPNTLIWHSNFVRSTN

SEQ ID NO: 3408 - protein, 1100 aa, Coccinella septempunctata
MDDNCMVMRAHFIAVELAGRLNTTYRRLLVEIWNDICPDRPTYAQLLSNRVRWILANQKLSRAELEYIKKGCFPSIMLEETEDPPETGRRKSSYGIRKSGLFVGEQEDGVIERSFEGNLMRFSGVAAESKPEIPRLKYSKMAYELVRKVDSVLPKHLTSVTTLEELVEVVYAGAVTVCETLGQRIGHQRDTPRTPTIPPWKLRLEQKITSLRKKIGIIHTYLNSGAPNTKVVKAVRKVASGARIKRRDPSFNEKIAIVSDQLKQKIKALGNRIRRYNERVKRYKNNNLFFKNQKQFFRTLEGEDAVDADQLRPQDAHGFWSGVWSQQGVHDERAYWMEEAESIIPNTTMDDIKVQQLDIVEILKSCNNWSSPGSDKIHNYWWKYFTNVHEKLALLLQETLNNPSLVPKFFTLGVTYLIPKGGDRKDPKNYRPITCLPSVYKILTGVLTKNINKHLREHNLMTEEQGGCRARTKGCKELLVMDHIITKQARKKLRNISVAWVDYKKAFDSVPHTWLLKVLEMHGISKKVIELMRHLMKNWRTSLNMRSGGSMIKTGPIKINRGIFQGDTLSPIWFCLALNPLSLILRKTKYGYVINKNRQVSINHRFFMDDLKLYGANFEQLKRMLEIVASFSESIGMEMGVEKCAVLDVRRGRIQETEEGAILMNNITIPALSEDTPYKYLGIKQALEIKTPEMKESFKKKLLSRVGLLLRAKLNSKSLFTAINIWAISGMAYSFGILNWSLTDLRGLDRDIRSMLTKYGVHHPHSSTMRLYLPRHQGGRGLLSLEDVHGKNVCDLRQHFLRNNSPVFRAIREADDRISALKLSDAEYQVPRCTEGERIEEWNSKTLHGRYPAHLKSEDVNRVESLTYLRAGYLFPETEGRLLAIQDQVVPTRMYMKHIAKQAVPSDRCRKCSRAAESIQHITSSCPILAPKDYLDRHNSMGRIYHQHIALKLGLLHDEIPQHLYQPKTLLQNQRYKLYWDATLITDRGVAHNRPDVALFDKEKETCLLLDFTVPADENLARAYSEKITKYHELAYQLREIHKLKSVGVLPLIISVNGLVEKHLPENTERLCLDRSVISSSQKQVMLGTARMVRRFLQGP

SEQ ID NO: 3409 - protein, 1100 aa, Coccinella septempunctata
MDDNCMVMRAHFIAVELAGRLNTTYRRLLVEIWNDICPDRPTYAQLLSNRVRWILANQKLSRAELEYIKKGCFPSIMLEETEDPPETGRRKSSYGIRKSGLFVGEQEDGVIERFFEGNLMRFSGVAAESKPEIPRLKYSKMAYELVRKVDSVLPKHLTSVTTLEELVEVVYAGAVTVCETLGQRIGHQRDTPRTPTIPPWKLRLEQKITSLRKKIGIIHTYLNSGAPNTKVVKAVRKVASGARIKRRDPSFNEKIAIVSDQLKQKIKALGNRIRRYNERVKRYKNNNLFFKNQKQFFRTLEGEDAVDADQLRPQDAHGFWSGVWSQQGVHDERAYWMEEAESIIPNTTMDDIKVQQLDIVEILKSCNNWSSPGSDKIHNYWWKYFTNVHEKLALLLQETLNNPSLVPKFFTLGVTYLIPKGGDRKDPKNYRPITCLPSVYKILTGVLTKNINKHLREHNLMTEEQGGCRARTKGCKELLVMDHIITKQARKKLRNISVAWVDYKKAFDSVPHTWLLKVLEMHGISKKVIELMRHLMKNWRTSLNMRSGGSMIKTGPIKINRGIFQGDTLSPIWFCLALNPLSLILRKTKYGYVINKNRQVSINHRFFMDDLKLYGANFEQLKRMLEIVASFSESIGMEMGVEKCAVLDVRRGRIQETEEGAILMNNITIPALSEDTPYKYLGIKQALEIKTPEMKESFKKKLLSRVGLLLRAKLNSKSLFTAINIWAISGMAYSFGILNWSLTDLRGLDRDIRSMLTKYGVHHPHSSTMRLYLPRHQGGRGLLSLEDVHGKNVCDLRQHFLRNNSPVFRAIREADDRISALKLSDAEYQVPRCTEGERIEEWNSKTLHGRYPAHLKSEDVNRVESLTYLRAGYLFPETEGRLLAIQDQVVPTRMYMKHIAKQAVPSDRCRKCSRAAESIQHITSSCPILAPKDYLDRHNSMGRIYHQHIALKLGLLHDEIPQHLYQPKTLLQNQRYKLYWDATLITDRGVAHNRPDVALFDKEKETCLLLDFTVPADENLARAYSEKITKYHELAYQLREIHKLKSVGVLPLIISVNGLVEKHLPENTERLCLDRSVISSSQKQVMLGTARMVRRFLQGP

SEQ ID NO: 3410 - protein, 1128 aa, Armadillidium nasatum
MKEICKGKKGKETGQTKEANINSTTIQQETEHEKENLNTKEDLVIIIQEKDDPLLDEEPTSEEEESNSDIISGENDMLDISEEEIPPINYAQINPIEDINDDREEEFLNMIAKYRDEDIVLGMNQRKKVKKITDWKKMNKYIGITNRVLPRLIPPNCNISEVNRLYYAASRAIADAMGTETTQEQEGNTKTKRNKIPPWKFRLQKQIENLRSEIGVLTMFRRGEVTTQIAKSKVENMLNKERIRNGDKLSHAMVRRKLLLAAKSKKLKRYEKVEKEKKQNRMFKEDPGKFYKTLRQKQEVVQKVPSIEQCDRFWRNIYENEIHHNEQAEWIEEIKNQPRNRDIIDMNHPKIEKSEVRNVIKKTNNWKAPGIDRVQNIWIKKITILMDPLIECYNRIIEGNEEIPMWFTTGETTLLPKSDKTEDPSKYRPITCLPTLYKILTGIITTRIQNHIINNDILNEEQKGCTKNSYGTKEQLLINKMIMENSRKSQKNLCMTWIDYKKAYDSVPHSWIKEIMKIYKINRKIVSFIEKTMSTWKIRMKLPHEKGVLKLDEIKIRRGIFQGDTMSPLLFVLALNPLSSIINNLRNGYRVNPRNEKKSKQISHLFYMDDIKLYSPDRTETERQIEVVKRFSEDIRMDFGIEKCAYVLLKKGRRAEAENIIINDTVIKELEPEATYKYLGIEESEKIENEIMKSRIRKEYLDRLKAILKTELKPKNKIEAIKVLAIPIITYGIGIIDWFQYEINELDVKTRKLLHAHKLIYKNQCTARLYMPRNEGGMAVPMIDEIHKKEIIGLSEYIKGKGTKYVKWVKEHEERKATTTSILKKANDYLNEHLIEANEEMHMEDVDVMNKIKKIKQTYKVSRMKVNEREWRNHKHAKKYKEEVLDKAFIDKEKTVELIAKGYLRFEEERLLITAQDGGLRTNWFKKHIEKQNCSDRCRMCGAEGESVIHILSGCETLLHRHIYTERHNTICKLIYYKLCKKYNIEIVPDNYRNFTPPSIIDNEQAQILYDYPIPTDNNIPCNRPDIVLTDKTTNKCYIIEVGVPYDGKVSLYEREKEIKYQQLKYEIRRMWNVEEVIVIPVVVGALGTIKSSLNFHLNRLPIEIRTSELSVEIVRKSLSILRLVLGM

SEQ ID NO: 3411 - protein, 1064 aa, Cherax destructor
MPSLNTPSPPPHQALTPSFCLMPQLSPDEASHSSTQSVLPSMPTLTTLNLSPLQRSSPEMSPAATATSPASMSPTAVSSPAPMSPATIASPVPTRPAAIIDQTQLSGEDNAEARGGWTQDLATEPRSEDESSQHHDQSQLPGVDHEDASQRRPIQDEAEEDWLLEPFLEPLIDVLQQPDWERFVELTREVTDEVQRANSISIRPNKTPPGRGTIDVNDCKVIQRLYKINRRRAVRLITQGEGTRCSIARERVEEYFQQGQRDYEELSTNQAWVDAIPAPSEERPQLQLHPFTPREVDARLAKAENTAPGDDRITYRNWRQADPGCRVLAAIFNICLRSGRIPQEWKSSRTILIPKSGDLDDISNWRPVALCRTIYKLYTGCLAARLRQWVTDNDVLCSAQKGFMPSDGVVEHNYLLQHYLDEARGGNADICIATLDINNAFGSIPTEVIVASLERMGVGDDFKKIIEGVIQGNSTRIMTSSGETGDIPARRGVRQGCPISGLLFNIGIEAILRKIIAAGLTADPTIKHPCLAYADDITLIARTPAHLQGLLNVATQACNELCLTINPNKCASMHMSGTRPRGMRRTNFQVGTTQIMSLEDGQQSKFLGRPVGFHLLPNSAAIDGYIDLGTLILQSKLAPWQRLDALKTFVLPSAVFAMRTWQLRKTDWKKLDDALRPLIKKTLYLQPRASNEYIYGSTAAGACGVPSAAEDSDIFLVDTAFKLLTSPDPDTRDIAREDCQQTAARWTQREPCMDDASAFLSKEELPGRSAAHQTLWSRARDASGRLGVKWSYDGTSRTIGLTCGDKSLGRKHRWIVARSIRNHHRCLRDYTLQDKPDQGKVMRVVALERASSHFMREGAYTTFADWRFIHRARLNLLPLNGARRVAQADRRCRRCGGIETLPHVLNHCWRHSDAMRRRHNALVDRIKTAARGRGWRIVAENQRVANTGETGRPDLIIAKDNEALIIDVTCPFENGFEAFEETRKRKEEKYAPLAAEMRGNYRRVTVEAFVVGSLGSYDPRNDILMKRLSTRRYIQLFRRLCVSDTVKWSRNVYVEHITDARQYQ

SEQ ID NO: 3412 - protein, 1035 aa, Hormaphis cornu
MPPALPLDLVCPCGKKFETRASYSQHVRLYCRGGAANNICPVCGSTFSGFPGMRLHMSKKHPVEYNDDMMAEAGPARSEWTVEDMQIMAKAELTYPGRNINQYLQSLPQFRHRTIEAIKGRRKNEAYKNILLTLRNNPVDETAVTDVSYSESQSSEEDSESPHSSSSQSSSQSFDGVDVTPEDGLTLFLRTLEDRLEDPDDVRLVRSLLENQRGYLEAFSPWYDALSERFFKPKPVRERVINNNQPAYKNRRQERIAMFKKYQDLYKKNLRSLAAIVLEGKDIMRSSNLPSRECIERCYAEIFSAAPIRDNAPISDEAAENADLDFPVSKEEIEWALSSCKSWALGPDGVSVGSLRRVPLVKLELLFNIMFLSSLIPESLKKSRTVLIPKTKENLNEVGNWRPITVSSSVLKVLNKIIARRLSSIALNSQQRGFTSVDGCLANTLVLQTLIKDRRRRGRGYHIVSLDLRRAFDLISKSSIQRALRRVGASQKITNYALATYEGCSTVISIEGKAVCEVDVSRGVKQGDPMSPVLFNIVMDELVCRLNALPGASFDGQNISCVAYADDLVLIADSARSAQKLLKEAVGFFDDRGLELNVAKCNALSTGVVPSKKKVFTYTRSLFDVKGIPVRQIGVNDAFKYLGSHFAYDGVLHLSLGELNKQLSNLLKAPLKPHQKFKILREHLLPRWISHLQNPTVSNKCLREADRKIKRATKTILHLPITIADAALYASVRDGGLGIFSFSRRIPLIMVSRWERLCDDADPALGAVLRLSERYVARIKRMVKGGWSSNSEIRQQFRDTLDGSWYGGGIHQLGNHLSGSKYLMQPPAFWKGKDYVSTIQLRLNCLPTMGIPSNPPALRSCRAGCGRSESLSHVLQKCPLSHWKRIARHNFVVTKIKKVALSKNWEVREEPSIRADGQLYKPDLLLINENQVIVSDVGVHWEGPAHLNVHYQDKVDKYNRPGVVSWLQQRYPRKAVNFFPLIVGARGAWCARNLSLCDNIPLNQRNVEDIVLTCLTGSIIIHKEFMRAVWRRNPI

SEQ ID NO: 3413 - protein, 1264 aa, Daphnia pulicaria
MEKACGNEACNNTFFSSNNRKKFCSAACYPSVIATAAAKRLGRGHKSVVPAPAVSLPAAPPIYTESPSSSPAARSLDTSWAPSPSGRPATTPGRSSTNAATFIRCRSTACCNYFSRTSRSRQYCSLPCRPSSSTRQPAAAPAISPTWTDASAPSTTPLSPAPAQLVAVETPDGNLASGASDDSWSPPPERRSPTTLAEGLQHRRGNINNHGVTNNSPPTSSAVAPSLLPVSQAATLALPANHNLTSVEGELSDDPSPLLTTQRALDATGWAAYPVEPPTSTQVSDTNLSVDASLRCNQPSRSAGIVITMPLDSETESDGSDDDAEETVDSTLSPAEAFFNLWAPVFLRCSNREDMDLATESCAADWHRLTKKSDDLTASRKQVVQERSPNSPAAHRRQQSRQQQRIKKKDNTKKKEEAGRIQALFKRFPKRAVRKVLGETSQAYTGTVEAATDFLKGAYEQPRPSEAAVLEARRVYDGCSWANPSEEELEHLASPPARSEIARKLKRASNTAPGADGVEYKDISRLDPECRLLEVLYAAVWRLGVPKCWKSARTIPIFKKGSTEDYSNFRPISLLSTLYKLFSGCIASRITTVASGNEWLSPEQKGFLPGVHGIQEHTMLLESAIEEAKSQKRNLTICWLDLANAFGSLPHDYLNQLFCSLPVPPALRSILTDIYQHNEFHFVVGKELVMVRPTSGVRQGDGLSSIIFNLAAEPLVRRAKANSHGFQLFNTRLKSTSYADDISAADSDTTSLQSTIDGMNSTASILGLRFNAKKCSSLTITNGRASTSTKLSINGVQIRALDVGEYENYLGVPMGTKLTFRPATDLREKLVKIADSLLAPWQKLEVFRAHLLPSLSHHLATGRVQRGFLDELDTRCAEFLRQVAYVPHTAHTAFLFADRRAGGLGASQLKKDADVWTIARAVQLLDSKDKVVRLVARAQLEKTVSRGIDQATDVPLPLSDFLSGSTQGGLYDTRFYGCGPNTWTRTRKAARRLHARIDVSSDSSLSKVIADDVSCLSNKAVRGLRTVIRGRWTTELSNASNQGRVARGLLLDSSSDIARLTSSRTKLNFEEWKLIHRSRLSILPLFGTPGISAPDKKCRRCRTDAETTSHVTSHCRVNLPEIGRRHDAILLELAKIICRAGHTIRVNQVFPDTTLRPDIVITSATPQLIIDVTIPFDAPESLQAGFDRKVAKYGHLGPTLPVVIGALGSWMPSNNAVANSLNIQPNAWRRFRRKSRLAAIQGSMRVVSNHLHAADRDEGLLGPA

SEQ ID NO: 3414 - protein, 956 aa, Daphnia pulicaria
MPLDSETESDGSDDDAEETDDSTLSPAEAFFNLWAPVFLRCSNREDMDLATESCAADWHRLTKKSDDLTASRKQVVQERSPNSPAAHRRQQSRQQQRIKKKDNTKKKEEAGRIQALFKRFPKRAVRKVLGETSQAYTGTVEAATDFLKGAYEQPRPSEAAVLEARRVYDGCSWANPSEEELEHLASPPARSEIARKLKRASNTAPGADGVEYKDISRLDPECRLLEVLYAAVWRLGVPKCWKSARTIPIFKKGSTEDYSNFRPISLLSTLYKLFSGCIASRITTVASGNEWLSPEQKGFLPGVHGIQEHTMLLESAIEEAKSQKRNLTICWLDLANAFGSLPHDYLNQLFCSLPVPPALRSILTDIYQHNEFHFVVGKELVMVRPTSGVRQGDGLSSIIFNLAAEPLVRRAKANSHGFQLFNTRLKSTSYADDISAADSDTTSLQSTIDGMNSTASILGLRFNAKKCSSLTITNGRASTSTKLSINGVQIRALDVGEYENYLGVPMGTKLTFRPATDLREKLVKIADSLLAPWQKLEVFRAHLLPSLSHHLATGRVQRGFLDELDTRCAEFLRQVAYVPHTAHTAFLFADRRAGGLGASQLKKDADVWTIARAVQLLDSKDKVVRLVARAQLEKTVSRGIDQATDVPLPLSDFLSGSTQGGLYDTRFYGCGPNTWTRTRKAARRLHARIDVSSDSSLSKVIADDVSCLSNKAVRGLRTVIRGRWTTELSNASNQGRVARGLLLDSSSDIARLTSSRTKLNFEEWKLIHRSRLSILPLFGTPGISAPDKKCRRCRTDAETTSHVTSHCRVNLPEIGRRHDAILLELAKIICRAGHTIRVNQVFPDTTLRPDIVITSATPQLIIDVTIPFDAPESLQAGFDRKVAKYGHLGPTLPVVIGALGSWMPSNNAVANSLNIQPNAWRRFRRKSRLAAIQGSMRVVSNHLHAADRDEGLLGPA

SEQ ID NO: 3415 - protein, 967 aa, Daphnia pulicaria
MRVASQPTHTLDAPASPAFSVEDDDYEEEGDVSRSTLFYNEWAPLILGCSSREELDTVADNCASAWHRLTLKADPSAPSRSDAPVSLQRPDASLHPRRRSQNRQQQRIRRKTNAKRWEAASKLQSLFKRYPRRAVRKVLGESSEGYSGTLDSATQYLRGAYEQCRPDPSAIIEARRTYDNCHWAHPSEEESSCLASPPSRQEIAWKLKRASNTAPGADGVEYKDILRLDPDGRLLEVLYSAVWRLGVPSSWKSARTIPVYKKGATDDYGNFRPISLLSTLYKLFSSSIASRLTTVAANNSWLSLEQKGFLPGVHGIQEHTMLLECAIEEAKQKKRNLTICWLDLANAFGSLPHDFLFELFHSLPLPVVLREILIDIYSGNVFQFVVGKDLVAIHPTSGVRQGDGLSSIIFNLAAEPLLRCAKGPLNDGFLLFCSYLKATAYADDISLVGSCPADLQPTLDAMLVVAAALGLRFNAGKCCSLIICKGKANPAASLHIRGVAVRSLDEGEHEDYLGVPMGTRLTFRPASSLPGKLTLVADSDLAPWQKLEVFRAHLLPSLSHHLATGRVQRGFLDEIDSRCAEFLRHIANVPHTAHSAFLFADRRAGGLGASQLKMDADVWIIARAAQLLDSQDPVVRLSARSQLEQHISKGLGSSCVTPLPLSDYLSGSTRGGLYDARFYRCGPNTWSRTRKAARRLNVRIDVSGDESSTKVVADDVSCSSAKAVRGLRSAIRARWTASLASAPHQGRVAQGLLLDSSNDMARLTSSRTSLSFDEWKLIHQSRLGILPLLGAPGIAPPDRRCRRCKVDIETTAHVTSHCRVNLPSIGRRHDVVLEEIVSIIRKAGHTVRVNQVFRDTSLRPDIVVLSTTPPTIIDLTIPFDAPESLAAGYDRKVEKYSLLGPTLPFVIGALGSWLPSNNSIASALGIRPGAWTALRRKCRLLAIRGSIKIISDHIRRNDRPAPTDSTP

SEQ ID NO: 3416 - protein, 1265 aa, Daphnia pulicaria
MEKACGNAACSNTFSSSNNRKKFCSAACYPSVIATAAAKRLGRGQKSVIPAPAASLPAAPPIYTESPSSSPAARSLDTSWAPSPSGHSTRTATTPGRSLTNAATFIRCRSTACCNYFSRTSRSRQYCSLPCRPSSSSRQSAAAPAISPTRTVASAPSTTPLSPALAQLVADETSDRNLALGASVDSWSPPPERRPPATVTEGRQHRMRSSSTHGATNNSPQASSTIAPTLLSVSQAATPALPANHDLNGDESEHSDVPPSPFNLAHLPAAPPPVNFIGVDVASPTISLATNAAADSSLMRVASQPTHTLDAPASPAFSVEDDDSEEEGDVSRSTLFYNEWAPLILGCSSREELDTVADNCASAWHRLTLKADPSAPSRSDAPVSLQRPDASLHPRRRSQNRQQQRIRRKTNAKRWEAASKLQSLFKRYPRRAVRKVLGESSEGYSGTLDSATQYLRGAYEQCRPDPSAIIEARRTYDNCHWAHPSEEESSCLASPPSRQEIAWKLKRASNTAPGADGVEYKDILRLDPDGRLLEVLYSAVWRLGVPSSWKSARTIPVYKKGATDDYGNFRPISLLSTLYKLFSSSIASRLTTVAANNSWLSLEQKGFLPGVHGIQEHTMLLECAIEEAKQKKRNLTICWLDLANAFGSLPHDFLFELFHSLPLPVVLREILIDIYSGNVFQFVVGKDLVAIHPTSGVRQGDGLSSIIFNLAAEPLLRCAKGPLNDGFLLFCSYLKATAYADDISLVGSCPADLQPTLDAMLVVAAALGLRFNAGKCCSLIICKGKANPAASLHIRGVAVRSLDEGEHEDYLGVPMGTRLTFRPASSLPGKLTLVADSDLAPWQKLEVFRAHLLPSLSHHLATGRVQRGFLDEIDSRCAEFLRHIANVPHTAHSAFLFADRRAGGLGASQLKMDADVWIIARAAQLLDSQDPVVRLSARSQLEQHISKGLGSSCVTPLPFSDYLSGSTRGGLYDARFYRCGPNTWSRTRKAARRLNVRIDVSGDESSTKVVADDVSCSSAKAVRGLRSAIRARWTASLASAPHQGRVAQGLLLDSSNDMARLTSSRTSLSFDEWKLIHQSRLGILPLLGAPGIAPPDRRCRRCKVDIETTAHVTSHCRVNLPSIGRRHDVVLEEIVSIIRKAGHTVRVNQVFRDTSLRPDIVVLSTTPPTIIDLTIPFDAPESLAAGYDRKVEKYSQLGPTLPFVIGALGSWLPSNNSIASALGIRPGAWTALRRKCRLLAIRGSIKIISDHIRRNDRPAPTDSTP

SEQ ID NO: 3417 - protein, 1181 aa, Daphnia pulex
MEKACGNEACSNTFSSSNNRKKFCSTACYPSVIATAAAKRLGRGQKVVPAPAVSLPAAPPTYTESPPSSPAARSLDSSWAPSPSGRPSRPATAPDRAATKAPSLVRCRNTACSNHFTRSSGSRQYCSPSCRPSSTARLLSTAPTTSPARPFTPTACPSPPAPDLILPVSSSAQPDPVNLGVAYLPVTPPPVNFFGIDVASPTISPTTNAAADSSFMPAATQPTHTLNAPASPAISVEDDGSVQEEGDVSRSTLFYNEWAPLILGCSSREELDTVADNCASAWHRLTLKADSSAPSRPDAPRPLHLPDASLPRKRRSQNRQQQRIRRKTNAKRWEAASKLQSLFKRYPRRAVRKVLGESSEGYSGTLDSATQYLRGAYEQCRPDPSAIIEARRTYDNCHWAHPSEEESSCLASPPSRQEIAWKLKRASNTAPGADGVEYKDILRLDPDGRLLEVLYSAVWRLGVPSSWKSARTIPVYKKGATDDYGNFRPISLLSTLYKLFSSSIASRLTTVAANNSWLSLEQKGFLPGVHGIQEHTMLLECAIEEAKQKKRNLTICWLDLANAFGSLPHAFLFELFHSLPLPEALREILIDIYSGNIFQFVVGKDLVAIHPSSGVRQGDGLSSIIFNLAAEPLLRCAKGPLNAGFLLFCSYLKATAYADDISLVGSCPADLQPTLDAMLVVAAALGLRFNAGKCCSLVISKGKANPAACLHIRGAAVRSLDEGEHEDYLGVPMGTRLTFRPASSLPGKLTLVADSDLAPWQKLEVFRAHLLPSLSHHLATGRVQRGFLDEIDSRCAEFLRHIANVPHTAHSAFLFADRRAGGLGASQLKLDADVWIIARAAQLLDSQDPVVRLSARSQLEQHISKGLGSSCGASLPLSDFLSGSTRGGLYDSRFYKCGPNTWSRARKAARRLNVRIDVSGDESSTKAVADDVSCSSAKAVRGLRSAIRARWTASLASAPHQGRVAQGLLLDSSNDMARLTSSRTSLSFDEWKLIHQSRLGILPLLGAPGIAPPDRRCRRCKEDIETTAHVTSHCRVNLPSIGRRHDEVLEEIVGTIRKAGHDIQVNKVFRDTSLRPDIVVFSTTPPTIIDLTVPFDAPVSLVAGYNRKVEKYGQLGPTLPFVIGALGSWLPSNNSIASALGIRPGAWTALRRKCRLLAIRGSISIISDHIRRNDRPNPIMP

SEQ ID NO: 3418 - protein, 966 aa, Daphnia pulex
MPAATQPTLTLNAPASPAISVEDDGSVQEEGDVSRSTLFYNEWAPLILGCSSREELDTVADNCASAWHRLTLKADSSAPSRSDAPRPLQLPDASLPRRRRSQNRQQQRIRRKTNAKRWEAASKLQSLFKRYPRRAVRKVLGESSEGYSGTLDSATQYLRGAYEQCRPDPSAIIEARRTYDNCHWAHPSEEESSCLASPPSRQEIAWKLKRASNTAPGADGVEYKDILRLDPDGRLLEVLYNAVWRLGVPSSWKSARTIPVYKKGATDDYGNFRPISLLSTLYKLFSSSIASRLTTVAANNSWLSLEQKGFLPGVHGIQEHTMLLECAIEEAKQKKRNLTICWLDLANAFGSLPHAFLFELFHSLPLPVALREILIDIYSGNIFQFVVGKDLVAIHPSSGVRQGDGLSSIIFNLAAEPLLRCAKGPLNAGFLLFCSYLKATAYADDISLVGSCPADLQPTLDAMLVVAAALGLRFNAGKCCSLVISKGKANPAACLHIRGAAVRSLDEGEHEDYLGVPMGTRLTFRPASSLPGKLTLVADSDLAPWQKLEVFRAHLLPSLSHHLATGRVQRGFLDEIDLRCAEFLRHIANVPHTAHSAFLFADRRAGGLGASQLKLDADVWIIARAAQLLDSQDPVVRLSARSQLEQHISKGLGSSCGASLPLSDFLSGSTRGGLYDSRFYKCGPNTWSRARKAARRLNVRIDVSGDESSTKVVADDVSCSSAKAVRGLRSAIRARWTASLASAPHQGRVAQGLLLDSSNDMARLTSSRTSLSFDEWKLIHQSRLGILPLLGAPGIAPPDRRCRRCKEDIETTAHVTSHCRVNLPSIGRRHDEVLEEIVSTIRKAGHDIQVNQVFRDTSLRPDIVVFSTTPPTIIDLTVPFDAPESLVAGYNRKVEKYGQLGPTLPFVIGALGSWLPSNNSIASALGIRPGAWTALRRKCRLLAIRGSISIISDHIRRNDRPNPIMP

SEQ ID NO: 3419 - protein, 1149 aa, Daphnia pulicaria
MERACANSACSKSFICHNKNKKFCSTQCYPSVIRAAAKRAEKHGALVEAAGSVSPGTASATPAPSTTPPNYYESPEHTSSSKTGDDSWIPSPHPGCSPPTMRPGRPRRVPAPPTISPTANLPLAGIDAPHPALLPSHVRPQPTPPATRRAPVPPTINLPACDPHQGPAVVPYQPTSSPHSPLGTSPTMNSGASSPSFELGVDDLDGSLPDDDDGSTPANLFYEHWAPIIVECSSRTELDTIASDLAADWHSRTSKDDPPSSEASRPPRPPRTSPQRSNTNRHQSRQQQRIRQKNNAKRWEAASKLQALFKRYPKRAVRKVLGETSQCYTGSIDSATLFLKATYEQPRPPEADVMEAKAAYDACSWAPLSHDDLSLLSLPPSSQEVAYKLKRASNTSPGADGVEYKDILRLDPFGRLLELLYAAVWLYGIPACWKSARTIPVYKKGPTDDYGNFRPISLLSTIYKLFSSSIASRLTAVASDNEWLSLEQKGFLPGVHGIQEHTMLLESAIEQAKLKKSRLTICWLDLANAFGSLPHDFLHQLFQSLPIPTELRDILTDIYTNSIFQFVVNKELVTIQPTSGVRQGDGLSSIIFNLAAEPLIRCAKAPTNHGFTLFGSLLKATAYADDVALIGSSPDQLQPTLDAMLAVAAKLGLRFNVAKCSFLSLSKGKATNSSLLHIHGTSLRCLEEGESECYLGVPMGTRLTFRPVCDLPDKLTKVADSDLAPWQKLEVYRAHLLPSLSHHLATGRVLRGFLDEMDARCAEFLRFVANVPHTAHNGFLYSDRRAGGLGASQLAKDSDIWIIARAAQLLDSNDPVVRLTARAQLSQNISRGFNGKPPDPLPLSNYLSGSVEGGLHDTRFYRCGSNTWSRARKSARRLEVRIDVSGDESTKVIADDVSCLSLKAVRGLRSVIRKRWTISLTNALHQGRVARGLLLDPSNDIARLSSHRTCLSFNEWNLIHKSRLGLLPLLGNPGCSAPNTKCRRCKVDAETTSHVTSHCRSNLPAIGRRHDLVLAEIVKTITRAGHAASVNRVFPGSTLRPDIVISSTDPPTIIDLTITFDAPESLDAGHARKIEKYSCLGLTLPFVIGALGSWLPSNNAVAVALNIPPAPWRRLRRKCRLMAIQGSVSIIHRHIRGHGDDQEANIPAP

SEQ ID NO: 3420 - protein, 985 aa, Daphnia obtusa
MPGIPTSFGPPFFSLAPDSTPPPTSCTSSPSPEESDDEPDGNVSDDDDDASSPARLFYERWAPIILNCSSRAELDTIASNLATEWHSLTLKEDSANNGATRPPRPPQTSPPGPTPHRQQSRQQQRVRRKNNAKRWAAASKLQALFKRYPKRAVRKVLGETSQSYTGSIESATLFLKNTYEQPRPLAADILVAKAAYDECHWTSPSEDDLALLALPPSSQEVARKLKRASNTSPGADGVEYKDILRLDPSGRLLELLYAAVWLYGIPACWKTARTIPVYKKGSSDDYANFRPISLLSTIYKLFSSSIASRLTTVASDCDWLSPEQKGFLPGVHGIQEHTMLLESAIEEAKLKKSKLAICWLDLANAFGSLPHDFLHQLFNSLPIPTELRGILSDIYTDSVFQFVVGRELVTIHPTSGVRQGDGLSSIIFNLAAEPLIRCAKAPSNSGFPLFCSILKATAYADDVSLISTTPELLQPTLDAMLEVAAKLGLRFNVGKCSFLALSKGKADSSSSLTMHGTPLRCLEEGESESYLGVPMGTRLTFRPVSDLPDKLTKLADSDLAPWQKLEVFRAHLLPSLSHHLATGRVLRGFLGEMDARCSEFLRHVANVPHTAHNGFLYSDRRAGGLGASQLVKDSDVWIIARAAQLLDSNDPVVRLTARAQLAQNISRGFNGEPPDPLPFSDYLSGSVRGGLHDTRFYKCGSNTWSRARKSARRLEVRIDVSGDESTKVIADDVSCLSLKAVRGLRSVIRKRWTYSFTNAMHQGRVARGLLLDSSNDIARLTSPQTSLSFDEWKLIHKSRLGLLPLLGNPGFSAPNTKCRRCKTDAETTSHVTSHCRSNLPAIGRRHDLVLTEIVKTITAAGHEVSVNRVFPGSNLRPDILVSSTSPPIIIDLTITFDAPESLNAGHARKIEKYSCLGLTLPLVIGALGSWLPSNNAVAASLGILPAPWRRLRRKCRLMAIQGSVSIINRHIRGNLVEDDASSPAS

SEQ ID NO: 3421 - protein, 1148 aa, Daphnia obtusa
MEKACGNSSCANTFICHNNKKKFCSSACFPSVIARAAKAAGKKGALTGAASSVSLDTENATPSCTLAPTYYESPDGTSSRRTGDESWIPSPHPGRSPPTTRSRRPRRGPAPPTINQPASIPPVGVNAPLPALSPPHAQHFSTPPPTRKSARPPAIITPACLSHEGLEYQHPLALPSSHLPPDSTPPPTSCTSSPSPEESDDEPDGNVSDDDDDASSPARLFYERWAPIILNCSSRAELDTIASNLATEWHSLTLKEDSANNGATRPPRPPQTSPPGPTPHRQQSRQQQRVRRKNNAKRWAAASKLQALFKRYPKRAVRKVLGETSQSYTGSIESATLFLKNTYEQPRPLAADILVAKAAYDECHWTSPSEDDLALLALPPSSQEVARKLKRASNTSPGADGVEYKDILRLDPSGRLLELLYAAVWLYGIPACWKTARTIPVYKKGSSDDYANFRPISLLSTIYKLFSSSIASRLTTVASDCDWLSPEQKGFLPGVHGIQEHTMLLESAIEEAKLKKSKLAICWLDLANAFGSLPHDFLHQLFDSLPIPTELRGILSDIYTDSVFQFVVGRELVTIHPTSGVRQGDGLSSIIFNLAAEPLIRCAKAPSNSGFPLFCSILKATAYADDVSLISTTPELLQPTLDSMLVVAAKLGLRFNVGKCSFLAISKGKADSSSSLTMHGTPLRCLEEGESESYLGVPMGTRLTFRPVSDLPDKLTKLADSDLAPWQKLEVFRAHLLPSLSHHLATGRVLRGFLGEMDARCSEFLRHVANVPHTAHNGFLYSDRRAGGLGASQLVKDSDVWIIARAAQLLDSNDPVVRLTARAQLAQNISRGFNGEPPDPLPFSDYLSGSVRGGLHDTRFYKCGSNTWSRARKSARRLEVRIDVSGDESTKVIADDVSCLSLKAVRGLRSVIRKRWTYSFTNAMHQGRVARGLLLDSSNDIARLTSPQTSLSFDEWKLIHKSRLGLLPLLGNPGFSAPNTKCRRCKTDAETTSHVTSHCRSNLPAIGRRHDLVLTEIVKTITAAGHEVSVNRVFPGSNLRPDILVSSTSPPIIIDLTITFDAPESLNAGHARKIEKYSCLGLTLPFVIGALGSWLPSNNAVAASLGTLPAPWRRLRRKCRLMAIQGSVSIINRHIRGNLVEDDASSPA

SEQ ID NO: 3422 - protein, 647 aa, Daphnia obtusa
MLLESAIEEAKLKKSKLAICWLDLANAFGSLPHDFLHQLFDSLPIPTELRGILSDIYTDSVFQFVVGRELVTIHPTSGVRQGDGLSSIIFNLAAEPLIRCAKAPSNSGFPLFCSILKATAYADDVSLISTTPELLQPTLDSMLVVAAKLGLRFNVGKCSFLAISKGKADSSSSLTMHGTPLRCLEEGESESYLGVPMGTRLTFRPVSDLPDKLTKLADSDLAPWQKLEVFRAHLLPSLSHHLATGRVLRGFLGEMDARCSEFLRHVANVPHTAHNGFLYSDRRAGGLGASQLVKDSDVWIIARAAQLLDSNDPVVRLTARAQLAQNISRGFNGEPPDPLPFSDYLSGSVRGGLHDTRFYKCGSNTWSRARKSARRLEVRIDVSGDESTKVIADDVSCLSLKAVRGLRSVIRKRWTYSFTNAMHQGRVARGLLLDSSNDIARLTSPQTSLSFDEWKLIHKSRLGLLPLLGNPGFSAPNTKCRRCKTDAETTSHVTSHCRSNLPAIGRRHDLVLTEIVKTITAAGHEVSVNRVFPGSNLRPDILVSSTSPPIIIDLTITFDAPESLNAGHARKIEKYSCLGLTLPFVIGALGSWLPSNNAVAASLGILPAPWRRLRRKCRLMAIQGSVSIINRHIRGNLVEDDASSPAS

SEQ ID NO: 3423 - protein, 1149 aa, Daphnia pulicaria
MERACASSACSKSFICHNKNKKFCSTQCYPSVIRAAAKRAEKHGALVEAAGSVSPGTASATPAPSTTPPNYYESPEHTSSSKTGDDSWIPSPHPGCSPPTMRPGRPRRVPAPPTISPTANLPLAGIDAPHPALLPSHVRPQPTPPATRRAPVPPTINLPACDPHQGPAVVPYQPTSSPHSPLGTSPTMNSGASSPSFELGVDDLDGSLPDDDDGSTPANLFYEHWAPIIVECSSRTELDTIASDLAADWHSRTSKDDPPSSEASRPPRPPRTSPQRSNTNRHQSRQQQRIRQKNNAKRWEAASKLQALFKRYPKRAVRKVLGETSQCYTGSIDSATLFLKATYEQPRPPEADVMEAKAAYDACSWAPLSHDDLSLLSLPPSSQEVAYKLKRASNTSPGADGVEYKDILRLDPFGRLLELLYAAVWLYGIPACWKSARTIPVYKKGPTDDYGNFRPISLLSTIYKLFSSSIASRLTAVASDNEWLSLEQKGFLPGVHGIQEHTMLLESAIEQAKLKKSRLTICWLDLANAFGSLPHDFLHQLFQSLPIPTELRDILTDIYTNSIFQFVVNKELVTIQPTSGVRQGDGLSSIIFNLAAEPLIRCAKAPTNHGFTLFGSLLKATAYADDVALIGSSPDQLQPTLDAMLAVAAKLGLRFNVAKCSFLSLSKGKATNSSLLHIHGTSLRCLEEGESECYLGVPMGTRLTFRPVCDLPDKLTKVADSDLAPWQKLEVYRAHLLPSLSHHLATGRVLRGFLDEMDARCAEFLRFVANVPHTAHNGFLYSDRRAGGLGASQLAKDSDIWIIARAAQLLDSNDPVVRLTARAQLSQNISRGFNGKPPDPLPLSNYLSGSVEGGLHDTRFYRCGSNTWSRARKSARRLEVRIDVSGDESTKVIADDVSCLSLKAVRGLRSVIRKRWTISLTNALHQGRVARGLLLDPSNDIARLSSHRTCLSFNEWNLIHKSRLGLLPLLGNPGCSAPNTKCRRCKVDAETTSHVTSHCRSNLPAIGRRHDLVLAEIVKTITRAGHAASVNRVFPGSTLRPDIVISSTDPPTIIDLTITFDAPESLDAGHARKIEKYSCLGLTLPFVIGALGSWLPSNNAVAVALNIPPAPWRRLRRKCRLMAIQGSVSIIHRHIRGHGDDQEANIPAP

SEQ ID NO: 3424 - protein, 1143 aa, Daphnia pulicaria
MEKACGNSACRNTFICHNDKKKFCSNRCYPSVIARAAAKQASRNGALAGATNRASLDTVRTTPAHTPAPTYYETPDDTSTRKTRDDSWIPSPHSGCSPPTARFGRPRRDPAPSANFPLAGIDAPHPALFPSHARPQPTPPATRRAPAPPTINLPACVSHQGPVVPYQPISSPHSPLGTSPTTNSGASSPSLELGVDDLDGSLPDEEDGPTPANLFYEHWAPIIMECSSRTELDTIASDLAADWHSRTSKDDPPSSEASRPPRPPRTSPQRSNTHRHQSRQQQRIRQKNNAKRWEAASKLQALFKRYPKRAVRKVLGETSQCYTGSIESATLFLKATYEQPRPPEADIMVAKAAYDACSWAPLSDDDLSLLSLPPSSQEVAHKLKRASNTSPGADGVEYKDILRLDPFGRLLELLYAAVWLYGIPACWKSARTIPVYKKGPTDDYGNFRPISLLSTIYKLFSSSIASRLTAVASDNDWLSFEQKGFLPGVHGIQEHTMLLESAIEQAKLKKSRLTICWLDLANAFGSLPHDFLHQLFQSLPIPTELRDILTDIYTNSIFQFVVNKELVTVHPTSGVRQGDGLSSIIFNLAAEPLIRCAKDPTNQGFNLFGSLLKATAYADDLSLIGSSPDQLQPTLDAMLAVAAKLGLRFNVAKCSFLSLSKGKATNSSLLHIHGTSLRCLEEGESECYLGVPMGTRLTFRPVCDLPDKLIKVADSDLAPWQKLEVYRAHLLPSLSHHLATGRVLRGFLNEMDARCAEFLRFVANVPHTAHNGFLYSDRRAGGLGASQLAKDSDIWIIARATQLLDSNDPVVRLTARAQLSQNISRGFDGKPPDPLPLSNYLSGSLEGGLYDTRFYKCGSNTWSRARKSARRLEVRIDVSGDESTKVIADDVSCLSLKAVRGLRTVIRKRWTISLTNALHQGRVARGLLLDPSNDVARLSSHRTCLSFNEWNLIHKSRLGLLPLLGNPGCSAPNTKCRRCKVDAETTSHVTSHCRSNLPAIGRRHDLVLAEIVKTITRAGHAASVNRVFPGSTLRPDIVIFSTDPPTIIDLTITFDAPESLDAGHARKIEKYSCLGLTLPFVIGALGSWLPSNNAVAVALNIPPAPWRRLRRKCRLMAIQGSVSIIHRHIRGHGDDQEAYTPAP

SEQ ID NO: 3425 - protein, 1143 aa, Daphnia pulicaria
MEKACGNSACRNTFICHNDKKKFCSNRCYPSVIARAAAKQASRNGALAGATNCASLDTVRTTPAHTPAPTYYETPDDTSTRRTRDDSWIPSPHSGCSPPTARFGRPRRDPAPSANFPLAGIDAPHPALFPSHARPQPTPPATRRAPAPPTINLPACVSHQGPVVPYQPISSPHSPLGTSPTTNSGASSPSLELGVDDLDGSLPDEEDGPTPANLFYEHWAPIIMECSSRTELDTIASDLAADWHSRTSKDDPSNSEASRPPRPPRTSPQRSNTHRHQSRQQQRIRQKNNAKRWEAASKLQALFKRYPKRAVRKVLGETSQCYTGSIESATLFLKATYEQPRPPEADIMVAKAAYDACSWAPLSDDDLSLLSLPPSSQEVAHKLKRASNTSPGADGVEYKDILRLDPFGRLLELLYAAVWLYGIPACWKSARTIPVYKKGPTDDYGNFRPISLLSTIYKLFSSSIASRLTAVASDNDWLSFEQKGFLPGVHGIQEHTMLLESAIEQAKLKKSRLTICWLDLANAFGSLPHDFLHQLFQSLPIPTELRDILTDIYTNSIFQFVVNKELVTVHPTSGVRQGDGLSSIIFNLAAEPLIRCAKDPTNQGFNLFGSLLKATAYADDLSLIGSSPDQLQPTLDAMLAVAAKLGLRFNVAKCSFLSLSKGKATNSSLLHIHGTSLRCLEEGESECYLGVPMGTRLTFRPVCDLPDKLIKVADSDLAPWQKLEVYRAHLLPSLSHHLATGRVLRGFLNEMDARCAEFLRFVANVPHTAHNGFLYSDRRAGGLGASQLAKDSDIWIIARATQLLDSNDPVVRLTARAQLSQNISRGFDGKPPDPLPLSNYLSGSLEGGLYDTRFYKCGSNTWSRARKSARRLDVRIDVSGDESTKVIADDVSCLSLKAVRGLRTVIRKRWTISLTNALHQGRVARGLLLDPSNDVARLLSHRTCLSFNEWNLIHKSRLGLLPLLGNPGCSAPNTKCRRCKVDAETTSHVTSHCRSNLPAIGRRHDLVLAEIVKTITRAGHAASVNRVFPGSTLRPDIVIFSTDPPTIIDLTITFDAPESLDAGHARKIEKYSCLGLTLPFVIGALGSWLPSNNAVAVALNIPPAPWRRLRRKCRLMAIQGSVSIIHRHIRGHGDDQEAYTPAP

SEQ ID NO: 3426 - protein, 1135 aa, Daphnia pulicaria
MEKACGNSACRNTFICHNDKKKFCSNRCYPSVIARAAAKQASRNGALAGAANCASLDTVRTTPAQTPAPTYYETPDDTSTRKTRDDSWIPSPHSGCSPPTARFGRPRRDPAPSTVTQTACIAGVNVSLPALSPPQARPFSTPTSRSPRPPSIVQPTRVSHGDLDDQHLALPSPLFPSDTTPPPFSDASSSSFESSFDDLDGGVLEDEDALSPADLFYERWAPTILNCSSRTELDTIASDLATNWHALTLKEDTPSSEATRPPRIPQTTPPGSIPHRQQSRQQQRVRRKNNAKRWAAASKLQALFKRYPKRAVRKVLGETSQSYTGSSEAATLFLKTTYEKPRPPPDDILVARAAYDECLWTPPSDDDLSLLSLPPSRQEIAYKLKRASNTSPGADGVEYKDIQRLDPSGRLLEVLYAAVWLYGIPTCWKSARTIPVYKKGSPDDYANFRPISLLSTIYKLFSSSIATRLTTVASDCDWLSPEQKGFLPGVHGIQEHTMLLESAIEEAKLKKSNLTICWLDLANAFGSLPHDFLHQLFASLPIPTVLRDLLSDIYTDSIFQFVVGRELITVHPTSGVRQGDGLSSIIFNLAAEPLIRCAKAPSNSGFPLFCSMLKATAYADDVSLIGTTPEQLQPVLDAMLVVAAKLGLRFNVGKCSFLAISKGKATHSTHLTIHGTSLRGLEEGETESYLGVPLGTRLTFRPVSDLPDKLTKLADCDLAPWQKLEVFRAHLLPSLSHHLATGRVLRGFLGEMDARCSEFLRFVSNVPHTAHNGFLYSDRRAGGLGASQLAKDSDIWIIARATQLLDSNDPVVRLTARAQLSQNISRGFNGKPPDPLPLSNYLSGSVEGGLHDTRFYKCGSNTWSRARKSARRLEVRIDVSGDESTKVIADDVSCLSLKAVRGLRSVIRKRWTISLTNALHQGRVARGLLLDPSNDVARLSSHRTCLSFNEWNLIHKSRLGLLPLLGNPGCSAPNTKCRRCKVDAETTSHVTSHCRSNLPAIGRRHDLVLAEIVKTITRAGHAASVNRVFPGSTLRPDIVISSTDPPTIIDLTITFDAPESLDAGHARKIEKYSCLGLTLPFVIGALGSWLPSNNAVAVALNIPPAPWRRLRRKCRLMAIQGSVSIIPSPHPRTWG

SEQ ID NO: 3427 - protein, 1068 aa, Daphnia pulicaria
MIPGSPLHIRAVLLPRCDLAGPDESLLHPPSLLRLTSHWQALMLHIRLFSLSHVRPQPTPPATRRAPVPPTINLPACDPHQGPVVVPYQPTSSPHSPLGTSPTMNSGASSPSFELGVDDLDGSLPDDDDGSTPANLFYEHWAPIIVECSSRTELDTIASDLAADWHSRTSKDDPPSSEASRPPRPPRPPRTSPQRSNTNRHQSRQQQRIRQKNNAKRWEAASKLQALFKRYPKRAVRKVLGETSQCYTGSIDSATLFLKATYEQPRPPEADVMEAKAAYDACSWAPLSDDDLSLLSLPPSSQEVAYKLKRASNTSPGADGVEYKDILRLDPFGRLLELLYAAVWLYGIPACWKSARTIPVYKKGPTDDYGNFRPISLLSTIYKLFSSSIASRLTAVASDNEWLSLEQKGFLPGVHGIQEHTMLLESAIEQAKLKKSRLTICWLDLANAFGSLPHDFLHQLFQSLPIPTELRDILTDIYTNSIFQFVVNKELVTIQPTSGVRQGDGLSSIIFNLAAEPLIRCAKAPTNHGFTLFGSLLKATAYADDVALIGSSPDQLQPTLDAMLAVAAKLGLRFNVAKCSFLSLSKGKATNSSLLHIHGTSLRCLEEGESECYLGVPMGTRLTFRPVCDLPDKLTKVADSDLAPWQKLEVYRAHLLPSLSHHLATGRVLRGFLDEMDARCAEFLRFVANVPHTAHNGFLYSDRRAGGLGASQLAKDSDIWIIARAAQLLDSNDPVVRLTARAQLSQNISRGFNGKPPDPLPLSNYLSGSVEGGLHDTRFYRCGSNTWSRARKSARRLEVRIDVSGDESTKVIADDVSCLSLKAVRGLRSVIRKRWTISLTNALHQGRVARGLLLDPSNDIARLSSHRTCLSFNEWNLIHKSRLGLLPLLGNPGCSAPNTKCRRCKVDAETTSHVTSHCRSNLPAIGRRHDLVLAEIVKTITRAGHAASVNRVFPGSTLRPDIVISSTDPPTIIDLTITFDAPESLDAGHARKIEKYSCLGLTLPFVIGALGSWLPSNNAVAVALNIPPAPWRRLRRKCRLMAIQGSVSIIHRHIRGHGDDQEANIPAP

SEQ ID NO: 3428 - protein, 1149 aa, Daphnia pulicaria
MERACANSACSKSFICHNKNKKFCSTQCYPSVIRAAAKRAEKHGALVEAAGSVSPGTASATPAPSTTPPNYYESPEHTSSSKTGDDSWIPSPHPGCSPPTMRPGRPRRVPAPPTISPTANLPLAGIDAPHPALLPSHVRPQPTPPATRRAPVPPTINLPACDPHQGPAVVPYQPTSSPHSPLGTSPTMNSGASSPSFELGVDDLDGSLPDDDDGSTPANLFYEHWAPIIVECSSRTELDTIASDLAADWHSRTSKDDPPSSEASRPPRPPRTSPQRSNTNRHQSRQQQRIRQKNNAKRWEAASKLQALFKRYPKRAVRKVLGETSQCYTGSIDSATLFLKATYEQPRPPEADVMEAKAAYDACSWAPLSHDDLSLLSLPPSSQEVAYKLKRASNTSPGADGVEYKDILRLDPFGRLLELLYAAVWLYGIPACWKSARTIPVYKKGPTDDYGNFRPISLLSTTYKLFSSSIASRLTAVASDNEWLSLEQKGFLPGVHGIQEHTMLLESAIEQAKLKKSRLTICWLDLANAFGSLPHDFLHQLFQSLPIPTELRDILTDIYTNSIFQFVVNKELVTIQPTSGVRQGDGLSSIIFNLAAEPLIRCAKAPTNHGFTLFGSLLKATAYADDVALIGSSPDQLQPTLDAMLAVAAKLGLRFNVAKCSFLSLSKGKATNSSLLHIHGTSLRCLEEGESECYLGVPMGTRLTFRPVCDLPDKLTKVADSDLAPWQKLEVYRAHLLPSLSHHLATGRVLRGFLDEMDARCAEFLRFVANVPHTAHNGFLYSDRRAGGLGASQLAKDSDIWIIARAAQLLDSNDPVVRLTARAQLSQNISRGFNGKPPDPLPLSNYLSGSVEGGLHDTRFYRCGSNTWSRARKSARRLEVRIDVSGDESTKVIADDVSCLSLKAVRGLRSVIRKRWTISLTNALHQGRVARGLLLDPSNDIARLSSHRTCLSFNEWNLIHKSRLGLLPLLGNPGCSAPNTKCRRCKVDAETTSHVTSHCRSNLPAIGRRHDLVLAEIVKTITRAGHAASVNRVFPGSTLRPDIVISSTDPPTIIDLTITFDAPESLDAGHARKIEKYSCLGLTLPFVIGALGSWLPSNNAVAVALNIPPAPWRRLRRKCRLMAIQGSVSIIHRHIRGHGDDQEANIPAP

SEQ ID NO: 3429 - protein, 1380 aa, Ctenocephalides felis
MSSQRSLPGRRPAKPWDYDLRLSLSTENNTSAESEVVYLDLPLKDDKAHCPKCRKAYTQKSKLMMHLRIEHHAVLKYKCSLCNLPTSLNAFRGHLMKCEGRGKKANMTKHNKPTKPTPSTPPKSVSAVDPNIQAGTSRPASITKTRPKTAVTTLTTRNITPPPASSSQIMTRSRTRAASVPPSDQSQKGGRVIWRTKSATLDTTGGSPEFTAAEISSPKPNPPGLLREETGDNITLWPSPMEIITNRTSGKKLPTISETPPEPETPVLLPGTLNNEIPTRPNLTARRGKSSGGRESTTVEISSELNPPGQLHEETGENIPLWPSPIEVTTTRTSGSQLPTTAEMPPELEPPALLPGIVDDEIPMWPSLIARRVATEENTSETNDETAPPIEVISNENETVTANEMEREIAERLRDIRAIVEEINTRPSETPSREEGVRQQTRNEGTIPTPTLVTPKMTEFQVEACRRIQATATPADLDKEIEDISNSIKPNESAEPRNESGRRYRPNTDQRRRRRRNTDMTFDPAAAARIQKLYRRDRKRAFREITGNNERAYCHFEPEFLHAYFKAVYRRQPDPEPSEAMPEIIPPITPVGDGNNNPLTKDFTAEEIWARALKCKNTAPGPDGIRYWLWKKCDPGSHILAAIFNQTHKLKYVPRSWQVSETILIPKKGDLDEVTSWRPIALSNTIGKLYASVLADRLGKWCKENNRISNAQKGFMPFEGCSEHNYTLQSSIQDARRRRKEIAVAWLDLKNAFGSIPHKTIFNAMRWAGLGSESISLIERFYSGCTTKIRSVQGSTEDVPVEAGVKQGCPLSPITFNMAIEPLLRAIRNTPENYNANGTINNVLAYADDLVLMADSAEGLQKLMDTTATVSKWSGLQFNTRKCATLHVDGKQHRAITTTFSLNGETMKTLDMDQSYEYLGIPTGFQSFSSADEVIRAMRRHAEQLNNSLLAPWQKVDALNTFIMPQLQFHLRNGKTTKKLLWIYDREVKTYAKKWANLPKRASAEILYLAYKEGGFNLLPTSFLADIGQVVHAHRLLTSNDDSVAEASLAALKEVVRKKTIREATPNELVDYINGSDEGLVAKPSNDISSTWTRLRAAARRLKGKINFLLELDSLQVDNKRVERQNSESALRTAARNHFRNKLILKPDQGKAMEVTSANSVSNHFIRDGSFTRFADWRFIHRARLNVLPLNGCRRFGQNDKRCRRCGHQNETLPHVLNHCRPQFVTMTKRHNAILNRLTKAMKVPPGSRTFINQQIPGYSGAERPDVVIIDETQKIALIMDVTVAFENRPQAFVTARAEKIRKYSALSNHLHTQGLTTKILVFVMGSLGGYDKSNVETLIALGIGRRYSVLMKRLMVSDTIKWSRDMYVEHITGSRQYHG

SEQ ID NO: 3430 - protein, 1380 aa, Ctenocephalides felis
MSSQRSLPGRRPAKPWDYDLRLSLSTENTTSAESEVVYLDLPLKDDKAHCPKCRKAYTQKSKLMMHLRIEHHAVLKYKCSLCNLPTSLNAFRGHLMKCEGRGKKANMTKHNKPTKPTPSTPPKSASAVGPNIQAGSSRPASITKKRPKTAVTTSGTRNITPPPASSSQIMTRSRTRAASVPPSDRSQKGGRVIWRTKSATLDTTGGNPEFTAAEILSPKPNPPGLLREETGDNILLWPSPIEIITNRTSGKKLPTISETPPEPETPVLLPETLNNETPTRPNLTARRGKSSGGRESTTVESSSELNPPGQLHEETGENIPLWLSPIEITTNRTSGSQLPTTAEMPPELEPPALLPGIVDDEIPMWPSLIARRVATEENTSETNDETAPPIEVISNENETVTANEMAREIAERLRDIRAIVEEINTRPSETPSQEEGVRQQTRNEGTIPTPTLVTPKMTEFQVEACRRIQAIATPADLDKEIEDISNSIKPNESAEPRNETGRGYRPNTDQRRRRRRNTDMTFDPAAAARIQKLYRRDRKRAFREITGNNERAYCHFEPEFLHAYFKAVYRRQPDPEPSEAMPEIIPPITPVGDGNNNPLTKDFTAEEIWARALKCKNTAPGPDGIRYWLWKKCDPGSHILAAIFNQTHKLKYVPRSWQVSETILIPKKGDLDEVTSWRPIALSNTIGKLYASVLADRLGKWCKENNRISNAQKGFMPFEGCSEHNYTLQSSIQDARRRRKEIAVAWLDLKNAFGSIPHKTIFNAMRWAGLGSESIALIERIYSGCTTKIRSVQGSTEDVPVEAGVKQGCPLSPITFNMAIEPLLRAIRNTPENYNANGTINNVLAYADDLVLMADSAEGLQKLMDTTATVSKWSGLQFNTRKCATLHVDGKQHRAITTTFSLNGETMKTLDMDQSYEYLGIPTGFQSFSSADEVIRAMRRHAEQLNNSLLAPWQKVDALNTFIMPQLQFHLRNGKTTKKLLWIYDREVKNYAKKWANLPKRASAEILYLAYKEGGFNLLPTSFLADIGQVVHAHRLLTSNDDSVAEASLAALKEVVRKKTIREATPKELVDYINGSDEGLVAKPSNDISSTWTRLRAAARRLKGKINFLLELDSLQVDDKRVERQNSESALRTAARNHFRNKLILKPDQGKAMEVTSANSVSNHFIRDGSFTRFADWRFIHRARLNVLPLNGCRRFGQNDKRCRRCGHQNETLPHVLNHCRPQFATMTKRHNAILNRLTKAMKVPPGSRTFINQQIPGYIGTERPDVVILDETQKIALIMDVTVAFENRPQAFVTARAEKIRKYSALANHLHTQGLTTKILVFVMGSLGGYDKSNVETLIALGIGRRYSVLMKRLMVSDTIKWSRDMYVEHITGSRQYHG

SEQ ID NO: 3431 - protein, 904 aa, Dermanyssus gallinae
MDSSLANPETLAQTLAQARQDLKIAKVIPRGAREACAAAFAKALNNFNSKLDLESWNSLMSAPSLMLALPHRKNHEATLTRIIKDNVSVLEQKSLESLLQTVPKAPINRLDGLAGDRQSVSIAERKLAEGDVRSAARALLSSDTFAPRNSRTERELRNKHPPPPAVCQERLATFEQPTVGYCESVENSAILEAIRSFPVASGAGLDGLRPRHLRDMLDQTVPSSERLLNYLSIFLGRVLNGTLPKFCLPVFYGANLTALKKKDNSIRPIACGLTLRRIAAKIAMARNKKTILTAILPHQVGVAVKGGAEALVHATRALLETADQVKVLVKLDFCNAFNTLRRDRILDAVMEKSPELLPMVWQSYRDPSLLTWGTTSTLRSEAGIQQGDPLGPALFSLGISDLVLQLQSPFNVWYLDDATLAGPASIIATDLRRVLQFEENGGLTLNAAKCEITAVGGSPQEREEAIHKITEILPGITRVELNNLEVLGAPVKQDGISHTLSEKKEALTKIRPRLTRLHPQAALCIWRYSLGSSRFNYILRACPALTCPEELTAYDDVSRDILSEVLNVNLEENTWQRASLPIREGGLGIRRATDLAPVCYAASLVQFGPVAASLVEEAVRPQIRYETSKARDTIRTMLDPGPLEEYPSQYNLDELKSKKKSREILDELASRRDRAVFLAAQDNFSGGWLKALPSPQLGTMLDPNSFRMMSALRIGASVCEPFQCKLCGEMVDSSGLHPLSCPKSAGRSSRHAELNGVIIRSLRKAGIPSTLEPRGLVSAGEERPDGVTIALWSHGKSLAWDATVSCTTAASYLHHSSVEPGWVAKHADARKRFKYAELETRYIFVPIAMETLGPISKGTEAFLKDLSKRIQEVTNDRREGQFLRQALSLAVCRGNAASILGAME

SEQ ID NO: 3432 - protein, 986 aa, Dermanyssus gallinae
MTSQPSHPDGFITDEDSRLNSPLSQTPYTCTHCGRALRTSQGLRAHITRLHPPASLRNQHLRPFQPQPTDSSKTPSPHHTSPMDSSLANPETLAQTLAQARQDLKIARVIPRGAREACAAAFAKALNNFNSKLDLESWNSLMSAPSLMLALPHRKNHEATLTRIIKDNVSVLEQKSLESLLQTVPKAPINRLDGLAGDRQSVSIAERKLAEGDVRSAARALLSSDTFAPRNSRTERELRNKHPPPPAVCQERLATLEQPTVGYCESVENSAILEAIRSFPVASGAGLDGLRPRHLRDMLDQTVPSSERLLNYLSIFLGRVLNGTLPKFCLPVFYGANLTALKKKDNSIRPIACGLTLRRIAAKIAMARNKKTILTAILPHQVGVAVKGGAEALVHATRALLETADQVKVLVKLDFCNAFNTLRRDRILDAVMEKSPELLPMVWQSYRDPSLLTWGTTSTLRSEAGIQQGDPLGPALFSLGISDLVSQLQSPFNVWYLDDATLAGPASIIATDLRRVLQFEEDGGLTLNAAKCEITAVGGSPQEREEAIYKITEILPGITRVELNNLEVLGAPVKQDGISHTLSEKKEALTKIRPRLTRLHPQAALCIWRYSLGSSRFNYILRACPALTCPEELTAYDDVSRDILSEVLNVNLEENTWQRASLPIREGGLGIRSATDLAPVCYAASLVQFGPVAASLVEEAVRPQIRYETSKARDTIRTMLDPGPLEEYPSQYNLDELKSKKKSREILDELASRRDRAVFLAAQDNFSGGWLKALPSPQLGTMLDPNSFRMMSALRIGASVCEPFQCKLCGEMVDSSGLHPLSCPKSAGRSSRHAELNGVIIRSLRKAGIPSTLEPRGLVSAGEERPDGVTIALWSHGKSLAWDATVSCTTAASYLHHSSVEPGWVAKHADARKRFKYAGLETRYIFVPIAMETLGPISKGTEAFLKDLSKRIQEVTKDRREGQFLRQALSLAVCRGNAASILGAME

SEQ ID NO: 3433 - protein, 986 aa, Dermanyssus gallinae
MTSQPSHPDGFITDEDSRLNSPLSQTPYTCTHCGRALRTSQGLRAHITRLHPPASLRNQHLRPFQPQPTDSSKTPSPHHTSSMDSSLANPETLAQTLAQARQDLKIARVIPRGAREACAAAFAKALNNFNSKLDLESWNSLMYAPSLMLALPHRKNHEATLTRIIKDNVSVLEQKSLESLLQTVPKATINRLDGLAGDRQSVSIAERKLAEGDVRSAARALLSSDTFAPRNSRTERELRNKHPPPPAVCQERLATFEQPTVGYCESVENSAILEAIRSFPVASGAGLDGLRPRHLRDMLDQTVPSSERLLNYLSIFLGRVLNGTLPKFCLPVFYGANLTALKKKDNSIRPIACGLTLRRIAAKIAMARNKKTILTAILPHQVGVAVKGGAEALVHATRALLETEDQVKVLVKLDFCNAFNTLRRDRILDAVMEKSPELLPMVWQSYRDPSLLTWGTTSTLRSEAGIQQGDPLGPALFSLGISDLVSQLQSPFNVWYLDDATLAGPASIIATDIRRVLQFEEDGGLTLNAAKCEITAVGGSPQEREEAIHKITEILPGITRVELNNLEVLGATVKQDGISHTLSEKKEALTKIRPRLTRLHPQAALCIWRYSLGSSRFNYILRACPALTCPEELTAYDDVSRDILSEVLNVNLEENTWQRASLPIREGGLGIRSATDLAPVCYAASLVQFSPVAASLVEEAVRPQIRYETSKARDTIRTMLDPGPLEEYPSQYNLDELKSKKKSREILDELVSRRDRAVFLAAQDNFSGGWLKALPSPQLGTMLDPNHFRMMSALRIGASVCEPFQCKLCGEMVDSSGLHPLSCPKSAGRSSRHAELNGVIIRSLRKAGIPSTLEPRGLVSAGEERPDGVTIALWSHGKSLAWDATVSCTTAASYLHHSSVEPGWVAKHADARKRFKYAGLETRYIFVPIAMETLGPISKGTEAFLKDLSKRIQEVTNDRREGQFLRQALSLAVCRGNAASILGAMD

SEQ ID NO: 3434 - protein, 845 aa, Dermanyssus gallinae
MSAPSLMLALPHRKNHGATLTRIIKDNASMLEQKTLEGLLQTVRKAPSNRIDSPVGDRESVSMAERKLAEGDVRSAARVLLSSDTFAPRNSCTERELRNKHPPPPAACQERLETFEQPTVGICESVENSAILEAIRSFPVASGAGLDGLRPRHLRDMLDQTVPSSECLLNDLSIFLGRVLNGTLPKFCLPLFYGANLTALTKKDNSIRPIVCGLTLRRIAAKIAMARNKKAILTAILPHQVGVAVRGGAEALVHATRALLKTEDQVKVLVKLDFCNAFNTLRRDKILDAVMKKSPELLPMVWQSYRDPSLLTWGTTSTLHSEAGIQQGDPLGPALFSLGISDLVSQLQSPFNVWYLDDATLAGPASISATDLRRVLQFEEDGGLALNASKCEITAVGGSLQEREEAIQEITEILPDITRVEVNNLEVLGAPVKQDGISHTLSRKKEAFTKIRPRLTRLHPQAALCIWRYSLGSSKFNYTLRSCPAIVCSKELTAYDDVSRDILSEVLNVNLEDNTWQRASLPIREGGLGIRSAIDLAPVCYAASLIRFGPVAASLVEEAVRPQIKNETSKARDTIRTMLDPGPLEEYPSQYNLDELKSKKKSREILEGLVTQRDRAVFLAAQDNFSGGWLKALPSPQLGTMLDPNHFRMMSALRIGAPVCEPFQCKLCGETVDSSGLHPLSCPKSAGRSSRHAELNKVIIRSLRKAGIPSTLEPRGLVPAGEERPDGVTIALWSHGKSLAWDATVSCTTAASYLHHSSVEPGWVAKHAEARKRVKYTGLETRYTFVPIAMETLGPISKGTEAFLKDLSKRIQEVTGDQREGQFLRQALSLAVCRGNAASILGAME

SEQ ID NO: 3435 - protein, 845 aa, Dermanyssus gallinae
MSAPSLILALPHRKNHEATLTRIIKDNASMLEQKTLEGLLQTVRKAPSNRIDSPVGDRESVSMAERKLAEGDVRSAARVLLSSDTFAPRNSCTERELRNKHPPPPAACQESLETFEQPTVGICESVENSAILEAIRSFPVASGAGLDGLRPRHLRDMLDQTVPSSECLLNDLSIFLGRVLNGTLPKFCLPLFYGANLTALKKKDNSIRPIACGLTLRRIAAKIAMARNKKAILTAILPHQVGVAVRGGAEALVHATRALLKTEDQVKVLVKLDFCNAFNTLRRDKILDAVMKKSPELLPMVWQSYRDPSLLTWGTTSTLHSEAGIQQGDPLGPALFSLGISDLVSQLQSPFNVWYLDDATLAGPASIIATDLRRVLQFEEDGGLALNASKCEITAVGGSLQEREEAIQEITEILPDITRVEVNNLEVLGAPVKQDGISHTLSRKKEALTKIRPRLTRLHPQAALCIWRYSLGSSKFNYTLRSCPAIVCSKELTAYDDVSRDILSKVLNVNLEDNTWQRASLPIREGGLGIRSAIDLAPVCYAASLIRFGPVAASLVEEAVRPQIKNETSKARDTIRTMLDPGPLEEYPSQYNLDELKSKKKSREILEGLVTQRDRAVFLAAQDNFSGGWLKALPSPQLGTMLDPNHFRMMSALRIGAPVCEPFQCKLCGETVDSSGLHPLSCPKSAGRSSRHAELNKVIIRSLRKAGIPSTLEPRGLVPAGEERPDGVTIALWSHGKSLAWDATVSCTTAASYLHHSSVEPGWVAKHAEARKRVKYTGLETRYTFVPIAMETLGPISKGTEAFLKDLSKRIQEVTGDQREGQFLRQALSLAVCRGNAASILGAME

SEQ ID NO: 3436 - protein, 986 aa, Dermanyssus gallinae
MTSQPSHPDVIVTDEDSRLNSPLSQTPYTCTHCGRALRTSQGLRAHITRLHPAASLRNQHLRPFQPQPTDSSNTPSPLHTSSIDSSSVNPATLVQTLAQARRDLKIARVIPRGAREACAVAFAKALNNFNSKLDVQSWNSLMSAPSLMLALPHRKNHEATLTRIIKDNASMLEQKTLESLLQTVRKAPSNRIDSPFGDRESVSMAERKLAEGDVRSAARVLLSSDTFAPRNSRTERELRNKHPPPPAACQERLETFEQPTVGICESVENSAILEAIRSFPVASGAGLDGLRPRHLRDMLDQTVPSSECLLNDLSIFLGKVLNGTLPKFCLPLFYGANLTALKKKDNSIRPIACGLTLRRIAAKIAMARNKKAILTAILPHQVGVAVRGGAEALVHATRALLKTEDQVKVLVKLDFCNAFNTLRRDKILDAVMKKSPELLPMVWQSYRDPSLLTWGTTSTLHSEAGIQQGDPLGPALFSLGISDLVSQLQSPFNVWYLDDATLAGPASIIATDLRRVLQFEEDGGLALNASKCEITAVGGSLQEREEAIQEITEILPDITRVEVNNLEILGAPVKQNGISHTLSRKKEALTKIRPRLTCLHPQAALCIWRYSLGSSKFNYTLRSCPAIVCSKELTAYDDVSRDILSEVLNVNLEDNIWQRASLPIREGGLGIRSAIDLAPVCYAASLIRFGPVAASLVEEAVRPQIKNETSKARDTIRTMLDPGPLEEYPSQYNLDELKSKKNSREILEGLVTQRDRAVFLAAQDNFSGGWLKALPSPQLGTMLDPNHFRMMSALRIGAPVCEPFQCKLCGETVDSSGLHPLSCPKSAGRSSRHAELNKVIIRSLRKAGIPSTLEPRGLVPAGEERPDGVTIALWSHGKSLAWDATVSCTTAASYLHHSSVEPGWVAKHAEARKRVKYTELETRYTFVPIAMETLGPISKGTEAFLKDLSKRIQEVTSDQREGQFLRQALSLAVCRGNAASILGAME

SEQ ID NO: 3437 - protein, 986 aa, Dermanyssus gallinae
MTSQPSHPDVIVTDEDSRLNSPLSQTPYTCTHCGRALRTSQGLRAHITRLHPAASLRNQHLRPFPPQPTDSSNTPSPLHTSSIDSSSVNPAALVQTLAQARRDLKIARVIPRGAREACAVAFAKALNNFNSKLDVQSWNSLMSAPSLILALPHRKNHEATLTRIIKDNASMLEQKTLEGLLQTVRKAPSNRIDSPVGDRESVSMAERKLAEGDVRSAARVLLSSDTFAPRNSCTERELRNKHPPPPAACQERLETFEQPTVGICESVENSAILEAIRSFPVASGAGLDGLRPRHLRDMLDQTVPSSECLLNDLSIFLGRVLNGTLPKFCLPLFYGANLTALKKKDNSIRPIACGLTLRRIAAKIAMARNKKAILTAILPHQVGVAVRGGAEALVHATRALLKTEDQVKVLVKLDFCNAFNTLRKDKILDAVMKKSPELLPMVWQSYRDPSLLTWGTTSTLHSDAGIQQGDPLGPALFSLGISDLVSQLQSPFNVWYLDDATLAGPASIIATDLRRVLQFEEDGGLALNASKCEITAVGGSLQEREEAIQEITEILPDITRVEVNNLEVLGAPVKQDGISHTLSRKKEALTKIRPRLTRLHPQAALCIWRYSLGSSKFNYTLRSCPAIVCSKELTAYDDVSRDILSEVLNVNLEDNTWQRASLPIREGGLGIRSAIDLAPVCYAASLIRFGPVAASLVEEAVRPQIKNETSKARDTIRTMLEPGPLEEYPSQYNLDELKSKKKSREILEGLVTQRDRAVFLAAQDNFSGGWLKALPSPQLGTMLDPNHFRMMSALRIGAPVCEPFQCKLCGETVDSSGLHPLSCPKSAGRSSRHAELNKVIIRSLRKAGIPSTLEPRGLVPAGEERPDGVTIALWSHGKSLAWDATVSCTTAASYLHHSSVEPGWVAKHAEARKRVKYTGLETRYTFVPIAMETLGPISKGTEAFLKDLSKRIQEVTGDQREGQFLRQALSLAVCRGNAASILGAME

SEQ ID NO: 3438 - protein, 986 aa, Dermanyssus gallinae
MTSQPSHPDVIVTDEDSRLNSPLSQTPYTCTHCGRALRTSQGLRAHITRLHPAASLRNQHLRPFQPQPTDSSNTPSPLHTSSIDSSSVNPATLVQTLAQARRDLKIARVIPRGAREACAVAFAKALNNFNSKLDVQSWNSLMSAPSLMLALPHRKNHEATLTRIIKDNASMLEQKTLDGLLQTVRKAPSNRIDSPVGDRESVSMAERKLAEGDVRSAARVLLSSDTFAPRNSCTERELRNKHPPPPAACQERLETFEQPTVGICESVENSAILEAIRSFPVASGAGLDGLRPRHLRDMLDQTVPSSECLLNDLSIFLGRVLNGTLPKFCLPLFYGANLTALKKKDNSIRPIACGLTLRRIAAKIAMARNKKAILTAILPHQVGVAVRGGAEALVHATRALLKTEDQVKVLVKLDFCNAFNTLRRDKILDAVMKKSPELLPMVWQSYRDPSLLTWGTTSTLHSEAGIQQGDPLGPALFSLGISDLVSQLQSPFNVWYLDDATLAGPASIIATDLRRVLQFEEDGGLALNASKCEITAVGGSLQEREEAIQEITEILPDITRVEVNNLEVLGAPVKQDGISHTLSRKKEALTKIRPRLTRLHPQAALCIWRYSLGSSKFNYTLRSCPAIVCSKELTAYDDVSRDILSEVLNVNLEDNTWQRASLPIREGGLGIRSAIDLAPVCYAASLIRFGPVAASLVEEAVRPQIKNETSKARDTIRTMLDPGPLEEYPSQYNLDELKSKKKSREILEGLVTQRDRAVFLAAQDNFSGGWLKALPSPQLGTMLDPNHFRMMSALRIGAPVCEPFQCKLCGETVDSSGLHPLSCPKSAGRSSRHAELNKVIIRSLRKAGIPSTLEPRGLVPVGEERPDGVTIALWSHGKSLAWDATVSCTTAASYLHHSSVEPGWVAKHAEARKRVKYTGLETRYTFVPIAMETLGPISKGTEAFLKDLSKRIQEVTGDQREGQFLRQALSLAVCRGNAASILGAME

SEQ ID NO: 3439 - protein, 950 aa, Dermanyssus gallinae
MRTSQGLRAHITRLHPPASLRNQHLRPFQPQPTDSSKTPSPHHTSPMDSSLANPETLAQTLAQARQDLKIARVIPRGAREACAAAFANALNNFNSKLDLEGWNSLMSAPSLMLALPHRKNHEATLTRIIKDNVSVLEQKSLESLLQTVPKAPINRLDGLAGDRQSVSIAERKLAEGDVRSAARALLSSDTFAPRNSRTERELRNKHPPPPAVCQERLATFEQPTVGYCESVENSAILEAIRSFPVASGAGLDGLRPRHLRDMLDQTVPSSERLLNYLSIFLGRVLNGTLPKFCLPVFYGANLTALKKKDNSIRPIACGLTLRRIAAKIAMARNKKTILTAILPHQVGVAVKGGAEALVHATRALLETEDQVKVLVKLDFCNAFNTLRRDRILDAVMEKSPKLLPMVWQSYRDPSLLTWGTTSTLRSEAGIQQGDPLGPALFSIGISDLVSQLQSPFNVWYLDDATLAGPASIIATDLRRVLQFEEDGALTLNAAKCEITAVGGSPQEREEAIHKITEILPGITRVELNNLEVLGPPVKQDGISHTLSEKKEALTKIRPRLTRLHPQAALCIWRYSLGSSRFNYILRACPALTCPEELTAYDDVSRDILSEVLNVNLEENTWQRASLPMREGGLGIRSATDLAPVCYAASLVQFGPVAASLVEEAVPPQIRYETSKARDTIRTMLDPGPLEEYPSQYNLDELKSKKKSREILDELVSRRDRAVFLAAQDNFSGGWLKALPSPQLGTMLDPNSFRMMSALRIGASVCEPFQCKLCGEMVDSSGLHPLSCPKSAGRSSRHAELNGVIIRSLRKAGIPSTLEPRGLVSAGEERPDGVTIALWSHGKSLVWDATVSCTTAASYLHHSSVEPGWVAKHADARKRFKYAGLETRYIFVPIAMETLRPISKGTEAFLKDLSKRIQEVTNDRREGQFLRQALSLAVCRGHAASILGAME

SEQ ID NO: 3440 - protein, 986 aa, Dermanyssus gallinae
MTSQPSHPDGFITDEDSRLNSPLSQTPYTCTHCGRALRTSQGLRAHITRLHPPASLRNQHLRPFQPQPTDSSKTPSPHHTSSMDSSLANPETLAQTLAQARQDLKIARVIPRGAREACAAAFAKALNNFNSKLDLESWNSLMSAPSLMLALPHRKNHEATLTRIIKDNVSVLEQKSLESLLQTVPKAPINRLDGLAGDRQSVSIAERKLAEGDVRSAARALLSSDTFAPRNSRTERELRNKHPPPPAVCQERLATFEQPTVGYCESVENSAILEAIRSFPVASGAGLDGLRPRHLRDMLDQTVPSSERLLNYLSIFLGRVLNGTLPKFCLPVFYGANLTALKKKDNSIRPIACGLTLRRIAAKIAMARNKKTILTAILPHQVGVAVKGGAEALVHATRALLETEDQVKVLVKLDFCNAFNTLRRDRILDAVIEKSPELLPMVWQSYRDPSLLTWGTTSTLRSEAGIQQGDPLGPALFSLGISDLVSQLQSPFNVWYLDDATLAGPASIIATDLRRVLQFEEDGGLTLNAAKCEITAVGGSPQEREEAIHKITEILPGITRVELNNLEVLGAPVKQDGISHTLSEKKEALTKIRPRLTRLHPQAALCIWRYSLGSSRFNYILRACPALTCPEELTAYDDVSRDILSEVLNVNLEENTWQRASLPIREGGLGIRSATDLAPVCYAASLVQFGPVAASLVEEAVRPQIRYETSKARDTIRTMLDPGPLEEYPSQYNLDELKSKKKSREILDELVSRRDRAVFLAAQDNFSGGWLKALPSPQLGTMLDPNSFRMMSALRIGASVCEPFQCKLCGEMVDSSGLHPLSCPKSAGRSSRHAELNGVIIRSLRKAGIPSTLEPRGLVSAGEERPDGVTIALWSHGKSLAWDATVSCTTAASYLHHSSVEPGWVAKHADARKRFKYAGLETRYIFVPIAMETLGPISKGTEAFLKDLSKRIQEVTNDRREGQFLRQALSLAVCRGNAASILGAME

SEQ ID NO: 3441 - protein, 986 aa, Dermanyssus gallinae
MTSQPSHPDVIVTDEDSRLNSPLSQTPYTCTHCGRALRTSQGLRAHITRLHPAASLRNQHLRPFQPQPTDSSNTPSPLHTSSIDSSSVNPATLVQTLAQARRDLKIARVIPRGAREACAVAFAKALNNFNSKLDVQSWNSLMSAPSLMLALPHRKYHEATLTRIIKDNASMLEQKTLEGLLQTVRKAPSNRIDSPVGDRESVSMAERKLAEGDVRSAARVLLSSDTFAPRNSCTERELRNKHPPPPAACQERLETFEQPTVGICESVENSAILEAIRSFPVASGAGLDGLRPRHLRDMLDQTVPSSECLLNDLSIFLGRVLNGTLPKFCLPLFYGANLTALKKKDNSIRPIACGLTLRRIAAKIAMARNKKAILTAILPHQVGVAVRGGAEALVHATRALLKTEDQVKVLVKLDFCNAFNTLRRDKILDAVMKKSPELLPMVWQSYRDPSLLTWGTTSTLHSEAGIQQGDPLGPALFSLGISDLVSQLQSPFNVWYLDDATLAGPTSIIATDLRRVLQFEEDGGLALNASKCEITAVGGSLQEREEAIQEITEILPDITRVEVNNLEVLGAPVKQDGISHTLSRKKEALTKIRPRLTRLHPQAALCIWRYSLGSSKFNYTLRSCPAIVCSKELTAYDDVSRDILSEVLNVNLEDNTWQRASLPIREGGLGIRSAIDLAPVCYAASLIRFGPVAASLVEEAVRPQIKNETSKARDTIRTMLDPGPLEEYPSQYNLDELKSKKKSREILEGLVTQRDRAVFLAAQDNFSGGWLKALPSPQLGTMLDPNHFRMMSALRIGAPVCEPFQCKLCGETVDSSGLHPLSCPKSAGRSSRHAELNKVIIRSLRKAGIPSTLEPRGLVPAGEERPDGVTIALWSHGKSLAWDATVSCTTAASYLHHSSVEPGWVAKHAEARKRVKYTGLETRYTFVPIAMETLGPISKGTEAFLKDLSKRIQEVTGDQREGQFLRQALSLAVCRGNAASILGAME

SEQ ID NO: 3442 - protein, 986 aa, Dermanyssus gallinae
MTSQPSHPDGFITDEDSRLNSPLSQTPYTCTHCGRALRTSQGLRAHITRLHPPASLRNQHLRPFQPQPTDSSKTPSPHHTSPRDSSLANPETLAQTLAQARRDLKIARVIPRGAREACAAAFAKALNNFNSKLDLESWNSLMSAPSLMLALPHRKNHEATLTRIIKDNVSVLEQKSLESLLQTVPKTPINRLDGLAGDRQSVSIAERKLAEGDVRSAARALLSSDTFAPRNSRTERELRNKHPPPPAVCQERLATFEQPTVGYCESVENSAILEAICSFPVASGAGLDGLRPRHLRDMLDQTVPSSECLLNDLSIFLGRVLNGTLPKFCLPVFYGANLTALKKKDNSIRPIACGLTLRRIAAKIAMARNKKTSLTAILPHQVGVAVKGGAEALVHATRALLETEDQVKVLVKLDFCNAFNTLRRDRILDAVMKKSPELLPMVWQSYRDPSLLTWGTTSTLRSEAGIQQGDPLGPALFSLGISDLVSQLQSPFNVWYLDDATLAGPACIIATDLRRVLQFEEDGGLTLNAAKCEITAVGGSLQEREEAIQKITEILPGITRVELNNLEDLGAPIKQDGISHTLSEKKEALTKIRPRLTRLHPQAALCIWRYSLGSSRFNYILRACPALTCPEELTAYDDVSRDILSEVLNVNLEENTWQRASLPIREGGLGIRNATDLAPVCYAASLVQFGPVAASLVEEAVRPQIRYETSKARDSIRTMLDPGPLEEYPSQYNLDKLKSKKKSREILDELVSRRDRAVFLAAQDNFSGGWLKAVPSPQLGTMLDPNSFRMMSALRIGASVCEPFQCKLCGEIVDSSGLHPLSCPKSAGRSSRHAELNGVIIRSLRKAGIPSTLEPRGLVSAGEERPDGVTIALWSYGKSLAWDATVSCTTAASYLHHSSVESGWVAKHADARKRFKYAGLETRYIFVPIAMETLGPISKGTEAFLKDLSKRIQEVTNDRREGQFLRQALSLAVCRGNAASILGAME

SEQ ID NO: 3443 - protein, 845 aa, Dermanyssus gallinae
MYAPSLMLALPHRKNHEATLTRIIKDNVSVLEQKSLESLLQTVTKATINRLDGLAGDRQSVSIAERKLAEGDVRSAARALLSSDTFAPRNSRTERELRNKHPPPPAVCQERLATFEQPTVGYCESVENSAILEAIRSFPVASGAGLDGLRPRHLRDMLDQTVPSSERLLNYLSIFLGRVLNGTLPKFCLPVFYGANLTALKKKDNSIRPIACGLTLRRIAAKIAMARNKKTILTAILPHQVGVAVKGGAEALVHATRALLETEDQVKVLVKLDFCNAFNTLRRDRILDAVMEKSPELLPMVWQSYRDPSLLTWGTTSTLRSEAGIQQGDPLGPALFSLGISDLVSQLQSPFNVWYLDDATLAGPASIIATDIRRVLQFEEDGGLTLNAAKCEITAVGGSPQEREEAIHKITEILPGITRVELNNLEVLGAPVKQDGISHTLSEKKEALTKIRPRLTRLHPQAALCIWRYSLGSSRFNYILRACPALTCPEELTAYDDVSRDILSEVLNVNLEENTWQRASLPIREGGLGIRSATDLTPVCYAASLVQFGPVAASLVEEAVRPQIRYETSKARDTIRTMLDPGPLEEYPSQYNLDELKSKKKSREILDELVSRRDRAVFLAAQDNFSGGWLKALPSPQLGTMLDPNSFRMMSALRIGASVCEPFQCKLCGEMVDSSGLHPLSCPKSAGRSSRHAELNGVIIRSLRKAGIPSTLEPRGLVSAGEERPDGVTIALWSHGKSLAWDATVSCTTAASYLHHSSVEPGWVAKHADARKRFKYAGLETRYIFVPIAMETLGPISKGTEAFLKDLSKRIQEVTNDRREGQFLRQALSLAVCRGNAASILGAME

SEQ ID NO: 3444 - protein, 848 aa, Dermanyssus gallinae
MDSSLANPETLAQTLAQARQDLKIARVIPRGAREACAAAFAKALNNFNSKLDLESWNSLMSAPSLMLALPHRKNHEVTLTRIIKDNVSVLEQKSLESLLQTVPKAPINRLDGLAGDRQSVSIAERKLAEGDVRSAARALLSSDTFAPRNSRTERELRNKHPPPPAVCQERLATFEQPTVRYCESVENSAILEAIRSFPVASGAGLDGLRPRHLRDMLDQTVPSSERLLNYLSIFLGRVLNGTLPKFCLPVFYGANLTALKKKDISIRPIACGLTLRRIAAKIAMARNKKTILTAILPHQVGVAVKGGAEALVHATRALLETEDQVKVLVKLDFCNAFNTLRRDRILDAVMEKSPELLPMVWQSYRDPSLLTWGTTSTLRSEAGIQQGDPLGPALFSLGISDLVSQLQSPFNVWYLDDATLAGPASIIATDLRRVLQFEEDGGLTLNAAKCEITAVGGSPQEREEAIHKITEILPGITRVELNNLEVLGAPVKQDGISHTLSEKKEALTKIRPRLTRLHPQAALCIWRYSLGSSRFNYILRACPALTCPEELTAYDDVSRDILSEVLNVNLEENTWQRASLPIREGGLGIRSATELAPVCYAASLVQFGPVAASLVEEAVRLQIRYETSKARDTIRTMLDPDPLEEYPSQYTLDELKSKKTSREILDELVSRRDRAVFLAAQDNFSGGWLKALPSPLLGTMLDPNSFRMMSALRIGASVCEPFQCKLCGEMVDSSGLHPLSCPKSAGRSSRHAELNGVIIRSLRKAGIPSTLEPRGLVSAGEERPDGVTIALWSHGKSLAWDATVSCTTAASYLHHSSVEPGWVAKHAEPENGLNMLDWRQDIFLCLSP

SEQ ID NO: 3445 - protein, 986 aa, Dermanyssus gallinae
MTSQPSHPDGFITDEDSRLNSPLSQTPYTCTHCGRALRTSQGLRAHITRLHPPASLRNQHLRPFQPQPTDSSKTPSPHHTSPMDSSLANPETLAQTLAQARQDLKIARVIPRGAREACAAAFAKALNNFNSKLDLESWNSLMSAPSLMLALPHRKNHEATLTRIIKDNVSVLEQKSLESLLQTVPKAPINRLDGLAGDRQSVSIAERKLAEGDVRSAARALLSSDTFAPRNSRTERELRNKHPPPPAVCQERLATFEQPTVGYCESVENSAILEAIRSFPVASGAGLDGLRPRHLRDMLDQTVPSSERLLNYLSIFLGRVLNGTLPKFCLPVFYGANLTALKKKDNSIRPIACGLTLRRIAAKIAMARNKKTILTAILPHQVGVAVKGGAEALVHATRALLETADQVKVLVKLDFCNAFNTLRRDRILDAVMGKSPELLPMVWQSYRDSSLLTWGTTSTLRSEAGIQQGYPLGPALFSLGISDLVSQLQSPFNVWYLDDATLAGPASIIAADLRRVLQFEEDGGLTLNAAKCEITAVGGSPQEREEAIHKITEILPGITRVELNNLEVLGAPVKQDGISHTLSEKKEALTKIRPRLTRLHPQAALCIWRYSLGSSRFNYILRACPALTCPEELTAYDDVSRDILSEVLNVNLEENTWQRASLPIREGGLGIRSATDLAPVCYAASLVQFGPVAASLVEEAVRPQIRYETSKARDTIRTMLDPGPLEEYPSQYNLDELKSKKKSREILDELASRRDRAVFLAAQDNFSGGWLKALPSPQLGTMLDPNSFRMMSALRIGASVCEPFQCKLCGEMVDSSGLHPLSCPKSAGRSSRHAELNGVIIRSLRKAGIPSTLEPRGLVSAGEERPDGVTIALWSHGKSLAWDATVSCTTAASYLHHSSVEPGWVAKHADARKRFKYAGLETRYIFVPIAMETLGPISKGTEAFLKDLSKRIQEVTNDRREGQFLRQALSLAVCRGNAASILGAME

SEQ ID NO: 3446 - protein, 986 aa, Dermanyssus gallinae
MTSQPSHPDVIVTDEDSRLNSPLSQTPYTCTHCGRALRTSQGLRAHITRLHPAASLRNQHLRPFQPQPTDSSNTPSPLHTSSIDSSSVNPATLVQTLAQARRDLKIARVIPRGAREACAVAFAKALNNFNSKLDVQSWNSLMSAPSLMLALPHRKNHEATLTRIIKDNASMLEQKTLEGLLQTVRKAPSNRIDSPVGDRESVSMAERKLAEGDVRSAARVLLSSDTFAPRNSCTERELRNKHPPPPAACQERLETFEQPTVGICESVENSAILEAIRSFPVASGAGLDGLRPRHLRDMLDQTVPSSECLLNDLSIFLGRVLNGTLPKFCLPLFYGANLTALKKKDNSIRPIACGLTLRRIAAKIAMARNKKAILTAILPHQVGVAVRGGAEALVHATRALLKTEDQVKVLVKLDFCNAFNTLRRDKILDAVMKKSPELLPMVWQSYRDPSLLTWGTTSTLHSEAGIQQGDPLGPALFSLGISDLVSQLQSPFNVWYLDDATLAGPASIIATDLRRVLQFEEDGGLALNASKCEITAVGGSLQEREEAIQEITEILPDITRVEVNNLEVLGAPVKQDGISHTLSRKKEALTKIRPRLTRLHPQAALCIWRYSLGSSKFNYTLRSCPAIVCSKELTAYDDVSRDILSEVLNVNLEDNTWQRASLPIREGGLGIRSAIDLAPVCYAASLIRFGPVAASLVEEAVRPQIKNETSKARDTIRTMLDPGPLEEYPSQYNLDELKSKKKSREILEGLVTQRDRAVFLAAQDNFSGGWLKAFPSPQLGTMLDPNHFRMMSALRIGAPVCEPFQCKLCGETVDSSGLHPLSCPKSAGRSSRHAELNKVIIRSLRKAGIPSTLEPRGLVPAGEERPDGVTIALWSHGKSLAWDATVSCTTAASYLHHSSVEPGWVAKHAEARKRVKYTGLETRYTFVPIAMETLGPISKGTEAFLKDLSKRIQEVTGDQREGQFLRQALSLAVCRGNAASILGAME

SEQ ID NO: 3447 - protein, 986 aa, Dermanyssus gallinae
MTSQPSHPDGFITDEDSRLNSPLSQTPYTCTHCGRALRTSQGLRAHITRLHPPASLRNQHLRPFQPQPTDSSKTPSPHHTSPMDSSLANPETLAQTLAQARQDLKIARVIPRGAREACAAAFAKALNNFNSKLDLESWNSLMSAPSLMLALPHRKNHEATLTRIIKDNVSVLEQKSLESLLQTVPKAPINRLDGLAGDRQSVSIAERKLAEGDVRSAARALLSSDTFAPRNSRTERELRNKHPPPPAVCQERLATFEQPTVGYCESVENSAILEAIRSFPVASGAGLDGLRPRHLRDMLDQTVPSSERLLNYLSIFLGRVLNGTLPKFCLPVFYGANLTALKKKDNSIRPIACGLTLRRIAAKIAMARNKKTILTAILPHQVGVAVKGGAEALVHATRALLETEDQVKVLVKLDFCNAFNTLRRDRILDAVMEKSPELLPMVWQSYRDPSLLTWGTTSTLRSEAGIQQGDPLGPALFSLGISDLVSQLQSPFNVWYLDDATLAGPASIIATDLRRVLQFEEDGGLTLNAAKCEITAVGGSPQEREEAIHKITEILPGITRVELNNLEVLGAPVKQDGISHTLSEKKEALTKIRPRLTRLHPQAALCIWRYSLGSSRFNYILRACPALTCPEELTAYDDVSRDILSEVLNVNLEENTWQRASLPIREGGLGIRSATDLAPVCYAASLVQFGPVAASLVEEAVRPQIRYETSKARDTIRTMLDPGPLEEYPSQYNLDELKSKKKSREILDELVSRRDRAVFLAAQDNFSGGWLKALPSPQLGTMLDPNSFRMMSALRIGASVCEPFQCKLCGEMVDSSGLHPLSCPKSAGRSSRHAELNGVIIRSLRKAGIPSTLEPRGLVSAGEERPDGVTIALWSHGKSLAWDATVSCTTAASYLHHSSVEPGWVAKHADARKRFKYAGLETRYIFVPIAMETLGPISKGTEAFLKDLSKRIQEVTNDRREGQFLRQALSLAVCRGNAASILGAME

SEQ ID NO: 3448 - protein, 986 aa, Dermanyssus gallinae
MTSQPSHPDGFITDEDSRLNSPLSQTPYTCTHCGRALRTSQGLRAHITRLHPPASLRNQHLRPFQPQPTESSKTPSPHHTSPMNSSLANPETLAQTLAQARQDLKIARVIPRGAREACAAAFAKALNNLNSKLDLESWNSLMSAPSLMLALPHRKNHEATLTRIIKDNVSVLEQKSLESLLQTVPKAPINRLDGVAGDRQSVSIAERKLAEGDVRSAARALLSSDTFAPRNSRTERELRNKHPPPPAVCQERLATFEQPTFGYCESVENSAILEAIRSFPVASGAGLDGLRPRHLRDMLDQTVPSSERLLNYLSIFLGRVLNGTLPKFCLPVFYGANLTALKKKDNSIRPIACGLTLRRIAAKIAMARNKKTILTAILPHQVGVAVKGGAEALVHATRALLETEDQVKVLVKLDFCNAFNTLRRDRILDAVMEKSPELLPMVWQSYRDPSLLTWGTTSTLRSEAGIQQGDPLGPALFSLGISDLVSQLQSPFNVWYLDDATLAGPASIIATDLRRVLQFEEDGGLTLNAAKCEITAVGGSPQEREEAIYKITEILPGITRVELNNLEVLGAPVKQDGISHTLSEKKEALTKIRPRLTRLHPQAALCIWRYSLGSSRFNYILRACPALTCPEELTAYDDVSRDILSEVLNVNLEENTWQRASLPIREGGLGIRSATDLAPVCYAASLVQFGPVAASLVEEAVRPQIRYETSKARDTIRTMLDPGPLEEYPSQYNLDELKSKKKSREILDELVSRRDRAVFLAAQDNFSGGWLKALPSPQLGTMLDPNSFRMMSALRIGASVCEPFQCKLCGEMVDSSGLHPLSCPKSAGRSSRHAELNGVIIRSLRKAGIPSTLEPRGLVFAGEERPDGVTIALWSHGKSLAWDATVSCTTAASYLHHSSVEPGWVAKHADARKRFKYAGLETRYIFVPIAMETLGPISKGTEAFLKDLSKRIQEVTNDRREGQFLRQALSLAVCRGNAASILGAME

SEQ ID NO: 3449 - protein, 986 aa, Dermanyssus gallinae
MTSQPSHPDVIVTDEDSRLNSPLSQTPYTCTHCGRALRTSQGLRAHITRLHPAASLRNQHLRPFQPQPTDSSNTPSPLHTSSIDSSSVNPATLVQTLAQARRDLKIARVIPRGAREACAVAFAKALNNFNSKLDVQSWNSLMSAPSLMLALPHRKNHEATLTRIIKDNASMLEQKTLEGLLQTVRKAPSNRIDSPVGDRESVSMAERKLAEGDVRSAARVLLSSDTFAPRNSCTERELRNKHPPPPAACQERLETFEQPTVGICESVENSAILEAIRSFPVASGAGLDGLRPRHLRDMLDQTVPSSECLLNDLSIFLGRVLNGTLPKFCLPLFYGANLTALKKKDNSIRPIACGLTLRRIAAKIAMARNKKAILTAILPHQVGVAVRGGAEALVHATRALLKTEDQVKVLVKLDFCNAFNTLRRDKILDAVMKKSPELLPMVWQSYRDPSLLTWGTTSTLHSEAGIQQGDPLGPALFSLGISDLVSQLQSPFNVWYLDDATLAGPASIIATDLRRVLQFEEDGGLALNASKCEITAVGGSLQEREEAIQEITEILPDITRVEVNNLEVLGAPVKQDGISHTLSRKKEALTKIRPRLTRLHPQAALCIWRYSLGSSKFNYTLRSCPAIMCSKELTAYDDVSRDILSEVLNVNLEDNTWQRASLPIREGGLGIRSAIDLAPVCYAASLIRFGPVAASLVEEAVRPQIKNETSKARDTIRTMLDPGPLEEYPSQYNLDELKSKKKSREILEGLVTQRDRAVFLAAQDNFSGGWLKALPSPQLGTMLDPNHFRMMSALRIGAPVCEPFQCKLCGETVDSSGLHPLSCPKSAGRSSRHAELNKVIIRSLRKAGIPSTLEPRGLVPAGEERPDGVTIALWSHGKSLAWDATVSCTTAASYLHHSSVEPGWVAKHAEARKRVKYTGLETRYTFVPIAMETLGPISKGTEAFLKDLSKRIQEVTGDQREGQFLRQALSLAVCRGNAASILGAME

SEQ ID NO: 3450 - protein, 986 aa, Dermanyssus gallinae
MTSQPSHPDGFITDEDSRLNSPLSQTPYTCTHCGRALRTSQGLRAHITRLHPPASLRNQHLRPFQPQPTDSSKTPSPHHTSPMDSSLANPETLAQTSAQARQDLKIARVIPRGAREACAAAFAKALNNFNSKLDLESWNSLMSAPSLMLALPHRKNHEATLTRIIKDNVSVLEQKSLESLLQTVPKAPINRLDGLAGDRQSVSIAERKLAEGDVRSAARALLSSDTFAPRNSRTERELRNKHPPPPAVCQERLATFEQPTVGYCESVENSAILEAIRSFPVASGAGLDGLRPRHLRDMLDQTVPSSERLLNYLSIFLGRVLNGTLPKFCLPVFYGANLTALKKKDNSIRPIACGLTLRRIAAKIAMARNKKTILTAILPHQVGVAVKGGAEALVHATRALLETADQVKVLVKLDFCNAFNTLRRDRILDAVMEKSPELLPMVWQSYRDPSLLTWGTTSTLRSEAGIQQGDPLGPALFSLGISDLVSQLQSPSNVWYLDDATLAGPASIIATDLRRVLQFEEHGGLTLNAAKCEITAVGGSPQEREEAIHKITEILPGITRVELNNLEVLGAPVKQDGISHTLSEKKEALTKIRRRLTRLHPQAALCIWRYSLGSSRFKYILRACPALTCPEELTAYDDVSRDILSEVLNVNLEENTWQRASLPICEGGLGIRSATDLAPVCYAASLVQFGPVAASLVEEAVRPQIRYETSKARDTIRTMLDPGPLEEYPSQYNLDELKSKKKSREIVDELASRRDRAVFLAAQDNFSGGWLKALPSPQLGTMLDPNSFRMMSALRIGASVCEPFQCKLCGEMVDSSGLHPLSCPKSAGRSSRHAELNGVIIRSLRKAGIPSTLEPRGLVSAGEERPDGVTIALWSHGKSLAWDATVSCTTAASYLHHSSVEPGWVAKHADARKRFKYAGLETRYIFVPIAMETLGPISKGTEAFLKDLSKRIQEVTNDRREGQFLRQALSLAVCRGNAASILGAME

SEQ ID NO: 3451 - protein, 986 aa, Dermanyssus gallinae
MTSQPSHPDGFITDEDSRLNSPLSQTPYTCTHCGRALRTSQGLRAHITRLHPPASQRNQHLRPFQPQPTDSSKTPSPHHTSPMDSSLANPETLAQTLAQARQDLKIARVIPRGAREACAAAFAKALNNFNSKLDLESWNSLMSAPSLMLALPHRKNHEATLTRIIKDNVSVLEQKSLESLLQTVPKAPINRLDGLAGDRQSVSIAERKLAEGDVRSAARALLSSDTFAPRNSRTERELRNKHPPPPAVCQERLATFEQPTVGYCESVENSAILEAIRSFPVASGAGLDGLRPRHLRDMLDQTVPSSERLLNYLSIFLGRVLNGTLPKFCLPVFYGANLTALKKKDNSIRPIACGLTLRRIAAKIAMARNKKTILTAILPHQVGVAVKGGAEALVHATRALLETEDQLKVLVKLDFCNAFNTLRRDRILDAVMEKSPELLPMVWQSYRDPSLLTWGTTSTLRSEAGIQQGDPLGPALFSLGISDLVSQLQSPFNVWYLDDATLAGPASIIATDLRRVLQFEEDGGLTLNAAKCEITAVGGSPQEREEAIHKITEILPGITRVELNNLEVLGAPVKQDGISHTLSEKKEALTKIRPRLTRLHPQAALCIWRYSLGSSRFNYILRACPALTCPEELTAYDDVSRDILSEVLNVNLEENTWQRASLPIREGGLGIRSATDLAPVCYAASLVQFGPVAASLVEEAVRPQIRYETSKARDTIRTMLDPGPLEEYPSQYNLDELKSKKKSREILDELVSRRDRAVFLAAQDNFSGGWLKALPSPQLGTMLDPNSFRMMSALRIGASVCEPFQCKLCGEMVDSSGLHPLSCPKSAGRSSRHAELNGVIIRSLRKAGIPSTLEPRGLVSAGEERPDGVTIALWSHGKSLAWDATVSCTTAASYLHHSSVEPGWVAKHADARKRFKYAGLETRYIFVPIAMETLGPISKGTEAFLKDLSKRIQEVTNDRREGQFLRQALSLAVCRGNAASILGAME

SEQ ID NO: 3452 - protein, 986 aa, Dermanyssus gallinae
MTSQPSHPDVIVTDEDSRLNSPLSQTPYTCTHCGRALRTSQGLRAHITRLHPAASLRNQHLRPFSPQPTDSSNTPSPLHTSSIDSSSVNPATLVQTLAQARRDLKIARVIPRGAREACAVAFAKALNNFNSKLDVQSWNSLMSAPSLMLALPHRKNHEATLTRIIKDNASMLEQKTLEGLLQTVRKAPSNRIDSPVGDRESVSMAERKLAEGDVRSAARVLLSSDTFAPRNSCTERELRNKHPPPPAACQERLETFEQPTVGICESVENSAILEAIRSFPVASGAGLDGLRPRHLRDMLDQTVPSSECLLNDLSIFLGRVLNGTLPKFCLPLFYGANLTALKKKDNSIRPIACGLTLRRIAAKIAMARNKKAILTAILPHQVGVAVRGGAEALVHATRALLKTEDQVKVLVKLDFCNAFNTLRRDRILDAVMKKSPELLPMVWQSYRDPSLLTWGTTSTLHSEAGIQQGDPLGPALFSLGISDLVSQLQSPFNVWYLDDATLAGPASIIATDLRRVLQFEEDGGLALNASKCEITAVGGSLQEREEAIQEITEILPDITRVEVNNLEVLGAPVKQDGISHTLSRKKEALTKIRPRLTRLHPQAALCIWRYSLGSSKFNYTLRSCPAIVCSKELTAYDDVSRDILSEVLNVNLEDNTWQRASLPIREGGLGIRSAIDLAPVCYAASLIRFGPVAASLVEEAVRPQIKNETSKARDTIRTMLDPGPLEEYPSQYNLDELKSKKKSREILEGLVTQRDRAVFLAAQDNFSGGWLKALPSPQLGTMLDPNHFRMMSALRIGAPVCEPFQCKLCGETVDSSGLHPLSCPKSAGRSSRHAELNKVIIRSLRKAGIPSTLEPRGLVPAGEERPDGVTIALWSHGKSLAWDATVSCTTAASYLHHSSVEPGWVAKHAEARKRVKYTGLETRYTFVPIAMETLGPISKGTEAFLKDLSKRIQEVTGDQREGQFLRQALSLAVCRGNAASILGAME

SEQ ID NO: 3453 - protein, 879 aa, Dermanyssus gallinae
MDSSLANPETLAQTLAQARQDLKIARVIPRGAREACAAAFAKALNNFNSKLDLESWNSLMSAPSLMLALPHRKHHEATLTRIIKDNVSVLEQKSLESLLQTVPKAPINRLDGLAGDRQSVSIAERKLAEGDVRSAARALLSSDTFAPRNSRTERELRNKHPPPPAVCQERLATFEQPTVGYCESVENSAILEAIRSFPVASGAGLDGLRPRHLRDMLDQTVPSSERLLNYLSIFLGRVLNGTLPKFCLPVFYGANLTALKKKDNSIRPIACGLTLRRIAAKIAMARNKKTVLTAILPHQVGVAVKGGAEALVHATRALLETEDQVKVLVKLDFCNAINTLRRDRILDAVMEKSPELLPMVWQSYRDPSLLTWGTTSTLRSEAGIQQGDPLGPALFSLGISDLVSQLQSPFNVWYLYDATLAGPASIIATDLRRVLQFEEDGGLTLNAAKCEITAVGGSPQEREEAIHKITEILPGITRVELNNLEVLGAPVKQDGISHTLSEKKEALTKIRLRLTRLHPQAALCIWRYSLGSSRFNYILRACPALTCPEELTAYDDVSRDILSEVLNENTWQRASLPIREGGLGIRSATDLAPVRPQIRYETSKARDTIRTMLDPGPLEEYPSQYNLDELKSKKKSREILDELVSRRDRAVFLAAQDNFSGGWLKALPSPQLGTMLDPNSFRMMSALRIGASVCEPFQCKLCGEMVDSSGLHPLSCPKSAGRSSRHAELNGVIIRSLRKAGIPSTLEPRGLVSAGEERPDGVTIALWSHGKSLAWDATVSCTTAASYLHHSSVEPGWVAKHADARKRFKYAGLETRYIFVPIAMETLGPISKGTEAFLKDLSKRIQEVTNDRREGQFLRQALSLAVCRGNAASILGAME

SEQ ID NO: 3454 - protein, 979 aa, Dermanyssus gallinae
MTSQPSHPDGFITDEDSRLNSPLSQTPYTCTHCGRALRTSQGLRAHITRLHPPASLRNQHLRPFQPQPTDSSKTSSPHHISPMDTSLANPETLAQTLAQARQDLKIARVIPRGAREACAAAFAKALNNFNSKLDLESWNSLMSAPSLMLALPHRKNHEATLTRIIKDNVSVLEQKSLESLLQTVPKAPINRLDGLAGDRQSVSIAERKLAEGDVRSAARALLSSDTFAPRNSRTERELRNKHPPPPAVCQERLATFEQPTVGYCKSVENSAILEAIRSFPVASGAGLDGLRPRHLRDMLDQTVPSSERLLNYLSIFLGRVLNGTLPKFCLPVFYGANLTALKKKDNSIRPIACGLTLRRIAAKIAMARNKKTILTAILPHQVGVAVKGGAEALVHATRALLETEDQVKVLVKLDFCNAFNTLRRDRILDAVMEKSPELLPMVWQSYRDPSLLTWGTTSTLRSEAGIQQGDPLGPALFSLGISDLVSQLQSPFNVWYLDDATLAGPASIIATDLRRVLQFEEDGGLTLNAAKCEITAVGGSPQEREEAIHKITEILPGITRVELNNLEVLGAPVKQDGISHTLSEKKEALTKIRPRLTRLHPQAALCIWRYSLGSSRFNYILRACPALTCPEELTAYDDVSRDILSEVLNVNLEENTWQRASLPIREATDLAPVCYAASLVQFGPVAASLVEEAVRPQIRYETSEARDTIRTMLDPGPLEEYPSQYNLDELKSKKKSREILDELVSRRDRAVFLAAQDDFSGGWLKALPSPQLGTMLDPNSFRMMSALRIGASVCEPFQCKLFGEMVDSSGLHPLSCPKSAGRSSRHAELNGVIIRSLRKAGIPSTLEPRGLVSAGEERPDGVTIALWSHGKSLAWDATVSCTTAASYLHHSSVEPGWVAKHADARKRFKYAGLETRYIFVPIAMETLGPISKGTEAFLKDLSKRIQEVTNDRREGQFLRQALSLAVCRGNAASILGAME

SEQ ID NO: 3455 - protein, 853 aa, Morbakka virulenta
MKAQRLRRFDKRSKFFRQNKIFKTDAKKFYREIGKGKIEIKEPPKTEEIEKFWNSIWGNEKSFNENAAWIEREEERMSETNQQEWEPITVEELQAALGKSQKWKSPGKDKIPNFWLNRLTEVHTSLAKNLNEIMEHPENAPSWLTEGVTYLLPKTSETKNPKNYRPITCLTTTYKILTSVITERMYTFLDENSILPSEQKGCKRNSYGCKDQLLINRMILEDCRSKKKNLSTAWIDYKKAFDSVPHDWILKSLEMYKISPIIKNFLSNNMSKWQTRLFLSHENGTCESNLITIKRGIFQGDSLSPLLFCISLIPLSNELNNTNSGYKILDGIINHLFYMDDLKLYAKNDQQLEGLLTMVKEFSDDICMDFGLDKCAKASFVRGNLSRTSSIVIDTDTTIRELEQDETYKYLGVNEGNGINHATMKERIRKEYYRRVRLILKTELNSKNKVEAINSLAVPVVQYSYNIINWNLSDLKRMDTKTRKLLTANRMLHPKADVDRLYLPRSDGGRGLIQLELSYKTTTIGMKYYLETSNDWMLALVRRHENSKKLHSVIKESNKFQRELNVTPNVDEIDLPATKIAKKIKQEAKKNGQDKIADSWSQKSLHGQYVLRCQNADVDKFATHQWLRSSGLKAETEGFITAAQDQSLNTKNYQANVLKNGVDPKCRICDKAVETIDHLVSGCSVLASNEYTRRHDRVGQYLHWGICQHYGIKTEANWYEHKPPDVAEAQYVTILWDFPIHTDRTIQANRPDIIIKDRKNKTCLLIDMSVPCDKNVGTKEFEKVSKYKDLEIEVERMCRLKTSTVPVVIGALGMIKKGTQKHLDKIPGNHCLQEIQKIVLNSTAHILRKTLSM

SEQ ID NO: 3456 - protein, 1219 aa, Morbakka virulenta
MQTRNKTSCRIGRRAEYTGSRPPRELNQFGVEKYATESATSENDLQGNQNQEPPNPDPVVIPNRQRKHRNKWSTEDYKNVLRAYYTAQIRPNRNVTEQTYIYWREIVGNDFMPNINSNKLGNTRRDILNNKRLTDAQIEQVRREVRQHYAEDETNESGGENEIVNIDDMDFEPVVRIENLNGNDIENLIADARIPEEGVRVDGADEFVDQNREKINDAHEDILRELSQTEHKEMEDREPLPKVNMNSKSNAIIKLYNVALRKIIAGAEKDIDTINKIIYSTGQAITKKIGIKVKKRKANNVHKPPKWKVKIQKEIDALRAELSIVQEISNGTNIRTRKGRRIKRKYKIENEGSLDTTKEVIKQRIQMKAQRLRRFDKRSKFFRQNKIFKTDAKKFYREIGKGKIEIKEPPKTEEIEKFWNSIWGNEKSFNENAAWIEREEERMSETNQQEWEPITVEELQAALGKSQKWKSPGKDKIPNFWLNRLTEVHTSLAKNLNEIMEHPENAPSWLTEGVTYLLPKTSETKNPKNYRPITCLTTTYKILTSVITERMYTFLDENSILPSEQKGCKRNSYGCKDQLLINRMILEDCRSKKKNLSTAWIDYKKAFDSVPHDWILKSLEMYKISPIIKNFLSNNMSKWQTRLFLSHENGTCESNLITIKRGIFQGDSLSPLLFCISLIPLSNELNNTNSGYKILDGIINHLFYMDDLKLYAKNDQQLEGLLTMVKEFSDDICMDFGLDKCAKASFVRGNLSRTSSIVIDTDTTIRELEQDETYKYLGVNEGNGINHATMKERIRKEYYRRVRLILKTELNSKNKVEAINSLAVPVVQYSYNIINWNLSDLKRMDTKTRKLLTANRMLHPKADVDRLYLPRSDGGRGLIQLELSYKTTTIGMKYYLETSNDWMLALVRRHENSKKLHSVIKESNKFQRELNVTPNVDEIDLPATKIAKKIKQEAKKNGQDKIADSWSQKSLHGQYVLRCQNADVDKFATHQWLRSSGLKAETEGFITAAQDQSLNTKNYQANVLKNGVDPKCRICDKAVETIDHLVSGCSVLASNEYTRRHDRVGQYLHWGICQHYGIKTEANWYEHKPPDVAEAQYVTILWDFPIHTDRTIQANRPDIIIKDRKNKTCLLIDMSVPCDKNVGTKEFEKVSKYKDLEIEVERMCRLKTSTVPVVIGALGMIKKGTQKHLDKIPGNHCLQEIQKIVLNSTAHILRKTLSM

SEQ ID NO: 3457 - protein, 1219 aa, Morbakka virulenta
MQTRNKTSCRIGRRAEYTGSRPPRELNQFGVEKYATESATSENDLQGNQNQEPPNPDPVVIPNRQRKHRNKWSTEDYKNVLRAYYTAQIRPNRNVTEQTYIYWREIVGNDFMPNINSNKLGNTRRDILNNKRLTDAQIEQVRREVRQHYAEDETNESGGENEIVNIDDMDFEPVVRIENLNGNDIENLIADARIPEEGVRVDGADEFVDQNREKINDAHEDILRELSQTEHKEMEDREPLPKVNMNSKSNAIIKLYNVALRKIIAGAEKDIDTINKIIYSTGQAITKKIGIKVKKRKANNVHKPPKWKVKIQKEIDALRAELSIVQEISNGTNIRTRKGRRIKRKYKIENEGSLDTTKEVIKQRIQMKAQRLRRFDKRSKFFRQNKIFKTDAKKFYREIGKGKIEIKEPPKTEEIEKFWNSIWGNEKSFNENAAWIEREEERMSETNQQEWEPITVEELQAALGKSQKWKSPGKDKIPNFWLNRLTEVHTSLAKNLNEIMEHPENAPSWLTEGVTYLLPKTSETKNPKNYRPITCLTTTYKILTSVITERMYTFLDENSILPSEQKGCKRNSYGCKDQLLINRMILEDCRSKKKNLSTAWIDYKKAFDSVPHDWILKSLEMYKISPIIKNFLSNNMSKWQTRLFLSHENGTCESNLITIKRGIFQGDSLSPLLFCISLIPLSNELNNTNSGYKILDGIINHLFYMDDLKLYAKNDQQLEGLLTMVKEFSDDICMDFGLDKCAKASFVRGNLSRTSSIVIDTDTTIRELEQDETYKYLGVNEGNGINHATMKERIRKEYYRRVRLILKTELNSKNKVEAINSLAVPVVQYSYNIINWNLSDLKRMDTKTRKLLTANRMLHPKADVDRLYLPRSDGGRGLIQLELSYKTTTIGMKYYLETSNDWMLALVRRHENSKKLHSVIKESNKFQRELNVTPNVDEIDLPATKIAKKIKQEAKKNGQDKIADSWSQKSLHGQYVLRCQNADVDKFATHQWLRSSGLKAETEGFITAAQDQSLNTKNYQANVLKNGVDPKCRICDKAVETIDHLVSGCSVLASNEYTRRHDRVGQYLHWGICQHYGIKTEANWYEHKPPDVAEAQYVTILWDFPIHTDRTIQANRPDIIIKDRKNKTCLLIDMSVPCDKNVGTKEFEKVSKYKDLEIEVERMCRLKTSTVPVVIGALGMIKKGTQKHLDKIPGNHCLQEIQKIVLNSTSHILRKTLSM

SEQ ID NO: 3458 - protein, 1219 aa, Morbakka virulenta
MQTRNKTSCRIGRRAEYIGSRPPRELNQFGVEKYATESATSENDLQGNQNQEPPNPDPVVIPNRQRKHRNKWSTEDYKNVLRAYYTAQIRPNRNVTEQTYIYWREIVGNDFMPNINSNKLGNTRRDILNNKRLTDAQIEQVRREVRQHYAEDETNESGGENEIVNIDDMDFEPVVRIENLNGNDIENLIADARIPEEGVRVDGADEFVDQNREKINDAHEDILRELSQTEHKEMEDREPLPKVNMNSKSNAIIKLYNVALRKIIAGAEKDIDTINKIIYSTGQAITKKIGIKVKKRKANNVHKPPKWKVKIQKEIDALRAELSIVQEISNGTNIRTRKGRRIKRKYKIENEGSLDTTKEVIKQRIQMKAQRLRRFDKRSKFFRQNKIFKTDAKKFYREIGKGKIEIKEPPKTEEIEKFWNSIWGNEKSFNENAAWIEREEERMSETNQQEWEPITVEELQAALGKSQKWKSPGKDKIPNFWLNRLTEVHTSLAKNLNEIMEHPENAPSWLTEGVTYLLPKTSETKNPKNYRPITCLTTTYKILTSVITERMYTFLDENSILPSEQKGCKRNSYGCKDQLLINRMILEDCRSKKKNLSTAWIDYKKAFDSVPHDWILKSLEMYKISPIIKNFLSNNMSKWQTRLFLSHENGTCESNLITIKRGIFQGDSLSPLLFCISLIPLSNELNNTNSGYKILDGIINHLFYMDDLKLYAKNDQQLEGLLTMVKEFSDDICMDFGLDKCAKASFVRGNLSRTSSIVIDTDTTIRELEQDETYKYLGVNEGNGINHATMKERIRKEYYRRVRLILKTELNSKNKVEAINSLAVPVVQYSYNIINWNLSDLKRMDTKTRKLLTANRMLHPKADVDRLYLPRSDGGRGLIQLELSYKTTTIGMKYYLETSNDWMLALVRRHENSKKLHSVIKESNKFQRELNVTPNVDEIDLPATKIAKKIKQEAKKNGQDKIADSWSQKSLHGQYVLRCQNADVDKFATHQWLRSSGLKAETEGFITAAQDQSLNTKNYQANVLKNGVDPKCRICDKAVETIDHLVSGCSVLASNEYTRRHDRVGQYLHWGICQHYGIKTEANWYEHNPPDVAEAQYVTILWDFPIHTDRTIQANRPDIIIKDRKNKTCLLIDMSVPCDKNVGTKEFEKVSKYKDLEIEVERMCRLKTSTVPVVIGALGMIKKGTQKHLDKIPGNHCLQEIQKIVLNSTAHILRKTLSM

SEQ ID NO: 3459 - protein, 1219 aa, Morbakka virulenta
MQTRNKTSCRIGRRAEYTGSRPPRELNQFGVEKYATESATSENDLQGNQNQEPPNPDPVVIPNRQRKHRNKWSTEDYKNVLRAYYTAQIRPNRNVTEQTYIYWREIVGNDFMPNINSNKLGNTRRDILNNKRLTDAQIEQVRREVRQHYAEDETNESGGENEIVNIDDMDFEPVVRIENLNGNDIENLIADARIPEEEVRVDGADEFVDQNREKINDAHEDILRELSQTEHKEMEDREPLPKVNMNSKSNAIIKLYNVALRKIIAGAEKDIDTINKIIYSTGQAITKKIGIKVKKRKANNVHKPPKWKVKIQKEIDALRAELSIVQEISNGTNIRTRKGRRIKRKYKIENEGSLDTTKEVIKQRIQMKAQRLRRFDKRSKFFRQNKIFKTDAKKFYREIGKGKIEIKEPPKTEEIEKFWNSIWGNEKSFNENAAWIEREEERMSETNQQEWEPITVEELQAALGKSQKWKSPGKDKIPNFWLNRLTEVHTSLAKNLNEIMEHPENAPSWLTEGVTYLLPKTSETKNPKNYRPITCLTTTYKILTSVITERMYTFLDENSILPSEQKGCKRNSYGCKDQLLINRMILEDCRSKKKNLSTAWIDYKKAFDSVPHDWILKSLEMYKISPIIKNFLSNNMSKWQTRLFLSHENGTCESNLITIKRGIFQGDSLSPLLFCISLIPLSNELNNTNSGYKILDGIINHLFYMDDLKLYAKNDQQLEGLLTMVKEFSDDICMDFGLDKCAKASFVRGNLSRTSSIVIDTDTTIRELEQDETYKYLGVNEGNGINHATMKERIRKEYYRRVRLILKTELNSKNKVEAINSLAVPVVQYSYNIINWNLSDLKRMDTKTRKLLTANRMLHPKADVDRLYLPRSDGGRGLIQLELSYKTTTIGMKYYLETSNDWMLALVRRHENSKKLHSVIKESNKFQRELNVTPNVDEIDLPATKIAKKIKQEAKKNGQDKIADSWSQKSLHGQYVLRCQNADVDKFATHQWLRSSGLKAETEGFITAAQDQSLNTKNYQANVLKNGVDPKCRICDKAVETIDHLVSGCSVLASNEYTRRHDRVGQYLHWGICQHYGIKTEANWYEHKPPDVAEAQYVTILWDFPIHTDRTIQANRPDIIIKDRKNKTCLLIDMSVPCDKNVGTKEFEKVSKYKDLEIEVERMCRLKTSTVPVVIGALGMIKKGTQKHLDKIPGNHCLQEIQKIVLNSTAHILRKTLSM

SEQ ID NO: 3460 - protein, 987 aa, Morbakka virulenta
MEERETLPKIVNNSRAKEKIKLFNVAVKEILKTQKYDITSLNTILYSTAKAATIDIGIKIKKNKKKHTNKPPKWKVNIQKEIDSLRAEISTLDEIARGTLVKTRKSKRIKKKYNVTDQTSIDTAKETLKQRIQVKAQRLRRYDKRTKFYRQNQTFKTDAKKFYRELGKSKIEVKEPPEQDKVEEFWTNIWGKEKNFNADASWIEREEERVEEIEGQKWIDITVEELQTALTKSQKWKSPGIDKIPNFWLNSLSEGHIHLVRSFNEIMVNPEDIRPWLTEGITYLLPKSEETQNPKNYRPITCLTTTYKILTSIITDRMYSFLEDNTILPHEQKGCKRNSYGCKDQLLINKMLLENCKKKSRNLSTAWIDYRKAFDSVPHDWILKSLDIYKISPVISKFLKNSMTSWNTRLFLSHSSGTNQSNSINIKRGIFQGDSLSPLLFCMSLIPLSNELSNTGYGYKIAEKIINHLFYMDDLKLFAKNDRELEGLLTTVKEFSNDIGMDFGLDKCAKATFIRGKLTKTSSITLDLDTTIRELDSDGIYKYLGVNEGDGINHATMKEKIRKEYYRRVRMVLKTELNAKNRIEAINILAVPVVQYSFNIINWNMLDLQRMDAKTRKLFTANHMLHPKADVDRLYLPRREGGRGLIQLELAYKTTTIGMEKYLDTTDDWMLQLVFNHENGKRLHSICKEARKFANDFDIDIQQPIEENTPATKAAKSIKQKAKKIGNQQLADKWSQKALHGQYVLRSRNADVDQNATHQWLRSSSLKAETEGFIIAAQDQSLFTRNYQANILHNGADPKCRFCDQFVETIDHLISGCPILAPSEYVNRHDRVGQYLHWGICQHYQIPVHQNWYEHKPSPVVNSEDVTILWDFSINTDRTIQANRPDIVIKDHKLKTCTLIDMSIPSDRNIAIKEFEKISKYKDLEIEIQRMWKMKTTTVPVIVGALGMIKKDTQNFLDKIPGNLKLQEIQKIVITSTAHILRKTLSM

SEQ ID NO: 3461 - protein, 1170 aa, Morbakka virulenta
MQTRRKKSYRIGRRADNQGSRPSGGNQPEVEKYTTGINSSKNDLVGNQNQDIPNPDPPVIPQKQKEKRTKWSIEDYRNVLRAYYTSQLRPMRNLTEQTYNEWRKIVGTDIRRNIDANKLANIRRDILNHKRLTDAQIDQIRDEVRRSDANFVGEESGNVIEEVGEDGGNPERELVLNVPLMGAAEVENMIREVRNPIEIGQPSEDQGYLTFIENNRENIANARTEILRELSITEQTPMEERETLPKIVNNSRAKAKIKLFNVAVKEILKTQKYDITSLNNILYSTAKAATIDIGIKIKKNKKKHTNKPPKWKVNIQKEIDSLRAEISTLDEIARGTLVKTRKSKRIKKKYNVTDQTSIDTAKETLKQRIQVKAQRLRRYDKRTKFYRQNQTFKTDAKKFYRELGKSKIEVKEPPEQDKVEEFWTNIWGKEKNFNADASWIEREEERVEEIEGQKWIDITVEELQTALTKSQKWKSPGIDKIPNFWLNSLSEGHIHLVRSFNEIMVNPEDIRPWLTEGITYLLPKSEETQNPKNYRPITCLTTTYKILTSIITDRMYSFLEDNTILPHEQKGCKRNSYGCKDQLLINKMLLENCKKKSRNLSTAWIDYRKAFDSVPHDWILKSLDIYKISPVISKFLKNSMTSWNTRLFLSHSSGTNQSNSINIKRGIFQGDSLSPLLFCISLIPLSNELSNTGYGYKIAEKIINHLFYMDDLKLFAKNDRELEGLLTTVKEFSNDIGMDFGLDKCAKATFIRGKLTKTSSITLDLDTTIRELDSDGIYKYLGVNEGDGINHATMKEKIRKEYYRRVRMVLKTELNAKNRIEAINILAVPVVQYSFNIINWNMLDLQRMDAKTRKLFTANHMLHPKADVDRLYLPRREGGRGLIQLELAYKTTTIGMEKYLDTTDDWMLQLVFNHENGKRLHSICKEARKFANDFDIDIQQPIEENTPATKAAKSIKQKAKKIGNQQLADKWSQKALHGQYVLRSRNADVDQNATHQWLRSSSLKAETEGFIIAAQDQSLFTRNYQANILHNGADPKCRFCDQFVETIDHLISGCPILAPSEYVNRHDRVGQYLHWGICQHYQIPVHQNWYEHKPSPVVNSEDVTILWDFSINTDRTIQANRPDIVIKDHKLKTCTLIDMSIPSDRNIAIKEFEKISKYKDLEIEFRECGR

SEQ ID NO: 3462 - protein, 1224 aa, Morbakka virulenta
MQTRRKKSYRIGRRAGNQGSRPSGGNQPEVEKYTTGINSSKNDLVGNQNQDIPNPDPPVIPQKQKEKRTKWSIEDYRNVLRAYYTSQLRPMRNLTEQTYNEWRKIVGTDIRRNIDANKLANIRRDILNHKRLTDAQIDQIRDEVRRSDANFVGEESGNVIEEVGEDGGNPERELVLNVPLMGAAEVENMIREVRNPIEIGQPSEDQGYLTFIENNRENIANARTEILRELSITEQTPMEERETLPKIVNNSRAKAKIKLFNVAVKEILKTQKYDITSLNNILYSTAKAATIDIGIKIKKNKKKHTNKPPKWKVNIQKEIDSLRAEISTLDEIARGTLVKTRKSKRIKKKYNVTDQTSIDTAKETLKQRIQVKAQRLRRYDKRTKFYRQNQTFKTDAKKFYRELGKSKIEVKEPPEQDKVEEFWTNIWGKEKNFNADASWIEREEERVEEIEGQKWIDITVEELQTALTKSQKWKSPGIDKIPNFWLNSLSEGHIHLVRSFNEIMVNPEDIRPWLTEGITYLLPKSEETQNPKNYRPITCLTTTYKILTSIITDRMYSFLEDNTILPHEQKGCKRNSYGCKDQLLINKMLLENCKKKSRNLSTAWIDYRKAFDSVPHDWILKSLDIYKISPVISKFLKNSMTSWNTRLFLSHSSGTNQSNSINIKRGIFQGDSLSPLLFCISLIPLSNELSNTGYGYKIAEKIINHLFYMDDLKLFAKNDRELEGLLTTVKEFSNDIGMDFGLDKCAKATFIRGKLTKTSSITLDLDTTIRELDSDGIYKYLGVNEGDGINHATMKEKIRKEYYRRVRMVLKTELNAKNRIEAINILAVPVVQYSFNIINWNMLDLQRMDAKTRKLFTANHMLHPKADVDRLYLPRREGGRGLIQLELAYKTTTIGMEKYLDTTDDWMLQLVFNHENGKRLHSICKEARKFANDFDIDIQQPIEENTPATKAAKSIKQKAKKIGNQQLADKWSQKALHGQYVLRSRNADVDQNATHQWLRSSSLKAETEGFIIAAQDQSLFTRNYQANILHNGADPKCRFCDQFVETIDHLISGCPILAPSEYVNRHDRVGQYLHWGICQHYQIPVHQNWYEHKPSPVVNSEDVTILWDFSINTDRTIQANRPDIVIKDHKLKTCTLIDMSIPSDRNIAIKEFEKISKYKDLEIEIQRMWKMKTTTVPVIVGALGMIKKDTQNLLDKIPGNLKLQEIQKIVITSTAHILRKTLSM

SEQ ID NO: 3463 - protein, 1224 aa, Morbakka virulenta
MRTRRKKLYRIGRRADNQGSRPSGGNQPEVEKYTTGINSSKNDLVGNQNQDIPNPDPPVIPQKQKEKRTKWSIEDYRNVLRAYYTSQLRPMRNLTEQTYNEWRKIVGTDIRRNIDANKLANIRRDILNHKRLTDAQIDQIRDEVRRSDANFVGEESGNVIEEVGEDGGNPERELVLNVPLMGAAEVENMIREVRNPIEIGQPSEDQGYLTFIENNRENIANARTEILRELSITEQTPMEERETLPKIVNNSRAKAKIKLFNVAVKEILKTQKYDITSLNNILYSTAKAATIDIGIKIKKNKKKHTNKPPKWKVNIQKEIDSLRAEISTLDEIARGTLVKTRKSKRIKKKYNVTDQTSIDTAKETLKQRIQVKAQRLRRYDKRTKFYRQNQTFKTDAKKFYRELGKSKIEVKEPPEQDKVEEFWTNIWGKEKNFNADASWIEREEERVEEIEGQKWIDITVEELQTALTKSQKWKSPGIDKIPNFWLNSLSEGHIHLVRSFNEIMVNPEDIRPWLTEGITYLLPKSEETQNPKNYRPITCLTTTYKILTSIITDRMYSFLEDNTILPHEQKGCKRNSYGCKDQLLINKMLLENCKKKSRNLSTAWIDYRKAFDSVPHDWILKSLDIYKISPVISKFLKNSMTSWNTRLFLSHSSGTNQSNSINIKRGIFQGDSLSPLLFCISLIPLSNELSNTGYGYKIAEKIINHLFYMDDLKLFAKNDRELEGLLTTVKEFSNDIGMDFGLDKCAKATFIRGKLTKTSSITLDLDTTIRELDSDGIYKYLGVNEGDGINHATMKEKIRKEYYRRVRMVLKTELNAKNRIEAINILAVPVVQYSFNIINWNMLDLQRMDAKTRKLFTANHMLHPKADVDRLYLPRREGGRGLIQLELAYKTTTIGMEKYLDTTDDWMLQLVFNHENGKRLHSICKEARKFANDFDIDIQQPIEENTPATKAAKSIKQKAKKIGNQQLADKWSQKALHGQYVLRSRNADVDQNATHQWLRSSSLKAETEGFIIAAQDQSLFTRNYQANILHNGADPKCRFCDQFVETIDHLISGCPILAPSEYVNRHDRVGQYLHWGICQHYQIPVHQNWYEHKPSPVVNSEDVTILWDFSINTDRTIQANRPDIVIKDHKLKTCTLIDMSIPSDRNIAIKEFEKISKYKDLEIEIQRMWKMKTTTVPVIVGALGMIKKDTQNFLDKIPGNLKLQEIQKIVITSTAHILRKTLSI

SEQ ID NO: 3464 - protein, 1224 aa, Morbakka virulenta
MQTRRKKSYRIGRRADNQGSRPSGGNQPEVEKYTTGINSSKNDLVGNQNQDIPNPDPPVIPQKQKEKRTKWSIEDYRNVLRAYYTSQLRPMRNLTEQTYNEWRKIVGTDIRRNIDANKLANIRRDILNHKRLTDAQIDQIRDEVRRSDANFVGEESGNEIEEVGEDGGNPERELVLNVPLMGAAEVENMIREVRNPIEIGQPSEDQGYLTFIENNRENIANARTEILRELSITEQTPMEERETLPKIVNNSRAKAKIKLFNVAVKEILKTQKYDITSLNNILYSTAKAATIDIGIKIKKNKKKHTNKPPKWKVNIQKEIDSLRAEISTLDEIARGTLVKTRKSKRIKKKYNVTDQTSIDTAKETLKQRIQVKAQRLRRYDKRTKFYRQNQTFKTDAKKFYRELGKSKIEVKEPPEQDKVEEFWTNIWGKEKNFNADASWIEREEERVEEIEGQKWIDITVEELQTALTKSQKWKSPGIDKIPNFWLNSLSEGHIHLVRSFNEIMVNPEDIRPWLTEGITYLLPKSEETQNPKNYRPITCLTTTYKILTSIITDRMYSFLEDNTILPHEQKGCKRNSYGCKDQLLINKMLLENCKKKSRNLSTAWIDYRKAFDSVPHDWILKSLDIYKISPVISKFLKNSMTSWNTRLFLSHSSGTNQSNSINIKRGIFQGDSLSPLLFCISLIPLSNELSNTGYGYKIAEKIINHLFYMDDLKLFAKNDRELEGLLTTVKEFSNDIGMDFGLDKCAKATFIRGKLTKTSSITLDLDTTIRELDSDGIYKYLGVNEGDGINHATMKEKIRKEYYRRVRMVLKTELNAKNRIEAINILAVPVVQYSFNIINWNMLDLQRMDAKTRKLFTANHMLHPKADVDRLYLPRREGGRGLIQLELAYKTTTIGMEKYLDTTDDWMLQLVFNHENGKRLHSICKEARKFANDFDIDIQQPIEENTPATKAAKSIKQKAKKIGNQQLADKWSQKALHGQYVLRSRNADVDQNATHQWLRSSSLKAETEGFIIAAQDQSLFTRNYQANILHNGADPKCRFCDQFVETIDHLISGCPILAPSEYVNRHDRVGQYLHWGICQHYQIPVHQNWYEHKPSPVVNSEDVTILWDFSINTDRTIQANRPDIVIKDHKLKTCTLIDMSIPSDRNIAIKEFEKISKYKDLEIEIQRMWKMKTTTVPVIVGALGMIKKDTQNFLDKIPGNLKLQEIQKIVITSTAHILRKTLSM

SEQ ID NO: 3465 - protein, 1224 aa, Morbakka virulenta
MQTRRKKSYRIGRRAGNQGSRPSGGNQPEVEKYTTGINSSKNDLVGNQNQDIPNPDPPVIPQKQKEKRTKWSIEDYRNVLRAYYTSQLRPMRNLTEQTYNEWRKIVGTDIRRNIDANKLANIRRDILNHKRLTDAQIDQIRDEVRRSDANFVGEESGNVIEEVGEDGGNPERELVLNVPLMGAAEVENMIREVRNPIEIGQPSEDQGYLTFIENNRENIANARTEILRELSITEQTPMEERETLPKIVNNSRAKAKIKLFNVAVKEILKTQKYDITSLNNILYSTAKAATIDIGIKIKKNKKKHTNKPPKWKVNIQKEIDSLRAEISTLDEIARGTLVKTRKSKRIKKKYNVTDQTSIDTAKETLKQRIQVKAQRLRRYDKRTKFYRQNQTFKTDAKKFYRELGKSKIEVKEPPEQDKVEEFWTNIWGKEKNFNADASWIEREEERVEEIEGQKWIDITVEELQTALTKSQKWKSPGIDKIPNFWLNSLSEGHIHLVRSFNEIMVNPEDIRPWLTEGITYLLPKSEETQNPKNYRPITCLTTTYKILTSIITDRMYSFLEDNTILPHEQKGCKRNSYGCKDQLLINKMLLENCKKKSRNLSTAWIDYRKAFDSVPHDWILKSLDIYKISPVISKFLKNSMTSWNTRLFLSHSSGTNQSNSINIKRGIFQGDSLSPLLFCISLIPLSNELSNTGYGYKIAEKIINHLFYMDDLKLFAKNDRELEGLLTTVKEFSNDIGMDFGLDKCAKATFIRGKLTKTSSITLDLDTTIRELDSDGIYKYLGVNEGDGINHATMKEKIRKEYYRRVRMVLKTELNAKNRIEAINILAVPVVQYSFNIINWNMLDLQRMDAKTRKLFTANHMLHPKADVDRLYLPRREGGRGLIQLELAYKTTTIGMEKYLDTTDDWMLQLVFNHENGKRLHSICKEARKFANDFDIDIQQPIEENTPATKAAKSIKQKAKKIGNQQLADKWSQKALHGQYVLRSRNADVDQNATHQWLRSSSLKAETEGFIIAAQDQSLFTRNYQANILHNGADPKCRFCDQFVETIDHLISGCPILAPSEYVNRHDRVGQYLHWGICQHYQIPVHQNWYEHKPSPVVNSEDVTILWDFSINTDRTIQANRPDIVIKDHKLKTCTLIDMSIPSDRNIAIKEFEKISKYKDLEIEIQRMWKMKTKTVPVIVGALGMIKKDTQNFLDKIPGNLKLQEIQKIVITSTAHILRKTLSM

SEQ ID NO: 3466 - protein, 1137 aa, Morbakka virulenta
MRNLTEQTYNGWRKIVGTDIRRNIDANKLANIRRDILNHKRLTDAQIDQIDQIRDEVRRSDANFVGEESGNEIEEVGEDGGNPERELVLNVPLMGAAEVENMIREVRNPIEIGQPSEDQGYLTFIENNRENIANARTEILRELSITEQTPMEERETLPKIVNNSRAKAKIKLFNVAVKEILKTQKYDITSLNNILYSTAKAATIDIGIKIKKNKKKHTNKPPKWKVNIQKEIDSLRAEISTLDEIARGTLVKTRKSKRIKKKYNVTDQTSIDTAKETLKQRIQVKAQRLRRYDKRTKFYRQNQTFKTDAKKFYRELGKSKIEVKEPPEQDKVEEFWTNIWGKEKNFNADASWIEREEERVEEIEGQKWIDITVEELQTALTKSQKWKSPGIDKIPNFWLNSLSEGHIHLVRSFNEIMVNPEDIRPWLTEGITYLLPKSEETQNPKNYRPITCLTTTYKILTSIITDRMYSFLEDNTILPHEQKGCKRNSYGCKDQLLINKMLLENCKKKSRNLSTAWIDYRKAFDSVPHDWILKSLDIYKISPVISKFLKNSMTSWNTRLFLSHSSGTNQSNSINIKRGIFQGDSLSPLLFCISLIPLSNELSNTGYGYKIAEKIINHLFYMDDLKLFAKNDRELEGLLTTVKEFSNDIGMDFGLDKCAKATFIRGKLTKTSSITLDLDTTIRELDSDGIYKYLGVNEGDGINHATMKEKIRKEYYRRVRMVLKTELNAKNRIEAINILAVPVVQYSFNIINWNMLDLQRMDAKTRKLFTANHMLHPKADVDRLYLPRREGGRGLIQLELAYKTTTIGMEKYLDTTDDWMLQLVFNHENGKRLHSICKEARKFANDFDIDIQQPIEENTPATKAAKSIKQKAKKIGNQQLADKWSQKALHGQYVLRSRNADVDQNATHQWLRSSSLKAETEGFIIAAQDQSLFTRNYQANILHNGADPKCRFCDQFVETIDHLISGCPILAPSEYVNRHDRVGQYLHWGICQHYQIPVHQNWYEHKPSPVVNSEDVTILWDFSINTDRTIQANRPDIVIKDHKLKTCTLIDMSIPSDRNIAIKEFEKISKYKDLEIEIQRMWKMKTTTVPVIVGALGMIKKDTQNFLDKIPGNLKLQEIQKIVITSTAHILRKTLSM

SEQ ID NO: 3467 - protein, 1224 aa, Morbakka virulenta
MQTRRKKSYRIGRRADNQGSRPSGGNQPEVEKYTTGINSSKNDLVGNQNQDIPNPDPPVIPQKQKEKRTKWSIEDYRNVLRAYYTSQLRPMRNLTEQTYNEWRKIVGTDIRRNIDANKLANIRRDILNHKRLTDAQIDQIRDEVRRSDANFVGEESGNVIEEVGEDGGNPERELVLNVPLMGAAEVENMIREVRNPIEIGQPSEDQGYLTFIENNRENIANARTEILRELSITEQTPMEERETLPKIVNNSRAKAKIKLFNVAVKEILKTQKYDITSLNNILYSTAKAATIDIGIKIKKNKKKHTNKPPKWKVNIQKEIDSLRAEISTLDEIARGTLVKTRKSKRIKKKYNVTDQTSIDTAKETLKQRIQVKAQRLRRYDKRTKFYRQNQTFKTDAKKFYRELGKSKIEVKEPPEQDKVEEFWTNIWGKEKNFNADASWIEREEERVEEIEGQKWIDITVEELQTALTKSQKWKSPGIDKIPNFWLNSLSEGHIHLVRSFNEIMVNPEDIRPWLTEGITYLLPKSEETQNPKNYRPITCLTTTYKILTSIITDRMYSFLEDNTILPHEQKGCKRNSYGCKDQLLINKMLLENCKKKSRNLSTAWIDYRKAFDSVPHDWILKSLDIYKISPVISKFLKNSMTSWNTRLFLSHSSGTNQSNSINIKRGIFQGDSLSPLLFCISLIPLSNELSNTGYGYKIAEKIINHLFYMDDLKLFAKNDRELEGLLTTVKEFSNDIGMDFGLDKCAKATFIRGKLTKTSSITLDLDTTIRELDSDGIYKYLGVNEGDGINHATMKEKIRKEYYRRVRMVLKTELNAKNRIEAINILAVPVVQYSFNIINWNMLDLQRMDAKTRKLFTANHMLHPKADVDRLYLPRREGGRGLIQLELAYKTTTIGMEKYLDTTDDWMLQLVFNHENGKRLHSICKEARKFANDFDIDIQQPIEENTPATKAAKSIKQKAKKIGNQQLADKWSQKALHGQYVLRSRNADVDQNATHQWLRSSSLKAETEGFIIAAQDQSLFTRNYQANILHNGADPKCRFCDQFVETIDHLISGCPILAPSEYVNRHDRVGQYLHWGICQHYQIPVHQNWYEHKPSPVVNSEDVTILWDFSINTDRTIQANRPDIVIKDHKLKTCTLIDMSIPSDRNIAIKEFEKISKYKDLEIEIQRMWKMKTTTVPVIVGALGMIKKDTQNFLDKIPGNLKLQEIQKIVITSTAHILRKTLSM

SEQ ID NO: 3468 - protein, 1224 aa, Morbakka virulenta
MQTRRNKSYRIGRRADNQGSRPSGGNQPEVEKYTTGINSSKNDLVGNQNQDIPNPDPPVIPQKQKEKRTKWSIEDYRNVLRAYYTSQLRPMRNLTEQTYNEWRKIVGTDIRRNIDANKLANIRRDILNHKRLTDAQIDQIRDEVRRSDANFVGEESGNVIEEVGEDGGNPERELVLNVPLMGAAEVENMIREVRNPIEIGQPSEDQGYLTFIENNRENIANARTEILRELSITEQTPMEERETLPKIVNNSRAKAKIKLFNVAVKEILKTQKYDITSLNNILYSTAKAATIDIGIKIKKNKKKHTNKPPKWKVNIQKEIDSLRAEISTLDEIARGTLVKTRKSKRIKKKYNVTDQTSIDTAKETLKQRIQVKAQRLRRYDKRTKFYRQNQTFKTDAKKFYRELGKSKIEVKEPPEQDKVEEFWTNIWGKEKNFNADASWIEREEERVEEIEGQKWIDITVEELQTALTKSQKWKSPGIDKIPNFWLNSLSEGHIHLVRSFNEIMVNPEDIRPWLTEGITYLLPKSEETQNPKNYRPITCLTTTYKILTSIITDRMYSFLEDNTILPHEQKGCKRNSYGCKDQLLINKMLLENCKKKSRNLSTAWIDYRKAFDSVPHDWILKSLDIYKISPVISKFLKNSMTSWNTRLFLSHSSGTNQSNSINIKRGIFQGDSLSPLLFCISLIPLSNELSNTGYGYKIAEKIINHLFYMDDLKLFAKNDRELEGLLTTVKEFSNDIGMDFGLDKCAKATFIRGKLTKTSSITLDLDTTIRELDSDGIYKYLGVNEGDGINHATMKEKIRKEYYRRVRMVLKTELNAKNRIEAINILAVPVVQYSFNIINWNMLDLQRMDAKTRKLFTANHMLHPKADVDRLYLPRREGGRGLIQLELAYKTTTIGMEKYLDTTDDWMLQLVFNHENGKRLHSICKEARKFANDFDIDIQQPIEENTPATKAAKSIKQKAKKIGNQQLADKWSQKALHGQYVLRSRNADVDQNATHQWLRSSSLKAETEGFIIAAQDQSLFTRNYQANILHNGADPKCRFCDQFVETIDHLISGCPILAPSEYVNRHDRVGQYLHWGICQHYQIPVHQNWYEHKPSPVVNSEDVTILWDFSINTDRTIQANRPDIVIKDHKLKTCTLIDMSIPSDRNIAIKEFEKISKYKDLEIEIQRMWKMKTTTVPVIVGALGMIKKDTQNFLDKIPGNLKLQEIQKIVITSTAHILRKTLSM

SEQ ID NO: 3469 - protein, 1224 aa, Morbakka virulenta
MQTRRKKSYRIGRRAGNQGSRPSGGNQPEVEKYTTGINSSKNDLVGNQNQDIPNPDPPVIPQKQKEKRTKWSIEDYRNVLRAYYTSQLRPMRNLTEQTYNEWRKIVGTDIRRNIDANKLANIRRDILNHKRLTDAQIDQIRDEVRRSDANFVGEESGNVIEEVGEDGGNPERELVLNVPLMGAAEVENMIREVRNPIEIGQPSEDQGYLTFIENNRENIANARTEILRELSITEQTPMEERETLPKIVNNSRAKAKIKLFNVAVKEILKTQKYDITSLNNILYSTAKAATIDIGIKIKKNKKKHTNKPPKWKVNIQKEIDSLRAEISTLDEIARGTLVKTRKSKRIKKKYNVTDQTSIDTAKETLKQRIQVKAQRLRRYDKRTKFYRQNQTFKTDAKKFYRELGKSKIEVKEPPEQDKVEEFWTNIWGKEKNFNADASWIEREEERVEEIEGQKWIDITVEELQTALTKSQKWKSPGIDKIPNFWLNSLSEGHIHLVRSFNEIMVNPEDIRPWLTEGITYLLPKSEETQNPKNYRPITCLTTTYKILTSIITDRMYSFLEDNTILPHEQKGCKRNSYGCKDQLLINKMLLENCKKKSRNLSTAWIDYRKAFDSVPHDWILKSLDIYKISPVISKFLKNSMTSWNTRLFLSHSSGTNQSNSINIKRGIFQGDSLSPLLFCISLIPLSNELSNTGYGYKIAEKIINHLFYMDDLKLFAKNDRELEGLLTTVKEFSNDIGMDFGLDKCAKATFIRGKLTKTSSITLDLDTTIRELDSDGIYKYLGVNEGDGINHATMKEKIRKEYYRRVRMVLKTELNAKNRIEAINILAVPVVQYSFNIINWNMLDLQRMDAKTRKLFTANHMLHPKADVDRLYLPRREGGRGLIQLELAYKTTTIGMEKYLDTTDDWMLQLVFNHENGKRLHSICKEARKFANDFDIDIQQPIEENTPATKAAKSIKQKAKKIGNQQLADKWSQKALHGQYVLRSRNADVDQNATHQWLRSSSLKAETEGFIIAAQDQSLFTRNYQANILHNGADPKCRFCDQFVETIDHLISGCPILAPSEYVNRHDRVGQYLHWGICQHYQIPVHQNWYEHKPSPVVNSEDVTILWDFSINTDRTIQANRPDIVIKDHKLKTCTLIDMSIPSDRNIAIKEFEKISKYKDLEIEIQRMWKMKTTTVPVIVGALGMIKKDTQNFLDKIPGNLKLQEIQKIVITSTAHILRKTLSM

SEQ ID NO: 3470 - protein, 1224 aa, Morbakka virulenta
MQTRRKKSYRIGRRADNQGSRPSGGNQPEVEKYTTGINSSKNDLVGNQNQDIPNPDPPVIPQKQKEKRTKWSIEDYRNVLRAYYTSQLRPMRNLTEQTYNEWRKIVGTDIRRNIDANKLANIRRDILNHKRLTDAQIDQIRDEVRRSDANFVGEESGNVIEEVGEDGGNPERELVLNVPLMGAAEVENMIREVRNPIEIGQPSEDQGYLTFIENNRENIANARTEILRELSITEQTPMEERETLPKIVNNSRAKAKIKLFNVAVKEILKTQKYDITSLNNILYSTAKAATIDIGIKIKKNKKKHTNKPPKWKVNIQKEIDSLRAEISTLDEIARGTLVKTRKSKRIKKKYNVTDQTSIDTAKETLKQRIQVKAQRLRRYDKRTKFYRQNQTFKTDAKKFYRELGKSKIEVKEPPEQDKVEEFWTNIWGKEKNFNADASWIEREEERVEEIEGQKWIDITVEELQTALTKSQKWKSPGIDKIPNFWLNSLSEGHIHLVRSFNEIMVNPEDIRPWLTEGITYLLPKSEETQNPKNYRPITCLTTTYKILTSIITDRMYSFLEDNTILPHEQKGCKRNSYGCKDQLLINKMLLENCKKKSRNLSTAWIDYRKAFDSVPHDWILKSLDIYKISPVISKFLKNSMTSWNTRLFLSHSSGTNQSNSINIKRGIFQGDSLSPLLFCISLIPLSNELSNTGYGYKIAEKIINHLFYMDDLKLFAKNDRELEGLLTTVKEFSNDIGMDFGLDKCAKATFIRGKLTKTSSITLDLDTTIRELDSDGIYKYLGVNEGDGINHATMKEKIRKEYYRRVRMVLKTELNAKNRIEAINILAVPVVQYSFNIINWNMLDLQRMDAKTRKLFTANHMLHPKADVDRLYLPRREGGRGLIQLELAYKTTTIGMEKYLDTTDDWMLQLVFNHENGKRLHSICKEARKFANDFDIDIQQPIEENTPATKAAKSIKQKAKKIGNQQLADKWSQKALHGQYVLRSRNADVDQNATHQWLRSSSLKAETEGFIIAAQDQSLFTRNYQANILHNGADPKCRFCDQFVETIDHLISGCPILAPSEYVNRHDRVGQYLHWGICQHYQIPVHQNWYEHKPSPVVNSEDVTILWDFSINTDRTIQANRPDIVIKDHKLKTCTLIDMSIPSDRNIAIKEFEKISKYKDLEIEIQRMWKMKTTTVPVIVGALGMIKKDTQNFLDKIPGNLKLQEIQKIVITSIAHILRKTLSI

SEQ ID NO: 3471 - protein, 1184 aa, Morbakka virulenta
MQTRRNKSYCIGRRADNQGSRPSGGNQPEVEIYTTGINSSKNDLVGNQNQDIPNPDPPVIPQKQKEKRTKWSIEDYRNVLRAYYTSQLRPMRNLTEQTYNEWRKIVGTDIRRNIDANKLANIRRDILNHKRLTDAQIDQIRDEVRRSDANFVGEESGNVIEEVGEDGGNPERELVLNVPLMGAAEVENMIREVRNPIEIGQPSEDQGYLTFIENNRENIANARTEILRELSITEQTPMEERETLPKIVNNSRAKAKIKLFNVAVKEILKTQKYDITSLNNILYSTAKAATIDIGIKIKKNKKKHTNKPPKWKVNIQKEIDSLRAEISTLDEIARGTLVKTRKSKRIKKKYNVTDQTSIDTAKETLKQRIQVKAQRLRRYDKRTKFYRQNQTFKTDAKKFYRELGKSKIEVKEPPEQDKVEEFWTNIWGKEKNFNADASWIEREEERVEEIEGQKWIDITVEELQTALTKSQKWKSPGIDKIPNFWLNSLSEGHIHLVRSFNEIMVNPEDIRPWLTEGITYLLPKSEETQNPKNYRPITCLTTTYKILTSIITDRMYSFLEDNTILPHEQKGCKRNSYGCKDQLLINKMLLENCKKKSRNLSTAWIDYRKAFDSVPHDWILKSLDIYKISPVISKFLKNSMTSWNTRLFLSHSSGTNQSNSINIKRGIFQGDSLSPLLFCISLIPLSNELSNTGYGYKIAEKIINHLFYMDDLKLFAKNDRELEGLLTTVKEFSNDIGMDFGLDKCAKATFIRGKLTKTSSITLDLDTTIRELDSDGIYKYLGVNEGDGINHATMKEKIRKEYYRRVRMVLKTELNAKNRIEAINILAVPVVQYSFNIINWNMLDLQRMDAKTRKLFTANHMLHPKADVDRLYLPRREGGRGLIQLELAYKTTTIGMEKYLDTTDDWMLQLVFNHENGKRLHSICKEARKFANDFDIDIQQPIEENTPATKAAKSIKQKAKKIGNQQLADKWSQKALHGQYVLRSRNADVDQNATHQWLRSSSLKAETEGFIIAAQDQSLFTRNYQANILHNGADPKCRFCDQFVETIDHLISGCPILAPSEYVNRHDRVGQYLHWGICQHYQIPVHQNWYEHKPSPVVNSEDVTILWDFSINTDRTIQANRPDIVIKDHKLKTCTLIDMSIPSDRNIAIKEFEKISKYKDLEIEIQRMWKMKTTTVPVIVVHLG

SEQ ID NO: 3472 - protein, 1006 aa, Morbakka virulenta
MNNDNNNNNNNNNITEQTPMEERETLPKIVNNSRAKAKIKLFNVAVKEILKTQKYDITSLNNILYSTAKAATIDIGIKIKKNKKKHTNKLPKWKVNIQKEIDSLRAEISTLDEIARGTLVKTRKSKRIKKKYNVTDQTSIDTAKETLKQRIQVKAQRLRRYDKRTKFYRQNQTFKTDAKKFYRELGKSKIEVKEPPEQDKVEEFWTNIWGKEKNFNADASWIEREEERVEEIEGQKWIDITVEELQTALTKSQKWKSPGIDKIPNFWLNSLSEGHIHLVRSFNEIMVNPEDIRPWLTEGITYLLPKSEETQNPKNYRPITCLTTTYKILTSIITDRMYSFLEDNTILPHEQKGCKRNSYGCKDQLLINKMLLENCKKKSRNLSTAWIDYRKAFDSVPHDWILKSLDIYKISPVISKFLKNSMTSWNTRLFLSHSSGTNQSNSINIKRGIFQGDSLSPLLFCISLIPLSNELSNTGYGYKIAEKIINHLFYMDDLKLFAKNDRELEGLLTTVKEFSNDIGMDFGLDKCAKATFIRGKLTKTSSITLDLDTTIRELDSDGIYKYLGVNEGDGINHATMKEKIRKEYYRRVRMVLKTELNAKNRIEAINILAVPVVQYSFNIINWNMLDLQRMDAKTRKLFTANHMLHPKADVDRLYLPRREGGRGLIQLELAYKTTTIGMEKYLDTTDDWMLQLVFNHENGKRLHSICKEARKFANDFDIDIQQPIEENTPATKAAKSIKQKAKKIGNQQLADKWSQKALHGQYVLRSRNADVDQNATHQWLRSSSLKAETEGFIIAAQDQSLFTRNYQANILHNGADPKCRFCDQFVETIDHLISGCPILAPSEYVNRHDRVGQYLHWGICQHYQIPVHQNWYEHKPSPVVNSEDVTILWDFSINTDRTIQANRPDIVIKDHKLKTCTLIDMSIPSDRNIAIKEFEKISKYKDLEIEIQRMWKMKTTTVPVIVGALGMIKKDTQNFLDKIPGNLKLQEIQKIVITSTAHILRKTLSM

SEQ ID NO: 3473 - protein, 1096 aa, Morbakka virulenta
MRNLTEQTYNEWRKIVGNDIRRNIDANKLANIRRDILNNKRLTDAQIDQIRDEVGRSDANFVGEESGNEIEEVGEDGGNPKRELVLNVPRMSAAEVEIMVREVRNPVEIGQPSKDQGHLTFIENNGENIANARTEILRELSITEQTPMEERETLPKIANNSRAKAKIKLFNVAVKEILKTQKYDITSLNNILYSTAKAATIDIGIKIKKNKKKHTNKPPKWKVNIQKEIDSLRAEISTLDEIARGTLVKTRKSKRIKKKYNVTDQTSIDTAKETLKQRIQVKAQRLRRYDKRTKFYRQNQTFKTDAKKFYRELGKSKIEVKEPPEQDKVEEFWTNIWGKEKNFNADASWIEREEERVEEIEGQKWIDITVEELQTALTKSQKWKSPGIDKIPNFWLNSLSEGHIHLVRSFNEIMVNPEDIRPWLTEGITYLLPKSEETQNPKNYRPITCLTTTYKILTSIITDRMYSFLEDNTILPHEQKGCKRNSYGCKDQLLINKMLLENCKKKSRNLSTAWIDYRKAFDSVPHDWILKSLDIYKISPVISKFLKNSMTSWNTRLFLSHSSGTNQSNSINIKRGIFQGDSLSPLLFCISLIPLSNELSNTGYGYKIAEKIINHLFYMDDLKLFAKNDRELEGLLTTVKEFSNDIGMDFGLDKCAKATFIRGKLTKTSSITLDLDTTIRELDSDGIYKYLGVNEGDGINHATMKEKIRKEYYRRVRMVLKTELNAKNRIEAINILAVPVVQYSFNIINWNMLDLQRMDAKTRKLFTANHMLHPKADVDRLYLPRREGGRGLIQLELAYKTTTIGMEKYLDTTDDWMLQLVFNHENGKRLHSICKEARKFANDFDIDIQQPIEENTPATKAAKSIKQKAKKIGNQQLADKWSQKALHGQYVLRSRNADVDQNATHQWLRSSSLKAETEGFIIAAQDQSLFTRNYQANILHNGADPKCRFCDQFVETIDHLISGCPILAPSEYVNRHDRVGQYLHWGICQHYQIPVHQNWYEHKPSPVVNSEDVTILWDFSINTDRTIQANRPDIVIKGHKLKTCTLIDMNISSDRNIAIKELEKISKYKYPGKRNSENEENENYNSASYSGCTWDD

SEQ ID NO: 3474 - protein, 983 aa, Morbakka virulenta
MGAAEVENMIREVRNPIEIGQPSEDQGYLTFIENNRENIANARTEILRELSITEQTPMEERETLPKIVNNSRAKAKIKLFNVAVKEILKTQKYDITSLNNILYSTAKAATIDIGIKIKKNKKKHTNKPPKWKVNIQKEIDSLRAEISTLDEIARGTLVKTRKSKRIKKKYNVTDQTSIDTAKETLKQRIQVKAQRLRRYDKRTKFYRQNQTFKTDAKKFYRELGKSKIEVKEPPEQDKVEEFWTNIWGKEKNFNADASWIEREEERVEEIEGQKWIDITVEELQTALTKSQKWKSPGIDKIPNFWLNSLSEGHIHLVRSFNEIMVNPEDIRPWLTEGITYLLPKSEETQNPKNYRPITCLTTTYKILTSIITDRMYSFLEDNTILPHEQKGCKRNSYGCKDQLLINKMLLENCKKKSRNLSTAWIDYRKAFDSVPHDWILKSLDIYKISPVISKFLKNSMTSWNTRLFLSHSSGTNQSNSINIKRGIFQGDSLSPLLFCISLIPLSNELSNTGYGYKIAEKIINHLFYMDDLKLFAKNDRELEGLLTTVKEFSNDIGMDFGLDKCAKATFIRGKLTKTSSITLDLDTTIRELDSDGIYKYLGVNEGDGINHATMKEKIRKEYYRRVRMVLKTELNAKNRIEAINILAVPVVQYSFNIINWNMLDLQRMDAKTRKLFTANHMLHPKADVDRLYLPRREGGRGLIQLELAYKTTTIGMEKYLDTTDDWMLQLVFNHENGKRLHSICKEARKFANDFDIDIQQPIEENTPATKAAKSIKQKAKKIGNQQLADKWSQKALHGQYVLRSRNADVDQNATHQWLRSSNLKTEKEGFIIAAQDQSLFTRNYQANILHNGADPKCRFCDQFVETIDHLISGCPILAPSEYVNRHDRVGQYLHWGICQYYQIPVNQNWNEHKPSPVVNSEDVTMLWDFSINTDRTIQANRPDIVIKDHKLKTGTLIDRQRELCFMQSVFHHQKEWYLMGRKW

SEQ ID NO: 3475 - protein, 1134 aa, Morbakka virulenta
MRNLTEQTYNEWRKIVGTDIRRNIDANKLANIRRDILNHKRLTDAQIDQIRDEVRRSDANFVGEESGNVIEEVGEDGGNPERELVLNVPLMGAAEVENMIREVRNPIEIGQPSEDQGYLTFIENNRENIANARTEILRELSITEQTPMEERETLPKIVNNSRAKAKIKLFNVAVKEILKTQKYDITSLNNILYSTAKAATIDIGIKIKKNKKKHTNKPPKWKVNIQKEIDSLRAEISTLDEIARGTLVKTRKSKRIKKKYNVTDQTSIDTAKETLKQRIQVKAQRLRRYDKRTKFYRQNQTFKTDAKKFYRELGKSKIEVKEPPEQDKVEEFWTNIWGKEKNFNADASWIEREEERVEEIEGQKWIDITVEELQTALTKSQKWKSPGIDKIPNFWLNSLSEGHIHLVRSFNEIMVNPEDIRPWLTEGITYLLPKSEETQNPKNYRPITCLTTTYKILTSIITDRMYSFLEDNTILPHEQKGCKRNSYGCKDQLLINKMLLENCKKKSRNLSTAWIDYRKAFDSVPHDWILKSLDIYKISPVISKFLKNSMTSWNTRLFLSHSSGTNQSNSINIKRGIFQGDSLSPLLFCISLIPLSNELSNTGYGYKIAEKIINHLFYMDDLKLFAKNDRELEGLLTTVKEFSNDIGMDFGLDKCAKATFIRGKLTKTSSITLDLDTTIRELDSDGIYKYLGVNEGDGINHATMKEKIRKEYYRRVRMVLKTELNAKNRIEAINILAVPVVQYSFNIINWNMLDLQRMDAKTRKLFTANHMLHPKADVDRLYLPRREGGRGLIQLELAYKTTTIGMEKYLDTTDDWMLQLVFNHENGKRLHSICKEARKFANDFDIDIQQPIEENTPATKAAKSIKQKAKKIGNQQLADKWSQKALHGQYVLRSRNADVDQNATHQWLRSSSLKAETEGFIIAAQDQSLFTRNYQANILHNGADPKCRFCDQFVETIDHLISGCPILAPSEYVNRHDRVGQYLHWGICQHYQIPVHQNWYEHKPSPVVNSEDVTILWDFSINTDRTIQANRPDIVIKDHKLKTCTLIDMSIPSDRSIAIKEFEKISKYKDLEIEIQRMWKMKTTTVPVIVGALGMIKKDTQNYLDKISGNLKLQEIQKIVITSTAHILRKTLSM

SEQ ID NO: 3476 - protein, 1203 aa, Morbakka virulenta
MQTRRKKSYRIGRRAGNQGSRPSGGNQPEVEKYTTGINSSKNDLVGNQNQDIPNPDPPVIPQKQKEKRTKWSIEDYRNVLRAYYTSQLRPMRNLTEQTYNEWRKIVGTDIRRNIDANKLANIRRDILNHKRLTDAQIDQIRDEVRRSDANFVGEESGNVIEEVGEDGGNPERELVLNVPLMGAAEVENMIREVRNPIEIGQPSEDQGYLTFIENNRENIANARTEILRELSITEQTPMEERETLPKIVNNSRAKAKIKLFNVAVKEILKTQKYDITSLNNILYSTAKAATIDIGIKIKKNKKKHTNKPPKWKVNIQKEIDSLRAEISTLDEIARGTLVKTRKSKRIKKKYNVTDQTSIDTAKETLKQRIQVKAQRLRRYDKRTKFYRQNQTFKTDAKKFYRELGKSKIEVKEPPEQDKVEEFWTNIWGKEKNFNADASWIEREEERVEEIEGQKWIDITVEELQTALTKSQKWKSPGIDKIPNFWLNSLSEGHIHLVRSFNEIMVNPEDIRPWLTEGITYLLPKSEETQNPKNYRPITCLTTTYKILTSIITDRMYSFLEDNTILPHEQKGCKRNSYGCKDQLLINKMLLENCKKKSRNLSTAWIDYRKAFDSVPHDWILKSLDIYKISPVISKFLKNSMTSWNTRLFLSHSSGTNQSNSINIKRGIFQGDSLSPLLFCISLIPLSNELSNTGYGYKIAEKIINHLFYMDDLKLFAKNDRELEGLLTTVKEFSNDIGMDFGLDKCAKATFIRGKLTKTSSITLDLDTTIRELDSDGIYKYLGVNEGDGINHATMKEKIRKEYYRRVRMVLKTELNAKNRIEAINILAVPVVQYSFNIINWNMLDLQRMDAKTRKLFTANHMLHPKADVDRLYLPRREGGRGLIQLELAYKTTTIGMEKYLDTTDDWMLQLVFNHENGKRLHSICKEARKFANDFDIDIQQPIEENTPATKAAKSIKQKAKKIGNQQLADKWSQKALHGQYVLRSRNADVDQNATHQWLRSSSLKAETEGFIIAAQDQSLFTRNYQANILHNGADPKCRFCDQFVETIDHLISGCPILAPSEYVNRHDRVGQYLHWGICQHYQIPVHQNWYEHKPSPVVNSEDVTILWDFSINTDRTIQANRPDIVIKDHKLKTCTLIDMSIPSDRNIAIKEFEKISKYKDLEIEIQRMWKMKTTTVPVIVGALGMIKKDTQNYLDKIPGNLKL

SEQ ID NO: 3477 - protein, 1134 aa, Morbakka virulenta
MRNLTEQTYNEWRKIVGTDIRRNIDANKLANIRRDILNHKRLTDAQIDQIRDEVRRSDANFVGEESGNVIEEVGEDGGNPERELVLNVPLMGAAEVENMIREVRNPIEIGQPSEDQGYLTFIENNRENIANARTEILRELSITEQTPMEERETLPKIVNNSRAKAKIKLFNVAVKEILKTQKYDITSLNNILYSTAKAATIDIGIKIKKNKKKHTNKPPKWKVNIQKEIDSLRAEISTLDEIARGTLVKTRKSKRIKKKYNVTDQTSIDTAKETLKQRIQVKAQRLRRYDKRTKFYRQNQTFKTDAKKFYRELGKSKIEVKEPPEQDKVEEFWTNIWGKEKNFNADASWIEREEERVEEIEGQKWIDITVEELQTALTKSQKWKSPGIDKIPNFWLNSLSEGHIHLVRSFNEIMVNPEDIRPWLTEGITYLLPKSEETQNPKNYRPITCLTTTYKILTSIITDRMYSFLEDNTILPHEQKGCKRNSYGCKDQLLINKMLLENCKKKSRNLSTAWIDYRKAFDSVPHDWILKSLDIYKISPVISKFLKNSMTSWNTRLFLSHSSGTNQSNSINIKRGIFQGDSLSPLLFCISLIPLSNELSNTGYGYKIAEKIINHLFYMDDLKLFAKNDRELEGLLTTVKEFSNDIGMDFGLDKCAKATFIRGKLTKTSSITLDLDTTIRELDSDGIYKYLGVNEGDGINHATMKEKIRKEYYRRVRMVLKTELNAKNRIEAINILAVPVVQYSFNIINWNMLDLQRMDAKTRKLFTANHMLHPKADVDRLYLPRREGGRGLIQLELAYKTTTIGMEKYLDTTDDWMLQLVFNHENGKRLHSICKEARKFANDFDIDIQQPIEENTPATKAAKSIKQKAKKIGNQQLADKWSQKALHGQYVLRSRNADVDQNATHQWLRSSSLKAETEGFIIAAQDQSLFTRNYQANILHNGADPKCRFCDQFVETIDHLISGCPILAPSEYVNRHDRVGQYLHWGICQHYQIPVHQNWYEHKPSPVVNSEDVTILWDFSINTDRTIQANRPDIVIKDHKLKTCTLIDMSIPSDRNIAIKEFEKISKYKDLEIEIQRMWKMKTTTVPVIVGALGMIKKDTQNFLDKIPGNLKLQEIQKIVITSTAHILRKTLSM

SEQ ID NO: 3478 - protein, 721 aa, Morbakka virulenta
MVNPEDIRPWLTEGITYLLPKSEETQNPKNYRPITCLTTTYKILTSIITDRMYSFLEDNTILPHEQKGCKRNSYGCKDQLLINKMLLENCKKKSRNLSTAWIDYRKAFDSVPHDWILKSLDIYKISPVISKFLKNSMTSWNTRLFLSHSSGTNQSNSINIKRGIFQGDSLSPLLFCMSLIPLSNELSNTGYGYKIAEKIINHLFYMDDLKLFAKNDRELEGLLTTVKEFSNDIGMDFGLDKCAKATFIRGKLTKTSSITLDLDTTIRELDSDGIYKYLGVNEGDGINHATMKEKIRKEYYRRVRMVLKTELNAKNRIEAINILAVPVVQYSFNIINWNMLDLQRMDAKTRKLFTANHMLHPKADVDRLYLPRREGGRGLIQLELAYKTTTIGMEKYLDTTDDWMLQLVFNHENGKRLHSICKEARKFANDFDIDIQQPIEENTPATKAAKSIKQKAKKIGNQQLADKWSQKALHGQYVLRSRNADVDQNATHQWLRSSSLKAETEGFIIAAQDQSLFTRNYQANILHNGADPKCRFCDQFVETIDHLISGCPILAPSEYVNRHDRVGQYLHWGICQHYQIPVHQNWYEHKPSPVVNSEDVTILWDFSINTDRTIQANRPDIVIKDHKLKTCTLIDMSIPSDRNIAIKEFEKISKYKDLEIEIQRMWKLKTTTVPVIVGALGMIKKDTRNYLDKISGNLKLQEIQKIVVTSRAHILRKTLSM

SEQ ID NO: 3479 - protein, 1224 aa, Morbakka virulenta
MQTRRKKSYRIGRRADNQGSRPSGGNQPEVEKYTTGINSSKNDLVGNQNQDIPNPDPPVIPQKQKEKRTKWSIEDYRNVLRAYYTSQLRPMRNLTEQTYNEWRKIVGTDIRRNIDANKLANIRRDILNHKRLTDAQIDQIRDEVRRSDANFVGEESGNVIEEVGEDGGNPERELVLNVPLMGAAEVENMIREVRNPIEIGQPSEDQGYLTFIENNRENIANARTEILRELSITEQTPMEERETLPKIVNNSRAKAKIKLFNVAVKEILKTQKYDITSLNNILYSTAKAATIDIGIKIKKNKKKHTNKPPKWKVNIQKEIDSLRAEISTLDEIARGTLVKTRKSKRIKKKYNVTDQTSIDTAKETLKQRIQVKAQRLRRYDKRTKFYRQNQTFKTDAKKFYRELGKSKIEVKEPPEQDKVEEFWTNIWGKEKNFNADASWIEREEERVEEIEGQKWIDITVEELQTALTKSQKWKSPGIDKIPNFWLNSLSEGHIHLVRSFNEIMVNPEDIRPWLTEGITYLLPKSEETQNPKNYRPITCLTTTYKILTSIITDRMYSFLEDNTILPHEQKGCKRNSYGCKDQLLINKMLLENCKKKSRNLSTAWIDYRKAFDSVPHDWILKSLDIYKISPVISKFLKNSMTSWNTRLFLSHSSGTNQSNSINIKRGIFQGDSLSPLLFCISLIPLSNELSNTGYGYKIAEKIINHLFYMDDLKLFAKNDRELEGLLTTVKEFSNDIGMDFGLDKCAKATFIRGKLTKTSSITLDLDTTIRELDSDGIYKYLGVNEGDGINHATMKEKIRKEYYRRVRMVLKTELNAKNRIEAINILAVPVVQYSFNIINWNMLDLQRMDAKTRKLFTANHMLHPKADVDRLYLPRREGGRGLIQLELAYKTTTIGMEKYLDTTDDWMLQLVFNHENGKRLHSICKEARKFANDFDIDIQQPIEENTPATKAAKSIKQKAKKIGNQQLADKWSQKALHGQYVLRSRNADVDQNATHQWLRSSSLKAETEGFIIAAQDQSLFTRNYQANILHNGADPKCRFCDQFVETIDHLISGCPILAPSEYVNRHDRVGQYLHWGICQHYQIPVHQNWYEHKPSPVVNSEDVTILWDFSINTDRTIQANRPDIVIKDHKLKTCTLIDMSIPSDRNIAIKEFEKISKYKDLEIEIQRMWKMKTTTVPVIVGALGMIKKDTQNFLDKIPGNLKLQEIQKIVITSTAYILRKTLSM

SEQ ID NO: 3480 - protein, 1212 aa, Morbakka virulenta
MQTRRKKSYRIGRRADNQGSRPSGGNQPEVEKYTTGINSSKNDLVGNQNQDIPNPDPPVIPQKQKEKRTKWSIEDYRNVLRAYYTSQLRPMRNLTEQTYNEWRKIVGTDIRRNIDANKLANIRRDILNHKRLTDAQIDQIRDEVRRSDANFVGEESGNVIEEVGEDGGNPERELVLNVPLMGAAEVENMIREVRNPIEIGQPSEDQGYLTFIENNRENIANARTEILRELSITEQTPMEERETLPKIVNNSRAKAKIKLFNVAVKEILKTQKYDITSLNNILYSTAKAATIDIGIKIKKNKKKHTNKPPKWKVNIQKEIDSLRAEISTLDEIARGTLVKTRKSKRIKKKYNVTDQTSIDTAKETLKQRIQVKAQRLRRYDKRTKFYRQNQTFKTDAKKFYRELGKSKIEVKEPPEQDKVEEFWTNIWGKEKNFNADASWIEREEERVEEIEGQKWIDITVEELQTALTKSQKWKSPGIDKIPNFWLNSLSEGHIHLVRSFNEIMVNPEDIRPWLTEGITYLLPKSEETQNPKNYRPITCLTTTYKILTSIITDRMYSFLEDNTILPHEQKGCKRNSYGCKDQLLINKMLLENCKKKSRNLSTAWIDYRKAFDSVPHDWILKSLDIYKISPVISKFLKNSMTSWNTRLFLSHSSGTNQSNSINIKRGIFQGDSLSPLLFCISLIPLSNELSNTGYGYKIAEKIINHLFYMDDLKLFAKNDRELEGLLTTVKEFSNDIGMDFGLDKCAKATFIRGKLTKTSSINLDLDTTIRELDSDGIYKYLGVNEGDGINHATMKEKIRKEYYRRVRMVLKTELNAKNRIEAINILAVPVVQYSFNIINWNMLDLQRMDAKTRKLFTANHMLHPKADVDRLYLPRREGGRGLIQLELAYKTTTIGMEKYLDTTDDWMLQLVFNHENGKRLHSICKEARKFANDFDIDIQQPIEENTPATKAAKSIKQKAKKIGNQQLADKWSQKALHGQYVLRSRNADVDQNATHQWLRSSSLKAETEGFIIAAQDQSLFTRNYQANILHNGADPKCRFCDQFVETIDHLISGCPILAPSEYVNRHDRVGQYLHWGICQHYQIPVHQNWYEHKPSPVVNSEDVTILWDFSINTDRTIQANRPDIVIKDHKLKTCTLIDMSIPSDRNIAIKEFEKISKYKDLEIEIQRMWKMKTTTVPVIVGALGMIKKDTQNHLDKIPGNLKLQEIQKNRDN

SEQ ID NO: 3481 - protein, 1010 aa, Morbakka virulenta
MNFVGKESGNEIEEVGEDGGKLERELVLHAPLMSAAEVKYMIREERNPVEIGQPSEDQGYLSFIENNRKNIANARTETLRELSISEQTSMEERETLPKIANNARAKAKIKLFNVAVKEILKIEKYDITSLNNILYSTAKAATIDIGIKIKKNKKKHTNKPPKWKVNIQKEIDSLRTEISTLDEIARGTLVKTRKSRRVTKKYNVTDPTSIDTAKETLKQRIQVKAQRLRRYDKRTKFYRQNQTFKTDAKKFYRELGKSKIEVKEPPEQDKVEEFWTNIWGKEKNFNADASWIEREEERVEEIEGQKWIDITVEELQTALTKSQKWKSPGIDKIPNFWLNSLSEGHIHLVRSFNEIMVNPEDIRPWLTEGITYLLPKSEETQNPKNYRPITCLTTTYKILTSIITDRMYSFLEDNTILPHEQKGCKRNSYGCKDQLLINKMLLENCKKKSRNLSTAWIDYRKAFDSVPHDWILKSLDIYKISPVISKFLKNSMTSWNTRLFLSHSSGTNQSNSINIKRGIFQGDSLSPLLFCISLIPLSNELSNTGYGYKIAEKIINHLFYMDDLKLFAKNDRELEGLLTTVKEFSNDIGMDFGLDKCAKATFIRGKLTKTSSITLDLDTTIRELDSDGIYKYLGVNEGDGINHATMKEKIRKEYYRRVRMVLKTELNAKNRIEAINILAVPVVQYSFNIINWNMLDLQRMDAKTRKLFTANHMLHPKADVDRLYLPRREGGRGLIQLELAYKTTTIGMEKYLDTTDDWMLQLVFNHENGKRLHSICKEARKFANDFDIDIQQPIEENTPATKAAKSIKQKAKKIGNQQLADKWSQKALHGQYVLRSRNADVDQNATHQWLRSSSLKAETEGFIIAAQDQSLFTRNYQANILHNGADPKCRFCDQFVETIDHLISGCPIVAPSEYVNRVGQYLHWEICQHYQIPVHQNWYEHKRSPVVNSEDITILWDFSINTDRTIQANRPDIVIKDHKLKTCTLIDMSIPSDRNIAIKEFEKISKYKDL

SEQ ID NO: 3482 - protein, 1134 aa, Morbakka virulenta
MRNLTEQTYNEWRKIVGTDIRRNIDANKLANIRRDILNHKRLTDAQIDQIRDEVRRSDANFVGEESGNVIEEVGEDGGNPERELVLNVPLMGAAEVENMIREVRNPIEIGQPSEDQGYLTFIENNRENIANARTEILRELSITEQTPMEERETLPKIVNNSRAKAKIKLFNVAVKEILKTQKYDITSLNNILYSTAKAATIDIGIKIKKNKKKHTNKPPKWKVNIQKEIDSLRAEISTLDEIARGTLVKTRKSKRIKKKYNVTDQTSIDTAKETLKQRIQVKAQRLRRYDKRTKFYRQNQTFKTDAKKFYRELGKSKIEVKEPPEQDKVEEFWTNIWGKEKNFNADASWIEREEERVEEIEGQKWIDITVEELQTALTKSQKWKSPGIDKIPNFWLNSLSEGHIHLVRSFNEIMVNPEDIRPWLTEGITYLLPKSEETQNPKNYRPITCLTTTYKILTSIITDRMYSFLEDNTILPHEQKGCKRNSYGCKDQLLINKMLLENCKKKSRNLSTAWIDYRKAFDSVPHDWILKSLDIYKISPVISKFLKNSMTSWNTRLFLSHSSGTNQSNSINIKRGIFQGDSLSPLLFCISLIPLSNELSNTGYGYKIAEKIINHLFYMDDLKLFAKNDRELEGLLTTVKEFSNDIGMDFGLDKCAKATFIRGKLTKTSSITLDLDTTIRELDSDGIYKYLGVNEGDGINHATMKEKIRKEYYRRVRMVLKTELNAKNRIEAINILAVPVVQYSFNIINWNMLDLQRMDAKTRKLFTANHMLHPKADVDRLYLPRREGGRGLIQLELAYKTTTIGMEKYLDTTDDWMLQLVFNHENGKRLHSICKEARKFANDFDIDIQQPIEENTPATKAAKSIKQKAKKIGNQQLADKWSQKALHGQYVLRSRNADVDQNATHQWLRSSSLKAETEGFIIAAQDQSLFTRNYQANILHNGADPKCRFCDQFVETIDHLISGCPILAPSEYVNRHDRVGQYLHWGICQHYQIPVHQNWYEHKPSLVVNSEDVTILWDFSINTDRTIQANRPDIVIKDHKLKTCTLIDMSIPSDRNIGVKEFEKISKYKDLEIEIQRMWKMKTTTVPVIVGALGMIKKDTQNYLDKIPGNPKLQEIQKIVITSTAHILRKTLSM

SEQ ID NO: 3483 - protein, 1224 aa, Morbakka virulenta
MQTRRKKSYRIGRRADNQGSRPSGGNQPEVEKYTTGINSSKNDLVGNQNQDIPNPDPPVIPQKQKEKRTKWSIEDYRNVLRAYYTSQLRPMRNLTEQTYNEWRKIVGTDIRRNIDANKLANIRRDILNHKRLTDAQIDQIRDEVRRSDANFVGEESGNEIEEVGEDGGNPERELVLNVPLMGAAEVENMIREVRNPIEIGQPSEDQGYLTFIENNRENIANARTEILRELSITEQTPMEERETLPKIVNNSRAKAKIKLFNVAVKEILKTQKYDITSLNNILYSTAKAATIDIGIKIKKNKKKHTNKPPKWKVNIQKEIDSLRAEISTLDEIARGTLVKTRKSKRIKKKYNVTDQTSIDTAKETLKQRIQVKAQRLRRYDKRTKFYRQNQTFKTDAKKFYRELGKSKIEVKEPPEQDKVEEFWTNIWGKEKNFNADASWIEREEERVEEIEGQKWIDITVEELQTALTKSQKWKSPGIDKIPNFWLNSLSEGHIHLVRSFNEIMVNPEDIRPWLTEGITYLLPKSEETQNPKNYRPITCLTTTYKILTSIITDRMYSFLEDNTILPHEQKGCKRNSYGCKDQLLINKMLLENCKKKSRNLSTAWIDYRKAFDSVPHDWILKSLDIYKISPVISKFLKNSMTSWNTRLFLSHSSGTNQSNSINIKRGIFQGDSLSPLLFCISLIPLSNELSNTGYGYKIAEKIINHLFYMDDLKLFAKNDRELEGLLTTVKEFSNDIGMDFGLDKCAKATFIRGKLTKTSSITLDLDTTIRELDSDGIYKYLGVNEGDGINHATMKEKIRKEYYRRVRMVLKTELNAKNRIEAINILAVPVVQYSFNIINWNMLDLQRMDAKTRKLFTANHMLHPKADVDRLYLPRREGGRGLIQLELAYKTTTIGMEKYLDTTDDWMLQLVFNHENGKRLHSICKEARKFANDFDIDIQQPIEENTPATKAAKSIKQKAKKIGNQQLADKWSQKALHGQYVLRSRNADVDQNATHQWLRSSSLKAETEGFIIAAQDQSLFTRNYQANILHNGADPKCRFCDQFVETIDHLISGCPILAPSEYVNRHDRVGQYLHWGICQHYQIPVHQNWYEHKPSPVVNSEDVTILWDFSINTDRTIQANRPDIVIKDHKLKTCTLIDMSIPSDRNIAIKEFEKISKYKDLEIEIQRMWKMKTTTVPVIVGALGMIKKDTQNYLDKIPGNPKLQEIQKIVITSTAHILRKTLSM

SEQ ID NO: 3484 - protein, 1224 aa, Morbakka virulenta
MQTRRKKSYRIGRRAGNQGSRPSGGNQPEVEKYTTGINSSKNDLVGNQNQDIPNPDPPVIPQKQKEKRTKWSIEDYSNVLRAYYTSQLRPMRNLTEQTYNEWRKIVGTDIRRNIDANKLANIRRDILNHKRLTDAQIDQIRDEVRRSDANFVGEESGNVIEEVGEDGGNPERELVLNVPLMGAAEVENMIREVRNPIEIGQPSEDQGYLTFIENNRENIANARTEILRELSITEQTPMEERETLPKIVNNSRAKAKIKLFNVAVKEILKTQKYDITSLNNILYSTAKAATIDIGIKIKKNKKKHTNKPPKWKVNIQKEIDSLRAEISTLDEIARGTLVKTRKSKRIKKKYNVTDQTSIDTAKETLKQRIQVKAQRLRRYDKRTKFYRQNQTFKTDAKKFYRELGKSKIEVKEPPEQDKVEEFWTNIWGKEKNFNADASWIEREEERVEEIEGQKWIDITVEELQTALTKSQKWKSPGIDKIPNFWLNSLSEGHIHLVRSFNEIMVNPEDIRPWLTEGITYLLPKSEETQNPKNYRPITCLTTTYKILTSIITDRMYSFLEDNTILPHEQKGCKRNSYGCKDQLLINKMLLENCKKKSRNLSTAWIDYRKAFDSVPHDWILKSLDIYKISPVISKFLKNSMTSWNTRLFLSHSSGTNQSNSINIKRGIFQGDSLSPLLFCMSLIPLSNELSNTGYGYKIAEKIINHLFYMDDLKLFAKNDRELEGLLTTVKEFSNDIGMDFGLDKCAKATFIRGKLTKTSSITLDLDTTIRELDSDGIYKYLGVNEGDGINHATMKEKIRKEYYRRVRMVLKTELNAKNRIEAINILAVPVVQYSFNIINWNMLDLQRMDAKTRKLFTANHMLHPKADVDRLYLPRREGGRGLIQLELAYKTTTIGMEKYLDTTDDWMLQLVFNHENGKRLHSICKEARKFANDFDIDIQQPIEENTPATKAAKSIKQKAKKIGNQQLADKWSQKALHGQYVLRSRNADVDQNATHQWLRSSSLKAETEGFIIAAQDQSLFTRNYQANILHNGADPKCRFCDQFVETIDHLISGCPILAPSEYVNRHDRVGQYLHWGICQHYQIPVHQNWYEHKPSPVVNSEDVTILWDFSINTDRTIQANRPDIVIKDHKLKTCTLIDMSIPSDRNIAIKEFEKISKYKDLEIEIQRMWKMKTTTVPVIVGALGMIKKDTQKFLDKIPGNLKLQEIQKIVITSTAHILRKTLSM

SEQ ID NO: 3485 - protein, 1224 aa, Morbakka virulenta
MQTRRKNSYRIGRRAGNQGSRPSGGNQPEVEKYTTGINSSKNDLVGNQNQDIPNPDPPVIPQKQKEKRTKWSIEDYRNVLRAYYTSQLRPMRNLTEQTYNEWRKIVGTDIRRNIDANKLANIRRDILNHKRLTDAQIDQIRDEVRRSDANFVGEESGNVIEEVGEDGGNPERELVLNVPLMGAAEVENMIREVRNPIEIGQPSEDQGYLTFIENNRENIANARTEILRELSITEQTPMEERETLPKIVNNSRAKAKIKLFNVAVKEILKTQKYDITSLNNILYSTAKAATIDIGIKIKKNKKKHTNKPPKWKVNIQKEIDSLRAEISTLDEIARGTLVKTRKSKRIKKKYNVTDQTSIDTAKETLKQRIQVKAQRLRRYDKRTKFYRQNQTFKTDAKKFYRELGKSKIEVKEPPEQDKVEEFWTNIWGKEKNFNADASWIEREEERVEEIEGQKWIDITVEELQTALTKSQKWKSPGIDKIPNFWLNSLSEGHIHLVRSFNEIMVNPEDIRPWLTEGITYLLPKSEETQNPKNYRPITCLTTTYKILTSIITDRMYSFLEDNTILPHEQKGCKRNSYGCKDQLLINKMLLENCKKKSRNLSTAWIDYRKAFDSVPHDWILKSLDIYKISPVISKFLKNSMTSWNTRLFLSHSSGTNQSNSINIKRGIFQGDSLSPLLFCISLIPLSNELSNTGYGYKIAEKIINHLFYMDDLKLFAKNDRELEGLLTTVKEFSNDIGMDFGLDKCAKATFIRGKLTKTSSITLDLDTTIRELDSDGIYKYLGVNEGDGINHATMKEKIRKEYYRRVRMVLKTELNAKNRIEAINILAVPVVQYSFNIINWNMLDLQRMDAKTRKLFTANHMLHPKADVDRLYLPRREGGRGLIQLELAYKTTTIGMEKYLDTTDDWMLQLVFNHENGKRLHSICKEARKFANDFDIDIQQPIEENTPATKAAKSIKQKAKKIGNQQLADKWSQKALHGQYVLRSRNADVDQNATHQWLRSSSLKAETEGFIIAAQDQSLFTRNYQANILHNGADPKCRFCDQFVETIDHLISGCPILAPSEYVNRHDRVGQYLHWGICQHYQIPVHQNWYEHKPSPVVNSEDVTILWDFSINTDRTIQANRPDIVIKDHKLKTCTLIDMSIPSDRNIAIKEFEKISKYKDLEIEIQRMWKMKTTTVPVIVGALGKIKKDTQNFLDKIPGNLKLQEIQKIVITSTAHILRKTLSM

SEQ ID NO: 3486 - protein, 1134 aa, Morbakka virulenta
MRNLTEQTYNEWRKIVGNDIRRNLDANKLANILRDILNNKRLTDAQIDQIRDEVRRSDANFVGEESGNEIDEVGEDGGNPERELVLKAPLMSAAEVENMIREVRNPVEIGQPSEDQGYLTFIENNRENITNARTEILRELSITEQTSMEERETLPKIANNSRAKAKIKRFNVAMKEILKTQKYDITSLNNILYSTAKAATIDIGIKIKKNKKKHTNKPPKWKVNIQKEIDSLRAEISTLDEIARGTLVKTRKSKRIKKKYNVTDQTSIDTAKETLKQRIQVKAQRLRRYDKRTKFYRQNQTFKTDAKKFYRELGKSKIEVKEPPEQDKVEEFWTNIWGKEKNFNADASWIEREEERVEEIEGQKWIDITVEELQTALTKSQKWKSPGIDKIPNFWLNSLSEGHIHLVRSFNEIMVNPEDIRPWLTEGITYLLPKSEETQNPKNYRPITCLTTTYKILTSIITDRMYSFLEDNTILPHEQKGCKRNSYGCKDQLLINKMLLENCKKKSRNLSTAWIDYRKAFDSVPHDWILKSLDIYKISPVISKFLKNSMTSWNTRLFLSHSSGTNQSNSINIKRGIFQGDSLSPLLFCISLIPLSNELSNTGYGYKIAEKIINHLFYMDDLKLFAKNDRELEGLLTTVKEFSNDIGMDFGLDKCAKATFIRGKLTKTSSITLDLDTTIRELDSDGIYKYLGVNEGDGINHATMKEKIRKEYYRRVRMVLKTELNAKNRIEAINILAVPVVQYSFNIINWNMLDLQRMDAKTRKLFTANHMLHPKADVDRLYLPRREGGRGLIQLELAYKTTTIGMEKYLDTTDDWMLQLVFNHENGKRLHSICKEARKFANDFDIDIQQPIEENTPATKAAKSIKQKAKKIGNQQLADKWSQKALHGQYVLRSRNADVDQNATHQWLRSSSLKAETEGFIIAAQDQSLFTRNYQANILHNGADPKCRFCDQFVETIDHLISGCPILAPSEYVNRHDRVGQYLHWGICQHYQIPVHQNWYEHKPSPVVNSEDVTILWDFSINTDRTIQANRPDIVIKDHKLKTCTLIDMSIPSDRNIAIKEFEKISKYKDLEIEIQRMWKMKTTTVPVVVDAFGMIKKDTQNYLDKIPGNLKLQEIQKIVITSTAHILRKTLSM

SEQ ID NO: 3487 - protein, 1125 aa, Morbakka virulenta
MPTRNLTEQTYVEWRKIEGNDFQKNFDSNKLANVRRNIFKYKRLNDAQIDQLRNDNRQVDDSVVEEQAGDANAEAIVRVVRMNENEIENVINTVGNEEQDQNNNNDQPEIDDFLENNRDEIAESRDDNIRELSKIEFIKMEDRESLPKIAANSKAKKMIELYNVALREIINETETRICSVNNLIYSTARAVTAQLGVKVKKKGKKHTNKAPSWKVKIQKEIESLRAEISILDEISKGTAVKTRKSRKVKKKYRFTDEASIAEIKETLKQKIQVKAQRLRRFDKRNKFYRQNKIFKTDAKKFYREIGKGQIEIKDPPKGEDVEEFWNKIWGEEKLFNKEATWIEREEERVSEVEEQDWVSITMDEVQAALRKSKKWTSPGIDKIPNFWLNVLVPSHVELAQSLNDIMEKPEDAPEWLTEGLSYLLPKSDDTKNPKNYRPITCLTTTYKLLTSIITERMYNFLEINSILPQEQKGCRRNSYGCKDQLLINRMILENCRKGKRSLSTAWIDYRKAFDSVPHDWILKSLSIYKISPYISNFLRHSMGQWKARLLLSHDNGVAESNFIRIKRGIFQGDSLSPLLFCMSLIPLSNELNNTGSGYKIFDKVINHLFYMDDLKLYAKNDQELEGLLTTAKAFSNDICMDFGLDKCAKATFVKGRLRETSSINVDVDTIIKELDQEDTYKYLGVEEGDGISHATMKEKIRKEYYRRIRLVLKTELNSKNRIEAINTLAIPVVQYSFSIINWNLPDLQRMDRKTRKLLTSNRMLHPKADVDRLYLPRSNGGRGLIQLELSFKTTIIGMKQYLECTNDWMLSLVHRHEISKKLHSIIKESNAFERELKVDPMVEAKQVPVTKLAKKAKEAAKKNGQDQLYQRWSQKALHGQYVLRSQNADVDQVATHQWLRSSGLKAETEGFIVAAQDQSLFTRNYQANILRNGADPKCRFCDQFVETIDHLVSGCPVLTPSEYVKRHDRVGQYLHWGICQHYHVETPTKWYEHHPLPVINGPNVTILWDFPVNTDRTIQANRPDIIIKDHLTKTCTLIDMSIPNDKNISVKQFDKLSKYKDLEIEIAKMWNLKTTTVPVIIGALGMIKKGTDKHLAKIPGNHNLQEIQKIVLTSTANILRKSLST

SEQ ID NO: 3488 - protein, 1215 aa, Morbakka virulenta
MRTRHKTYRIVRRAGQQGTRLSVGNQAGVFEKSATGMNPSKNELQGNQNQDPPNPEPVVISTTSTQKTKRHKWSIEDYKNVLRAFYIAQRMPTRNLTEQTYVEWRKIVGNDFQKNFDSNKLANVRRDIFKYKRLNDAQIDQLRNDNRQVDDSVVEEQAGDANAKAIVRVVKMNENEIENVINVIGNEEQDQNNNNDQPEIDDFLENNRAKIAEARDDIIRELSKTEFIKIEDRESLPKIAANSKAKKMIKIYNVALREIINETETRICSINNLIYSTARAVTAQLGVKVKKKGKKHTNKAPSWKVKIQKEIESLRAEISILDEISKGTAVKTRKSRKVKKKYRFTDEASIAEIKETLKQKIQVKAQRLRRFDKRNKFYRQNKIFKTDAKKFYREIGKGQIEIKDPPKGEDVEEFWNKIWGEEKLFNKEATWIEREEERVSEVEEQDWVSITMDEVQAALRKSKKWTSPGIDKIPNFWLNVLVPSHVELAQSLNDIMEKPEDAPEWLTEGLSYLLPKSDDTKNPKNYRPITCLTTTYKLLTSIITERMYNFLEINSILPQEQKGCRRNSYGCKDQLLINRMILENCRKGKRSLSTAWIDYRKAFDSVPHDWILKSLSIYKISPYISNFLRHSMGQWKARLLLSHDNGVAESNFIRIKRGIFQGDSLSPLLFCMSLIPLSNELNNTGSGYKIFDKVINHLFYMDDLKLYAKNDQELEGLLTTAKAFSNDICMDFGLDKCAKATFVKGRLRETSSINVDVDTIIKELDQEDTYKYLGVEEGDGISHATMKEKIRKEYYRRIRLVLKTELNSKNRIEAINTLAIPVVQYSFSIINWNLPDLQRMDRKTRKLLTSNRMLHPKADVDRLYLPRSNGGRGLIQLELSFKTTIIGMKQYLECTNDWMLSLVHRHEISKKLHSIIKESNAFERELKVDPMVEAKQVPVTKLAKKAKEAAKKNGQDQLYQRWSQKALHGQYVLRSQNADVDQVATHQWLRSSGLKAETEGFIVAAQDQSLFTRNYQANILRNGADPKCRFCDQFVETIDHLVSGCPVLTPSEYVKRHDRVGQYLHWGICQHYHVETPTNWYEHHPLPVINGPNVTILWDFPVNTDRTIQANRPDIIIKDHLTKTCTLIDMSIPNDKNISVKQFDKLSKYKDLEIEIAKMWNLKTTTVPVIIGALGMIKKGTDKHLAKIPGNHNLQEIQKIVLTSTANILRKSLST

SEQ ID NO: 3489 - protein, 1174 aa, Morbakka virulenta
MRTRHKTYRIVRRAGQQGTRLSVGNQAGVFEKSATGMNPSKNELQGNQNQDPPNPEPVVISTTSTQKTKRHKWSIEDYKNVLRAFYIAQRMPTRNLTEQTYVEWRKIVGNDFQKNFDSNKLANVRRDIFKYKRLNDAQIDQLRNDNRQVDDSVVEEQAGDANAKAIVRVVKMNENEIENVINVIGNEEQDQNNNNDQPEIDDFLENNRAKIAEARDDIIRELSKTEFIKIEDRESLPKIAANSKAKKMIKIYNVALREIINETETRICSINNLIYSTARAVTAQLGVKVKKKGKKHTNKAPSWKVKIQKEIESLRAEISILDEISKGTAVKTRKSRKVKKKYRFTDEASIAEIKETLKQKIQVKAQRLRRFDKRNKFYRQNKIFKTDAKKFYREIGKGQIEIKDPPKGEDVEEFWNKIWGEEKLFNKEATWIEREEERVSEVEEQDWVSITMDEVQAALRKSKKWTSPGIDKIPNFWLNVLVPSHVELAQSLNDIMEKPEDAPEWLTEGLSYLLPKSDDTKNPKNYRPITCLTTTYKLLTSIITERMYNFLEINSILPQEQKGCRRNSYGCKDQLLINRMILENCRKGKRSLSTAWIDYRKAFDSVPHDWILKSLSIYKISPYISNFLRHSMGQWKARLLLSHDNGVAESNFIRIKRGIFQGDSLSPLLFCMSLIPLSNELNNTGSGYKIFDKVINHLFYMDDLKLYAKNDQELEGLLTTAKAFSNDICMDFGLDKCAKATFVKGRLRETSSINVDVDTIIKELDQEDTYKYLGVEEGDGISHATMKEKIRKEYYRRIRLVLKTELNSKNRIEAINTLAIPVVQYSFSIINWNLPDLQRMDRKTRKLLTSNRMLHPKADVDRLYLPRSNGGRGLIQLELSFKTTIIGMKQYLECTNDWMLSLVHRHEISKKLHSIIKESNAFERELKVDPMVEAKQVPVTKLAKKAKEAAKKNGQDQLYQRWSQKALHGQYVLRSQNADVDQVATHQWLRSSGLKAETEGFIVAAQDQSLFTRNYQANILRNGADPKCRFCDQFVETIDHLVSGCPVLTPSEYVKRHDRVGQYLHWGICQHYHVETPTKWYEHHPLPVINGPNVTILWDFPVNTDRTIQANRPDIIIKDHLTKTCTLIDMSIPNDKNISVKQFDKLSKYKDLEIEIAKMWNLKTTTVPVIIDND

SEQ ID NO: 3490 - protein, 1044 aa, Morbakka virulenta
MNENEIENVINVIGNEEQDQNNNNDQPEIDDFLENNRAKIAEARDDIIRELSKTEFIKIEDRESLPKIAANSKAKKMIKIYNVALREIINETETRICSINNLIYSTARAVTAQLGVKVKKKGKKHTNKAPSWKVKIQKEIESLRAEISILDEISKGTAVKTRKSRKVKKKYRFTDEASIAEIKETLKQKIQVKAQRLRRFDKRNKFYRQNKIFKTDAKKFYREIGKGQIEIKDPPKGEDVEEFWNKIWGEEKLFNKEATWIEREEERVSEVEEQDWVSITMDEVQAALRKSKKWTSPGIDKIPNFWLNVLVPSHVELAQSLNDIMEKPEDAPEWLTEGLSYLLPKSDDTKNPKNYRPITCLTTTYKLLTSIITERMYNFLEINSILPQEQKGCRRNSYGCKDQLLINRMILENCRKGKRSLSTAWIDYRKAFDSVPHDWILKSLSIYKISPYISNFLRHSMGQWKARLLLSHDNGVAESNFIRIKRGIFQGDSLSPLLFCMSLIPLSNELNNTGSGYKIFDKVINHLFYMDDLKLYAKNDQELEGLLTTAKAFSNDICMDFGLDKCAKATFVKGRLRETSSINVDVDTIIKELDQEDTYKYLGVEEGDGISHATMKEKIRKEYYRRIRLVLKTELNSKNRIEAINTLAIPVVQYSFSIINWNLPDLQRMDRKTRKLLTSNRMLHPKADVDRLYLPRSNGGRGLIQLELSFKTTIIGMKQYLECTNDWMLSLVHRHEISKKLHSIIKESNAFERELKVDPMVEAKQVPVTKLAKKAKEAAKKNGQDQLYQRWSQKALHGQYVLRSQNADVDQVATHQWLRSSGLKAETEGFIVAAQDQSLFTRNYQANILRNGADPKCRFCDQFVETIDHLVSGCPVLTPSEYVKRHDRVGQYLHWGICQHYHVETPTNWYEHHPLPVINGPNVTILWDFPVNTDRTIQANRPDIIIKDHLTKTCTLIDMSIPNDKNISVKQFDKLSKYKDLEIEIAKMWNLKTTTVPVIIGALGMIKKGTDKHLAKIPGNHNLQEIQKIVLTSTANILRKALST

SEQ ID NO: 3491 - protein, 1229 aa, Morbakka virulenta
MARNTQPLGSKVKMHRTRHKTYRIVRRAGQQGTRPSVGNQAGVFEKSATGMNPSKNELQGNQNQDPPNPEPVVISTTSTQKTKRHKWSIEDYKNVLRAFYIAQRMPTRNLTEQTYVEWRKIVGNDFQKNFDSNKLANVRRDIFKYKRLNDAQIDQLRNDNRQVDDSVVEEQAGDANAKAIVRVVKMNENEIENVINVIGNEEQDQNNNNDQPEIDDFLENNRAKIAEARDDIIRELSKTEFIKIEDRESLPKIAANSKAKKMIKIYNVALREIINETETRICSINNLIYSTARAVTAQLGVKVKKKGKKHTNKAPSWKVKIQKEIESLRAEISILDEISKGTAVKTRKSRKVKKKYRFTDEASIAEIKETLKQKIQVKAQRLRRFDKRNKFYRQNKIFKTDAKKFYREIGKGQIEIKDPPKGEDVEEFWNKIWGEEKLFNKEATWIEREEERVSEVEEQDWVSITMDEVQAALRKSKKWTSPGIDKIPNFWLNVLVPSHVELAQSLNDIMEKPEDAPEWLTEGLSYLLPKSDDTKNPKNYRPITCLTTTYKLLTSIITERMYNFLEINSILPQEQKGCRRNSYGCKDQLLINRMILENCRKGKRSLSTAWIDYRKAFDSVPHDWILKSLSIYKISPYISNFLRHSMGQWKARLLLSHDNGVAESNFIRIKRGIFQGDSLSPLLFCMSLIPLSNELNNTGSGYKIFDKVINHLFYMDDLKLYAKNDQELEGLLTTAKAFSNDICMDFGLDKCAKATFVKGRLRETSSINVDVDTIIKELDQEDTYKYLGVEEGDGISHATMKEKIRKEYYRRIRLVLKTELNSKNRIEAINTLAIPVVQYSFSIINWNLPDLQRMDRKTRKLLTSNRMLHPKADVDRLYLPRSNGGRGLIQLELSFKTTIIGMKQYLECTNDWMLSLVHRHEISKKLHSIIKESNAFERELKVDPMVEAKQVPVTKLAKKAKEAAKKNGQDQLYQRWSQKALHGQYVLRSQNADVDQVATHQWLRSSGLKAETEGFIVAAQDQSLFTRNYQANILRNGADPKCRFCDQFVETIDHLVSGCPVLTPSEYVKRHDRVGQYLHWGICQHYHVETPTKWYEHHPLPVINGPNVTILWDFPVNTDRTIQANRPDIIIKDHLTKTCTLIDMSIPNDKNISVKQFDKLSKYKDLEIEIAKMWNLKTTTVPVIIGALGMIKKGTDKHLAKIPGNHNLQEIQKIVLTSTANILRKSLST

SEQ ID NO: 3492 - protein, 1215 aa, Morbakka virulenta
MRTRHKTYRIVRRAGQQGTRPSVGNQAGVFEKSATGMNPSQNELQGNPNQDPPNPEPVVIPTPSTQKTKRHKWSIQDYKNVLRAFYIAQRMPTRNLTEQTYVEWRKIVGNDFQKNFDSNKLANVRRDIFKYKRLNDAQIDQLRNDNRQVDDSVVEEQAGDANAKAIVRVVKMNENEIENVINVIGNEEQDQNNNNDQPEIDDFLENNRAKIAEARDDIIRELSKTEFIKIEDRESLPKIAANSKAKKMIKIYNVALREIINETETRICSINNLIYSTARAVTAQLGVKVKKKGKKHTNKAPSWKVKIQKEIESLRAEISILDEISKGTAVKTRKSRKVKKKYRFTDEASIAEIKETLKQKIQVKAQRLRRFDKRNKFYRQNKIFKTDAKKFYREIGKGQIEIKDPPKGEDVEEFWNKIWGEEKLFNKEATWIEREEERVSEVEEQDWVSITMDEVQAALRKSKKWTSPGIDKIPNFWLNVLVPSHVELAQSLNDIMEKPEDAPEWLTEGLSYLLPKSDDTKNPKNYRPITCLTTTYKLLTSIITERMYNFLEINSILPQEQKGCRRNSYGCKDQLLINRMILENCRKGKRSLSTAWIDYRKAFDSVPHDWILKSLSIYKISPYISNFLRHSMGQWKARLLLSHDNGVAESNFIRIKRGIFQGDSLSPLLFCMSLIPLSNELNNTGSGYKIFDKVINHLFYMDDLKLYAKNDQELEGLLTTAKAFSNDICMDFGLDKCAKATFVKGRLRETSSINVDVDTIIKELDQEDTYKYLGVEEGDGISHATMKEKIRKEYYRRIRLVLKTELNSKNRIEAINTLAIPVVQYSFSIINWNLPDLQRMDRKTRKLLTSNRMLHPKADVDRLYLPRSNGGRGLIQLELSFKTTIIGMKQYLECTNDWMLSLVHRHEISKKLHSIIKESNAFERELKVDPMVEAKQVPVTKLAKKAKEAAKKNGQDQLYQRWSQKALHGQYVLRSQNADVDQVATHQWLRSSGLKAETEGFIVAAQDQSLFTRNYQANILRNGADPKCRFCDQFVETIDHLVSGCPVLTPSEYVKRHDRVGQYLHWGICQHYHVETPTNWYEHHPLPVINGPNVTILWDFPVNTDRTIQANRPDIIIKDHLTKTCTLIDMSIPNDKNISVKQFDKLSKYKDLEIEIAKMWNLKTTTVPVIIGALGMIKKGTDKHLAKIPGNHNLQEIQKIVLTSTANILRKSLST

SEQ ID NO: 3493 - protein, 1125 aa, Morbakka virulenta
MPTRNLTEQTYVEWRKIVGNDFQKNFDSNKLANVRRDIFKYKRLNDAQIDQLRNDNRQVDDSVVEEQAGGANAKAIVRVVKMNENEIENVINVIGNEEQDQNNNNDQPEIDDFLENNRAKIAEARDDIIRELSKTEFIKIEDRESLPKIAANSKAKKMIKIYNVALREIINETETRICSINNLIYSTARAVTAQLGVKVKKKGKKHTNKAPSWKVKIQKEIESLRAEISILDEISKGTAVKTRKSRKVKKKYRFTDEASIAEIKETLKQKIQVKAQRLRRFDKRNKFYRQNKIFKTDAKKFYREIGKGQIEIKDPPKGEDVEEFWNKIWGEEKLFNKEATWIEREEERVSEVEEQDWVSITMDEVQAALRKSKKWTSPGIDKIPNFWLNVLVPSHVELAQSLNDIMEKPEDAPEWLTEGLSYLLPKSDDTKNPKNYRPITCLTTTYKLLTSIITERMYNFLEINSILPQEQKGCRRNSYGCKDQLLINRMILENCRKGKRSLSTAWIDYRKAFDSVPHDWILKSLSIYKISPYISNFLRHSMGQWKARLLLSHDNGVAESNFIRIKRGIFQGDSLSPLLFCMSLIPLSNELNNTGSGYKIFDKVINHLFYMDDLKLYAKNDQELEGLLTTAKAFSNDICMDFGLDKCAKATFVKGRLRETSSINVDVDTIIKELDQEDTYKYLGVEEGDGISHATMKEKIRKEYYRRIRLVLKTELNSKNRIEAINTLAIPVVQYSFSIINWNLPDLQRMDRKTRKLLTSNRMLHPKADVDRLYLPRSNGGRGLIQLELSFKTTIIGMKQYLECTNDWMLSLVHRHEISKKLHSIIKESNAFERELKVDPMVEAKQVPVTKLAKKAKEAAKKNGQDQLYQRWSQKALHGQYVFRSQNADVDQVATHQWLRSSGLKAETEGFIVAAQDQSLFTRNYQANILRNGADPKCRFCDQFVETIDHLVSGCPVLTPSEYVKRHDRVGQYLHWGICQHYHVETPTKWYEHHPLPVINGPNVTILWDFPVNTDRTIQANRPDIIIKDHLTKTCTLIDMSIPNDKNISVKQFDKLSKYKDLEIEIAKMWNLKTTTVPVIIGALGMIKKGTDKHLAKIPGNHNLQEIQKIVLTSTANILRKSLST

SEQ ID NO: 3494 - protein, 1214 aa, Morbakka virulenta
MRTRHKTYRIVHRAGQQGRRPSVGNQAGVFEKSATGMNPSKNELQGNQNQDPPNPEPVVIPTPSTQKTKRHKWSIEDYKNVLRAFYIAQRIPTRNVTEQTYVEWKKIVGNDFQKNFDSNKLGNVRRDIFKYKRLNGAQVDQLRNDRQVDDSVVEEQAGDANAEAIVRVVRMNENEIENVMNVIGNEEQDQNNNNDQPEIDDFLENNRAKIAEARDDIISELSKTEFIKIEDRESLPKLAANSKAKKMIKIYNVALREIINETETRICSINNLIYSTARAVTAQLGVKVKKKGKKHTNKAPSWKVKIQKEIESLRAEISILDEISKGTAVKTRKSRKVKKKYRFTDEASIAEIKETLKQKIQVKAQRLRRFDKRNKFYRQNKIFKTDAKKFYREIGKGQIEIKDPPKGEDVEEFWNKIWGEEKLFNKEATWIEREEERVSEVEEQDWVSITMDEVQAALRKSKKWTSPGIDKIPNFWLNVLVPSHVELAQSLNDIMEKPEDAPEWLTEGLSYLLPKSDDTKNPKNYRPITCLTTTYKLLTSIITERMYNFLEINSILPQEQKGCRRNSYGCKDQLLINRMILENCRKGKRSLSTAWIDYRKAFDSVPHDWILKSLSIYKISPYISNFLRHSMGQWKARLLLSHDNGVAESNFIRIKRGIFQGDSLSPLLFCMSLIPLSNELNNTGSGYKIFDKVINHLFYMDDLKLYAKNDQELEGLLTTAKAFSNDICMDFGLDKCAKATFVKGRLRETSSINVDVDTIIKELDQEDTYKYLGVEEGDGISHATMKEKIRKEYYRRIRLVLKTELNSKNRIEAINTLAIPVVQYSFSIINWNLPDLQRMDRKTRKLLTSNRMLHPKADVDRLYLPRSNGGRGLIQLELSFKTTIIGMKQYLECTNDWMLSLVHRHEISKKLHSIIKESNAFERELKVDPMVEAKQVPVTKLAKKAKEAAKKNGQDQLYQRWSQKALHGQYVLRSQNADVDQVATHQWLRSSGLKAETEGFIVAAQDQSLFTRNYQANILRNGADPKCRFCDQFVETIDHLVSGCPVLTPSEYVKRHDRVGQYLHWGICQHYHVETPTKWYEHHPLPVINGPNVTILWDFPVNTDRTIQANRPDIIIKDHLTKTCTLIDMSIPNDKNISVKQFDKLSKYKDLEIEIAKMWNLKTTTVPVIIGALGMIKKGTDKHLAKIPGNHNLQEIQKIVLTSTANILRKSLSI

SEQ ID NO: 3495 - protein, 1215 aa, Morbakka virulenta
MRTRHKTYRIVRRAGQQGTRLSVGNQAGVFEKSATGMNPSKNELQGNQNQDPPNPEPVVISTTSTQKTKRHKWSIEDYKNVLRAFYIAQRMPTRNLTEQTYVEWRKIVGNDFQKNFDSNKLANVRRDIFKYKRLNDAQIDQLRNDNRQVDDSVVEEQAGDANAKAIVRVVKMNENEIENVINVIGNEEQDQNNNNDQPEIDDFLENNRAKIAEARDDIIRELSKTEFIKIEDRESLPKIAANSKAKKMIKIYNVALREIINETETRICSINNLIYSTARAVTAQLGVKVKKKGKKHTNKAPSWKVKIQKEIESLRAEISILDEISKGTAVKTRKSRKVKKKYRFTDEASIAEIKETLKQKIQVKAQRLRRFDKRNKFYRQNKIFKTDAKKFYREIGKGQIEIKDPPKGEDVEEFWNKIWGEEKLFNKEATWIEREEERVSEVEEQDWVSITMDEVQAALRKSKKWTSPGIDKIPNFWLNVLVPSHVELAQSLNDIMEKPEDAPEWLTEGLSYLLPKSDDTKNPKNYRPITCLTTTYKLLTSIITERMYNFLEINSILPQEQKGCRRNSYGCKDQLLINRMILENCRKGKRSLSTAWIDYRKAFDSVPHDWILKSLSIYKISPYISNFLRHSMGQWKARLLLSHDNGVAESNFIRIKRGIFQGDSLSPLLFCMSLIPLSNELNNTGSGYKIFDKVINHLFYMDDLKLYAKNDQELEGLLTTAKAFSNDICMDFGLDKCAKATFVKGRLRETSSINVDVDTIIKELDQEDTYKYLGVEEGDGISHATMKEKIRKEYYRRIRLVLKTELNSKNRIEAINTLAIPVVQYSFSIINWNLPDLQRMDRKTRKLLTSNRMLHPKADVDRLYLPRSNGGRGLIQLELSFKTTIIGMKQYLECTNDWMLSLVHRHEISKKLHSIIKESNAFERELKVDPMVEAKQVPVTKLAKKAKEAAKKNGQDQLYQRWSQKALHGQYVLRSQNADVDQVATHQWLRSSGLKAETEGFIVAAQDQSLFTRNYQANILRNGADPKCRFCDQFVETIDHLVSGCPVLTPSEYVKRHDRVGQYLHWGICQHYHVETPTKWYEHHPLPVINGPNVTILWDFPVNTDRTIQANRPDIIIKDHLTKTCTLIDMSIPNDKNISVKQFDKLSKYKDLEIEIAKMWNLKTTTVPVIIGALGMIKKGTDKHLAKIPGNHNLQEIQKIVLTSTANILRKSLST

SEQ ID NO: 3496 - protein, 1215 aa, Morbakka virulenta
MRTRHKTYRIVRRAGQQGTRLSVGNQAGVFEKSATGMNPSKNELQGNQNQDPPNPEPVVISTTSTQKTKRHKWSIEDYKNVLRAFYIAQRMPTRNLTEQTYVEWRKIVGNDFQKNFDSNKLANVRRDIFKYKRLNDAQIDQLRNDNRQVDDSVVEEQAGDANAKAIVRVVKMNENEIENVINVIGNEEQDQNNNNDQPEIDDFLENNRAKIAEARDDIIRELSKTEFIKIEDRESLPKIAANSKAKKMIKIYNVALRGIINETETRICSINNLIYSTARAVTAQLGVKVKKKGKKHTNKAPSWKVKIQKEIESLRAEISILDEISKGTAVKTRKSRKVKKKYRFTDEASIAEIKETLKQKIQVKAQRLRRFDKRNKFYRQNKIFKTDAKKFYREIGKGQIEIKDPPKGEDVEEFWNKIWGEEKLFNKEATWIEREEERVSEVEEQDWVSITMDEVQAALRKSKKWTSPGIDKIPNFWLNVLVPSHVELAQSLNDIMEKPEDAPEWLTEGLSYLLPKSDDTKNPKNYRPITCLTTTYKLLTSIITERMYNFLEINSILPQEQKGCRRNSYGCKDQLLINRMILENCRKGKRSLSTAWIDYRKAFDSVPHDWILKSLSIYKISPYISNFLRHSMGQWKARLLLSHDNGVAESNFIRIKRGIFQGDSLSPLLFCMSLIPLSNELNNTGSGYKIFDKVINHLFYMDDLKLYAKNDQELEGLLTTAKAFSNDICMDFGLDKCAKATFVKGRLRETSSINVDVDTIIKELDQEDTYKYLGVEEGDGISHATMKEKIRKEYYRRIRLVLKTELNSKNRIEAINTLAIPVVQYSFSIINWNLPDLQRMDRKTRKLLTSNRMLHPKADVDRLYLPRSNGGRGLIQLELSFKTTIIGMKQYLECTNDWMLSLVHRHEISKKLHSIIKESNAFERELKVDPMVEAKQVPVTKLAKKAKEAAKKNGQDQLYQRWSQKALHGQYVLRSQNADVDQVATHQWLRSSGLKAETEGFIVAAQDQSLFTRNYQANILRNGADPKCRFCDQFVETIDHLVSGCPVLTPSEYVKRHDRVGQYLHWGICQHYHVETPTKWYEHHPLPVINGPNVTILWDFPVNTDRTIQANRPDIIIKDHLTKTCTLIDMSIPNDKNISVKQFDKLSKYKDLEIEIAKMWNLKTTTVPVIIGALGMIKKGTDKHLAKIPGNHNLQEIQKIVLTSTANILRKSLST

SEQ ID NO: 3497 - protein, 1125 aa, Morbakka virulenta
MPTRNLTEQTYVEWRKIVGNDFQKNFDSNKLANVRRDIFKYKRLNDAQIDQLRNDNRQVDDSVVEEQAGDANAEAIVRVVRMNENEIENVINVIGNEEQDQNNNNDQPEIDDFLENNRAKIAEARDDIIRELSKTEFIKIEDRESLPKIAANSKAKKMIKIYNVALREIINETETRICSINNLIYSTARAVTAQLGVKVKKKGKKHTNKAPSWKVKIQKEIESLRAEISILDEISKGTAVKTRKSRKVKKKYRFTDEASIAEIKETLKQKIQVKAQRLRRFDKRNKFYRQNKIFKTDAKKFYREIGKGQIEIKDPPKGEDVEEFWNKIWGEEKLFNKEATWIEREEERVSEVEEQDWVSITMDEVQAALRKSKKWTSPGIDKIPNFWLNVLVPSHVELAQSLNDIMEKPEDAPEWLTEGLSYLLPKSDDTKNPKNYRPITCLTTTYKLLTSIITERMYNFLEINSILPQEQKGCRRNSYGCKDQLLINRMILENCRKGKRSLSTAWIDYRKAFDSVPHDWILKSLSIYKISPYISNFLRHSMGQWKARLLLSHDNGVAESNFIRIKRGIFQGDSLSPLLFCMSLIPLSNELNNTGSGYKIFDKVINHLFYMDDLKLYAKNDQELEGLLTTAKAFSNDICMDFGLDKCAKATFVKGRLRETSSINVDVDTIIKELDQEDTYKYLGVEEGDGISHATMKEKIRKEYYRRIRLVLKTELNSKNRIEAINTLAIPVVQYSFSIINWNLPDLQRMDRKTRKLLTSNRMLHPKADVDRLYLPRSNGGRGLIQLELSFKTTIIGMKQYLECTNDWMLSLVHRHEISKKLHSIIKESNAFERELKVDPMVEAKQVPVTKLAKKAKEAAKKNGQDQLYQRWSQKALHGQYVLRSQNADVDQVATHQWLRSSGLKAETEGFIVAAQDQSLFTRNYQANILRNGADPKCRFCDQFVETIDHLVSGCPVLTPSEYVKRHDRVGQYLHWGICQHYHVETPTKWYEHHPLPVINGPNVTILWDFPVNTDRTIQANRPDIIIKDHLTKTCTLIDMSIPNDKNISVKQFDKLSKYKDLEIEIAKMWNLKTTTVPVIIGALGMIKKGTDKHLAKIPGNHNLQEIQKIVLTSTANILRKSLST

SEQ ID NO: 3498 - protein, 902 aa, Morbakka virulenta
MRAEISILDEVSKGTPVKSRKSIKIRRKHKLTDGTSISIAKETLKQKIQVKAQRLRRFDKRNKFFRQNKIFKTDTKRFYREIGKNKIEVQEPPIKEEVEEFWNKIWGEEKNFNSEATWIGSEEERMNGIEEQEWKDITTDELRNALGKSQKWKSPGLDKIPNFWLNSLSETHELLKNCLNNIFINPNNTPDWMTQGTTYLLPKSNDTKNPKNYRPITCLTTIYKLLTSIITERMYVFLDDNSILPLEQKGCKRKSYGCKDQLLINKMILEDCRRRLKNLSTAWIDYKKAFDSVPHDWILKSLELYKISPVITNFLRNSMSKWNTQLLLSHKKGTTKSNLIKIKRGIFQGDSLSPLLFCIALIPLSNELNNSKSGYKVFDKTMNHLFYMDDLKLFAKNDDQLEGLLTTVKQFSNDICMDFGLDKCAKATFLRGRLSATSSVIIDQETFIRELDPEEMYKYLGVNESDGINHAAMKEKIRKEYYRRVRLVLKTELNSKNRIEAINTLAIPVVQYSYNIINWNLPEIENMDRKTRKLLTSNNMLHPKADVDRLYLPRNSGGRGLVQLEMSYKISTIGMNKYLETCEDWMLVLVRRHERGKRLHSITKKARMFENDLNIEPEDAEQHFQATTCARKAKIVAKKNAQKQLIDRWSQKSLHGQYVLRSQNPDVDQTATHQWLRSSGLKAETEGFIIAAQDQSLQTRNYQAYILRNGTDPKCRLCDKHTETIDHIVAGCPILAPGEYTKRHDRVGQYLHWGICNHYGIKTHHNWYEHHPEPVVESENVTILWDFPVHTDRTIQANRPDIIIKDKKNKLCTLIDMSVPSDNNIAVKEFDKLSKYKDLEIEIQKMWNLKATTVPVIVGALGMIKKGTEKYISKVPGEHKLQEIQKIVLTSTAHILRKFFTI

SEQ ID NO: 3499 - protein, 1215 aa, Morbakka virulenta
MRTRHKTYRIVRRAGQQGTRLSVGNQAGVFEKSATGMNPSKNELQGNQNQDPPNPEPVVISTTSTQKTKRHKRSIEDYKNVLRAFYIAQRMPTGNLTEQTYVEWRKIVGNDFQKNFDSNKLANVRRDIFKYKRLNDAQIDQLRNDNRQVDDSVVEEQAGDANAKAIVRVVKMNENEIENVINVIGNEEQDQNNNNDQPEIDDFLENNRAKIAEARDDIIRELSKTEFIKIEDRESLPKIAANSKAKKMIKIYNVALREIINETETRICSINNLIYSTARAVTAQLGVKVKKKGKKHTNKAPSWKVKIQKEIESLRAEISILDEISKGTAVKTRKSRKVKKKYRFTDEASIAEIKETLKQKIQVKAQRLRRFDKRNKFYRQNKIFKTDAKKFYREIGKGQIEIKDPPKGEDVEEFWNKIWGEEKLFNKEATWIEREEERVSEVEEQDWVSITMDEVQAALRKSKKWTSPGIDKIPNFWLNVLVPSHVELAQSLNDIMEKPEDAPEWLTEGLSYLLPKSDDTKNPKNYRPITCLTTTYKLLTSIITERMYNFLEINSILPQEQKGCRRNSYGCKDQLLINRMILENCRKGKRSLSTAWIDYRKAFDSVPHDWILKSLSIYKISPYISNFLRHSMGQWKARLLLSHDNGVAESNFIRIKRGIFQGDSLSPLLFCMSLIPLSNELNNTGSGYKIFDKVINHLFYMDDLKLYAKNDQELEGLLTTAKAFSNDICMDFGLDKCAKATFVKGRLRETSSINVDVDTIIKELDQEDTYKYLGVEEGDGISHATMKEKIRKEYYRRIRLVLKTELNSKNRIEAINTLAIPVVQYSFSIINWNLPDLQRMDRKTRKLLTSNRMLHPKADVDRLYLPRSNGGRGLIQLELSFKTTIIGMKQYLECTNDWMLSLVHRHEISKKLHSIIKESNAFERELKVDPMVEAKQVPVTKLAKKAKEAAKKNGQDQLYQRWSQKALHGQYVLRSQNADVDQVATHQWLRSSGLKAETEGFIVAAQDQSLFTRNYQANILRNGADPKCRFCDQFVETIDHLVSGCPVLTPSEYVKRHDRVGQYLHWGICQHYHVETPTKWYEHHPLPVINGPNVTILWDFPVNTDRTIQANRPDIIIKDHLTKTCTLIDMSIPNDKNISVKQFDKLSKYKDLEIEIAKMWNLKTTTVPVIIGALGMIKKGTDKHLAKIPGNHNLQEIQKIVLTSTANILRKSLST

SEQ ID NO: 3500 - protein, 1224 aa, Morbakka virulenta
MNLMQTRRNPCRIVRRADQQGTRPPGQDSPGVHEKYATESNTSTDDLHGNQNQKISNPEPVVMPPKPKETRQRWTPEDYKNVLRAFYTAQKTPMRNLIEQTYIEWRKFVGDETRNYIDANKLANVRRDIIKNKRLSDAQINSIRTEIRDTDRENLAQANIENARPVVRKHNMTDVEIEARIQDVREGREVRLEEGELNRVRLNDDDDDIDEYLENNMEKILIARDDILREFSVVQNTVMEERENLPKITTSKKSKSTIKLYNIALRDIVKEIQQDLTTLNDLIYATAKVIKVKLGVKITKASRKHVNKEPKWKVKINKEIETMRAEISILDEISKGTPVKSRKSIKIRRKHKLTDGTSISIAKETLKQKIQVKAQRLRRFDKRNKFFRQNKIFKTDAKRFYREIGKNKIEVQEPPIKEEVEEFWNKIWGEEKNFNSEATWIGSEEERMNGIEEQEWKDITTDELRNALGKSQKWKSPGLDKIPNFWLNSLSETHELLKNCLNNIFINPNNTPDWMTQGTTYLLPKSNDTKNPKNYRPITCLTTIYKLLTSIITERMYVFLDDNSILPLEQKGCKRKSYGCKDQLLINKMILEDCRRRLKNLSTAWIDYKKAFDSVPHDWILKSLELYKISPVITNFLRNSMSKWNTQLLLSHKKGTTKSNLIKIKRGIFQGDSLSPLLFCIALIPLSNELNNSKSGYKVFDKTMNHLFYMDDLKLFAKNDDQLEGLLTTVKQFSNDICMDFGLDKCAKATFLRGRLSATSSVIIDQETFIRELDPEEMYKYLGVNESDGINHAAMKEKIRKEYYRRVRLVLKTELNSKNRIEAINTLAIPVVQYSYNIINWNLPEIENMDRKTRKLLTSNNMLHPKADVDRLYLPRNSGGRGLVQLEMSYKISTIGMNKYLETCEDWMLVLVRRHERGKRLHSITKKARMFENDLNIEPEDAEQHFQATTCARKAKIVAKKNAQKQLIDRWSQKSLHGQYVLRSQNPDVDQTATHQWLRSSGLKAETEGFIIAAQDQSLQTRNYQAYILRNGTDPKCRLCDKHTETIDHIVAGCPILAPGEYTKRHDRVGQYLHWGICNHYGIKTHHNWYEHHPEPVVESENVTILWDFPVHTDRTIQANRPDIIIKDKKNKLCTLIDMSVPSDNNIAVKEFDKLSKYKDLEIEIQKMWNLKATTVPVIVGALGMIKKGTEKYISKVPGEHKLQEIQKIVLTSTAHILRKFLTI

SEQ ID NO: 3501 - protein, 1174 aa, Morbakka virulenta
MNYEVIRTRIPLNHEPVVIPTPSTQKTKRHKWSIEDYKNVLRAFYIAQRMPTRNLTEQTYVEWRKIVGNDFQKNFDSNKLASVRRDIFKYKRLNDAQIDQLRNDNRQVDDSVVEEQAGDANAKAIVRVVKMNENEIENVINVIGNEEQDQNNNNDQPEIDDFLENNRAKIAEARDDIIRELSKTEFIKIEDRESLPKIAANSKAKKMIKIYNVALREIINETETRICSINNLIYSTARAVTAQLGVKVKKKGKKHTNKAPSWKVKIQKEIESLRAEISILDEISKGTAVKTRKSRKVKKKYRFTDEASIAEIKETLKQKIQVKAQRLRRFDKRNKFYRQNKIFKTDAKKFYREIGKGQIEIKDPPKGEDVEEFWNKIWGEEKLFNKEATWIEREEERVSEVEEQDWVSITMDEVQAALRKSKKWTSPGIDKIPNFWLNVLVPSHVELAQSLNDIMEKPEDAPEWLTEGLSYLLPKSDDTKNPKNYRPITCLTTTYKLLTSIITERMYNFLEINSILPQEQKGCRRNSYGCKDQLLINRMILENCRKGKRSLSTAWIDYRKAFDSVPHDWILKSLSIYKISPFISNFLRHSMGQWKARLLLSHDNGVAESNFIRIKRGIFQGDSLSPLLFCMSLIPLSNELNNTGSGYKIFDKVINHLFYMDDLKLYAKNDQELEGLLTTAKAFSNDICMDFGLDKCAKATFVKGRLRETSSINVDVDTIIKELDQEDTYKYLGVEEGDGISHATMKEKIRKEYYRRIRLVLKTELNSKNRIEAINTLAIPVVQYSFSIINWNLPDLQRMDRKTRKLLTSNRMLHPKADVDRLYLPRSNGGRGLIQLELSFKTTIIGMKQYLECTNDWMLSLVHRHEISKKLHSIIKESNAFERELKVDPMVEAKQVPVTKLAKKAKEAAKKNGQDQLYQRWSQKALHGQYVLRSQNADVDQVATHQWLRSSGLKAETEGFIVAAQDQSLFTRNYQANILRNGADPKCRFCDQFVETIDHLVSGCPVLTPSEYVKRHDRVGQYLHWGICQHYHVETPTNWYEHHPLPVINGPNVTILWDFPVNTDRTIQANRPDIIIKDHLTKTCTLIDMSIPNDKNISVKQFDKLSKYKDLEIEIAKMWNLKTTTVPVIIGALGMVKKGTDKHLAKIPGNHNLQEVQKIVLTSTANILRKSLST

SEQ ID NO: 3502 - protein, 1212 aa, Morbakka virulenta
MRTRHKTYRIVRRAGQQGTRLSVGNQAGVFEKSATGMNPSKNELQGNQNQDPPNPEPVVISTTSTQKTKRHKWSIEDYKNVLRAFYIAQRMPTRNLTEQTYVEWRKIVGNDFQKNFDSNKLANVRRDIFKYKRLNDAQIDQLRNDNRQVDDSVVEEQAGDANAKAIVRVVKMNENEIENVINVIGNEEQDQNNNNDQPEIDDFLENNRAKIAEARDDIIRELSKTEFIKIEDRESLPKIAANSKAKKMIKIYNVALREIINETETRICSINNLIYSTARAVTAQLGVKVKKKGKKHTNKAPSWKVKIQKEIESLRAEISILDEISKGTAVKTRKSRKVKKKYRFTDEASIAEIKETLKQKIQVKAQRLRRFDKRNKFYRQNKIFKTDAKKFYREIGKGQIEIKDPPKGEDVEEFWNKIWGEEKLFNKEATWIEREEERVSEVEEQDWVSITMDEVQAALRKSKKWTSPGIDKIPNFWLNVLVPSHVELAQSLNDIMEKPEDAPEWLTEGLSYLLPKSDDTKNPKNYRPITCLTTTYKLLTSIITERMYNFLEINSILPQEQKGCRRNSYGCKDQLLINRMILENCRKGKRSLSTAWIDYRKAFDSVPHDWILKSLSIYKISPYISNFLRHSMGQWKARLLLSHDNGVAESNFIRIKRGIFQGDSLSPLLFCMSLIPLSNELNNTGSGYKIFDKVINHLFYMDDLKLYAKNDQELEGLLTTAKAFSNDICMDFGLDKCAKATFVKGRLRETSSINVDVDTIIKELDQEDTYKYLGVEEGDGISHATMKEKIRKEYYRRIRLVLKTELNSKNRIEAINTLAIPVVQYSFSIINWNLPDLQRMDRKTRKLLTSNRMLHPKADVDRLYLPRSNGGRGLIQLELSFKTTIIGMKQYLECTNDWMLSLVHRHEISKKLHSIIKESNAFERELKVDPMVEAKQVPVTKLAKKAKEAAKKNGQDQLYQRWSQKALHGQYVLRSQNADVDQVATHQWLRSSGLKAETEGFIVAAQDQSLFTRNYQANILRNGADPKCRFCDQFVETIDHLVSGCPVLTPSEYVKRHDRVGQYLHWGICQHYHVETPTKWYEHHPLPVINGPNVTILWDFPVNTDRTIQANRPDIIIKDHLTKTCTLIDMSIPNDKNISVKQFDKLSKYKDLEIEIAKMWNLKTTTVPVIIGALGMIKKGTDKHLAKIPGNHNLQEIQKIVLTSTANILRKS

SEQ ID NO: 3503 - protein, 1224 aa, Morbakka virulenta
MNLMQTRRNPCRIVRRADQQGTRPSGQDSPGVHEKYATESNTSTDDLHGNQNQKISNPEPVVMPPKPKETRQRWTPEDYKNVLRAFYTAQKTPMRNLIEQTYIEWRKFVGDETRNYIDSNKLANVRRDIIKNKRLSDAQINSIRTEIRDTDRENLAQANIENARPVVRKHNMTDVEIEARIQDVREGREVRLEEGELNRVRLNDDDDDIDEYLENNMEKILIARDDILREFSVVQNTVMEERENLPKITTSKKSKSTIKLYNIALRDIVKEIQQDLTTLNDLIYATAKVIKVKLGVKITKASRKHVNKEPKWKVKINKEIETMRAEISILDEISKGTPVKSRKSIKIRRKHKLTDGTSISIAKETLKQKIQVKAQRLRRFDKRNKFFRQNKIFKTDAKRFYREIGKNKIEVQEPPIKEEVEEFWNKIWGEEKNFNSEATWIGSEEERMNGIEEQEWKDITTDELRNALGKSQKWKSPGLDKIPNFWLNSLSETHELLKNCLNNIFINPNNTPDWMTQGTTYLLPKSNDTKNPKNYRPITCLTTIYKLLTSIITERMYVFLDDNSILPLEQKGCKRKSYGCKDQLLINKMILEDCRRRLKNLSTAWIDYKKAFDSVPHDWILKSLELYKISPVITNFLRNSMSKWNTQLLLSHKKGTTKSNLIKIKRGIFQGDSLSPLLFCIALIPLSNELNNSKSGYKVFDKTMNHLFYMDDLKLFAKNDDQLEGLLTTVKQFSNDICMDFGLDKCAKATFLRGRLSATSSVIIDQETFIRELDPEEMYKYLGVNESDGINHAAMKEKIRKEYYRRVRLVLKTELNSKNRIEAINTLAIPVVQYSYNIINWNLPEIENMDRKTRKLLTSNNMLHPKADVDRLYLPRNSGGRGLVQLEMSYKISTIGMNKYLETCEDWMLVLVRRHERGKRLHSITKKARMFENDLNIEPEDAEQHFQATTCARKAKIVAKKNAQKQLIDRWSQKSLHGQYVLRSQNPDVDQTATHQWLRSSGLKAETEGFIIAAQDQSLQTRNYQAYILRNGTDPKCRLCDKHTETIDHIVAGCPILAPGEYTKRHDRVGQYLHWGICNHYGIKTHHNWYEHHPEPVVESENVTILWDFPVHTDRTIQANRPDIIIKDKKNKLCTLIDMSVPSDNNIAVKEFDKLSKYKDLEIEIQKMWNLKATTVPVIVGALGMIKKGTEKYISKVPGEHKLQEIQKIFLTSTAHILRKFLTI

SEQ ID NO: 3504 - protein, 1170 aa, Morbakka virulenta
MVHCVGQQGTHPSVGNQAGVFKKSATGMNHSKNELQGNQNQDPPNPEPVVIPTPSTQKTKRHKWSIEDYKNVLRAFYILVAQRMPTRNLTEQTYVEWRKIVANDFQKNFDSNKLANVRRDIFKYKRLNDAQIDQLRNDNRQVDDSVVEEQAGDANAKAIVRVVKMNENEIENVINVIGNEEQDQNNNNDQPEIDDFLENNRAKIAEARDDIIRELSKTEFIKIEDRESLPKIAANSKAKKMIKIYNVALREIINETETRICSINNLIYSTARAVTAQLGVKVKKKGKKHTNKAPSWKVKIQKEIESLRAEISILDEISKGTAVKTRKSRKVKKKYRFTDEASIAEIKETLKQKIQVKAQRLRRFDKRNKFYRQNKIFKTDAKKFYREIGKGQIEIKDPPKGEDVEEFWNKIWGEEKLFNKEATWIEREEERVSEVKEQDWVSITMDEVQAALRKSKKWTSPGIDKIPNFWLNVLVPSHVELAQSLNDIMEKPEDAPEWLTEGLSYLLPKSDDTKNPKNYRPITCLTTTYKLLTSIITERMYNFLEINSILPQEQKGCRRNSYGCKDQLLINRMILENCRKGKRSLSTAWIDYRKAFDSVPHDWILKSLSIYKISPYISNFLRHSMGQWKARLLLSHDNGVAESNFIRIKRGIFQGDSLSPLLFCMSLIPLSNELNNTGSGYKIFDKVINHLFYMDDLKLYAKNDQELEGLLTTAKAFSNDICMDFGLDKCAKATFVKGRLRETSSINVDVDTIIKELDQEDTYKYLGVEEGDGISHATMKEKIRKEYYRRIRLVLKTELNSKNRIEAINTLAIPVVQYSFSIINWNLPDLQRMDRKTRKLLTSNRMLHPKADVDRLYLPRSNGGRGLIQLELSFKTTIIGMKQYLECTNDWMLSLVHRHEISKKLHSIIKESNAFERELKVDPMVEAKQVPVTKLAKKAKEAAKKNGQDQLYQRWSQKALHGQYVLRSQNADVDQVATHQWLRSSGLKAETEGFIVAAQDQSLFTRNYQANILRNGADPKCRFCDQFVETIDHLVSGCPVLTPSEYVKCHDRVGQYLHWGICQHYHVETPTKWYEHHPLPVINGPNVTILWDFLVNTDRTIQANRPDIIIKDHLTKTCTLIDMSIPNDKNISIKQFDKLSKYKDLEIEIAKMWNLKTTTVPVIIGALGMT

SEQ ID NO: 3505 - protein, 1215 aa, Morbakka virulenta
MRTRHKTYRIVRRAGQQGTRLSVGNQAGVFEKSATGMNPSKNELQGNQNQDPPNPEPVVISTTSTQKTKRHKWSIEDYKNVLRAFYIAQRMPTRNLTEQTYVEWRKIVGNDFQKNFDSNKLANVRRDIFKYKRLNDAQIDQLRNDNRQVDDSVVEEQAGDANAKAIVRVVKMNENEIENVINVIGNEEQDQNNNNDQPEIDDFLENNRAKIAEARDDIIRELSKTEFIKIEDRESLPKIAANSKAKKMIKIYNVALREIINETETRICSINNLIYSTARAVTAQLGVKVKKKGKKHTNKAPSWKVKIQKEIESLRAEISILDEISKGTAVKTRKSRKVKKKYRFTDEASIAEIKETLKQKIQVKAQRLRRFDKRNKFYRQNKIFKTDAKKFYREIGKGQIEIKDPPKGEDVEEFWNKIWGEEKLFNKEATWIEREEERVSEVEEQDWVSITMDEVQAALRKSKKWTSPGIDKIPNFWLNVLVPSHVELAQSLNDIMEKPEVAPEWLTEGLSYLLPKSDDTKNPKNYRPITCLTTTYKLLTSIITERMYNFLEINSILPQEQKGCRRNSYGCKDQLLINRMILENCRKGKRSLSTAWIDYRKAFDSVPHDWILKSLSIYKISPYISNFLRHSMGQWKARLLLSHDNGVAESNFIRIKRGIFQGDSLSPLLFCMSLIPLSNELNNTGSGYKIFDKVINHLFYMDDLKLYAKNDQELEGLLTTAKAFSNDICMDFGLDKCAKATFVKGRLRETSSINVDVDTIIKELDQEDTYKYLGVEEGDGISHATMKEKIRKEYYRRIRLVLKTELNSKNRIEAINTLAIPVVQYSFSIINWNLPDLQRMDRKTRKLLTSNRMLHPKADVDRLYLPRSNGGRGLIQLELSFKTTIIGMKQYLECTNDWMLSLVHRHEISKKLHSIIKESNAFERELKVDPMVEAKQVPVTKLAKKAKEAAKKNGQDQLYQRWSQKALHGQYVLRSQNADVDQVATHQWLRSSGLKAETEGFIVAAQDQSLFTRNYQANILRNGADPKCRFCDQFVETIDHLVSGCPVLTPSEYVKRHDRVGQYLHWGICQHYHVETPTKWYEHHPLPVINGPNVTILWDFPVNTDRTIQANRPDIIIKDHLTKTCTLIDMSIPNDKNISVKQFDKLSKYKDLEIEIAKMWNLKTTTVPVIIGALGMIKKGTDKHLAKIPGNHNLQEIQKIVLTSTANILRKSLST

SEQ ID NO: 3506 - protein, 764 aa, Morbakka virulenta
MDEVQAALRKSKKWTSPGIDKIPNFWLNVLVPSHVELAQSLNDIMEKPEDAPEWLTEGLSYLLPKSDDTKNPKNYRPITCLTTTYKLLTSIITERMYNFLEINSILPQEQKGCRRNSYGCKDQLLINRMILENCRKGKRSLSTAWIDYRKAFDSVPHDWILKSLSIYKISPYISNFLRHSMGQWKARLLLSHDNGVAESNFIRIKRGIFQGDSLSPLLFCMSLIPLSNELNNTGSGYKIFDKVINHLFYMDDLKLYAKNDQELEGLLTTAKAFSNDICMDFGLDKCAKATFVKGRLRETSSINVDVDTIIKELDQEDTYKYLGVEEGDGISHATMKEKIRKEYYRRIRLVLKTELNSKNRIEAINTLAIPVVQYSFSIINWNLPDLQRMDRKTRKLLTSNRMLHPKADVDRLYLPRSNGGRGLIQLELSFKTTIIGMKQYLECTNDWMLSLVHRHEISKKLHSIIKESNAFERELKVDPMVEAKQVPVTKLAKKAKEAAKKNGQDQLYQRWSQKALHGQYVLRSQNADVDQVATHQWLRSSGLKAETEGFIVAAQDQSLFTRNYQANILRNGADPKCRFCDQFVETIDHLVSGCPVLTPSEYVKRHDRVGQYLHWGICQHYHVETPTNWYEHHPLPVINGPNVTILWDFPVNTDRTIQANRPDIIIKDHLTKTCTLIDMSIPNDKNISVKQFDKLSKYKDLEIEIAKMWNLKTTTVPVIIGALGMIKKGTDKHLAKIPGNHNLQEIQKIVLTRTANILRKSLST

SEQ ID NO: 3507 - protein, 1224 aa, Morbakka virulenta
MNLMQTRRNPCRIVRRADQQGTRPSGQDSPGVHEKYATESNTSTDDLHGNQNQKISNPEPVVMPPKPKETRQRWTPEDYKNVLRAFYTAQKTPMRNLIEQTYIEWRKFVGDETRNYIDSNKLANVRRDIIKNKRLSDAQINSIRTEIRDTDRENLAQANIENARPVVRKHNMTDVEIEARIQDVREGREVRLEEGELNRVRLNDDDDDIDEYLENNMEKILIARDDILREFSVVQNTVMEERENLPKITTSKKSKSTIKLYNIALRDIVKEIQQDLTTLNDLIYATAKVIKVKLGVKITKASRKHVNKEPKWKVKINKEIETMRAEISILDEISKGTPVKSRKSIKIRRKHKLTDGTSISIAKETLKQKIQVKAQRLRRFDKRNKFFRQNKIFKTDAKRFYREIGKNKIEVQEPPIKEEVEEFWNKIWGEEKNFNSEATWIGSEEERMNGIEEQEWKDITTDELRNALGKSQKWKSPGLDKIPNFWLNSLSETHELLKNCLNNIFINPNNTPDWMTQGTTYLLPKSNDTKNPKNYRPITCLTTIYKLLTSIITERMYVFLDDNSILPLEQKGCKRKSYGCKDQLLINKMILEDCRRRLKNLSTAWIDYKKAFDSVPHDWILKSLELYKISPVITNFLRNSMSKWNTQLLLSHKKGTTKSNLIKIKRGIFQGDSLSPLLFCIALIPLSNELNNSKSGYKVFDKTMNHLFYMDDLKLFAKNDDQLEGLLTTVKQFSNDICMDFGLDKCAKATFLRGRLSATSSVIIDQETFIRELDPEEMYKYLGVNESDGINHAAMKEKIRKEYYRRVRLVLKTELNSKNRIEAINTLAIPVVQYSYNIINWNLPEIENMDRKTRKLLTSNNMLHPKADVDRLYLPRNSGGRGLVQLEMSYKISTIGMNKYLETCEDWMLVLVRRHERGKRLHSITKKARMFENDLNIEPEDAEQHFQATTCARKAKIVAKKNAQKQLIDRWSQKSLHGQYVLRSQNPDVDQTATHQWLRSSGLKAETEGFIIAAQDQSLQTRNYQAYILRNGTDPKCRLCDKHTETIDHIVAGCPILAPGEYTKRHDRVGQYLHWGICNHYGIKTHHNWYEHHPEPVVESENVTILWDFPVHTDRTIQANRPDIIIKDKKNKLCTLIDMSVPSDNNIAVKEFDKLSKYKDLEIEIQKMWNLKATTVPVIVGALGMIKKGTEKYISKVPGEHKLQEIQKIVLTSTAHILRKFLTI

SEQ ID NO: 3508 - protein, 764 aa, Morbakka virulenta
MDEVQAALRKSKKWTSPGIDKIPNFWLNVLVPSHVELAQSLNDIMEKPEDAPEWLTEGLSYLLPKSDDTKNPKNYRPITCLTTTYKLLTSIITERMYNFLEINSILPQEQKGCRRNSYGCKDQLLINRMILENCRKGKRSLSTAWIDYRKAFDSVPHDWILKSLSIYKISPYISNFLRHSMGQWKARLLLSHDNGVAESNFIRIKRGIFQGDSLSPLLFCMSLIPLSNELNNTGSGYKIFDKVINHLFYMDDLKLYAKNDQELEGLLTTAKAFSNDICMDFGLDKCAKATFVKGRLRETSSINVDVDTIIKELDQEDTYKYLGVEEGDGISHATMKEKIRKEYYRRIRLVLKTELNSKNRIEAINTLAIPVVQYSFSIINWNLPDLQRMDRKTRKLLTSNRMLHPKADVDRLYLPRSNGGRGLIQLELSFKTTIIGMKQYLECTNDWMLSLVHRHEISKKLHSIIKESNAFERELKVDPMVEAKQVPVTKLAKKAKEAAKKNGQDQLYQRWSQKALHGQYVLRSQNADVDQVATHQWLRSSGLKAETEGFIVAAQDQSLFTRNYQANILRNGADPKCRFCDQFVETIDHLVSGCPVLTPSEYVKRHDRVGQYLHWGICQHYHVETPTNWYEHHPLPVINGPNVTILWDFPVNTDRTIQANRPDIIIKDHLTKTCTLIDMSIPNDKNISVKQFDKLSKYKDLEIEIAKMWNLKTTTVPVIIGALGMIKKGTDKHLAKIPGNHNLQEIQKIVLTSTANILRKCLST

SEQ ID NO: 3509 - protein, 1224 aa, Morbakka virulenta
MNLMQTRRNPYRIVRRADQQGTRPSGQDSPGVHEKYATESNTSTDDLHGNQNQKISNPEPVVMPPKPKETRQRWTPEDYKNVLRAFYTAQKTPMRNLIEQTYIEWRKFVGDETRNYIDSNKLANVRRDIIKNKRLSDAQINSIRTEIRDTDRENLAQANIENARPVVRKHNMTDVEIEARIQDVREGREVRLEEGELNRVRLNDDDDDIDEYLENNMEKILIARDDILREFSVVQNTVMEERENLPKITTSKKSKSTIKLYNIALRDIVKEIQQDLTTLNDLIYATAKVIKVKLGVKITKASRKHVNKEPKWKVKINKEIETMRAEISILDEISKGTPVKSRKSIKIRRKHKLTDGTSISIAKETLKQKIQVKAQRLRRFDKRNKFFRQNKIFKTDAKRFYREIGKNKIEVQEPPIKEEVEEFWNKIWGEEKNFNSEATWIGSEEERMNGIEEQEWKDITTDELRNALGKSQKWKSPGLDKIPNFWLNSLSETHELLKNCLNNIFINPNNTPDWMTQGTTYLLPKSNDTKNPKNYRPITCLTTIYKLLTSIITERMYVFLDDNSILPLEQKGCKRKSYGCKDQLLINKMILEDCRRRLKNLSTAWIDYKKAFDSVPHDWILKSLELYKISPVITNFLRNSMSKWNTQLLLSHKKGTTKSNLIKIKRGIFQGDSLSPLLFCIALIPLSNELNNSKSGYKVFDKTMNHLFYMDDLKLFAKNDDQLEGLLTTVKQFSNDICMDFGLDKCAKATFLRGRLSATSSVIIDQETFIRELDPEEMYKYLGVNESDGINHAAMKEKIRKEYYRRVRLVLKTELNSKNRIEAINTLAIPVVQYSYNIINWNLPEIENMDRKTRKLLTSNNMLHPKADVDRLYLPRNSGGRGLVQLEMSYKISTIGMNKYLETCEDWMLVLVRRHERGKRLHSITKKARMFENDLNIEPEDAEQHFQATTCARKAKIVAKKNAQKQLIDRWSQKSLHGQYVLRSQNPDVDQTATHQWLRSSGLKAETEGFIIAAQDQSLQTRNYQAYILRNGTDPKCRLCDKHTETIDHIVAGCPILAPGEYTKRHDRVGQYLHWGICNHYGIKTHHNWYEHHPEPVVESENVTILWDFPVHTDRTIQANRPDIIIKDKKNKLCTLIDMSVPSDNNIAVKEFDKLSKYKDLEIEIQKMWNLKATTVPVIVGALGMIKKGTEEYISKVPGEHKLQEIQKIVLTCTAHILRKFLSI

SEQ ID NO: 3510 - protein, 1215 aa, Morbakka virulenta
MRTRHKTYRIVRRAGQQGTRLSVGNQAGVFEKSATGMNPSKNELQGNQNQDPPNPEPVVISTTSTQKTKRHKWSIEDYKNVLRAFYIAQRMPTRNLTEQTYVEWRKIVGNDFQKNFDSNKLANVRRDIFKYKRLNDAQIDQLRNDNRQVDDSVVEEQAGDANAKAIVRVVKMNENEIENVINVIGNEEQDQNNNNDQPEIDDFLENNRAKIAEARDDIIRELSKTEFIKIEDRESLPKIAANSKAKKMIKIYNVALREIINETETRICSINNLIYSTARAVTAQLGVKVKKKGKKHTNKAPSWKVKIQKEIESLRAEISILDEISKGTAVKTRKSRKVKKKYRFTDEASIAEIKETLKQKIQVKAQRLRRFDKRNKFYRQNKIFKTDAKKFYREIGKGQIEIKDPPKGEDVEEFWNKIWGEEKLFNKEATWIEREEERVSEVKEQDWVSITMDEVQAALRKSKKWTSPGIDKIPNFWLNVLVPSHVELAQSLNDIMEKPEDAPEWLTEGLSYLLPKSDDTKNPKNYRPITCLTTTYKLLTSIITERMYNFLEINSILPQEQKGCRRNSYGCKDQLLINRMILENCRKGKRSLSTAWIDYRKAFDSVPHDWILKSLSIYKISPYISNFLRHSMGQWKARLLLSHDNGVAESNFIRIKRGIFQGDSLSPLLFCMSLIPLSNELNNTGSGYKIFDKVINHLFYMDDLKLYAKNDQELEGLLTTAKAFSNDICMDFGLDKCAKATFVKGRLRETSSINVDVDTIIKELDQEDTYKYLGVEEGDGISHATMKEKIRKEYYRRIRLVLKTELNSKNRIEAINTLAIPVVQYSFSIINWNLPDLQRMDRKTRKLLTSNRMLHPKADVDRLYLPRSNGGRGLIQLELSFKTTIIGMKQYLECTNDWMLSLVHRHEISKKLHSIIKESNAFERELKVDPMVEAKQVPVTKLAKKAKEAAKKNGQDQLYQRWSQKALHGQYVLRSQNADVDQVATHQWLRSSGLKAETEGFIVAAQDQSLFTRNYQANILRNGADPKCRFCDQFVETIDHLVSGCPVLTPSEYVKRHDRVGQYLHWGICQHYHVETPTKWYEHHPLPVINGPNVTILWDFPVNTDRTIQANRPDIIIKDHLTKTCTLIDMSIPNDKNISVKQFDKLSKYKDLEIEIAKMWNLKTTTVPVIIGALGMIKKGTDKHLAKIPGNHNLQEIQKIVLTSTANILRKSLST

SEQ ID NO: 3511 - protein, 986 aa, Morbakka virulenta
MEGKESLPKITANSKAKKMIKLYNVALREIINETKTRICSVNNLIYSTAIAVTAQLGVKVKKKGKKHTNKALSWKVKIQKEIESLRAEISILDEISKGMAVKTRKSRKVKKKYRFTDEANIAEIKETLKQKIQAKAQRLRRFDKRNKFYRQNKIFKTDAKKFYREIGKGQIEIKDPPKGEDVEEFWNKIWGEEKLFNKEATWIEREEERVSEVEEQDWVTITMDEVQAALRKSKKWTSPGIDKIPNFWLNVLVPSHVELAQSLNDIMEKPEDAPEWLTEGLSYLLPKSDDTKNPKNYRPITCLTTTYKLLTSIITERMYNFLEINSILPQEQKGCRRNSYGCKDQLLINRMILENCRKGKRSLSTAWIDYRKAFDSVPHDWILKSLSIYKISPYISNFLRHSMGQWKARLLLSHDNGVAESNFIRIKRGIFQGDSLSPLLFCMSLIPLSNELNNTGSGYKIFDKVINHLFYMDDLKLYAKNDQELEGLLTTAKAFSNDICMDFGLDKCAKATFVKGRLRETSSINVDVDTIIKELDQEDTYKYLGVEEGDGISHATMKEKIRKEYYRRIRLVLKTELNSKNRIEAINTLAIPVVQYSFSIINWNLPDLQRMDRKTRKLLTSNRMLHPKADVDRLYLPRSNGGRGLIQLELSFKTTIIGMKQYLECTNDWMLSLVHRHEISKKLHSIIKESNAFERELKVDPMVEAKQVPVTKLAKKAKEAAKKNGQDQLYQRWSQKALHGQYVLRSQNADVDQVATHQWLRSSGLKAETEGFIVAAQDQSLFTRNYQANILRNGADPKCRFCDQFVETIDHLVSGCPVLTPSEYVKRHDRVGQYLHWGICQHYHVETPTKWYEHHPLPVINGPNVTILWDFPVNTDRTIQANRPDIIIKDHLTKTCTLIDMSIPNDKNISVKQFDKLSKYKDLEIEIAKMWNLKTTTVPVIIGALGMIKKGTDKHLAKIPGNHNLQEIQKIVLTSTANILRKSLST

SEQ ID NO: 3512 - protein, 1224 aa, Morbakka virulenta
MNLMQTRRNPCRIVRRADQQGTRPSGQDSPGVHEKYATESNTSTDDLHGNQNQKISNPEPVVMPPKPKETRQRWTPEDYKNVLRAFYTAQKTPMRNLIEQTYIEWRKFVGDETRNYIDSNKLANVRRDIIKNKRLSDAQINSIRTEIRDTDRENLAQANIENARPVVRKHNMTDVEIEARIQDVREGREVRLEEGELNRVRLNDDDDDIDEYLENNMEKILIARDDILREFSVVQNTVMEERENLPKITTSKKSKSTIKLYNIALRDIVKEIQQDLTTLNDLIYATAKVIKVKLGVKITKASRKHVNKEPKWKVKINKEIETMRAEISILDEISKGTPVKSRKSIKIRRKHKLTDGTSISIAKETLKQKIQVKAQRLRRFDKRNKFFRQNKIFKTDAKRFYREIGKNKIEVQEPPIKEEVEEFWNKIWGEEKNFNSEATWIGSEEERMNGIEEQEWKDITTDELRNALGKSQKWKSPGLDKIPNFWLNSLSETHELLKNCLNNIFINPNNTPDWMTQGTTYLLPKSNDTKNPKNYRPITCLTTIYKLLTSIITERMYVFLDDNSILPLEQNGCKRKSYGCKDQLLINKMILEDCRRRLKNLSTAWIDYKKAFDSVPHDWILKSLELYKISPVITNFLRNSMSKWNTQLLLSHKKGTTKSNLIKIKRGIFQGDSLSPLLFCIALIPLSNELNNSKSGYKVFDKTMNHLFYMDDLKLFAKNDDQLEGLLTTVKQFSNDICMDFGLDKCAKATFLRGRLSATSSVIIDQETFIRELDPEEMYKYLGVNESDGINHAAMKEKIRKEYYRRVRLVLKTELNSKNRIEAINTLAIPVVQYSYNIINWNLPEIENMDRKTRKLLTSNNMLHPKADVDRLYLPRNSGGRGLVQLEMSYKISTIGMNKYLETCEDWMLVLVRRHERGKRLHSITKKARMFENDLNIEPEDAEQHFQATTCARKAKIVAKKNAQKQLIDRWSQKSLHGQYVLRSQNPDVDQTATHQWLRSSGLKAETEGFIIAAQDQSLQTRNYQAYILRNGTDPKCRLCDKHTETIDHIVAGCPILAPGEYTKRHDRVGQYLHWGICNHYGIKTHNNWYEHHPEPVVESENVTILWDFPVHTDRTIQANRPDIIIKDKKNKLCTLIDMSVPSDNNIAVKEFDKLSKYKDLEIEIQKMWNLKATTVPVIVGALGMIKKGTEKYISKVPGEHKLQEIQKIVLTSTAHILRKFLTI

SEQ ID NO: 3513 - protein, 924 aa, Morbakka virulenta
MIIIIIIIIIIIIIIIIIIIESLRAEISILDEISKGTTVKTRKSRKVKKKYRFTDEASIAETKETLKQKIQVKAQRLRRFDKRNKFYRQNKIFKTDAKKFYRELGKGQIEIKDPPKGEDVEEFWNKIWGEEKLFNKEATWIEREEERVSEVEEQDWVSITMDEVQAALRKSKKWTSPGIDKIPNFWLNVLVPSHVELAQSLNDIMEKPEDAPEWLTEGLSYLLPKSDDTKNPKNYRPITCLTTTYKLLTSIITERMYNFLEINSILPQEQKGCRRNSYGCKDQLLINRMILENCRKGKRSLSTAWIDYRKAFDSVPHDWILKSLSIYKISPYISNFLRHSMGQWKARLLLSHDNGVAESNFIRIKRGIFQGDSLSPLLFCMSLIPLSNELNNTGSGYKIFDKVINHLFYMDDLKLYAKNDQELEGLLTTAKAFSNDICMDFGLDKCAKATFVKGRLRETSSINVDVDTIIKELDQEDTYKYLGVEEGDGISHATMKEKIRKEYYRRIRLVLKTELNSKNRIEAINTLAIPVVQYSFSIINWNLPDLQRMDRKTRKLLTSNRMLHPKADVDRLYLPRSNGGRGLIQLELSFKTTIIGMKQYLECTNDWMLSLVHRHEISKKLHSIIKESNAFERELKVDPMVEAKQVPVTKLAKKAKEAAKKNGQDQLYQRWSQKALHGQYVLRSQNADVDQVATHQWLRSSGLKAETEGFIVAAQDQSLFTRNYQANILRNGADPKCRFCDQFVETIDHLVSGCPVLTPSEYVKRHDRVGQYLHWGICQHYHVETPTKWYEHHPLPVINGPNVTILWDFPVNTDRTIQANRPDIIIKDHLTKTCTLIDMSIPNDKNISVKQFDKLSKYKDLEIEIAKMWNLKTTTVPVIIGALGMIKKGTDKHLAKIPGNHNLQEIQKIVLTSTANILRKSLST

SEQ ID NO: 3514 - protein, 1224 aa, Morbakka virulenta
MNLMQTRRNPCRIVRRADQQGTRPPGQDSPGVHEKYATESNTPTDDLHGNQNQKIPNPEPVVMPPKPKETRQRWTPEDYKNVLRAFYTAQKTPMRNLIEQTYIEWRKFVGDETRNYIDSNKLANVRRDIIKNKRLSDAQINSIRTEIRDTDRENLAQANIENARPVVRKHNMTDVEIEARIQDVREGREVRLEEGELNRVRLNDDDDDIDEYLENNMEKILIARDDILREFSVVQNTVMEERENLPKITTSKKSKSTIKLYNIALRDIVKEIQQDLTTLNDLIYATAKVIKVKLGVKITKASRKHVNKEPKWKVKINKEIETMRAEISILDEISKGTPVKSRKSIKIRRKHKLTDGTSISIAKETLKQKIQVKAQRLRRFDKRNKFFRQNKIFKTDAKRFYREIGKNKIEVQEPPIKEEVEEFWNKIWGEEKNFNSEATWIGSEEERMNGIEEQEWKDITTDELRNALGKSQKWKSPGLDKIPNFWLNSLSETHELLKNCLNNIFINPNNTPDWMTQGTTYLLPKSNDTKNPKNYRPITCLTTIYKLLTSIITERMYVFLDDNSILPLEQKGCKRKSYGCKDQLLINKMILEDCRRRLKNLSTAWIDYKKAFDSVPHDWILKSLELYKISPVITNFLRNSMSKWNTQLLLSHKKGTTKSNLIKIKRGIFQGDSLSPLLFCIALIPLSNELNNSKSGYKVFDKTMNHLFYMDDLKLFAKNDDQLEGLLTTVKQFSNDICMDFGLDKCAKATFLRGRLSATSSVIIDQETFIRELDPEEMYKYLGVNESDGINHAAMKEKIRKEYYRRVRLVLKTELNSKNRIEAINTLAIPVVQYSYNIINWNLPEIENMDRKTRKLLTSNNMLHPKADVDRLYLPRNSGGRGLVQLEMSYKISTIGMNKYLETCEDWMLVLVRRHERGKRLHSITKKARMFENDLNIEPEDAEQHFQATTCARKAKIVAKKNAQKQLIDRWSQKSLHGQYVLRSQNPDVDQTATHQWLRSSGLKAETEGFIIAAQDQSLQTRNYQAYILRNGTDPKCRLCDKHTETIDHIVAGCPILAPGEYTKRHDHVGQYLHWGICNHYGIQTHHNWYEHHPEPVVESENVTILWDFPVHTDRTIQANRPDIIIKDKKNKLCTLIDMSVPSDNNIAVKEFDKLSKYKDLEIEIQKMWNLKATTVPVIVGALGMIKKGTEKYISKVPGKHKLQEIQKIVLTSTAHILRKFLTI

SEQ ID NO: 3515 - protein, 1167 aa, Morbakka virulenta
MGNLIRPRRNSTTGCSLSSYPGQLLLLLLLLLLLLLFYIAQRMPTRNLTEQTYVEWRKIVGNDFQKNFDSNKLANVRRDIFKYKRLNDAQIDQLRNDNRQVDDSVVEEQAGDANAKAIVRVVKMNENEIENVINVIGNEEQDQNNNNDQPEIDDFLENNRAKIAEARDDIIRELSKTEFIKIEDRESLPKIAANSKAKKMIKIYNVALREIINETETRICSINNLIYSTARAVTAQLGVKVKKKGKKHTNKAPSWKVKIQKEIESLRAEISILDEISKGTAVKTRKSRKVKKKYRFTDEASIAEIKETLKQKIQVKAQRLRRFDKRNKFYRQNKIFKTDAKKFYREIGKGQIEIKDPPKGEDVEEFWNKIWGEEKLFNKEATWIEREEERVSEVEEQDWVSITMDEVQAALRKSKKWTSPGIDKIPNFWLNVLVPSHVELAQSLNDIMEKPEDAPEWLTEGLSYLLPKSDDTKNPKNYRPITCLTTTYKLLTSIITERMYNFLEINSILPQEQKGCRRNSYGCKDQLLINRMILENCRKGKRSLSTAWIDYRKAFDSVPHDWILKSLSIYKISPFISNFLRHSMGQWKARLLLSHDNGVAESNFIRIKRGIFQGDSLSPLLFCMSLIPLSNELNNTGSGYKIFDKVINHLFYMDDLKLYAKNDQELEGLLTTAKAFSNDICMDFGLDKCAKATFVKGRLRETSSINVDVDTIIKELDQEDTYKYLGVEEGDGISHATMKEKIRKEYYRRIRLVLKTELNSKNRIEAINTLAIPVVQYSFSIINWNLPDLQRMDRKTRKLLTSNRMLHPKADVDRLYLPRSNGGRGLIQLELSFKTTIIGMKQYLECTNDWMLSLVHRHEISKKLHSIIKESNAFERELKVDPMVEAKQVPVTKLAKKAKEAAKKNGQDQLYQRWSQKALHGQYVLRSQNADVDQVATHQWLRSSGLKAETEGFIVAAQDQSLFTRNYQANILRNGADPKCRFCDQFVETIDHLVSGCPVLTPSEYVKRHDRVGQYLHWGICQHYHVETPTNWYEHHPLPVINGPNVTILWDFPVNTDRTIQANRPDIIIKDHLTKTCTLIDMSIPNDKNISVKQFDKLSKYKDLEIEIAKMWNLKTTTVPVIIGALGMIKKGTDKHLAKIPGNHNLQEIQKIVLTSTANILRKSLST

SEQ ID NO: 3516 - protein, 902 aa, Penaeus japonicus
MGQYRYIYISIYLSIYFYVHDGNNDNNNKNYGIGNNDDNDGNNNNTNNNDDNNDDYTNASKNYTNNDNNHNHHHHNNKNNKDSNNNNNDNDDGNNDDDNNNNNNKWGKEKTLNAETPWLSREEERMREVEQQDWVEITVKELEVALGKSHKWKSPGIDKIPNFWLNVLSELHKPLVASMNDIIDQPESIPDWLTEGVTYLLPKTQETENPKNYRPITCLNTIYKTLTSIIIDRMYNFLEENQMLPNEQKGCKRNSYGCKDQLLINYMILENCKTHHKNLSTAWIDYRKAFDSVPHDWILRSLELYKISPVISNFLRNSMSKWHTKLFLSHNEGVGESNAIKIKRGIFQGDSLSPLLFCISLIPLSNELNNTGAGYNIFQKVLNHLFYMDDLKLFAKNDQQLEGLLTTVKEFSNDICMDFGLDKCAKASFVRGKLRESTPIQLDIDTIIKELNPEDSYKYLGVCEGDGIDHAKMKEKVRKEYYRRVRLVLKTELNSKNRVEAVNTLAVPVVQYSYNIINWNLPDLQRMDRKTRKLLTANKMLHPKSDVDRLYLPRKEGGRGLIQLELTYKTSTVGMKHYLHFSNDWMLQLVLQHESTKKLHSILKEGEKFEREFEVDPIVEEQQLDATKVAKKAKISAKKKGQEMLAERWSQKPLHGQYLTRSKQADVDQTATHQWLRGSGLKAETEGFIIAAQDQSLFTRNYQANILKNGADAKCRFCDKSTETVDHLISGCSVLAPSEYVRRHDRVGKYLHWGICNHYVIETTSNWFQHEPKTVINGKNVTILWDFSVHTDRTIQANRPDIIVKDHSLKTCLLIDMSVPSDKNISVKEFEKLSKYKDLEIEIGKMWNMKACTVPVIVGALGMIKKGTKKHLDEIPGKQSLQEIQKVVLTSTAHILRKTLST

SEQ ID NO: 3517 - protein, 1216 aa, Morbakka virulenta
MKTRSKSYRLVRRAGQQGTRPSGRDQPEVEKYTTRSNSSSANDLQGNQNQDIPNPEPAVMPTRSKETRVRWSTEDYNNVLRAFYIAQKNPMRNVTEQTYFEWRKIVGKEIMQNIDANKLANVRRDIFRNKRLNDAQIDLIRDEIRNETTVESEVDIEHENRESIIELVNLTPALIENRISEVREGTNEEIVRNVHMVEVVDDFFERNKEKIQAAREDIIRELAMTEETEMENRDTLPKLTFCSKTNFTIKLYNVALSEIVNETQKDLTSINNLIYSTAKAATQKLGTKIKKNKPKQVYKEPKWKMKIKKEIESLRAEISILDELTKGTDVKTRKSRKVKRKYNIIDKVSLDTTKEVLKQKIQVKAQRLRRFDKRNKFYRQNKIFKTDAKKFYREIGKSKIEIKDPPENKDVEEFWNGIWAKEKNYNQEATWIGREEERMSEVKEQQWKPITIEELRLALAKSQKWKSPGLDKIPNFWLNSLSEIHKYLMASLNEIVTTTEALPDWLTQGNTYLLPKSVDTKNPKNYRPITCLTTTYKVLTSVISDRMYNFLEQNLILPQEQKGCKRNSYGCKDQLLINKMILEDSRRKCKNLSTAWIDYRKAFDSVPHDWIIKSLEMYKISPIITNFLKKSMSKWNTSLFLTHDAGTTTSNPIKIKRGIFQGDSLSPLLFCISLIPLSSELNNANCGYTIYDKQINHLFYMDDLKLFAKSDQQLEGLLITVRQFSNDISMEFGLDKCAKATFSRGRLAKTSSIDLDPDTTIRELDPEEMYKYLGVNEGDGINHAGMKEKIRKEYYRRVRLVLKTELNSKNRIEAINTLAVPVVQYSYNITNWNPPDIKRMDCKTRKLFTSNGMLHPKADIDRLYLPRCEGGRGLIQLEMSYKTTTIGMKQYLKSKDDWMLNLVSRHERSKKLHSVCKESQKFEKELGVEITKEDEDGREATETARKVKMNAKRKAQKQLASHWSQKALHGQYVLRSQDADVDQYATHQWLRSAGLKAETEGFIIAAQDQSLFTGNYQANILKNGADPKCQFCDQHTETIDHLVSGCPVLAPNEYVKCHDCIGQYLHWSICKHFSIETNPNWYEHHPLPVTEGENATIPWDFLINTDRTIQANHPDIIIKDRKNKICTLIDMSVPSDKNISVKEFEKLSKYKYLEIEIQKMWNIKTRTVPVIVGALGMIKKGTQKHIEKIPGKHRVQDLQKITLTGTAHILRKALSI

SEQ ID NO: 3518 - protein, 933 aa, Alatina alata
MGNKLKKKNQKHHVNKAPKWKLKLQKEIDALRAELSILDEISKGTLVKTRKARNVKKRNEVTDERSLLTAKETIKQKIQVKAQRLRRFDKRNRFYRQNKIFQTDAKKFYREIGKGTINVVEPPLEEDMTNFWNGIWGKVKEFNSAAEWIKREQERMNEVEQQQWDEITVIELRNALAKSQKWKSPGVDRIPNFWLNSLTSSHEKLAINFTKILPNPDSAPEWLTEGTTYLLPKNQETQNPKNYRPITCLTTTYKILTSIITNRMYKFLDDNAILPQEQKGCKRNSYGCKDQLLINRMILENCRKGNRNLSTAWIDYKKAFDSVPHDWILKAIEIYKFSPIITNFLRSSMDKWKTRLFLSHKNGSLKSELIKIKRGIFQGDSLSPLLFCLALIPLSNELNNTNYGYKIYNKSINHLFYMDDLKLFAKSDQDLEGLLTTVKCFSDDIGMEFGLDKCAKASFVKGRLKTTSSVTLDLDTTIRELDPEEAYKYLGVSEGNGINHASMKEKVRKEYYRRIRLVLKTELNSKNRIEALNTLAVPVVQYSFNILNWKMDEIRRMDTKTRKLLTSNRMHHPKADVDRLYLPRRSGGRGMVNLETAYKTSTIGMATYLLVSKDWMIKLVHQHEESKKLFSINKEARKYEREFEFKDNVARNDEIPATKQAKSSKSSAKSCALKQTAERWNQKSLHGKYPLHCQQADVDQTTTHQWLRSSGLKAETEGFILAAQDQSLFTRNYQANILKNGANEKCRFCDTHKETIDHLISGCPILAPNEYKNRHDRVGQYLHWTICNSYNIKTCEHWYEHKPEPVVVGENVTLLWDFSIHTDRTIQANRPDIIIKDFKEKTCLLIDMSVPCDQNIAPKEFDKLSKYKDLEIEIQKMWSLNATTVPVIVGALGMIKKQTQKHLDKIPGNPQLQEIQKIVLTSTAHILRKALSI

SEQ ID NO: 3519 - protein, 1029 aa, Morbakka virulenta
MQNIDANKLANVRRDIFRNKRLNDAQIDLIRDEIRNETTVESEVDIEHENRESIIELVNLTPALIENRISEVREGTNEEIVRNVHMVEVVDDFFERNKEKIQGAREDIIRELAMTEETEMENRDTLPKLTFCSKTNFTIKLYNVALSEIVNETQKNLTSINNLIYSTAKAATQKLGTKIKKNKPKQVYKEPKWKMKIKKEIESLRAEISILDELTKGKDVKTRKSRKVKRKYNIIDKVSLDTTKEVLKQKIQVKAQRLRRFDKRNKFYRQNKIFKTDAKKFYREIGKSKIEIKDPPENKDVEEFWNGIWAKEKNYNQEATWIGREEERMSEVKEQQWKPITIEELRLALAKSQKWKSPGLDKIPNFWLNSLSEIHKYLMASLNEIVTTTEALPDWLTQGNTYLLPKSVDTKNPKNYRPITCLTTTYKVLTSVISDRMYNFLEQNLILPQEQKGCKRNSYGCKDQLLINKMILEDSRRKCKNLSTAWIDYRKAFDSVPHDWIIKSLEMYKISPIITNFLKKSMSKWNTSLFLTHDAGTTTSNPIKIKRGIFQGDSLSPLLFCISLIPLSSELNNANCGYTIYDKQINHLFYMDDLKLFAKSDQQLEGLLITVRQFSNDISMEFGLDKCAKATFSRGRLAKTSSIDLDPDTTIRELDPEEMYKYLGVNEGDGINHAGMKEKIRKEYYRRVRLVLKTELNSKNRIEAINTLAVPVVQYSYNIINWNPPDIKRMDCKTRKLFTSNGMLHPKADIDRLYLPRCEGGHGLIQLEMSYKTTTIGIKQYLESKDDWMLNLVSRHERSKKLHSVYKESQKFEKELGVEITKEHEDGRKATETARKVKMNAKRKAQKQLADHWSQKALHGQYALRRQDADVDQYATHQWLRSAGLKAETEGFIIAAQGKSLFTRNYQANTLKNGADPKCRFCDQHTETIDHLVSGCPVLAPNEYVKRHDRVGQYLHLGICKPVTEGENATILWDFPINTDRTIQANRSDIILKDRENKMCTLIDMSVPSDKNISVKEFEKLSKYKDLEI

SEQ ID NO: 3520 - protein, 1216 aa, Morbakka virulenta
MKTRSKSYRFVRRAGQQGMRPSGRSQREVEKYTTRSNSSSANDLQGNQNQDIPNPEPAVMPARSKETRVRWSTEDYNNVLSAFYIAQMNPMRNVTEQTYFEWRKIVGKEIMQNIDANKLANVRRDIFRNKRLNDAQIDLIRDEIRNETTVESEVDIEHENRESIIELVNLTPALIENRISEVREGTNEEIVRNVHMVEVVDDFFERNKEKIQGAREDIIRELAMTEETEMENRDTLPKLTFCSKTNFTIKLYNVALSEIVNETQKNLTSINNLIYSTAKAATQNLGTKIKKNKPKLVYKEPKWKMKIKKEIESLRAEISILEELTKGTDVKTRKSRKVKRKYNIIDKVSLDTTKEVLKQKIQVKAQRLRRFDKRNKFYRQNKIFKTDAKKFYREIGKSKIEIKDPPENKDVEEFWNGIWAKEKNYNQEATWIGREEERMSEVKEQQWKPITIEELRLALAKSQKWKSPGLDKIPNFWLNSLSEIHKYLMASLNEIVTTTEALPDWLTQGNTYLLPKSVDTKNPKNYRPITCLTTTYKVLTSVISDRMYNFLEQNLILPQEQKGCKRNSYGCKDQLLINKMILEDSRRKCKNLSTAWIDYRKAFDSVPHDWIIKSLEMYKISPIITNFLKKSMSKWNTSLFLTHDAGTTTSNPIKIKRGIFQGDSLSPLLFCISLIPLSSELNNTNCGYTIYDKQINHLFYMDDLKLFAKSDQQLEGLLITVRQFSNDISMEFGLDKCAKATFSRGRLAKTSSIDLDPDTTIRELDPEEMYKYLGVNEGDGINHAGMKEKIRKEYYRRVRLVLKTELNSKNRIEAINTLAVPVVQYSYNIINWNPPDIKRMDCKTRKLFTSNGMLHPKADIDRLYLPRCEGGRGLIQLEMSYKTTTIGMKQYLESKDDWMLNLVSRHERSKKLHSVYKESQKFEKELGVEITKEDEDGREATETARKVKMNAKRKAQKQLADHWSQKALHGQYALRSQDADVDQYATHQWLRSAGLKAETEGFIIAAQNQSLFTRNYQANILKNGADPKCRFCDQHTKTIDHLVSGCPVLAPNEYVKRHDRVRQYLHWGICKHFSIETNPNWYEHHPLPVTEGENGTILWDFPINTDRTIQANRPDIIIKDRKNKMCTLIDMSVLSDKNISVKEFEKLSKYKDLEIEIQKMWNIKTRTVPVIVGALGMIKKRIQKHIEKIPGKHRVQDLQKIVLTSTAHILQKALSI

SEQ ID NO: 3521 - protein, 1174 aa, Morbakka virulenta
MPHRPSRGSTRDASPGARLAWGARKVCTESNTSTDDLHSNQNQKIPKPEPVVMPPKPKETRQRWTSDDYKDVLRAIYTAQKTPMRNLIEQAYIEWRKIVGDETRNYIDANKLANVRRDIIKNKRLSDAQIDLIRTEIRDTDRENLAQATIENARPVVREHNMTDVEIEARIQDVREGREVRLEEGEVNRVRLNDDDDDIDEYLENNMEKILIARDDILREFSVVQNTVMEERENLPKITTSKKSKSTIKLYNIALRDIVKEIQQDLTTLNDLIYATAKVIKVKLGVKITKASRKHVNKEPKWKVKINKEIETMRAEISILDEISKGTPVKSRKSIKIRRKHKLTDGTSISIAKETLKQKIQVKAQRLRRFDKRNKFFRQNKIFKTDAKRFYREIGKNKIEVQEPPIKEEVEEFWNKIWGEEKNFNSEATWIGSEEERMNGIEEQEWKDITTDELRNALGKSQKWKSPGLDKIPNFWLNSLSETHELLKNCLNNIFINPNNTPDWMTQGTTYLLPKSNDTKNPKNYRPITCLTTIYKLLTSIITERMYVFLDDNSILPLEQKGCKRKSYGCKDQLLINKMILEDCRRRLKNLSTAWIDYKKAFDSVPHDWILKSLELYKISPVITNFLRNSMSKWNTQLLLSHKKGTTKSNLIKIKRGIFQGDSLSPLLFCIALIPLSNELNNSKSGYKVFDKTMNHLFYMDDLKLFAKNDDQLEGLLTTVKQFSNDICMDFGLDKCAKATFLRGRLSATSSVIIDQETFIRELDPEEMYKYLGVNESDGINHAAMKEKIRKEYYRRVRLVLKTELNSKNRIEAINTLAIPVVQYSYNIINWNLPEIENMDRKTRKLLTSNNMLHPKADVDRLYLPRNSGGRGLVQLEMSYKISTIGMNKYLETCEDWMLVLVRRHERGKRLHSITKKARMFENDLNIEPEDAEQHFQATTCARKAKIVAKKNAQKQLIDRWSQKSLHGQYVLRSQNPDVDQTATHQWLRSSGLKAETEGFIIAAQDQSLQTRNYQAYILRNGTDPKCRLCDKHTETIDHIVAGCPILAPGEYTKRHDRVGQYLHWGICNHYGIKTHHNWYEHHPEPVVESENVTILWDFPVHTDRTIQANRPDIIIKDKKNKLCTLIDMSVPSDNNIAVKEFDKLSKYKDLEIEIQKMWNLKPTTVPVIVGHLE

SEQ ID NO: 3522 - protein, 1191 aa, Morbakka virulenta
MNLMQTRRNPCRIVRRADQQGTRPSGQDSPGVHEKYATESNTSTDDLHGNQNQKISNPEPVVMPPKPKETRQRWTPEDYKNVLRAFYTAQKTPMRNLIEQTYIEWRKFVGDETRNYIDSNKLANVRRDIIKNKRLSDAQINSIRTEIRDTDRENLAQANIENARPVVRKHNMTDVEIEARIQDVREGREVRLEEGELNRVRLNDDDDDIDEYLENNMEKILIARDDILREFSVVQNTVMEERENLPKITTSKKSKSTIKLYNIALRDIVKEIQQDLTTLNDLIYATAKVIKVKLGVKITKASRKHVNKEPKWKVKINKEIETMRAEISILDEISKGTPVKSRKSIKIRRKHKLTDGTSISIAKETLKQKIQVKAQRLRRFDKRNKFFRQNKIFKTDAKRFYREIGKNKIEVQEPPIKEEVEEFWNKIWGEEKNFNSEATWIGSEEERMNGIEEQEWKDITTDELRNALGKSQKWKSPGLDKIPNFWLNSLSETHELLKNCLNNIFINPNNTPDWMTQGTTYLLPKSNDTKNPKNYRPITCLTTIYKLLTSIITERMYVFLDDNSILPLEQKGCKRKSYGCKDQLLINKMILEDCRRRLKNLSTAWIDYKKAFDSVPHDWILKSLELYKISPVITNFLRNSMSKWNTQLLLSHKKGTTKSNLIKIKRGIFQGDSLSPLLFCIALIPLSNELNNSKSGYKVFDKTMNHLFYMDDLKLFAKNDDQLEGLLTTVKQFSNDICMDFGLDKCAKATFLRGRLSATSSVIIDQETFIRELDPEEMYKYLGVNESDGINHAAMKEKIRKEYYRRVRLVLKTELNSKNRIEAINTLAIPVVQYSYNIINWNLPEIENMDRKTRKLLTSNNMLHPKADVDRLYLPRNSGGRGLVQLEMSYKISTIGMNKYLETCEDWMLVLVRRHERGKRLHSITKKARMFENDLNIEPEDAEQHFQATTCARKAKIVAKKNAQKQLIDRWSQKSLHGQYVLRSQNPDVDQTATHQWLRSSGLKAETEGFIIAAQDQSLQTRNYQAYILRNGTDPKCRLCDKHTETIDHIVAGCPILAPGEYTKRHDRVGQYLHWGICNHYGIKTHHNWYEHHPEPVVESENVTILWDFPVHTDRTIQANRPDIIIKDKKNKLCTLIDMSVPSDNNIAVKEFDKLSKYKDLEIEIQKMWNLKATTVPVIVGAGTWNDQEGN

SEQ ID NO: 3523 - protein, 954 aa, Morbakka virulenta
MTDVEIEARIQDVREGREVRLEEGELNRVRLNDDDDDIDEYLENNMEKILIARDDILREFSVVQNTVMEERENLPKITTSKKSKSTIKLYNIALRDIVKEIQQDLTTLNDLIYATAKVIKVKLGVKITKASRKHVNKEPKWKVKINKEIETMRAEISILDEISKGTPVKSRKSIKIRRKHKLTDGTSISIAKETLKQKIQVKAQRLRRFDKRNKFFRQNKIFKTDAKRFYREIGKNKIEVQEPPIKEEVEEFWNKIWGEEKNFNSEATWIGSEEERMNGIEEQEWKDITTDELRNALGKSQKWKSPGLDKIPNFWLNSLSETHELLKNCLNNIFINPNNTPDWMTQGTTYLLPKSNDTKNPKNYRPITCLTTIYKLLTSIITERMYVFLDDNSILPLEQNGCKRKSYGCKDQLLINKMILEDCRRRLKNLSTAWIDYKKAFDSVPHDWILKSLELYKISPVITNFLRNSMSKWNTQLLLSHKKGTTKSNLIKIKRGIFQGDSLSPLLFCIALIPLSNELNNSKSGYKVFDKTMNHLFYMDDLKLFAKNDDQLEGLLTTVKQFSNDICMDFGLDKCAKATFLRGRLSATSSVIIDQETFIRELDPEEMYKYLGVNESDGINHAAMKEKIRKEYYRRVRLVLKTELNSKNRIEAINTLAIPVVQYSYNIINWNLPEIENMDRKTRKLLTSNNMLHPKADVDRLYLPRNSGGRGLVQLEMSYKISTIGMNKYLETCEDWMLVLVRRHERGKRLHSITKKARMFENDLNIEPEDAEQHFQATTCARKAKIVAKKNAQKQLIDRWSQKSLHGQYVLRSQNPDVDQTATHQWLRSSGLKAETEGFIIAAQDQSLQTRNYQAYILRNGTDPKCRLCDKHTETIDHIVAGCPILAPGEYTKRHDRVGQYLHWGICNHYGIKTHHNWYEHHPEPVVESENVTILWDFPVHTDRTIQANRPDMI

SEQ ID NO: 3524 - protein, 1162 aa, Morbakka virulenta
MPPKPKETRQRWTPEDYKNVLRAFYTAQKTPMRNLIEQTYIEWRKFVGDETRNYIDANKLANVRRDIIKNKRLSDAQINLIRTEIRDTDRENLAQANIENARPVVRKHNMTDVEIEARIQDVREGREVRLEEGELNRVRLNDDDDDIDEYLENNMEKILIARDDILREFSVVQNTVMEERENLPKITTSKKSKSTIKLYNIALRDIVKEIQQDLTTLNDLIYATAKVIKVKLGVKITKASRKHVNKEPKWKVKINKEIETMRAEISILDEISKGTPVKSRKSIKIRRKHKLTDGTSISIAKETLKQKIQVKAQRLRRFDKRNKFFRQNKIFKTDAKRFYREIGKNKIEVQEPPIKEEVEEFWNKIWGEEKNFNSEATWIGSEEERMNGIEEQEWKDITTDELRNALGKSQKWKSPGLDKIPNFWLNSLSETHELLKNCLNNIFINPNNTPDWMTQGTTYLLPKSNDTKNPKNYRPITCLTTIYKLLTSIITERMYVFLDDNSILPLEQNGCKRKSYGCKDQLLINKMILEDCRRRLKNLSTAWIDYKKAFDSVPHDWILKSLELYKISPVITNFLRNSMSKWNTQLLLSHKKGTTKSNLIKIKRGIFQGDSLSPLLFCIALIPLSNELNNSKSGYKVFDKTMNHLFYMDDLKLFAKNDDQLEGLLTTVKQFSNDICMDFGLDKCAKATFLRGRLSATSSVIIDQETFIRELDPEEMYKYLGVNESDGINHAAMKEKIRKEYYRRVRLVLKTELNSKNRIEAINTLAIPVVQYSYNIINWNLPEIENMDRKTRKLLTSNNMLHPKADVDRLYLPRNSGGRGLVQLEMSYKISTIGMNKYLETCEDWMLVLVRRHERGKRLHSITKKARMFENDLNIEPEDAEQHFQATTCARKAKIVAKKNAQKQLIDRWSQKSLHGQYVLRSQNPDVDQTATHQWLRSSGLKAETEGFIIAAQDQSLQTRNYQAYILRNGTDPKCRLCDKHTETIDHIVAGCPILAPGEYTKRHDRVGQYLHWGICNHYGIKTHHNWYEHHPEPVVESENVTILWDFPVHTDRTIQANRPDIIIKDKKNKLCTLIDMSVPSDNNIAVKEFDKLSKYKDLEIEIQKMWNLKATTVPVIVGALGMIKKGTEKYISKVPGEHKLQEIQKIVLTSTAHIFRKFLTI

SEQ ID NO: 3525 - protein, 1231 aa, Clytia hemisphaerica
MQHLILMKPKQKPYRIDCLAGYQGSRPSEGNQSGVEKSATGIQSSQNDPQGHQNRETTNSDPVVIEPKNKPKRQKWTIEDYKNVIRAFTIAQENPIDTITRQTYTEWREIVGEVFRPTIDANKLANVRRDILNKKRLNDAQLDQIRSEILAFLPSESEETTCEEGTTDMSPSVSLHNLNEREINEIMERVRNPEQETFDFIVERAEEELNDLFVEEHKEEIAEARDDIIREFSRVNSIDFTDRENLPKLQFTLKNNTRVRIYDSALKILLSEVDMDELDLSQLNDLIYATAKSTTTSVGVKIKKTNKRTHVHKAPRWKRKLQLEIDSLRADISILDELVRGVEVKTRRARKLKRALQIKDETSLLCAKENLMQKMQLKAQRMRRFDKRTKFFRQNKVFSTDAKKFYREIGKGKISVEEPPSQEDIEGFWNNIWGKKKSYNREATWIEREEERMKGKKEQEWEEITVEEVRVALGKTQKWKSPGIDKIQNFWLNYLPSMHRVLTFFLNELVGNPNSIPEWLTEGVTYLLPKSEDTKNPNNYRPITCLNTIYKLLTSVLTERMYSFLEDNSILPTEQKGCKRNSYGCKDQLLIDRMILESCRAKNKNLSTAWIDYRKAFDSVPHDWILKTLDLYKVSPIITNFLKTAMKQWETRLFLSHQQGTIESNYLKIKRGIFQGDSLSPLLFCLSLVPLSNELNNTNSGYQMYDKKINHLFYMDDLKLFAKNDRELEGLLTTVHQFSKDISMEFGLDKCAKATFIRGRIRQTSDILLDLDNSIKELDPEQTYKYLGVNEGEGIQHATMKEKVRREYYRRIRLVLKTELNSKNRIQAINTLAIPVVQYSFSILNWNIADLQRMDRKTRKLLTCNRMLHPKSDVDRLYLPRSKGGRGLLQIEQAYKIATIGMSKYLECSSDWMMALVHRHEQNKTSHSIVKEANKYARELDINTEPDVVLDQPATKIAKSIKCKAKLAGRKKLEQTWSQKSLHGQYYHRSHQADVDIEATHQWLRSSGLKAETEGFILAAQDQSLFTRNYQANILKNGSDPNCRFCNKHVESIDHLVSGCPVLTPNEYVKRHDRVGQYLHWCICKHYGVETDASFWYEHHPPAVVESKNVTILWDFPINTDRTIKANRPDIVVKDRKKRTCLLIDMSVPSDRNVSVKMFDKLSKYKDLEIEIQKMWNLKTTVVPVIVGALGLVRTGVQDFVEKIPGNPQLQEIQKIVLTSTAHILRKTLSM

SEQ ID NO: 3526 - protein, 1231 aa, Clytia hemisphaerica
MQHLILMKPKQKPYRIDCLAGYQGSRPSEGNQSGVEKSATGIQSSQNDPQGHQNRETTNSDPVVIEPKNKPKRQKWTIEDYKNVIRAFTIAQENPIDTITRQTYTEWREIVGEVFRPTIDANKLANVRRDILNKKRLNDAQLDQIRSEILAFLPSESEETTCEEGTTDMSPSVSLHNLNEREINEIMERVRNPEQETFDFIVERAEEELNDLFVEEHKEEIAEARDDIIREFSRVNSIDFTDRENLPKLQFTLKNNTRVRIYDSALKILLSEVDMDELDLSQLNDLIYATAKSTTTSVGVKIKKINKRTHVHKAPRWKRKLQLEIDSLRADISILDELVRGVEVKTRRARKLKRALQIKDETSLLCAKENLMQKMQLKAQRMRRFDKRTKFFRQNKVFSTDAKKFYREIGKGKISVEEPPSQEDIEGFWNDIWGKKKSYNREATWIEREEKRMKWKKEQEWEEITVEEVRVALGKTQKWKSPGIDKVQNFWLNYLPSMHRVLTFFLNKLVGNPNSIPEWLTEGVTYLLPKSEDTKNPNNYRPITCLNTIYKLLTSVLTERMYSILEDNSILPTEQKGCKRNSYGCKDQLLIDRMILESCRAKNKNLSTAWIDYRKAFDSVPHDWILKTLDLYKVSPIITNFLKTAMKQWETRLFLSHQQGTIESNYLKIKRGIFQGDSLSPLLFCLSLVPLSNELNNTNSGYQMYDKKINHLFYMDDLKLFAKNDRELEGLLTTVHQFSKDISMEFGLDKCAKATFIRGRIRQTSDILLDLDNSIKELDPQQTYKYLGVNEGEGIQHATMKEKVRREYYRRIRLVLKTELNSKNRIQAINKLAIPVVQYSFSILNWNIADLQRMDRKTRKLLTCNRMLHHKSDVDRLYLPRSKGGRGLLQIEQAYKIATIGMSKYLECSSDWMMALVNRHEQNKTSHSIVKEANKYARELDINTEPDVVLDQPATKIAKSIKCKAKLAGRKKLEQTWSQKSLHGQYYHRSHQADVDIEATHQWLRSSGLKAETEGFIIAAQDQSLFTRNYQANILKNGSDPNCRFCNKHVESIDHLVSGCPVLTPNEYVKRHDRVGQYLHWCICKHYGVETDASFWYEHHPPAVVESKNVTILWDFPINTDRTIKANRPDIVVKDRKKRTCLLIDMSVPSDRNVSVKMFDKLSKYKDLEIEIQKMWNLKTTVVPVIVGALGLVRTGVQDFVEKIPGNPQLQEIQKIVLTSTAHILRKTLSM

SEQ ID NO: 3527 - protein, 1253 aa, Clytia hemisphaerica
MAISVRRKGRKTLHKPLGSKVKMQHLILMKPKQKPYRIDCLAGYQGSRPSEGNQSGVEKSATGIQSSQNDPQGHQNRETTNSDPVVIEPKNKPKRQKWTIEDYKNVIRAFTIAQENPIDTITRQTYTEWREIVGEVFRPTIDANKLANVRRDILNKKRLNDAQLDQIRSEILAFLPSESEETTCEEGTTDMSPSVSLHNLNEREINEIMKRVRNPEQETFDFIVERAEEELNDLFVEEHKEKIAEARDDIIREFSRVNSIDFTDRENLAKLQFTLKNNTRVRIYDSALKILLSEVDMDELDLSQLNDLIYATAKSTTTSVGVKIKKTNKRTHVHKAPRWKRKLQLEIDSLRADISILDELVRGVEVKTRRARKLKRALQIKDETSLLCAKENLMQKMQLKAQRMRRFDKRTKFFRQNKVFSTDAKKFYREIGKGKISVEEPPSQEDIEGFWNNIWGKKKSYNREATWIEREEERMKGKKEQEWEEITVEEVRIALGKTQKWKSPGIDKVQNFWLNYLPSMHRALTFFLNELVGNPNSIPEWLTEGVTYLLPKSEDTKNPNNYRPITCLNTIYKLLTSVLTERMYSFLEDNSILPTEQKGCKRNSYGCKDQLLIDRMILESCRAKNKNLSTAWIDYRKAFDSVPHDWILKTLDLYKVSPIITNFLKTAMMQWETRLFLSHQQGTIESNYLKIKRGIFQGDSLSPLLFCLSLLPLSNELNNTNSGYQMYDKKINHLFYMDDLKLFAKNDRELEGLLTTVHQFSKDISMEFGLDKCAKATFIRGRIRQTSDILLDLDNSIKELDPEQTYKYLGVNEGEGIQHATMKEKVRREYYRRIRLVLKSELNSKNRIQAIKTLAIPVVQYSFSILNWNIADLQRMDRKTRKLLTCNRMLHPKSDVDRLYLPRSKGGRGLLQIEQAYKIATIGMSKYLECSSDWMMALVHRHEQNKTSHSIVKEANKYARELDINTEPDVVLDQPATKIAKSIKCKAKLAGRKKLEQTWSQKSLHGQYYHRSHQADVDIEATHQWLRSSGLKAETEGFILAAQDQSLFTRNYQANILKNGSDPNCRFCNKHVESIDHLVSGCPVLTPNEYVKRHDRVGQYLHWCICKHYGVETDASFWYEHHPPAVVESKNVTILWDFPINTDRTIKANRPDIVVKDRKKRTCLLIDMSVPSDRNVSVKMFDKLSKYKDLEIEIQKMWNLKTTVVPVIVGALGLVRTGVQDFVEKIPGNPQLQEIQKIVLTSTAHILRKTLSM

SEQ ID NO: 3528 - protein, 1293 aa, Ixodes scapularis
MTLCDTLFPSTSAMSSPLRLSPLPDSGGACTPCVQDSNDGDGFSLSSVAVGDSNAPNNRSTFSICPQCSRAFNSVRGLSLHQRHAHPEMYNEEINVERVKPRWNDEETYLLASREAQIGTAVYNINQVLCSFFPSRSLESIKSHRKQQTYRDLVASLRSSQCATTSDLLEEDARGAQHQSSSSEQRPGVPCPGSSRLLRPRVPRLQSSSAVQNSSPENDLSSVQPSGSPGDPDYVAMGARPKRSKTGCSSGSPLSGRPPALGAGPRAARHHTERHFQPGDGLVPGSEPEEDLMDDAERPWSSASRPEQARKTKTSRVRAVLASGEGDVVTPGGAVTHVVQQPQRSRSSFETPGPVQTPSDVTVAADLPATSRSQPWPSVDGNTAPVDQASAALPPEGGRVRSANAPPGRPRVPLRHPEAPAPAEGGSAAEVSAELRSLLSRAAPQSFQGPRLWDVAQQALRGVDVTHLLDNYLRAAFQVAPPARRQAPRTTRRPESRRKRKRWEYATAQDLFRKRQADCARSILDGPSAVNVQDKRLFLESWREFMTSAPPAPPKDRLAVPDERIDVFQPASAQEIRAALPPRNSAAGPDGFSARLLRSVPLRLLRVLLNILMLQRRLPPSWRGARTTFIPKKNPAQEPSDFRPITVGPVVQRLFHRILAKRATAAAALDFRQRAFQPVDGCAENVLLLSTALNEARQKLRPLYLASIDMAKAFDRVSTEAILRGALRAGFDDSFLAYLRELYSTSHTTLQFEGEDLRVQPTTGVRQGDPLSPILFNMVVDEFLCGIDRNITFRSDDFALDAMAFADDLVVLASTPQGLQQRLDDLAAFLKPRGLAINVSKSFTLSLQPSGRDKKIKVLTTTDFTINGQPLPASGVATTWRYLGVTFAPEGTKTLGIEEELEGLLEKVRRAPLKPQQRLVVLRTYLLPRLFHRLILGPWSRGLLKKLDTKVRSSMRRWLDLPHDTPLGYFHAPVGGGGLGVVSLRASIPSMKLKRLDNLRFSDHPECAAALTKPLLTGLRRTSLEACRYQGKELQSKKSMQKMWAALLHRSNDGAALRESKDVPGAHRWVSEGTRMLPGRQFINLLKLLVNAQPTLERTSRGRGVDISCRAGCGAPESLGHVLQCCHRGHPNRVKRHDNLARYVCSRLRQLQWTVLWEPHFILPGGVLKPDIVAFKEEDTIIIDAQVVGTRMDLAFHHNQKIVKYSSPLLHQAARDGRTGTLMTTSITLNFRGVWSAESARDLQGLGLTANDFKQLSVRCLQGGMRCFYAHRSMTTAVRIAGDVPSSGVVRRS

SEQ ID NO: 3529 - protein, 1205 aa, Ixodes scapularis
MYNEEINVERVKPRWNDEETYLLASREAQIGTAVYNINQVLCSFFPSRSLESIKSHRKQQTYRDLVASLRASQCATTSDLLEEDARGAQHQSSSSELRPGVPCPESSRLLRPRVPRLESSSAVQNSSPENDFSSVEPSGSPGDPDNVAMGARPKRSKTGCSSGSPLSGRPPALGAGPRAARHHTERHFQPGDGLVPGSEPGEDLMDDAERPWSSTSRPEQARKTKTSRVRAVLASGEGDVVTPGGAVTHVVQQPQRSRSSFETPGPVQTPSDVTIAADLPATSRSQPWPSVDGKTAPADQASAALPPEGGRVRSATAPPGRPRVPLRHPGAPAPAEGGSAAEVSAELRSLLSRAAPQSFQGPRLWDVAQQALRGVDVTHLLDNYLRAAFQVAPPARRQAPRTTRRPESRRKRKRWEYATTQDLFRKRQADCARSILDGPSAVNVQDKRLFLESWREFMTSAPRPPPKDRLAVPDERIDVFQPASAQEIRAALPPRNSAAGPDGFSARLLRSVPLRLLRVLLNILMLQRRLPPSWRGARTTFIPKKNPAQEPSDFRPITVGPVVQRLFHRILAKRATAAAALDFRQRAFQPVDGCAENVLLLSTALNEARQKLRPLYLASIDMAKAFDRVSTEAILRGALRAGFDDSFLAYLRELYSTSHTTLQFEGEDQRVQPTTGVRQGDPLSPILFNMVVDEFLCGIDRNITFRSDDFALDAMAFADDLVVLASTPQGLQQRLDDLAAFLEPRGLAINVSKSFTLSLQPSGRDKKIKVLTTTDFTINGQPLPASGVATTWRYLGVTFAPEGTKTLGIEEELEGLLEKVRRAPLKPQQRLVVLRTYLLPRLFHRLILGPWSRGLLKKLDTKVRNSMRRWLDLPHDTPLGYFHAPVGEGGLGVVSLRASIPSMKLKRLDNLRFSDHPECAAALTKPLLTGLRRTSLEASRYQGRELLSKKSVQKMWAALLHRSNDGAALRESKDVPGAHRWVSEGTRMLPGRQFINLLKLRVNAQPTLERTSRGRGVDISCRAGCGAPESLGHVLQCCHRGHRNRVKRHDNLARYVCSRLRQLQWTVLWEPHFILPGGVLKPDIVAFKEEDTIIIDAQVVGTRMDLAFHHNQKIVKYSSPLLHQAAKDGRTGTLMTTSITLNFRGVWSAESARDLQGLGLTANDFKQLSVRCLQGGMRCFYAHRSMTTAVRIAGDVPSSGVVRRS

SEQ ID NO: 3530 - protein, 1293 aa, Ixodes scapularis
MTLCDTLFPSTSAMSSPLRLSPLPDSGGACTPCVQDSNDGDGFSLSSVAVGDSNAPNNRSTFSICPQCSRAFNSVRGLSLHQRHAHPEMYNEEINVERVKPRWNDEETYLLASREAQIGTAVYNINQVLCSFFPSRSLESIKSHRKQQTYRDLVASLRSSQCATTSDLLEEDARGAQHQSSSSEQRPGVPCPGSSRLLRPRVPRLQSSSAVQNSSPENDLSSVQPSGSPGDPDYVAMGARPKRSKTGCSSGSPLSGRPPALGAGPRAARHHTERHFQPGDGLVPGSEPEEDLMDDAERPWSSASRPEQARKTKTSRVRAVLASGEGDVVTPGGAVTHVVQQPQRSRSSFETPGPVQTPSDVTVAADLPATSRSQPWPSVDGNTAPVDQASAALPPEGGRVRSANAPPGRPRVPLRHPEAPAPAEGGSAAEVSAELRSLLSRAAPQSFQGPRLWDVAQQALRGVDVTHLLDNYLRAAFQVAPPARRQAPRTTRRPESRRKRKRWEYATAQDLFRKRQADCARSILDGPSAVNVQDKRLFLESWREFMTSAPPAPPKDRLAVPDERIDVFQPASAQEIRAALPPRNSAAGPDGFSARLLRSVPLRLLRVLLNILMLQRRLPPSWRGARTTFIPKKNPAQEPSDFRPITVGPVVQRLFHRILAKRATAAAALDFRQRAFQPVDGCAENVLLLSTALNEARQKLRPLYLASIDMAKAFDRVSTEAILRGALRAGFDDSFLAYLRELYSTSHTTLQFEGEDLRVQPTTGVRQGDPLSPILFNMVVDEFLCGIDRNITFRSDDFALDAMAFADDLVVLASTPQGLQQRLDDLAAFLKPRGLVINVSKSFTLSLQPSGRDKKIKVLTTTDFTINGQPLPASGVATTWRYLGVTFAPEGTKTLGIEEELEGLLEKVRRAPLKPQQRLVVLRTYLLPRLFHRLILGPWSRGLLKKLDTKVRSSMRRWLDLPHDTPLGYFHAPVGGGGLGVVSLRASIPSMKLKRLDNLRFSDHPECAAALTKPLLTGLRRTSLEACRYQGKELQSKKSMQKMWAALLHRSNDGAALRESKDVPGAHRWVSEGTRMLPGRQFINLLKLLVNAQPTLERTSRGRGVDISCRAGCGAPESLGHVLQCCHRGHPNRVKRHDNLARYVCSRLRQLQWTVLWEPHFILPGGVLKPDIVAFKEEDTIIIDAQVVGTRMDLAFHHNQKIVKYSSPLLHQAARDGRTGTLMTTSITLNFRGVWSAESARDLQGLGLTANDFKQLSVRCLQGGMRCFYAHRSMTTAVRIAGDVPSSGVVRRS

SEQ ID NO: 3531 - protein, 1106 aa, Ixodes ricinus
MGQGVNQSGSQPQVGPQFHVCPQCARAFTSSRGLSQHQRNAHKASYNAAINVERVKPRWDSEESYLLAKKEAELGPEVKNINQVLHSLFPSRTYESIKSHRKQPTYRELVASLAEERAAKIREELQRQRTTCAPVLGSRMTSTTEAPGARPKSSRTRRVQAAGRPAVEDFLETLDTDEEDLDSSTETTSDTTWSPNRRAPMGRGGVLASGGGDVVTPGGAVAHVAQQPRRSRFPLSAPGPPSFPTTDDVGGLMSRETSWTSWTSDQHLDATARASSPGPGANNFAPPAGDCSDPAAPLPPRVDIQDSARQVADELRTLVSRAPPRSFQGPRLWDVARQALLGVDVCSQVDDYLRAIFRVPGPPRRQQHRNANQPGRESRRKKKKRDYATTQERFKKRQADCARSILDGPCAAKVTDGRGFLETWRGYMTGAPPAPPADPVPVPSQRIDIFQPATAQEIKTALPPKNSAAGPDGFSARLLRSIPLVLLRVLLNVVLLQRRLPPSWRGARTTFIPKKNDAQEPSDFRPITVGPVLQRLFHRILAKRATAAAGLDYRQRAFQPVDGCAENILLLSTALNEARQKLRPLYLASIDLSKAFDRVSTEAILRGALRAGFDDSFISYLGELYSTSFTTLQYEGEEVRVEPTTGVRQGDPLSPILFNLVIDEFLAGVDTNVAFRSGDFSLDAMAFADDLVVLASTPRGLQERLDSLAAFLSPRGLSINVKKSFTLSLQPSGREKKIKLLCDKIFHIDGQLLPASDVALTWRYLGLTFTPEGTTSPGIEMDLTNLLERVKKAPLKPQQRLVVLRTYLLPRLFHRLVLGPWSCGLLKKLDTKVRASMRAWLDLPHDTPLGYFHAPVGEGGLGVVSLRASIPSMRLLRLDGLRFSDHPGCAPALELPLLVGFRRRALAACRYQGQELLNKKLVQKMWTSLLHRSNDGAALRDCGKVPGAHRWVSEGTRLLRGRQFLNLIKLRINAMPTLERTSRGRAVDVSCRAGCRAPESLGHVLQCCHRGHRGRVKRHNNLARYVCNRLQQLGWTVLWEPHFPLPDGTLKPDLVAFKGQDTLILDAQVVGTGMGLGGIPAPSKGGQILGATAATCSLEQGRSAPC

SEQ ID NO: 3532 - protein, 1245 aa, Ixodes scapularis
MTLLSPNAPNNRSTFSICPQCSRAFNSVRGLSLHQRHAHAEMYNEEINVERVKPRWNDEETYLLASREAQIGTAVYNINQVLCSFFPSRSLESIKSHRKQQTYRDLVASVRASQRATTSDLLEEDARGAQHQSSSSELRPGVPCPESSRLLRPRVPRLESSSAVQNSSPENDFSSVEPSGSPGDPDYVAMGARPKRSKTGCSSGSPLSGRPPALGAGPRAARHHTERHFQPGDGLVPGSEPGEDLMDDAERPWSSTSRPEQARKTKTSRVRAVLASGEGDVVTPGGAVTHVVQQPQRSRSSFETPGPVQTPSDITIAADLPATSRSQPWPSVDGKTAPADQASAALPPEGGRVRSATAPPGRPRVPLRHPGVPAPAEGGSAAEVSAELRSLLSRAAPQSFQGPRLWDVAQQALRGVDVTHLLDNYLQAAFQVAPPARRQAPRTTRRPESRRKRKRWEYATTQDLFRKWQADCARSILDGPSAVNVQDKRLFLESWREFMTSAPPAPPKDRLAVPDERIDVFQPASAQEIRAALPPRNSAAGPDGFSARLLRSVPLRLLRVLLNILMLQRRLPPSWRGARTTFIPKKNPAQEPSDFRPITVGPVVQRLFHRILAKRATAAAALDFRQRAFQPVDGCAENVLLLSTALNEARQKLRPLYLASIDMAKAFDRVSTEAILRGALRAGFDDSFLAYLRELYSTSHTTLQFEGEGLRVQPTTGVRQGDPLSPILFNMVVDEFLCGIDRNITFRSDDFALDAMAFADDLVVLASTPQGLQQRLDDLAAFLEPRGLAINVSKSFTLSLQPSGRDKKIKVLTTTDFTINGQPLPASGVATTWRYLGVTFAPEGTKTLGIEEELEGLLEKVRRAPLKPQQRLVVLRTYLLPRLFHRLILGPWSRGLLKKLDTKVRNSMRRWLDLPHDTPLGYFHAPVGEGGLGVVSLRASIPSMKLKRLDNLRFSDHPECAAALTKPLLTGLRRTSLEASRYQGRELLSKKSVQKMWAALLHRSNHGAALRESKDVPGAHRWVSEGTRMLPGRQFINLLKLRVNAQPTLERTSRGRGVISCRAGCGTPESLGHVLQCCHRGHRNRVKRHDNLARYVCSRLRQLQWTVLWEPHFILPGGVLKPDIVAFKEEDTIIIDAQVVGTRMDLAFHHNQKIVKYSSPLLHQAAKDGRTGTLMTTSITLNFRGVWSAESARDLQGLGLTVNDFKQLSVRCLQGGMRCFYAHRSMTTAVRIAGDVPSSGVVRRS

SEQ ID NO: 3533 - protein, 1057 aa, Ixodes scapularis
MGARPKRSKTGCSSGSPLSGRPPALGAGPRAARHHTERHFQPGDGLVPGSEPEEDLMDDAERPWSSASRPEQARKTKTSRVRAVLASGEGDVVTPGGAVTHVVQQPQRSRSSFETPGPVQTPSDVTVAADLPATSRSQPWPSVDGNTAPVDQASAALPPEGGRVRSANAPPGRPRVPLRHPEAPAPAEGGSAAEVSAELRSLLSRAAPQSFQGPRLWDVAQQALRGVDVTHLLDNYLRAAFQVAPPARRQAPRTTRRPESRRKRKRWEYATTQDLFRKRQAGCARSILDGPSAVNVQDKRLFLESWREFMTSAPPAPPKDRLAVPDERIDVFQPASAQEIRAALPPKNSAAGPDGFSARLLRSVPLRLLRVLLNILMLQRRLPLSWRGARTTFIPKKNPAQEPSDFRPITVGPVVQRLFHRILAKRATAAAALDFRQRAFQPVDGCAENVLLLSTALNEARQKLRPLYLASIDMAKAFDRVSTEAILRGALRAGFDDSFLAYLRELYSTSHTTLQFEGEDLRVQPTTGVRQGDPLSPILFNMVVDGFLCGIDRNITFRSDDFALDAMAFADDLVVLASTPQGLQQRLVDLAAFLEPRGLAINVSKSFTLSLQPSGRDKKIKVLTTTDFTINGQPLPASGVATTWRYLGVTFAPEGTKTLGIEEELEGLLEKVRRAPLKPQQRLVVLRTYLLPRLFHRLILGPWSRGLLKKLDTKVRSSMRRWLDLPHDTPLGYFHAPVGEGGLGVVSLRASIPSMKLKRLDNQRFSDHPECAAALTKPLLTGLRRTSLEACRYQGKELQSKKSVQKMWAALLHRSNDGAALRESKDVPGAHRWVSEGTRMLPGRQFINLLKLRVNAQPTLERTSRGRGVDISCRAGCGAPESLGHVLQCCHRGHRNRVKRHDNLARYVCSRLRQLQWTVLWEPHFILPGGVLKPDIVAFKEEDTIIIDAQVVGTRMDLAFHHNQKIVKYSSPLLHQAARDGRTGTLMTTSITLNFRGVWSAESARDLQGLGLTANDFKQLSVRCLQGGMRCFYAHRSMTTAVRIAGDVPSSGVVRRS

SEQ ID NO: 3534 - protein, 1374 aa, Ixodes scapularis
MADVRQWCTRPCHAAVCVQPCNVFAPCITSQTEQPSDLLVVRVASPFDKISLGLDRQKKLTIRACQLAGAPSVAEPGVPGEGGDGSGGPIPVLQFKCTVCEKSFSTLKGLRVHASLKKHGRQDGVRVVDSAVPVEQGGDGDIGDSVGVVVDTDTLSAVRATLAVTFGEAGTGLLAGATGAQAAVASFSPRSGEVEVNQEALALERGIELEVIPSALSQGEGQSEPRDVGEFSRSLDGVSQDSRQVAGGASSGGQIHDGAAGDAPKFHTCPECARAFTSARGLTQHVRHAHRTLYNERIDVHRIKPRWDREEEYLLAKKEVELGSSCTNINQVLHSHFPSRSLEAIKSHRKDLNYRETVQRLAAETALRLTDSGAGSGGVCPRVVRTRELREGAPRSEGGAAVTTCPVDPVLQHRGALQSSPVPQSQLDFVAQGARPRRPLRSCRRDRLQPSVEVVLPESSGTSELPDPPSRGDDLGDVVTPGGVVTHVVQQPQRSRSPSESPSRILRRPSSPLRDQSQASSEERVREELRGLLARAPPAVFQGPRLWDIARRALLGVNIFSSLDDYLREVFVDPAAHHRGQRCPRRQPARESRRKKKKREYAATQERFAKRQADCARAILDGQCESAITDCRGLLLEWRSFMTGSPPAPPPEPVSLPPQRIDVFQPVTAQDIKVALPPKNSAAGPDGFTARLLRSVPSLLLRVLMNLLLLLHRLPTAWRAARTSFIPKKNPAALPSDFRPITVGPVLQRLFHKILAKRVMAAAPLDFRQRAFQPVDGCAENILLLSTVLDEARCRLRPLHLASVDLAKAFDRVTTEAILRGALRAGFDDAFLAYLRELYATSYTTLQYGGEELVVQPTTGVRQGDPLSPVLFNMVLDEFLSSVDPRVAFRSGDFTVDAMAFADDLVVCASTPQGLQQRLNDLAAFLSPRGLNINVAKSFTLSLQPSAREKKCKIVTTNRFHINGEPLPVSGVASVWRYLGVSFTPDGTRSNGVEMELEELLERVKKAPLKPQQRLLVLRTYLLPRLFHRLILGPWSVGLLKKADTKVRAALRSWLALPHDVPLGYFHAPVGEGGLGVVSLRASIPSMRLRRIEGLRFSDHPGCAEALRCPLLVGFRQKALDACYYQGVELRDKKAVQRMWAARLHRSCDGAALRESGKAPAAHRWVSDGTRLLRGRRFIDLIKLRINAQPTLERTSRGRPRDLACRAGCRAPESLGHVLQCCHRGHRNRIKRHDNLVRYVSGRLSQLKWSVLWEPHYSLPEGVLKPDLVAYKGQDSLIIDAQVVGTKMGLGFLHHQKKDKYSGVELRRLVQGERTGSLTVTTVTLNFRGVWSPESARDLQSLGLTGNDLKLLSVRCLQGGMRCFWAHRSMTTAG

SEQ ID NO: 3535 - protein, 1057 aa, Ixodes scapularis
MGARPKRSKTGCSSGSPLSGRPPALGAGPRAARHHTERHFQPGDGLVPGSEPEEDLMDDAERPWSSASRPEQARKTKTSMVRAVLASGEGDVVTPGGAVTHVVQQPQRSRSSFETPGPVQTPSDVTVAADLPATSRSQPWPSVDGNTAPVDQASAALPPEGGRVRSANAPPGRPRVPLRHPEVPAPAEGGSAAEVSAELRSFLSRAAPQSFQGPRLWDVAQQALRGVDVTHLLDNYLRAAFQVAPPARGQAPRTTRRPESRRKRKRWEYATTQDLFRKRQADCARSILDGPSAVNVQDKRLFLESWREFMTSAPPAPPKDRLAVPDERIDVFQPASAQEIRAALPPRNSAAGPDGFSARLLRSVPLRLLRVLLNILMLQRRLPPSWRGARTTFIPKKNPAQEPSDFRPITVGPVVQRLFHRILAKRATAAAALDFRQRAFQPVDGCAENVLLLSTALNEARQKLRPLYLASIDMAKAFDRVSTEAILRGALRAGFDDSFLAYLRELYSTSHTTLQFEGEDLRVQPTTGVRQGDPLSPILFNMVVDEFLCGIDRNITFRSDDFALDAMAFADDLVVLASTPQGLQQRLDDLAAFLEPRGLAINVSKSFTLSLQPSGRDKKIKVLTTTDFTINGQPLTASGVATTWRYLGVTFAPEGTKTLGIEEELEGLLEKVRRAPLKPQQRLVVLLTYLLPRLFHRLILGPWSRGLLKKLDTKVRSSMRRWLDLPHDTPLGYFHAPVGEGGLGVVSLRASIPSMKLKRLDNLRFSDHPECAAALTKPLLTGLRRTSLEACRYQGKELQSKKSVQKMWAALLHRSNDGAALRESKDVPGAHRWVSEGTRMLPGRQFINLLKLRVNAQPTLERTSRGRGVDISCRAGCGAPESLGHVLQCCHRGHRNRVKRHDNLARYVCSRLRQLQWTVLWEQHFILPGGVLKPDIVAFKEEDTIIIDAQVVGTRMDLAFHHNQKIVKYSSPLLHQAARDGRTGTLMTTSITLNFRGVWSAESARDLQGLGLTANDFKQLSVRCLQGGMRCFYAHRSMTTAVRIAGDVPSSGVVRRS

SEQ ID NO: 3536 - protein, 1057 aa, Ixodes scapularis
MGARPKRSKTGCSSGSPLSGRPPALGAGPRAARHHTDRHFQPEDGLVPGSEPGEDLMDDAERPWSSTSRPEQARKTKTSRVRAVLASGEGDVVTPGGAVTHVVQQPQRSRSSFETPGPVQTPSDVTVAADLPATSRSQPWPSVDGETAPADQASAALPPEGERVRSATAPPGRPRVPLRHPGAPAPAEGGSAAEVSAELRSLLSRAAPQSFQGPRLWDVAQQALRGVDVTHLLDNYLRAAFQVAPLARRQAPRTTRRPESRRKRKRWEYATTQDLFRKRQADCARSILDGPSAVNVQDKRLFLESWREFMTSAPPAPPKDRLAVPDERIDVFQPASAQEIRAALPPRNSAAGPDGFSARLLRSVPLRLLRVLLNILMLQRRLPPSWRGARTTFIPKKNPAQEPSDFRPITVGPVVQRLFHRILAKRATAAAALDFRQRAFQPVDGCAENVLLLSTALNEARQKLRPLYLASIDMAKAFDRVSTEAILRGALRAGFDDSFLAYLRELYSTSHTTLQFEGEDLRVQPTTGVRQGDPLSPILFNMVVDEFLCGIDRNITFRSDDFALDAMAFADDLVVLASTPQGLQQRLDDLAAFLEPRGLAINVSKSFTLSLQPSGRDKKIKVLTTTDFTINGQPLPASGVATTWRYLGVTFAPEGTKTLGIEEELEGLLEKVRRAPLKPQQRLVVLRTYLLPRLFHRLILGPWSRGLLKKLDTKVRNSMRRWLDLPHDTSLGYFHAPVGEGGLGVVSLRASIPSMKLKRLDNLRFSDHPECAAALTKPLLTGLRRTSLEASRYQGRELLSKKSVQKMWAALLHRSNDGAALRESKDVPGAHRWVSEGTRMLPGRQFINLLKLRVNAQPTLERTSRGRGVDISCRAGCGAPESLGHVLQCCHRGHRNRVKRHDNLARYVCCRLRQLQWTVLWEPHFILPGGVLKPDIVAFKEEDTIIIDAQVVGTRMDLAFHHNQKIVKYSSPLLHQAARDGRTGTLMTTSITLNFRGVWSAESARDLQGLGLTANDFKQLLVRCLQGGMRCFYAHRSMTTAVRIAGDVPSSGVVRRS

SEQ ID NO: 3537 - protein, 1382 aa, Ixodes scapularis
MTQASAVAPDEGGGGSDVPVQLWFGCTGCARKFASVRGLRVHASLKQHGPQDGLLHVPCDSDNASRSDLCASASVGRQDTGIDGTKCATPTQDTLFPSTSATSSPSLRLSPLPDSGGACTPCVQESNGGDGFSLSSVAVGDSIAPNNRSTFSICPQCSRAFNSVRGLSLHQRHAHAEMYNEEINVERVKPMWNDEETYLLASREAQIGTAVYNINQVLCSFFPSRSLESIKSHRKQQTYRDLVASLRASQCATTSDLLEEDATGAQHQSSSSELRPGVPCPESSRLLRPRVPRLESSSAVQNSSPENDFSSVEPSGSPGDPDYVAMGARPKRSKTGCSSGSPLSGRPPALGAGPRAARHHTERHFQPGDGLVPGSEPGEDLMDDAERPWSSTSRPEQARKTKTSRVRAVLASGEGDVVTPGGAVTHVVQQPQRSRSSFETPGPVQTPSDVTIAADLPATSRSQPWPSVDGKTAPADQASAALPPEGGRVRSATAPPGRPRVPLRHPGAPAPAEGGSAAEVSAELRSLLSRAAPQSFQGPRLWDVAQQALRGVDVTHLLDNYLRVAFQVAPPARRQAPRTTRRPESRRKRKRWEYATTQDLFRKRQADCARSILDGPSAVNVQDKRLFLESWREFMTSAPPAPPKDRLAVPDERIDVFQPASAQEIRAALPPRNSAAGPDGFSARLLRSVPLRLLRVLLNILMLQRRLPPFWRGARTTFIPKKNPAQEPSDFRPITVGPVVQRLFHRILAKRATAAAALDFRQRAFQPVDGCAENVLLLSTALNEARQKLRPLYLASIDMAKAFDRVSTEAILRGALRDGFDDSFLAYLRELYSTSHTTLQFEGEDLRVQPTTGVRQGDPLSPILFNMVVDEFLCGIDRNITFRSDDFALDAMAFADDLVVLASTPQGLQQRLDDLAAFLEPRGLAINVSKSFTLSLQPSGRDKMIKVLTTTDFTINGQPLPASGVATTWRYLGVTFAPEGTKTLGIEEELEGLLEKVRRAPLKPQQRLVVLRTYLLPRLFHRLILGPWSRGLLKKLDTKVRNSMRRWLDLPHDTPLGYFHAPVGEGGLGVVSLRASIPSMKLKRLDNLRFSDHPECAAALTKPLLTGLRRTSLEASRYQGRELLSKKSVQKMWAALLHRSNDGAALRESKDVPGAHRWVSEGTRMLPGRQFINLLKLRVNAQPTLERTSRGRGVDISCRAGCGAPESLGHVLQCCHRGHRNRVKRHDNLARYVCSRLRQLQWTVLWEPHFILPGGVLKPDIVAFKEEDSIIIDAQVVGTRMDLAFHHNQKIVKYSSPLLHQAAKDGRTGTLMTTSITLNFRGVWSAESARDLQGLGLTANDFKQLSVRCPQGGMRCFYAHRSMTTAVRIAGDVPSSGVVRRS

SEQ ID NO: 3538 - protein, 1167 aa, Ixodes persulcatus
MSQGVNQSGSQPQVGPQFHVCPQCARAFTSSRGLSQHQRNAHKASYNAAINVERVKPRWDSEESYLLAKKEAELGPEIKNINQVLHSLFPSRTYESIKSHRKQPTYRELVASLAEERAAKVREELQRQRTACAPVLGSQMTSTTEAPGARPKSSRTRRGRAAGRPTVEDFLETLDTDEEDLDSSAKTTSDTNWSPNQRAPMGRGGVLASGGGDVVTPGGAVAHVAQQPRRSRFPLSAPGPPSFPTTDDVGGLMSRETSWTSWTSDQHLDATARASSPGPGANNLAPPAGDCSDPAAPLPPRVDIQDSAKQVADELRTLVSRAPPRSFQGPRLWDVARQALLGVDVCSQVDDYLRAVFRVPGPPRRQQHRNANQPGRESRRKKKKRDYATTQERFKKRQADCARSILDGPCAAKVTDGRGFLETWRGYMTGAPPAPPADPVPVPSQRIDIFQPATAQEIKTALPPKNSAAGPDGFSARLLRSIPLVLLRVLLNVVLLQRRLPPSWRGARTTFIPKKNDAQEPSDFRPITVGPVLQRLFHRILAKRATAAAGLDYRQRAFQPVDGCAENILLLSTALNEARQKLRPLYLASIDLSKAFDRVSTEAILRGALRAGFDDSFISYLGELYSTSFTTLQYEGEEVRVEPTTGVRQGDPLSPILFNLVIDEFLAGVDTNVAFRSGDFSLDAMAFADDLVVLASTPRGLQERLDSLAAFLSPRGLSINVKKSFTLSLQPSGREKKVKLLCDKIFHIDGQLLPASDVALTWRYLGLTFTPEGTTSPGIEMDLTNLLERVKKAPLKPQQRLVVLRTYLLPRLFHRLVLGPWSCGLLKKLDTKVRASMRAWLDLPHDTPLGYFHAPVGEGGLGVVSLRASIPSMRLQRLDGLRFSDHPGCAPALELPLLAGFRRRALAACRYQGQELLNKKLVQKMWTSLLHRSNDGAALRDCGKVPGAHRWVSEGTRLLRGRQFLNLIKLRINAMPTLERTSRGRGVDVSCRAGCRAPESLGHVLQCCHRGHRGRVKRHNNLARYVCNRLVQLGWTVLWEPHFPLPDGTLKPDLVAFKGQDTLILDAQVVGTGMGLGFLHHQKVAKYSGPLLQLAARAGRSGTLLTSTITLNFRGVWCPESARDLLSLGLTQNDLKLLSVRCLQGGLRCFWSHRTMTTAMRIAGDVP

SEQ ID NO: 3539 - protein, 1205 aa, Ixodes scapularis
MYNEEINVDRVKPRWNDEETYLLASREAQIGTAVYNINQVLCSFFPSRSLESIKSHRKQQTYRDLVASLRASQCATTSDLLEEDARGAQHQSSSSELRPGVPCPESSRLLRPRVPRLESSSAVQNSSPENDFSSVEPSGSPGDPDYVAMGARPKRSKTGCSSGSPLSGRPPALGAGPRAARHHTERHFQPGDGLVPGSEPGENLMDDAERPWSSTSRPEQARKTKTSRVRAVLASGEGDVVTPGGAVTHVVQQPQRSRSSFETPGPVQTPSDVTIAADLPATSRSQPWPSVDGKTAPADQASAALPPEGGRVRSATAPPGRPRVPLRHPGAPAPAEGGSAAEVSAELRSLLSRAAPQSFQGPRLWDVAQQALRGVDVTHLLDNYLRAAFQVAPPARRQAPRTTRRPESRRKRKRWEYATTQDLFRKRQADCARSILDGPSAVNVQDKRLFLESWREFMTSAPPAPPKDRLAVPEERIDVFQPASAQEIRAALPPRNSAAGPDGFSARLLRSVPLRLLRVLLNILMLQRRLPPSWRSARTTFIPKKNPAQEPSDFRPITVRPVVQRLFHRILAKRATAAAALDFRQRAFQPVDGCAENVLLLSTALNEARQKLRPLYLASIDMAKAFDRVSTEAILRGALRAGFDDSFLAYLRELYSTSHTTLLFEGEDLRVQPTTGVRQGDPLSPILFNMVVDEFLCGIDRNITFRSDDFALDAMAFADDLVVLASTPQGLQQRLDDLAAFLEPRGLAINVSKSFTLSLQPSGRDKKIKVLTTTDFTINGEPLPASGVATTWRYLGVTFVPEGTKTLGIEEELEGLLEKVRRAPLKPQQRLVVLRTYLLPRLFHRLILGPWSRGLLKKLDSKVRNSMRRWLDLPHDTPLGYFHAPVGEGGLGVVSLRASIPSMKLKRLDNLRFSDHPECAAALTKPLLTGLRRTSLEASRYQGRELLSKKSVQKMWAALLHRSNDGAALRESKDVPGAHRWVSEGTRMLPGRQFINLLKLRVNAQPTLERTSRGRGVDISCRAGCGAPESLGHVLQCCHRGHRNRVKRHDNLARYVCSRLRQLQWTVLWEPHFILPGGVLKPDIVAFKEEDTIIIDAQVVGTRMDLAFHHNQKIVKYSSPLVHQAAKDGRTGTLMTTSITLNFRGVWSAESARDLQGLGLTANDFKQLSVRCLQGGMRCFYAHRSMTTAVRIAGDVPSSGVVRRS

SEQ ID NO: 3540 - protein, 794 aa, Ixodes persulcatus
MKRWEYATTQDRFRKRQADCARSILDRPNAVNVQDKRLFLESWREFMTSAPPAPPRDRLAVPNERVDVFQPASAQEIRAALPPKNSAAGPDGFSARLLRSVPLRLLRVLLNILMLQRRLPPSWRGDRTTFIPKKNPAQDPSDFWPITVGPVVQRLFHRILAKRATAAAALDFRQRAFQPVDGCTENVLLLSTALNEARQKLRPLYLASIDMAKAFDRVSTEAILRGALRAGFDESFLAYLRELYSTSHTTLQFEGEDLKVQPTTGVRQGDALSPILFNMVVDEFLSSVDHNITFRSDDFALDAMAFADDLVVLASTPQGLQQRLDDLAAFLEPRGLAINVSKSFTLALQPSGRDKKIKVLTTTDFTINGQPLPASGVATTWRYLGVTFAPDGTKTLGIEEELEGLLEKVRRAPLKPQQRLEVLRTYLLPRLFHRLILEPWSRGLLKKLDTKVRNSMRRWLDLPHDTPLGYFHAPVGEGGLGVVSLRASIPSMKLKRLDNLRFSDHPECAAALTKPLLTGLRRTSLEACRYQGKELLSKKSLQKMWAALLHRSNDGAALRESRDVPGAHRWVSEGTRMLPGRQYINLLKLRVNAQPTLERTSRGRGVDISCRAGCGAPESLGHVLQCCHRGHRNRVKRHDNLAHYVCSRLRQLKWTVLWEPHFILPGGVLKPDIVAFKGQDTIIIDAQVVGTRMDLAFHHNQKIEKYSCPLLQQAARDGRTGTLMTTCITLNFRGVWSAESARDLQGLGLTANDFKQLSVRCLQEGMRCFYAHRSMTTAVRIAGDVPSSGAVRRS

SEQ ID NO: 3541 - protein, 1366 aa, Ixodes scapularis
MCPCSFGLAAPDARGSSHPFVVSGSTLHSRSMVHKTDFSVCLVTVTMLQEVTFVQVPVLDIRTRVSTVPSARRLRRTLCFPLPLQRLLLLFVSLPFRIVGVPAHLVCRSQMVGMVSHSLSVAVGDSNAPNNRSTFSICPQCSRAFNSVRGLSLHQRHAHAEMYNEEINVERVKPRWNDEETYLLASREAQIGTAVYNINQVLCSFFPSRSLESIKSHRKQQTYRDLVASLRASQCATTSDLLEEDARGAQNQSSSSELRPGVPCPESSRLLRPRVPRLESSSAVQNSSPENDFSSVEPSGSPGDPDYVAMGARPKRSKTGCSSGSPLSGRPPALGAGPRAARHHTERHFQPGDGLVPGSEPGEDLMDDAERPWSSTSRPEQARKTKTSRVRAVLASGEGDVVTPDGAVTHVVQQPQRSRSSFETPGPVQTPSDVTVATDLPATSRSQSWPSVDGKTAPADQASAALPPEGGRVRSATAPPGRPRVPLRHPGAPAPAEGGSAAEVSAELRSLLSRAAPQSFQGPRLWDVAQQALRGVDVTHLLDNYLRAAFQVAPPARRQAPRTTRRPESRRKRKRWEYATTQDLFRKRQADCARSILDGPSAVNVQDKRLFLESWREFMTSAPPAPPKDRLAVPDERIDVFQPASAQEIRAALPPRNSAAGPDGFSARLLRSVPLRLLRVLLNILMLQRRLPPSWRGARTTFIPKKNPAQEPSDFRPITVGPVVQRLFHRILAKRATAAAALDFRQRAFQPVDGCAENVLLLSTALNEARQKLRPLYLASIDMAKAFDRVSTEAILRGALRAGFDDSFLAYLRELYSTSHTTLQFEGEDLRVQPTTGVRQGDPLSPILFNMVADEFLCGIDRNITFRSDDFALDAMAFADDLVVLASTPQGLQQRLDDLAAFLEPRGLAINVSKSFTLSLQPSGRDKKIKVLTTTDFTINGQPLPASGVATTWRYLGVTFAPEGTKTLGIEEELEGLLEKVRRAPLKPQQRLVVLRTYLLPRLFHRLILGPWSRGLLKKLDTKVRNSMRRWLDLPHDTPLGYFHAPVGEGGLGVVSLRASIPSMKLKRLDNLRFSDHPECAAALTKPLLTGLRRTSLEASRYQGRELLSKKSVQKMWAALLHRSNDGAALRESKDVPGAHRWVSEGTRMLPGRQFINLLKLRVNAQPTLERTSRGRGVDISCRAGCGAPESLGHVLQCCHRGHRNRVKRHDNLARYVCSRLRQLQWTVLWEPHFILPGGVLKPDIVAFKEEDTIIIDAQVVGTRMDLAFHHSQKIVKYSSPLLHQAARDGRTGTLMTTSITLNFRGVWSAESARDLQGLGLTANDFKQLSVRCLQGGMRCFYAHRSMTTAVRIAGDVPSSGVVRRS

SEQ ID NO: 3542 - protein, 1287 aa, Daphnia obtusa
MACAIPPQHTPVNISRTQNKVRVPIPLPPSIRCGHESCRGKRGSGPWSGEDRKKNLLEHLKIQHPGKGALTPVYFCTKCSLEFNNFITAGRHGRKCSGEANSISLSLDLTLRSLGGRSSISSDRRSSVRRAFPVSEISGNKLILLYPGVPSQCPRCGWVTLASNCNAMHSMARHLETKHALRLEKFWKCSNCGIIEQGKRMHAHDVKCRSLLPSQNASARNLAASTTTSTPSTSSHLDATTSEHSSPLQATPPSSHQEEGRDSEDAPNDSWLFTLPRQDSSAASRDENLETTVVSFASPITTSHSPAAEPSPLEQLILSESTPSHSTEEIVQQETPQPDVSQRSISDEEDELGPTSEHPSRRPGHFFLLWGNLFSGCKNMEELNDVLGRCTIDWLARASTTEQPLQEHRPRPETSSLRPRRRNQSRQLQRIRQRKRSSPEEASRIQRLFNVYPRRAVRQVLGEKSSPYTGSTEAADQYLHRTYVRNQPSPDECTRARRLFDACNWTNPTEHQSSFLNRPPSREEIEIKLRRTTNTSPGADGIEYRHIKALDPQCRLLEIIYQKVWQIGIPDAWRRSRTVPIFKKGDPSDFSNFRPISLLSTLYKIYSGILSQRITAIAVELGWLSPGQKGFLPGVHGIQEHTQLLQTAVEETTSKHKSMSMAWLDLCNAFGSVPHAVLFELFHSLPLPNDLKRMLSDIYTGNIMDFVVGNETISIAPTAGVRQGDALSTTVFNLAAEPLLRAALSESNPGIDLFGYIVKATSYADDIAEMSNTPQSLQETLHHLSRVASILGLKFNAGKCASLNFNNGKPFQVDLFVDGSPIRCLGPDDQEIYLGTPIGAKLRFRPPNQLVSNLDKIADSLLAPWQKLEVFRSHLLPSLSHHLASGRVLKDVLTSLDTECRKFLGHVTMVPNSATTPFFYADRQVGGLGTFSLSDDADIWTLARAVQLLTSKDQLVKNIFMEQLKDTILRGFREDVPATLPIGEYLSGSTEAGLYRLRFGPAGTNLWTLARGAAKRLRTRIDVSGEETFRIIADDVSVLPAKAVRGLRQVVRQRHTRKFINSPHQGRVASALAIDQSTKDIARLTSCRTDLLHDDWKYLHRARLDLLPLRGYSWSSFDNKSCRHCGESSENGLHVLNNCKVNLTLATQRHDAVLELFHQLLSRKGYAATINRRLPETRLRPDVELQVSGSRLLVDVAVSYDLPENLEAAYTRKVVKYQHLGQVLPLVLGSLGSWHPLNDDIRSLLAIDHRSWSAFRRKSRLAAIHGSMEMVKKHLTNTTDEHIADDP

SEQ ID NO: 3543 - protein, 1118 aa, Daphnia sinensis
MHSMIRHLETKHSLRLEKFWKCSKCGIIEQGKKMHAHDVKCMPSASTHQETPRISGDSSTSLSIPLALQSDVAAPEHSSPLQAPPTQSLLREDHDADGAPNESWLFILSRHDATNASRAEVTETTINSDTSSPCTNTTAATESSLAERSPQMTSIIPPLADEVQDQNTPPTDGSQRSVSDEEVVLDPSTEYLTQRSGHFYHLWEPVFRNCNNMEDLNEVLGRCTVDWFARASTTEQPFQQERPRPENAPRRPRRRNQSRQLQRIRQRQKSRPEEASRIQRLFNIYPRRAVRQVLGEKSSPYTGSTEAANQYLHNTYVRPQLSTEEITRARQLFNACNWTMPSEDQSDFLNRPPSREEIELKLRRATNTAPGSDGIEYRHIKALDPQGRLLEVIYDRVWQFGIPDAWRKSRTVPIFKKGDSSDFSNFRPISLLSTLYKIYSGILSQRITSIAVELGWLSPGQKGFLPGVHGIQEHTQLLQTAVEETTSKRKCMSMAWLDLCNAFGSVPHAVLYQLFHSLPLPKDLKRMLSDIYTGNSMDFVVGKETISIAPSAGVRQGDALSTTIFNLAAEPLLRAALSESNPGINLFGQIVKATAYADDIAVVSNTAQALQESLHHLSRVAKVLGLKFNAQKCASLNFINGKPFQVDLFVDGRPIKSLGSDEQEIYLGTPIGAKLRFRPPNQLVSNLDKIAESLLAPWQKLEVFRSHLLPSLSHHLASGRVLKDVLTTLDTECRKFLGHITMVPNTATTPFFYADRRVGGLGTFSLTDDADIWTLARAVQLLTSKDQLVKGIFTEQLKDTIMRGFRDEAPATLPIGEYLSGSTEAGLYRLRYAPAGTNLWTLARGAAKRMRVRIDVSGEGNIRIIADDVSVLPGKAVRGLRQVVRQRHTLKFISAPHQGRVASALATDRSTKDIARLTSSKTDLQHDDWRYLHRARLDLLPLRGYSWSSSDNKTCRHCGESSENGFHVLNNCRVNLTLATQRHDAVLELLYQLLSRKGYTAIINRELPESRLKPDVELEVSGTRLMIDVAVSYDISDNLEAAYNRKVTKYQHLGQVLPLVLGSLGSWYPMNEDIRSLLGIDHRSWCTFRRRSRLAAIKGSMEMIREHLATTDDHNIHM

SEQ ID NO: 3544 - protein, 1287 aa, Daphnia obtusa
MACAIPPQHTPVNISRTQNKVRVPIPLPPSIRCGHESCRGKRGSGPWSGEDRKKNLLEHLKIQHPGKGALTPVYFCTKCSLEFNNFITAGRHGRKCSGEANSISLSLYLTLRSLGGRSSISSDRRSSVRRAFPVSEISGNKLILLYPGVPSQCPRCGWVTLASNCNAMHSMARHLETKHALRFEKFWKCSKCGIIEQGKRMHAHDVKCRSLLPSQNASARNLAASTTTSTPSTSSHLDATTSEHSSPLQATPPSSHQEEGRDSEDAPNDSWLFTLPRQDSSAASRDENLETTVVSLASPITTSHSPAAEPSPLEQLILSESTPSHSTEEIEQQETPQPDVSQRSISDEEDELGPTSEHPPRRPGHFFLLWGNLFSGCKNMEELNDVLGRCTIDWLARASTTKQPLQEHRPRPETSSLRPRRRNQSRQLQRIRQRKRSSPEEASRIQRLFNVYPRRAVRQVLGEKSSPYTGSTEAADQHLHRTYVRNQPSPDECTRARRLFDACNWTNPTEDQSSFLNRPPSREEIEIKLRRATNTSPGADGIEYRHIKALDPQCRLLEIIYQKVWQIGIPDAWSRSRTVPIFKKGDPSDFSNFRPISLLSTLYKIYSGILSQRITAIAAELGWLSPGQKGFLPGVHGIQEHTQLLQTAVEETTSKHKSMSMAWLDLCNAFGSVPHAVLFELFHSLPLPNDLKRMLSDIYTGNIMDFVVGNETISIAPTAGVRQGDALSTTVFNLAAEPLLRAALSESNPGIDLFGYIVKATSYADDIAVMSNTPQSLQETLHHLSRVASILGLKFNAGKCASLNFNNGKPFQVDLFVDGSPIRCLGPDDQEIYLGTPIGAKLRFRPPNQLVSNLDKIADSLLAPWQKLEVFRSHLLPSLSHHLASGRVLKDVLTSLDTECRKFLGHVTMVPNSATTPFFYADRRVGGLGTFSLSDDADIWTLARAVQLLTSKDRLVKNIFMEQLKDTILRGFREDVPATLPIGEYLSGSTEAGLYRLRFGPAGTNLWTLARGTAKRLRARIDVSGEETFRIIADDVSMLPAKAVRGLRQVVRQRHTRKFINSPHQGRVASALAIDQSTKDIARLTSCRTDLLHDDWKYLHRARLDLLPLRGYSWSSFDNKSCRHCGESSENGLHVLNNCKVNLTLATQRHDAVLELFHQLLSRKGYAATINRRLPETRLRPDVELQVSGSRLMVDVAVSYDLPENLEAAYTRKVVKYQHLGQVLPLVLGSLGSWHPLNDDIRSLLAIDHRSWSAFRRKSRLAAIHGSMEMVKKHLTNTTDEHIADVP

SEQ ID NO: 3545 - protein, 1287 aa, Daphnia obtusa
MACAIPPQHTPVNISRTRNKVRVPIPLPPSIRCGHESCRGKRGSGPWSGEDRKKNLLEHLKIQHPGKGALTPVYFCTKCSLEFNNFITAERHGRKCSGEANSISLSLDLTLRSLGGRSSISSDRRSSVRRAFPVSEISGNKLILLYPGVPSQCPRCGWVTLASNCNAMHSMARHLETKHALRLEKFWKCSKCGIIEQGKRMHAHDVKCRLLLPSQNASTRNLAATTTTSTPSTSSHLDATTSEHSSPLQATPPSSHQEEGRDSEDAPNDSWLFTLPRQDSSAASRDENLETTVVSFASPITTSHSPAAEPSPLEQPILSESTPSHSTEEIEQQETPQPDVSQRSISDEEDELGPTSEHPSRRPGHFFLLWGNLFSGCKNMEELNDVLGRCTIDWLARASTTEQPLQEHRPRPETSSLRPRRRNQSRQLQRIRQRKRSSPEEASRIQRLFNVYPRRAVRQVLGEKSSPYTGSTEAADQYLHRTYVRNQPSPDECTRARRLFDACNWTNPTEDQSSFLNRPPSREEIEIKLRRATNTSPGADGIEYRHIKALDPQFRLLEIIYQKVWQIGIPDAWRRSRTVPIFKKGNPSDFSNFRPISLLSTLYKIYSGILSQRITAIAVELGWLSPGQKGFLPGVHGIQEHTQLLQTAVEETTSKHKSMSMAWLDLCNAFGSVPHAVLFELFHSLPLPNDLKRMLSDIYTGNIMDFVVGNETISIAPTAGVRQGDALSTTVFNLAAEPLLRAALSESNPGIDLFGYIVKATSYADDIAVMSNTPQSLQETLHHLSRVASILGLKFNAGKCASLNFNNGKPFQVDLFVDGSPIRCLGPDDQEIYLGTPIGAKLRFRPPNQLVSNLDKIADSLLAPWQKLEVFRSHLLPSLSHHLASGRVLKDVLTSLDTECRKFLGHVTMVPNSATTPFFYADRRVGGLGTFSLSDDADIWTLARAVQLLTSKDRLVKNIFMEQLKDTILRGFREDVPATLPIGEYLSGSTEAGLYRLRFGPAGTNLWTLARGAAKRLRARIDVSGEETFRIIADDVSVLPAKAVRGLRQVVRQRHTRKFINSPHQGRVASALAIDQSTKDIARLTSCRTDLLHDDWKYLHRARLDLLPLRGYSWSSFDNKSCRHCGESSENGLHVLNNCKVNLTLATQRHDAVLELFHQLLSTKGYAATINRRLPETRLRPDVELQVSGSRLMVDVAVSYDLPENLEAAYTRKVVKYQHLGQVLPLVLGSLGSWHPLNDDIRSLLAIDHRSWAAFRRKSRLAAIHGSMEMVKKHLTNTTDEHIADDP

SEQ ID NO: 3546 - protein, 1287 aa, Daphnia obtusa
MACAIPPQHTPVNISRTQNKVRVPIPLPPSIRCGHESCRGKRGSGPWSGEDRKKNLLEHLKIQHPGKGALTPVYFCTKCSLEFNNFITAGRHGRKCSGEANSISLSLDLTLRSLGGRSSISSDRRSSVRRAFPVSEISGNKLILLYPGVPSQCPRCGWVTLASNCNAMHSMARHLETKHALRLEKFWKCSKCGIIEQGKRMHAHDVKCRSLLPSQNASARNLAASTTTSTPSTSSHLDATTSEHSSPLQATPPSSHQEEGRDSEDAPNDSWLFTLPRQDSSAASRDENLETTVVSFASPITTSHSPAAEPSPLEQLILSESTPSHSTEEIEQQETPQPDVSQRSISDEEDELGPTSEHPSRRPGHFFLLWGNLFSGCKNMEELNDVLGRCTIDWLARASTTEQPLQEHRPRPETSSLRPRRRNQSRQLQRIRQRKRSSPEEASRIQRLFNVYPRRAVRQVLGEKSSPYTGSTEAADQHLHRTYVRNQPSPDECTRARRLFDACNWTNPTEDQSSFLNRPPSREEIEIKLRRATNTSPGADGIEYRHIKALDPQCRLLEIIYQKVWQIGIPNAWRRSRTVPIFKKGDPSDFSNFRPISLLSTLYKIYSGILSQRITAIAVELGWLSPGQKGFLPGVHGIQEHTQLLQTAVEETTSKHKSMSMAWLDLCNAFGSVPHAVLFELFHSLPLPNDLKRMLSDIYTGNIMDFVVGNETISIAPTAGVRQGDALSTTVFNLAAEPLLRAALSESNPGIDLFGYIVKATSYAYDIAVMSNTPQSLQETLHHLSRVASILGLKFNAGKCASLNFNNGKPFKVDLFVDGSPIRCLGPDDQEIYLGTPIGAKLRFRPPNQLVSNLDKIADSLLAPWQKLEVFRSHLLPSLSHHLASGRVLKDVLTSLDTECRKFLGHVTMVPNSATTPFFYADRRVGGLGTFSLSDDADIWTLARAVQLLTSKDRLVKNIFMEQLKDTILRGFREDVPATLPIGEYLSGSTEAGLYRLRFGPAGTNLWTLARGAAKRLRARIDVSGEETFRIIADDVSVLPAKAVRGLRQVVRQRHTRKFINSPHQGRVASALAIDQSTKDIARLTSCRTDLLHDDWKYLHRARLDLLPLRGYSWSSFDNKSCRHCGESSENGLHVLNNCKVNLTLATQRHDAVLELFHQLLSRKGYAATINRRLPETRLRPDVELQVSGSRLMVDVAVSYDLPENLEAAYTRKVVKYQHLGQVLPLVLGSLGSWHPLNDDIRSLLAIDHRSWSAFRRKSRLAAIHGSMEMVKKHLTNTTDEHIADVP

SEQ ID NO: 3547 - protein, 1299 aa, Daphnia sinensis
MVKHKFFMSYASTGNRTRAARVAGEHSTTDQDTVRVPIPLPPSIRCGHQSCRGKRGSGPWTGEDRKKLLFDHLKLHHPGRGVLSPVFFCTKCRLEFNNFTTAGRHGRKCSGETSSSISFSLDLTLRSLGASTSISSDRRSSTRIVFPIPEISGNQLILLYPGVPSQCPRCEWVTLASHCNTMHSMIRHLETKHSLRLEKFWKCSKCGIIEQGKKMHAHDVKCMPSASTHQETPRIYGDSSTSLSTPLALQSDVAAPEHSSPLQAPPTQSLLREEHDADDAPNESWLFILSRHDATNASRAEVTETTINSDTSSPCINTTAATESSLAERSPQITSIIPPLADEVQDQNTPPTDGSQRSVSDEEVVLDPSTEYLTQRCGHFYYLWEPVFRNCNNMEDLNEVLGRCTVDWLARASTTEQPFQQERPRPENAPRRPRRRNQSRQLQRIRQRQKSRPEEASRIQRLFNIYPRRAVRQVLGEKSSPYTGSTEAANQYLHNTYVRPQLSTEEITRARQLFNACNWTMPSEDQSDFLNRPPSREEIELKLRRATNTAPGSDGIEYRHIKALDPQGRLLEVIYDRVWQFGIPDAWRKSRTVPIFKKGDSSDFSNFRPISLLSTLYKIYSGILSQRITSIAVELGWLSPGQKGFLPGVHGIQEHTQLLQTAVEETTSKRKCMSMAWLDLCNAFGSVPHAVLYQLFHSLPLPNDLKRMLSDIYTGNSMDFVVGKETISIAPSAGVRQGDALSTTIFNLAAEPLLRAALSESNPGINLFGQIVKATAYADDIAVVSNTAQALQESLHHLSRVAKVLGLKFNAQKCASLNFINGKPFQVDLFVDGRPIKSLGSDDQEIYLGTPIGAKLRFRPPNQLVSNLDKIAESLLAPWQKLEVFRSHLLPSLSHHLASGRVLKDVLTTLDTECRKFLGHITMVPNTATTPFFYADRRVGGLGTFSLTDDADIWTLARAVQLLTSKDQLVKGIFTEQLKDTIMRGFRDEAPATLPIGEYLSGSTEAGLYRLRYAPAGTNLWTLARGAAKRLRVRIDVSGEGNIRIIADDVSVLPGKAVRGLRQVVRQRHTLKFISAPHQGRVASALATDRSTKDIARLTSSKTDLQHDDWRYLHRARLDLLPLRGYSWSSSDNKTCRHCGESSENGFHVLNNCRVNLTLATQRHDAVLELLYQLLSRKGYTAIKNRELPESRLKPDVELEVSGTRLMIDVAVSYDISDNLQAAYNRKVTKYQHLGQVLPLVLGSLGSWYPMNEDIRSLLGIDHRSWCTFRRRSRLAAIKGSMEMIREHLATTDDHNIHM

SEQ ID NO: 3548 - protein, 865 aa, Daphnia obtusa
MEELNDVLGRCTIDWLARASTTEQPLQEHRPRPETSSLRPRRRNQSRQLQRIRQRKRSSPEEASRIQRLFNVYPRRAVRQVLGEKSSPYTGSTEAADQYLHRTYVRNQPSPDECTRARRLFDACNWTNPTEDQSSFLNRPPSREEIEIKLRRATNTSPGADGIEYRHIMALDPQCRLLEIIYQKVWQIGIPDASRRSRTVPIFKKGDPNDFSNFRPISLLSTLYKIYSGILSQRITAIAVELGWLSPGQKGFLPGVHGIQEHTQLLQTAVEETTSKHKSMSMAWLDLCNAFGSVPHAVLFELFHSLPLPNDLKRMLSDIYTGNIMDFVVGNETISIAPTAGVRQGDALSTTVFNLAAEPLLRAALSESNPGIDLFGYIVKATSYADDIAVMSNTPQSLQETLHHLSRVASILGLKFNAGKCASLNFNNGKPFQVDLFVDGSPIRCLGPDGQEIYLGTPIGAKLRFRSPNQLVTNLDKVADSLLAPWQKLEVFRSHLLPSLSHHLASGRVLKDVLTSLDTECRKFLGHVTMVPNSATTPFFYADRRVGGLGTFSLSDDADIWTLTSTVQLLTSKDRLVKNIFMEQLKDTILRGFREDVPATLPIGEYLSGSTEAGLYRLRFGPAGTNLWTLARGAAKRLRARIDVSDEETFRIIADDVSVLPAKAVRGLRQVVRQRHTRKFINSPHQGRVASALAIDQSTKDIARLTSCRTDLLHDDWKYLHRARLDLLPLRGYSWSSFDNKSCRHCGESSENGLHVLNNCKVNLTLATQRHDAVLELFHQLLSRKGYAATINRRLPETRLRPDVELQVSGSRLMVDVAVSYDLPENLEAAYTRKVVKYQHLGQVLPLVLGSLGSWTHLMTTSGLF

SEQ ID NO: 3549 - protein, 906 aa, Daphnia sinensis
MEDLNEVLGRCTVDWLARASTTEQPFQQERPRPENAPRRPRRRNQSRQLQRIRQRQKSRPEEASRIQRLFNIYPRRAVRQVLGEKSSPYTGSTEAANQYLHNTYVRPQLSTEEITRARQLFNACNWTMPSEDQSDFLNRPPSRGEIELKLRRATNTAPGSDGIEYRHIKALDPQGRLLEVIYDRVWQFGIPDAWRKSRTVPIFKKGDSSDFSNFRPISLLSTLYKIYSGILSQRITSIAVELGWLSPGQKGFLPGVHGIQEHTQLLQTAVEETTSKRKCMSMAWLDLCNAFGSVPHAVLYQLFHSLPLPNDLKRMLSDIYTGNSMDFVVGKETISIAPSAGVRQGDALSTTIFNLAAEPLLRAALSESNPGINLFGQIVKATAYADDIAVVSNTAQALQESLHHLSRVAKVLGLKFNAQKCASLNFINGKPFQVDLFVDGRPIKSLGSDDQEIYLGTPIGAKLRFRPPNQLVSNLDKIAESLLAPWQKLEVFRSHLLPSLSHHLASGRVLKDVLTTLDTECRKFLGHITMVPNTATTPFFYADRRVGGLGTFSLTDDADIWTLARAVQLLTSKDQLVKGIFTEQLKDTIMRGFRDEAPATLPIGEYLSGSTEAGLYRLRYAPAGTNLWTLARGAAKRLRVRIDVSGEGNIRIIADDVSVLPGKAVRGLRQVVRQRHTLKFISAPHQGRVASALATDRSTKDIARLTSSKTDLQHDDWRYLHRARLDLLPLRGYSWSSSDNKTCRHCGESSENGFHVLNNCRVNLTLATQRHDAVLELLYQLLSRKGYTAIINRELPESRLKPDVELEVSGTRLMIDVAVSYDISDNLQAAYNRKVTKYQHLGQVLPLVLGSLGSWYPMNEDIRSLLGIDHRSWCTFRRRSRLAAIKGSMEMIREHLATTDDHNIHM

SEQ ID NO: 3550 - protein, 1090 aa, Chrysotoxum bicinctum
MTVYRSRLRTLFIAQCPEFNVTEQRLSDQVRAIHRNNLVPEMRRSAIKAEVENQIGPNNQHNNSDDTDVAEDDSADTENTNIPEAQREEHITPNSQLEQEIRFVFGQQQALFIGTDPLNRPNIPKINTSKRISQIISIMNNLVLPLALEEISDLHSYHTMMYCAAATVARMCGKKLTPITNVRRRKSPHNAVLERIQSKIAYLRSSIERIKAFLAGNRARRLQNRVKAICLQHCNHSRYESNQSNATLVLDTLTQKLSVQISKQRKIKNSLARRQNNKAFNTKEKVFYRNLRSHNTNIDNEIPNISDVERFWSDIWATPKQHDPNTSWIREEKERFRGMPEMITNTISMNTLKETLAKAQNWKAPGTDRIQNFWYKRFETTQPKLLDLLNQALKTPTDFPDFLVKGTTYLLPKSNGFNRNPANGRPITCLSTLYKIMTACVNKLVYDHLSTHKVLCEEQKGCIRGARGCKEQLTVDQVIIEQSTKNQRNLYVSYIDYKKAFDSIPHTWLIDVLKIYRIHPRVISFLAHSMSKWKTCIEMFKDGTSLKTNEIPIKSGIFQGDCFSALWFCIAINPLSNLLNSSKYGFKIKSNNSEFKINHLLYMDDLKTYASTKAHLNYLLEIVSMFSRDIKMEFGLSKCKTLSIVRGKISPSAQDEIYGIREMQENEIYTYLGAAQNNRMDSTKIKKDLTSEFKGRLHKIGKSQLNGKNLIKAINTYAIPVLTYSFGVIKWSTTDLADLQRKVRTILTQYNLHHPRSCVERMTLPRREGGRGVIDLQSMHTKQIMSLRQYFTEKSLSSNLVKATIEADDNLTPLNLKNHLHMQTPNINDRRLAWAAKPLHGKHYYALRSENVDTETSNLWLQAGELFSETEGFIIAIQDGVTATRNYMRYIMRDNTVEDICRRCGKPNETIEHIISGCTSMVQTDYLRRHNNVAKLFHQRLCQNFGFVHQPQPYYRYEPEAVLENDTTKILYDRTLRTTNRVEHNRPDITVIDKKHNTAVLIDFAVPNNYNIKKTYDEKRRRYEDLAMDIKSQWNLRSVKIIPLIISATGIVDKNLKKHLQELKINEKFIGKVQKSIILDTCHIVRKFLN

SEQ ID NO: 3551 - protein, 952 aa, Chrysotoxum bicinctum
MNNLVLPFALEEISDLHSYHTMMYCAAATVARMCGKKLTPITNVRRRKSPHNAVLERIQSKIAYLRSSIERIKAFLAGNRARRLQNRVKAICLQHCNHSRYESNQSNATLVLDTLTQKLSVQISKQRKIKNSLARRQNNKAFNTKEKVFYRNLRSHNTNIDNEIPNISDVERFWSDIWATPKQHDPNTSWIREEKERFRGMPEMITNTISMNTLKETLAKAQNWKAPGTDRIQNFWYKRFETTQPKLLDLLNQALKKPTDFPDFLVKGTTYLLPKSNGFNRNPANGRPITCLSTLYKIMTACVNRMVYDHLSTHKVLCEEQKGCIRGARGCKEQLTVDQVIIEQSTKSQRNLYVSYIDYKKAFDSIPHTWLIDVLKIYRIHPRVISFLAHSMSKWKTCIEMFKDGTSLKTNEIPIKSGIFQGDCFSALWFCIAINPLSNLLNSSKYGFKIKSNNSEFKINHLLYMDDLKTYASTKAHLNYLLEIVSMFSRDIKMEFGLSKCKTLSIVRGKISPSAQDEIYGIREMQENEIYTYLGAAQNNRMDSTKIKKDLTSEFKGRLHKIGKSQLNGKNLIKAINTYAIPVLTYSFGVIKWFTTDLADLQRKVRTILTQYNLHHPRSCVERMTLPRREGGRGVIDLQSMHTKQIMSLRQYFTEKSLSSNLVKATIEADDNLTPLNLKNHLHMQTPNINDRRLAWAAKPLHGKHYYALRSENVDTETSNLWLQAGELFSETEGFIIAIQDGVTATRNYMRYIMRDNTVEDICRRCGKPNETIEHIISGCTSMVQTDYLRRHNNVAKLFHQRLCQNFGFVHQPQPYYRYEPEAVLENDTTKILYDRTLRTTNRVEHNRPDITVIDKKHNTAVLIDFAVPNNYNIKKTYDEKRRRYEDLAMDIKSQWNLRSVKIIPLIISATGIVDKNLKKHLQELKINEKFIGKVQKSIILDTCHIVRKFLN

SEQ ID NO: 3552 - protein, 1208 aa, Chrysotoxum bicinctum
MLEAASISNLPEGIKWKNSMMYDTNYENNLGSSDIPTASGSHPNSRAQGLVPGPSARSQLQKTQNINNSTTTQHSSDQQAQSSAAITQGTNRQRRKWTTNVNESLLRIYYLVTNCETNMTVYRSRLRTLFIAQCPEFNVTEQRLSDQVRAIHRNNLVPEMRRSAIKAEVENQIGPNNQHNNSDDTDVAEDDSAYTENTNIPEAQREEHITPNSQLEQEIRFVFGQQQALFIGTDPLNRPNIPKINTSKRISQIISIMNNLVLPFALEEISDLHSYHTMMYCAAATVARMCGKKLTPITNVRRRISPHNAVLERIQSKIAYLRSSIERIKAFLAGNRARRLQNRVKAICLQHCNHSRYESNQSNATLVLDTLTQKLSVQISKQRKIKNSLARRQNNKAFNTKEKVFYRNLRSHNTNIENEIPNISDVERFWSDIWATPKQHDPNTSWIREEKERFRGMPEMITNTISMNTLKETLAKAQNWKAPGTDRIQNFWYKRFETTQPKLLDLLNQALKTPTDFPDFLVKGTTYLLPKSNGFNRNPANGRPITCLSTLYKIMTACVNRMVYDHLSTHKVLCEEQKGCIRGARGCKEQLTVDQVIIEQSTKSQRNLYVSYIDYKKAFDSIPHTWLIDVLKIYRIHPRVISFLAHSMSKWKTCIEMFKDGTSLKTNEIPIKSGIFQGDCFSALWFCIAINPLSNLLNSSKYGFKIKSNNSEFKINHLLYMDDLKTYASTKAHLNYLLEIVSMFSRDIKMEFGLSKCKTLSIVRGKISPSAQDEIYGIREMQENEIYTYLGAAQNNRMDSTKIKKDLTSEFKGRLHKIGKSQLNGKNLIKAINTYAIPVLTYSFGVIKWSTTDLADLQRKVRTILTQYNLHHPRSCVERMTLPRREGGRGVIDLQSMHTKQIMSLRQYFTEKSLSSNLVKATIEADDNLTPLNLKNHLHMQTPNIDDRRLAWAAKPLHGKHYYALRSENVDTETSNLWLQAGELFSETEGFIIAIQDGVIATRNYMRYIMRDNTVEDICRRCGKPNETIEHIISGCTSMVQTDYLRRHNNVAKLLHQRLCQNFGFVHEPQPYYRYEPEAVLENDTTKILYDRTLRTTNRVEHNRPDITVIDKKHNTAVLIDFAVPNNYNIKKTYDEKRRRYEDLAMDIKSQWNLRSVKIIPLIISATGIVDKNLKKHLQELKINEKFIGKVQKSIILDTCHIVRKFLN

SEQ ID NO: 3553 - protein, 1256 aa, Melanostoma mellinum
MLTQGHPCQTGRSGELQCNQLPNNSKILHPTLVARQHVGRRLNFMLEAASVLNLPEGVKWKKFLMNDTNYEINLGSSDNPTASGSHPNSRAQGLVPGPSAISQLQNTQNISNSSTTQQSSDQQAQPSAAITQGINRQRRKWTTNVNETLLRLYYLVTNCETNMTMYRSRLLPLFIAQCPDFNATEQRLSDQVRAIHRNNLVPELRRSAIKAEVEYQIGPNNQHNISDHRNATDQPAEDDSPAATEIINDPEAQREDQETPNSQLEQEIRFVFGQQQALFIGTDPLNRPNIPKINTSRRISQIIGIINNIVLPAVLEEISDLQSYHTMTYCAAATVVRMCGKKLTPATNVSRQKSPHNVALQRIQSIADLRSSIERIKAFLAGNRARRLQNRVKAICFKHRNHSRYESNHSNATLVLDTLAQKLSVQISKQRKLKNSLARRKNNKVFSTKEKAFYRNLRSSDIINDTEIPDIKDVERFWSDTWANPKQHDPNAIWIKEEKERFRGIPEMTTNTISMNNLEETLRRAQNWKAPGADKIQNFWYKRFEAAQPKLLDLLNQALRIPTEFPDFLVRGTTYLLPKSNGFNRDPANGRPITCLPTLYKIMTACVNRIVYDHLSTHKVLCEELEGCIKGARGCKEQLTVDQVIIEQATKNQRNLYVSYIDYKKAFDSIPHTWLIDVLEIYRIHPRVISFLAQSMSKWNTCIEIANNNTTLRTKDIPIKSGIFQGDCFSALWFCIAINPLSNMLNSSKYGFKIKSNNSEFKINHLLYMDDLKTCASTKTHLNHLLGIVNMFSRDIKMDFGLNKCKTLSIVRGRVSPSAQDETYGIKEMQGNEIYTYLGAAQNNRMDSAKMRKDLTSEFKGRIHKIGKSQLNGKNLIKAINTFAIPVLTYSFGVIKWSTTDLADLQRKVRTILTQYNLHHPRSCVERMMLPRREGGRGIIDLQNMYAKQIISLRQYFTEKSSSSNLAKATIEADDNLTPLNLKNQPHIQTPNMEDRRRAWATKPLHGKHYYALKSENVDTETSNLWLQSGELFSETEGFIIAIQDGVIATRNYTRYIMKDNTVEDICRRCGKPNETIEHIISGCTNMAQTEYLRRHNNVAKLLHQRLCQNFGFVQESQPYYRYEPEAVMENHMVKIFYDRTLRTTSRVEHNRPDVTVIDKRDNTAVLIDLAVPNNHNIKTTYDEKRRRYEDLAMDIKSQWNLRSVKIIPLIISATGIVEKNFKKQLQELKINEKFIGKAQKSIILDTCHIVRKFLN

SEQ ID NO: 3554 - protein, 1023 aa, Melanostoma mellinum
MTMYRSRLLPLFIAQCPDFNATEQRLSDQVRAIHRNNLVPELRRSAIKAEVENQIGPNNQHNISDHRNATDQPAEDDSPAATEIINDPEAQREDQETPNSQLEQEIRFVFGQQQALFIGTDPLNRPNIPKINTSRRISQIIGIINNIVLPAVLEEISDLQSYHTMTYCAAATVVRMCGKKLTPATNVSRQKSPHNVALQRIQSKIADLRSSIERIKAFLAGNRARRLQNRVKAICFKHRNHSRYESNHSNATLVLDTLAQKLSVQISKQRKLKNSLARRKNNKVFSTKEKAFYRNLRSSDIINDTEIPDIEDVERFWSDTWANPKQHDPNAIWIKEEKERFRGIPEMTTNTISMNNLEETLRRAQNWKAPGADKIQNFWYKRFEAAQPKLLDLLNQALRIPTEFPDFLVRGTTYLLPKSNGFNRDPANGRPITCLPTLYKIMTACVNRIVYDHLSTHKVLCEEQKGCIKGARGCKEQLTVDQVIIEQATKNQRNLYVSYIDYKKAFDSIPHTWLIDVLEIYRIHPRVISFLAQSMSKWNTCIEIANNNTTLRTKDIPIKSGIFQGDCFSALWFCIAINPLSNMLNSSKYGFKIKSNNSEFKINHLLYMDDLKTYASTKTHLNHLLGIVNMFSRDIKMEFGLNKCKTLSIVRGRVSPSAQDETYGIKEMQGNEIYTYLGAAQNNRMDSAKMRKDLTSEFKGRIHKIGKSQLNGKNLIKAINTYAIPVLTYSFGVIKWSTTDLADLQRKVRTILTQYNLHHPRSCVERMMLPRREGGRGIIDLQNMYAKQIISLRQYFTEKSSSSNLAKATIEADDNLTPLNLKNQPHIQTSNMEDRRRAWATKPLHGKHYYALKSENVDTETSNLWLQSGELFSETEGFIIAIQDGVIATRNYTRYIMKDNTVEDICRRCGKPNETIEHIISGCTNMAQTEYLRRHNNVAKLLHQRLCQNFGFVQESQPYYRYEPEAVVENHMVKIFYDRTLRTTSRVEHNRPDVTVIDKRDNTAVLIDLAVPNNHNIKTTYDQ

SEQ ID NO: 3555 - protein, 819 aa, Scaeva pyrastri
MNNLVLPRALEEISELHSYHTMMYCAAATVVRMCGKKLTPITNVRKHKSPHNVVLQRIQSKIADLRSSIERIKAFMAGNRARRLQNRVKAICFQHRNHSRYELNHNNATLVLDTLTQKLSVQISKQRKIKNSLARRENNKTFRTKEKVFYRNLRSGNTNNDTELPDINDVERFWSDIWATPKQHDPDTIWIKEEKERFCEMPEMIINNISMNTLKETLAKAQNWKAPGPDRIQNFWYKRFESTQPKLLDLLNQALTTPTDFPDFLLRGTTYLLPKSNGFNRNPANGRPITCLSTLYKIMTACVNKIVYDHLSTHKILCEEQKGCIKGARGCKEQLTIDQVIIEQSTREQRNLYVSYIDYKKAFDSIPHTWLIEVLKIYHIHPRVISFLAHSMSKWKTCIEMFKNGTSLKTDEIPIKSGIFQGDCFSALWFCIAINPLSNMLKSSKYGFKIKSANSEFKINHLLYMDDLKTYASTKTHLNYLLEMVNTFSRDIKMEFGLSKCKTLSIVRGKISPSAQDEMYGIREMQENEIYTYLGAAQSNRMDSAQIKKDLTSEVKGRIHKIGKSQLNGKNLIKAINTYAIPILTYSFGVIKWSTTDLADLQRKVRTILTQYNLHHPRSCIERMTLPRRDGGRGVIDLQSMHTKQIMSLRQYFTEKSLNSNLVKSIIGADDNLTPLNLNNHLHMQTPNIDDRRRAWAAKPLHGKHYYALKSENVDTETSNLWLQAGELFSETEGFIIAIQDGVIATRNYMRYIMRDNTVEDICRRCGKPNETIEHIISGCTSMVQTDYLRRHNNVAKLFHQRLCQTSLGLYRTPALLPL

SEQ ID NO: 3556 - protein, 1195 aa, Coremacera marginata
MMNSTNDETNLGTSDNPTASGSHTNSRAQGLVPGPSARSELQNIPNNSTTTQQSSDQQAQSSAALTQGINRQRRKWTTNINETLLRLYYLVTNCETNLTAYRSELRSLFIAKCPEFNVTEQRLSDQVRAIHRNNLVPELRRSAIKVEVENQTAPNNQYNRTDPPDEPNQPHGSAMRSANENIILQSDHHLEIQIENRGTSNSQLEQEICFIFAQQQALFCWTDPLNRPNIPRINTSRRVCQIISIINNSVLPLALEEVSDLHSYHTLIYCAAATVVRMCGKTLYIPNSRRQKCSYNVALQRTQNKINELRSSIERIKTFLAGNSSRRLQHRVKKICLKHRNHSRYESNHGIASFVLDTLVQKLSVQIAKQRKLKKSLSRRDNNKAFSTREKVFYRNLRSHITTNNEEMPDIRDVESFWSDIWSTPKQHDPNTIWIKKEKERFYEIPEMTTTIISLNTLKEILAKAQNWKTPGADKIQNFWYKRFETTPKLLDLLNKALRTPTELPNFLVRGTTYLLPKSNGFSKDPANARPITCLPTLYKILTACVNRMVYEHLTTHKILCEEQKGCIKGARGCKEQLTVDQVIIEQATKNKRNLYVSYIDYKKAFDSVPHTWLIDVLEIYRIHPRIISFLEYSMSKWKTCIEVCNNGTSLKTKDIPIKSGIFQGDCFSALWFCIAINPLSNILNSSKYGFKIKSNNFEFKINHLLYMDDLKTYAATKAHLNHLLEAVNMFSKDIKMDLGLSKCKTLSIIRGKVSPSDQVETFGIREIQENEIYTYLGTAQNNTMDTAKIKKDLVTEFKGRLHKIGKSQLNGKNLIKAINTYAIPVLTYSFGVIKWSTTDLADLQRKVRTTLTKYNFHHPKSCVERMTLPRREGGRGVIDLQSMHLKHIVSLRQYFTEKITTSTLAKAIIEADDNLTPLNLKNQTHVQVPTLNDRRRAWAAKPLHGKHYQALKSENVDIESSNLWLRAGELFSETEGFIIAIQDGVIATRNYMRFIIGDSTVEDICRRCGKSNETIEHITSGCTSLVQTDYLRRHNNVTKILHQRLCQNFGFIQESQPYYRYEPAAVLDNDIVKILYDRTLRTTNRVEHNRPDVTVIDKRNNTAVLIDVAVNNNHNIKKVYDEKRRRYEDLAMDIKSQWNLQSVKIIPVIISATGLVEKNLKKHLQDLNISNKFIGKAQKSIILDTCHTVRKFLN

SEQ ID NO: 3557 - protein, 1015 aa, Apoderus coryli
MEQAQIHEGELKTHTNTEEYQETNPRTDIVDKIKSYMIKYEHSSPNHKHHLPILPKAKRQSEIITQVNWTLKYFVEPTMNLEDLTLLAYIGALVTVEILDIKMYEENKETIHSKRLPPWKERLQDKIDSMRADIGILQNYSTTNYSSYKVLRKVKIISKKYRTPGILNQRETLLQLLDTLKQKIKIFALRIKRYTIRSERYQQNRMFYENQRSFYQKLASNTKHQKTSVPSERDMTQFWSNIWEKPAQHNKTPYWLPQIEEKLHQVQPMTHTQVDRSDISAALKYMNDWKAPGKDRIHVFWWKRFTSLHQQMASCFQDILVNPTTIPSFVTEGITYMLPKTYENPEPKDFRPITCLCAIYKILTKVIETKLTGHLNQNKILAPEQTGCKPKTRGTKEALVVDSVITHHAKTKHRYLSTAWIDYKKAFDSVPHSWILQVLKLYKVHNEIIKLIHHLMNSWRTRIQIKTAAVGYTTEEIHIRRGIFQGDSLSPTLFCLSLNPLSTILNDSPYGYIISKNPVIKVTHQFYVDDLKLYATSSKQLISQLELVAKFSRDIGMEFGTDKCATLHLHKGKLTQEQAIDLIDGTTIQTLPDGSNYKYLGILQAAEIDTNAVREGVRREVRVRLHRVLHTKLNSRNKIDAINAWVLPVAAYTFGVVKWSTTAIRELDCEIRKSLSKSGLHHPQSNTNRLYIPRGNGGRGLQLLENVLADSMSNIRQYFLNSEILVHKQVCRIGQESHPVFDQHLVSKTTRAMLDEWSLKPLHGRFINNVNKDYVDKASTFTYLKRGYLFPETEGAIHAIQDQCVKTRAYRKRILNESLDIETCRMCGAASESIQHLTSGCTTLAPKDYLERHNAVAKVIHQGICHQQKLIKSIVAPYKYMPEFKLESDTMLVYWDTPILTERHIVHNRPDIVVIDKKGKLGYIVDIANPGDENLQKTYVEKLSKYESLKYEISHLYNLQSVLIVPFILSANGLVHKSFVENLKIFNLNYGYLHEAQKAVILGTCRIVRRVLQIS

SEQ ID NO: 3558 - protein, 1174 aa, Apoderus coryli
MMNANENNNINLPLTQLEAMMEGANGLHQNNSATIRPARSPNNLEPNIGTPVVERPNNNNTQQTTRSRGRRWTRTKQLDLLRTYFKATEIETNFIGFRQKVFEDWKIMYPEHETSAQALSDYIRYLINKKIISDAELDEIKNLIRTEQNLFHGVQITVNMEQAQIHEGELNTHTNTEEYQETNPRTDIVDKIKSYMIKYEHSSPNHKHHLPILPKAKRQSEIITQVNWTLKYFVEPTMNLEDLTLLAYIGALVTVEILDIKMYEENKETIHSKRLPPWKQRLQDKIDSMRADIGILQNYSTTNYSSYKVLRKVKIISKKYRTPGILNQRETLLQLLDTLKQKIKIFALRIKRYTIRSERYQQNRMFYENQRSFYQKLASNTKHQKTSVPSERDMTQFWSNIWEKPAQHNKTPYWLPQIEEKLHQVQPMTHTQVDRSDISAALKYMNDWKAPGKDRIHVFWWKRFTSLHQQMASCFQDILVNPTTIPSFVTEGITYMLPKTYENPEPKDFRPITCLCAIYKILTKVIETKLTGHLNQNKILAPEQTGCKPKTRGTKEALVVDSVITHHAKTKHRYLSTAWIDYKKAFDSVPHSWILQVLKLYKVHNEIIKLIHHLMNSWRTRIQIKTAAVGYTTEEIHIRRGIFQGDSLSPTLFCLSLNPLSTILNDSPYGYIISKNPVVKVTHQFYVDDLKLYATSSKQLISQLELVAKFSRDIGMEFGTDKCATLHLHKGKLTQEQAIDLIDGTTIQTLADGSNYKYLGILQAAEIDTNAVREGVRREVRVRLHRVLHTKLNSRNKIDAINAWVLPVAAYTFGVVKWSTTAIRELDCEIRKSLSKAGLHHPQSNTNRLYIPRGNGGRGLQLLENVLADSMSNIRQYFLNSEILVHKQVCRIGQESHPVFDQHLVSKTTRVMLDEWSLKPLHGRFINNVNKDYVDKAGTFTYLKRGYLFPETEGAIHAIQDQCVKTRAYRKRILNESLDIEACRMCGAASESIQHLTSGCTTLAPKDYLERHNAVAKVIHQGICHQQKLIKSIVAPYKYMPEFRLESDTMLVYWDTPILTERHIVHNRPDIVVIDKKGKLGYIVDIANPGDENLQKTYVEKLSKYESLKYEISHLYNLQSVLIVPFILSANGLVHKSFVENLKIFNLNYGYLHEAQKAVILGTCRIVRRVLQIP

SEQ ID NO: 3559 - protein, 886 aa, Apoderus coryli
MRADIGILQNYSTTNYSSYKVLRKVKIISTKYRTPGILNQRETLLQLLDTLKQKIKIFALRIKRYTIRSERYQQNRMFYENQRSFYQKLASNTKHQKTSVRSERDMTQFWSNIWEKPAQHNKTPYWLPQIEEKLHQVQPMTHTQVDRSDISAALKYMNDWKAPGKDRIHVFWWKQFTSLHQQMASCFQDILVNPTTIPSFVTEGITYMLPKTYENPEPKDFRPITCLCAIYKILTKVIETKLTGHLNQNKILAPEQTGCKPKTRGTREALVVDSVITHHAKTKHRYLSTAWIDYKKAFDSVPHSWILQVLKLYKVHNEIIKLIHHLMNSWRTRIQIKTAAVGYTTEEIHIRRGIFQGDSLSPTLFCLSLNPLSTILNDSPYGYIISKNPVVKVTHQFYVDDLKLYATSSKQLISQLELVAKFSRDIGMEFGTDKCATLHLHKGKLTQEQAIDLIDGTTIQTLPDGSNYKYLGILQAAEIDTNAVREGVRREVRVRLHRVLHTKLNSRNKIDAINAWVLPVAAYTFGVVKWSTTAIRELDCEIRKSLSKAGLHHPQSNTNRLYIPRGNGGRGLQLLENVLADSMSNIRQYFLNSEILVHKQVCRIGQESHPVFDQHLVSKTTRGMLDEWSLKPLHGRFINNVNKDYVDKTSTFTYLKRGYLFPETEGAIHAIQDQCVKTRAYRKRILNESLDIETCRMCGAASESIQHLTSGCTTLAPKDYLERHNAVAKVIHQGICHQQKLIKSIVAPYKYMPEFRLESDTMLVYWDTPILTERHIVHNRPDIVVIDKKGKLGYIVDIANPGDENLQKTYVEKLSKYESLKYEICHLYNLQSVLIVPFILSANGLVHKSFVENLKIFNLNYGYLHEAQKAVILGTCRIVRRVLQIP

SEQ ID NO: 3560 - protein, 1174 aa, Apoderus coryli
MMNANENNNINLPLTQLEAMMEGANGLHQNNSATIRPARSPNNLEPNIGTPVVERPNNNNTQQTTRSRGRRWTRTKQLDLLRTYFKATEIETNFIGFRQKVFEDWKIMYPEHETSAQALSDYIRYLINKKIISDAELDEIKNLIRTEQNLFHGVQITVNMEQAQIHEGELNTHTNTEEYQETNPRTDIVDKIKSYMIKYEHSSPNHKHHLPILPKAKRQSEIITQVNWTLKYFVEPTMNLEDLTLLAYIGALVTVEILDIKMYEENKETIHSKRLPPWKQRLQDKIDSMRADIGILQNYSTTNYSSYKVLRKVKIISKKYRTPGILNQRETLLQLLDTLKQKIKIFALRIKRYTIRSERYQQNRMFYENQRSFYQKLASNTKHQKTSVPSERDMTQFWSNIWEKPAQHNKTPYWLPQIEEKLHQVQPMTHTQVDRSDISAALKYMNDWKAPGKDRIHVFWWKRFTSLHQQMASCFQDILVNPTTIPSFVTEGITYMLPKTYENPEPKDFRPITCLCAIYKILTKVIETKLTGHLNQNKILAPEQTGCKPKTRGTKEALVVDSVITHHAKTKHRYLSTAWIDYKKAFDSVPHSWILQVLKLYKVHNEIIKLIHHLMNSWRTRIQIKTAAVGYTTEEIHIRRGIFQGDSLSPTLFCLSLNPLSTILNDSPYGYIISKNPVIKVTHQFYVDDLKLYATSSKQLISQLELVAKFSRDIGMEFGTDKCATLHLHKGKLTQEQAIDLIDGTTIQTLPDGSNYKYLGILQAAEIDTNAVREGVRREVRVRLHRVLHTKLNSRNKIDAINAWVLPVAAYTFGVVKWSTTAIRELDCEIRKSLSKSGLHHPQSNTNRLYIPRGNGGRGLQLLENVLADSMSNIRQYFLNSEILVHKQVCRIGQESHPVFDQHLVSKTTRAMLDEWSLKPLHGRFINNVNKDYVDKASTFTYLKRGYLFPETEGAIHAIQDQCVKTRAYRKRILNESLDIETCRMCGAASESIQHLTSGCTTLAPKDYLERHNAVAKVIHQGICHQQKLIKSIVAPYKYMPEFKLESDTMLVYWDTPILTERHIVHNRPDIVVIDKKGKLGYIVDIANPGDENLQKTYVEKLSKYESLKYEISHLYNLQSVLIVPFILSANGLVHKSFVENLKIFNLNYGYLHEAQKAVILGTCRIVRRVLQIS

SEQ ID NO: 3561 - protein, 1174 aa, Apoderus coryli
MMNANENNNINLPLTQLEAMMEGANGLHQNNFATIRPARSPNNLEPNIGTPVVERPNNNNTQQTTRSRGRRWTRTKQLDLLRTYFKATEIETNFIGFRQKVFEDWKIMYPEHETSAQALSDYIRYLINKKIISDAELDEIKNLIRTEQNLFHGVQITVNMEQAQIHEGELNTHTNTEEYQETNPRTDIVDKIKSYMIKYEHSSPNHKHHLPILPKAKRQSEIITQVNWTLKYFVEPTMNLEDLTLLAYIGALVTVEILDIKMYEENKETIHSKRLPPWKQRLQDKIDSMRADIGILQNYSTTNYSSYKVLRKVKIISKKYRTPGILNQRETLLQLLDTLKQKIKIFALRIKRYTIRSERYQQNRMFYENQRSFYQKLASNTKHQKTSVPSERDMTQFWSNIWEKPAQHNKTPYWLPQIEEKLHQVQPMTHTQVDRSDISAALKYMNDWKAPGKDRIHVFWWKRFTSLHQQMASCFQDILVNPTTIPSFVTEGITYMLPKTYENPEPKDFRPITCLCAIYKILTKVIETKLTGHLNQNKILAPEQTGCKPKTRGTKEALVVDSVITHHAKTKHRYLSTAWIDYKKAFDSVPHSWILQVLKLYKVHNEIIKLIHHLMNSWRTRIQIKTAAVGYTTEEIHIRRGIFQGDSLSPTLFCLSLNPLSTILNDSPYGYIISKNPVVKVTHQFYVDDLKLYATSSKQLISQLELVAKFSRDIGMEFGTDKCATLHLHKGKLTQEQAIDLIDGTTIQTLPDGSNYKYLGILQAAEIDTNAVREGVKREVRVRLHRVLHTKLNSRNKIDAINAWVLPVAAYTFGVVKWSTTAIRELDCEIRKSLSKAGLHHPQSNTNRLYIPRGNGGRGLQLLENVLANSMSNIRQYFLNSEILVHKQVCRIGQESHPVFDQHLVSKTTRVMLDEWSLKPLHGRFINNVNKDYVDKTSTFTYLKRGYLFPETEGAIHAIQDQCVKTRAYRKRILNESLDIETCRMCGAASESIQHLTSGCTTLAPKDYLERHNAVAKVIHQGICHQQKLIKSIVAPYKYMPEFKLESDTMLVYWDTPILTERHIVHNRPDIVVIDKKGKLGYIVDIANPGDENLQKTYVEKLSKYESLKYEISHLYNLQSVLIVPFILSANGLVHKSFVENLKIFNLNYGYLHEAQKAVILGTCRIVRRVLQIP

SEQ ID NO: 3562 - protein, 1174 aa, Apoderus coryli
MMNANENNNINLPLTQLEAMMEGANGLHQNNSATIRPARSPNNLEPNIGTPVVERPNNNNTQQTTRSRGRRWTRTKQLDLLRTYFKATEIETNFIGFRQKVFEDWKIMYPEHETSAQALSDYIRYLINKKIISDAELDEIKNLIRTEQNLFHGVQITVNMEQAQIHEGELNTHTNTEEYQETNPRTDIVDKIKSYMIKYEHSSPNHKHHLPILPKAKRQSEIITQVNWTLKYFVEPTMNLEDLTLLAYIGALVTVEILDIKMYEENKETIHSKRLPPWKQRLQDKIDSMRADIGILQNYSTTNYSSYKVLRKVKIISKKYRTPGILNQRETLLQLLDTLKQKIKIFALRIKRYTIRSERYQQNRMFYENQRSFYQKLASNTKHQKTSVPSERDMTQFWSNIWEKPAQHNKTPYWLPQIEEKLHQVQPMTHTQVDRSDISAALKYMNDWKAPGKDRIHVFWWKRFTSLHQQMASCFQDILVNPTTIPSFVTEGITYMLPKTYENPEPKDFRPITCLCAIYKILTKVIETKLTGHLNQNKILAPEQTGCKPKTRGTKEALVVDSVITHHAKTKHRYLSTAWIDYKKAFDSVPHSWILQVLKLYKVHNEIIKLIHHLMNSWRTRIQIKTAAVGYTTEEIHIRRGIFQGDSLSPTLFCLSLNPLSTILNDSPYGYIISKNPVIKVTHQFYVDDLKLYATSSKQLISQLELVAKFSRDIGMEFGTDKCATLHLHKGKLTQEQAIDLIDGTTIQTLPDGSNYKYLGILQAAEIDTNAVREGVRREVRVRLHRVLHTKLNSRNKIDAINAWVLPVAAYTFGVVKWSTTAIRELDCEIRKSLSKSGLHHPQSNTNRLYIPRGNGGRGLQLLENVLADSMSNIRQYFLNSEILVHKQVCRIGQESHPVFDQHLVSKTTRAMLDEWSLKPLHGRFINNVNKDYVDKASTFTYLKRGYLFPETEGAIHAIQDQCVKTRAYRKRILNESLDIETCRMCGAASESIQHLTSGCTTLAPKDYLERHNAVAKVIHQGICHQQKLIKSIVAPYKYMPEFKLESDTMLVYWDTPILTERHIVHNRPDIVVIDKKGKLGYIVDIANPGDENLQKTYVEKLSKYESLKYEISHLYNLQSVLIVPFILSANGLVHKSFVENLKIFNLNYGYLHEAQKAVILGTCRIVRRVLQVS

SEQ ID NO: 3563 - protein, 1174 aa, Apoderus coryli
MMNANENNNINLPLTQLEAMMEGANGLHQNNFATIRPARSPNNLEPNIGTPVVERPNNNNTQQTTRSRGRRWTRTKQLDLLRTYFKATEIETNFIGFRQKVFEDWKIMYPEHETSAQALSDYIRYLINKKIISDAELDEIKNLIRTEQNLFHGVQITVNMEQAQIHEGELNTHTNTEEYQETNPRTDIVDKIKSYMIKYEHSSPNHKHHLPILPKAKRQSEIITQVNWTLKYFVEPTMNLEDLTLLAYIGALVTVEILDIKMYEENKETIHSKRLPPWKQRLQDKIDSMRADIGILQNYSTTNYSSYKVLRKVKIISKKYRTPGILNQRETLLQLLDTLKQKIKIFALRIKRYTIRSERYQQNRMFYENQRSFYQKLASNTKHQKTSVPSERDMTQFWSNIWEKPAQHNKTPYWLPQIEEKLHQVQPMTHTQVDRSDISAALKYMNDWKAPGKDRIHVFWWKRFTSLHQQMASCFQDILVNPTTIPSFVTEGITYMLPKTYENPEPKDFRPITCLCAIYKILTKVIETKLTGHLNQNKILAPEQTGCKPKTRGTKEALVVDSVITHHAKTKHRYLSTAWIDYKKAFDSVPHSWILQVLKLYKVHNEIIKLIHHLMNSWRTRIQIKTAAVGYTTEEIHIRRGIFQGDSLSPTLFCLSLNPLSTILNDSPYGYIISKNPVVKVTHQFYVDDLKLYATSSKQLISQLELVAKFSRDIGMEFGTDKCATLHLHKGKLTQEQAIDLIDGTTIQTLPDGSNYKYLGILQAAEIDTNAVREGVKREVRVRLHRVLHTKLNSRNKIDAINAWVLPVAAYTFGVVKWSTTAIRELDCEIRKSLSKAGLHHPQSNTNRLYIPRGNGGRGLQLLENVLANSMSNIRQYFLNSEILVHKQVCRIGQESHPVFDQHLVSKTTRVMLDEWSLKPLHGRFINNVNKDYVDKTSTFTYLKRGYLFPETEGAIHAIQDQCVKTRAYPKRILNESLDIETCRMCGAASESIQHLTSGCTTLAPKDYLERHNAVAKVIHQGICHQQKLIKSIVAPYKYMPEFKLESDTMLVYWDTPILTERHIVHNRPDIVVIDKKGKLGYIVDIANPGDENLQKTYVEKLSKYESLKYEISHLYNLQSVLIVPFILSANGLVHKSFVENLKIFNLNYGYLHEAQKAVILGTCRIVRRVLQIP

SEQ ID NO: 3564 - protein, 1174 aa, Apoderus coryli
MMNANENNNINLPLTQLEAMMEGANGLHQNNSATIRPARSPNNLEPNIGTPVVERPNNNNTQQTTRSRGRRWTRTKQLDLLRTYFKATEIETNFIGFRQKVFEDWKIMYPEHETSAQALSDYIRYLINKKIISDAELDEIKNLIRTEQNLFHGVQITVNMEQAQIHEGELNTHTNTEEYQETNPRTDIVDKIKSYMIKYEHSSPNHKHHLPILPKAKRQSEIITQVNWTLKYFVEPTMNLEDLTLLAYIGALVTVEILDIKMYEENKETIHSKRLPPWKQRLQDKIDSMRADIGILQNYSTTNYSSYKVLRKVKIISKKYRTPGILNQRETLLQLLDTLKQKIKIFALRIKRYTIRSERYQQNRMFYENQRSFYQKLASNTKHQKTSVPSERDMTQFWSNIWEKPAQHNKTPYWLPQIEEKLHQVQPMTHTQVDRSDISAALKYMNDWKAPGKDRIHVFWWKRFTSLHQQMASCFQDILVNPTTIPSFVTEGITYMLPKTYENPEPKDFRPITCLCAIYKILTKVIETKLTGHLNQNKILAPEQTGCKPKTRGTKEALVVDSVITHHAKTKHRYLSTAWIDYKKAFDSVPHSWILQVLKLYKVHNEIIKLIHHLMNSWRTRIQIKTAAVGYTTEEIHIRRGIFQGDSLSPTLFCLSLNPLSTILNDSPYGYIISKNPVIKVTHQFYVDDLKLYATSSKQLISQLELVAKFSRDIGMEFGTDKCATLHLHKGKLTQEQAIDLIDGTTIQTLPDGSNYKYLGILQAAEIDTNAVREGVRREVRVRLHRVLHTKLNSRNKIDAINAWVLPVAAYTFGVVKWSTTAIRELDCEIRKSLSKSGLHHPQSNTNRLYIPRGNGGRGLQLLENVLADSMSNIRQYFLNSEILVHKQVCRIGQESHPVFDQHLVSKTTRAMLDEWSLKPLHGRFINNVNKDYVDKASTFTYLKRGYLFPETEGAIHAIQDQCVKTRAYRKRILNESLDIETCRMCGAASESIQHLTSGCTTLAPKDYLERHNAVAKVIHQGICHQQKLIKSIVAPYKYMPEFKLESDTMLVYWNTPILTERHIVHNRPDIVVIDKKGKLGYIVDIANPGDENLQKTYVEKLSKYESLKYEISHLYNLQSVLIVPFILSANGLVHKSFVENLKIFNLNYGYLHEAQKAVILGTCRIVRRVLQIS

SEQ ID NO: 3565 - protein, 1173 aa, Apoderus coryli
MMNANENNNINLPLTQLEAMMEGANGLHQNNSATIRPARSPNNLEPNIGTPVVERPNNNNTQQTTRSRGRRWTRTKQLDLLRTYFKATEIETNFIGFRQKVFEDWKIMYPEHETSAQALSDYIRYLINTKIISDAELDEIKNLIRTEQNLFHGVQITVNMEQAQIHEGELNTHTNTEEYQETNPRTDIVDKIKSYMIKYEHSSPNHKHHLPILPKAKRQSEIITQVNWTLKYFVEPTMNLEDLTLLAYIGALVTVEILDIKMYEENKETIHSKRLPPWKQRLQDKIDSMRADIGILQNYSTTNYSSYKVLRKVKIISKKYRTPGILNQRETLLQLLDTLKQKIKIFALRIKRYTIRSERYQQNRMFYENQRSFYQKLASNTKHQKTSVPSERDMTQFWSNIWEKPAQHNKTPYWLPQIEEKLHQVQPMTHTQVDRSDISAALKYMNDWKAPGKDRIHVFWWKRFTSLHQQMASCFQDILVNPTTIPSFVTEGITYMLPKTYENPEPKDFRPITCLCAIYKILTKVIETKLTGHLNQNKILAPEQTGCKPKTRGTKEALVVDSVITHHAKTKHRYLSTAWIDYKKAFDSVPHSWILQVLKLYKVHNEIIKLIHHLMNSWRTRIQIKTPAVGYTTEEIHIRRGIFQGDSLSPTLFCLSLNPLSTILNDSPYGYIISKNPVVKVTHQFYVDDLKLYATSSKQLISQLELVAKFSRDIGMEFGTDKCATLHLHKGKLTQEQAIDLIDGTTIQTLPDGSNYKYLGILQAAEIDTNAVREGVRREVRVRLHRVLHTKLNSRNKIDAINAWVLPVAAYTFGVVKWSTTAIRELDCEIRKSLSKAGLHHPQSNTNRLYIPRGNGGRGLQLLENVLADSMSNIRQYFLNSEILVHKQVCRIGQESHPVFDQHLVSKTTRVMLDEWSLKPLHGRFINNVNKDYVDKAGTFTYLKRGYLFPETGAIHAIQDQCVKTRAYRKRILNESLDIEACRMCGAASESIQHLTSGCTTLAPKDYLERHNAVAKVIHQGICHQQKLIKSIVAPYKYMPEFKLESDTMIVYWDTPILTERHIVHNRPDIVVIDKKGKLGYIVDIANPGDENLQKTYVEKLSKYESLKYEISHLYNLQSVLIVPFILSANGLVHKSFVENLKIFNLNYGYLHEAQKAVILGTCRIVRRVLQIP

SEQ ID NO: 3566 - protein, 1174 aa, Apoderus coryli
MMNANENNNINLPLTQLEAMMEGANGLHQNNFATIRPARSPNNLEPNIGTPVVERPNNNNTQQTTRSRGRRWTRTKQLDLLRTYFKATEIETNFIGFRQKVFEDWKIMYPEHETSAQALSDYIRYLINKKIISDAELDEIKNLIRTEQNLFHGVQITVNMEQAQIHEGELNTHTNTEEYQETNPRTDIVDKIKSYMIKYEHSSPNHKHHLPILPKAKRQSEIITQVNWTLKYFVEPTMNLEDLTLLAYIGALVTVEILDIKMYEENKETIHSKRLPPWKQRLQDKIDSMRADIGILQNYSTTNYSSYKVLRKVKIISKKYRTPGILNQRETLLQLLDTLKQKIKIFALRIKRYTIRSERYQQNRMFYENQRSFYQKLASNTKHQKTSVPSERDMTQFWSKIWEKPAQHNKTPYWLPQIEEKLHQVQPMTHTQVDRSDISAALKYMNDWKAPGKDRIHVFWWKRFTSLHQQMASCFQDILVNPTTIPSFVTEGITYMLPKTYENPEPKDFRPITCLCAIYKILTKVIETKLTGHLNQNKILAPEQTGCKPKTRGTKEALVVDSVITHHAKTKHRYLSTAWIDYKKAFDSVPHSWILQVLKLYKVHNEIIKLIHHLMNSWRTRIQIKTAAVGYTTEEIHIRRGIFQGDSLSPTLFCLSLNPLSTILNDSPYGYIISKNPVVKVTHQFYVDDLKLYATSSKQLISQLELVAKFSRDIGMEFGTDKCATLHLHKGKLTQEQAIDLIDGTTIQTLPDGSNYKYLGILQAAEIDTNAVREGVKREVRVRLHRVLHTKLNSRNKIDAINAWVLPVAAYTFGVVKWSTTAIRELDCEIRKSLSKAGLHHPQSNTNRLYIPRGNGGRGLQLLENVLANSMSNIRQYFLNSEILVHKQVCRIGQESHPVFDQHLVSKTTRVMLDEWSLKPLHGRFINNVNKDYVDKTSTFTYLKRGYLFPETEGAIHAIQDQCVKTRAYRKRILNESLDIETCRMCGAASESIQHLTSGCTTLAPKDYLERHNAVAKVIHQGICHQQKLIKSIVAPYKYMPEFKLESDTMLVYWDTPILTERHIVHNRPDIVVIDKKGKLGYIVDIANPGDENLQKTYVEKLSKYESLKYEISHLYNLQSVLIVPFILSANGLVHKSFVENLKIFNLNYGYLHEAQKAVILGTCRIVRRVLQIP

SEQ ID NO: 3567 - protein, 1018 aa, Apoderus coryli
MYPEHETSAQALSDYIRYLINKKIISDAELDEIKNLIRTEQNLFHGVQITVNMEQAQIHEGELNTHTNTEEYQETNPRTDIVDKIKYEHSSPNHKHHLPILPKAKKQSEIITQVNWTLKYFVEPNMNLEDLTLLAYIGALVTVEILDIKMYEENKETIHSKRLPPWKQRLQDKIDSMRADIGILQNYSTTNYSSYKVLRKVKIISKKYRTPGILNQRETLLQLLDTLKQKIKIFALRIKRYTIRSERYQQNRMFYENQRSFYQNLASNTKHQKTSVPSERDMTQFWSNIWEKPAQHNKTPYWLPQIEEKLHQVQPMTHTQVDRSDISAALKYMNDWKAPGKDRIHVFWWKRFTSLHQQMASCFQDILVNPTTIPSFVTEGITYMLPKTYENPEPKDFRPITCLCAIYKILTKVIETKLTGHLNQNKILAPEQTGCKPKTRGTKEALVVDSVITHHAKTKHRYLSTAWIDYKKAFDSVPHSWILQVLKLYKVHNEIIKLIHHLMNSWRTRIQIKTAAVGYTTEEIHIRRGIFQGDSLSPTLFCLSLNPLSTILNDSPYGYIISKNPVIKVTHQFYVDDLKLYATSSKQLISQLELVAKFSRDIGMEFGTDKCATLHLHKGKLTQEQAIDLIDGTTIQTLPDGSNYKYLGILQAAEIDTNAVREGVRREVRVRLHRVLHTKLNSRNKIDAINAWVLPVAAYTFGVVKWSTTAIRELDCEIRKSLSKSGLHHPQSNTNRLYIPRGNGGRGLQLLENVLADSMSNIRQYFLNSEILVHKQVCRIGQESHPVFDQHLVSKTTRVMLDEWSLKPLHGRFINNVNKDYVDKASTFTYLKRGYLFPETEGAIHAIQDQCVKTRAYRKRILNESLDIETCRMCGAASESIQHLTSGCTTLAPKDYLERHNAVAKVIHQGICHQQKLIKSIVAPYKYMPEFKLESDTMLVYWDTPILTERHIVHNRPDIVVIDKKGKLGYIVDIANPGDENLQKTYVEKLSKYESLKYEISHLYKSTISVDSSIHLVG

SEQ ID NO: 3568 - protein, 1174 aa, Apoderus coryli
MMNANENNNINLPLTQLEAMMEGANGLHQNNSATIRPARSPNNLEPNIGTPVVERPNNNNTQQTTRGRGRRWTRTKQLDLLRTYFKATEIETNFIGFRQKVFEDWKIMYPEHETSAQALSDYIRYLINKKIISDAELDEIKNLIRTEQNLFHGVQITVNMEQAQIHEGELNTHTNTEEYQETNPRTDIVDKIKSYMIKYEHSSPNHKHHLPILPKAKRQSEIITQVNWTLKYFVEPTMNLEDLTLLAYIGALVTVEILDIKMYEENKETIHSKRLPPWKQRLQDKIDSMRADIGILQNYSTTNYSSYKVLRKVKIISKKYRTPGILNQRETLLQLLDTLKQKIKIFALRIKRYTIRSERYQQNRMFYENQRSFYQKLASNTKHQKTSVPSERDMTQFWSNIWEKPAQHNKTPYWLPQIEEKLHQVQPMTHTQVDRSDISAALKYMNDWKAPGKDRIHVFWWKRFTSLHQQMASCFQDILVNPTTIPSFVTEGITYMLPKTYENPEPKDFRPITCLCAIYKILTKVIETKLTGHLNQNKILAPEQTGCKPKTRGTKEALVVDSVITHHAKTKHRYLSTAWIDYKKAFDSVPHSWILQVLKLYKVHNEIIKLIHHLMNSWRTRIQIKTAAVGYTTEEIHIRRGIFQGDSLSPTLFCLSLNPLSTILNDSPYGYIISKNPVVKVTHQFYVDDLKLYATSSKQLISQLELVAKFSRDIGMEFGTDKCATLHLHKGKLTQEQAIDLIDGTTIQTLPDGSNYKYLGILQAAEIDTNAVREGVRREVRVRLHRVLHTKLNSRNKIDAINAWVLPVAAYTFGVVKWSTTAIRELDCEIRKSLSKAGLHHPQSNTNRLYIPRGNGGRGLQLLENVLADSMSNIRQYFLNSEILVHKQVCRIGQESHPVFDQHLVSKTTRVMLDEWSLKPLHGRFINNVNKDYVDKAGTFTYLKRGYLFPETEGAIHAIQDQCVKTRAYRKRILNESLDIETCRMGGAASESIQHLTSGCTTLAPKDYLERHNAVAKVIHQGICHQQKLIKSIVAPYKYMPEFKLESDTMLVYWDTPILTERHIVHNRPDIVVIDKKGKLGYIVDIANPGDENLQKTYVEKLSKYESLKYEISHLYNLQSVLIVPFILSANGLVHKSFVENLKIFNLNYGYLHEAQKAVILGTCRIVRRVLQIP

SEQ ID NO: 3569 - protein, 937 aa, Apoderus coryli
MNLEDLTLLAYIGALVTVEILDIKMYEENKETIHSKRLPPWKQRLQDKIDSMRADIGILQNYSTTNYSSYKVLRKVKIISKKYRTPGILNQRETLLQLLDTLKQKIKIFALRIKRYTIRSERYQQNRMFYENQRSFYQKLASNTKHQKTSVPSERDMTQFWSNIWEKPAQHNKTPYWLPQIEEKLHQVQPMTHTQVDRSDISAALKYMNDWKAPGKDRIHVFWWKRFTSLHQQMASCFQDILVNPTTIPSFVTEGITYMLPKTYENPEPKDFRPITCLCAIYKILTKVIETKLTGHLNQNKILAPEQTGCKPKTRGTKEALVVDSVITHHAKTKHRYLSTAWIDYKKAFDSVPHSWILQVLKLYKVHNEIIKLIHHLMNSWRTRIQIKTAAVGYTTEEIHIRRGIFQGDSLSPTLFCLSLNPLSTILNDSPYGYIISKNPVVKVTHQFYVDDLKLYATSSKQLISQLELVAKFSRDIGMEFGTDKCATLHLHKGKLTQEQAIDLIDGTTIQTLADGSNYKYLGILQAAEIDANAVREGVRREVRVRLHRVLHTKLNSRNKIDAINAWVLPVAAYTFGVVKWSTTAIRELDCEIRKSLSKAGLHHPQSNTNRLYIPRGNGGRGLQLLENVLADSMSNIRQYFLNSEILVHKQVCRIGQESHPVFDQHLVSKTTRVMLDEWSLKPLHGRFINNVNKDYVDKAGTFTYLKRGYLFPETEGAIHAIQDQCVKTRAYRKRILNESLDIEACRMCGAASESIQHLTSGCTTLAPKDYLERHNAVAKVIHQGICHQQKLIKSIVAPYKYMPEFRLESDTMLVYWDTPILTERHIVHNRPDIVVIDKKGKLGYIVDIANPGDENLQKTYVEKLSKYESLKYEISHLYNLQSVLIVPFILSANGLVHKSFVENLKIFNLNYGYLHEAQKAVILGTCRIVRRVLQIP

SEQ ID NO: 3570 - protein, 1221 aa, Apoderus coryli
MKGTAKTKDSGRKIVLRSDVRERTACAGSFRLMEQNTETSERSSESKGALERAASASVSLSPSCEEAEQAAPPRERLPQGPEELPETENIGLDNQIRDPAQIPEGRRGRIRWTKESNIKLMHVYYLVTKLETDMTLYRKRLYELWKNIEPHTNRSEQNLASQVNSILRRNALSEAELRTIKARAEQELNLNEQMQEIVVIPNMEVPVGDPEPQEDHNNIRDLENEGEAETLLKMLDKTLLEYDRIPLRNRPNLPKVKNNLKLVTIVSKVDQVLPQRAQRCVDLESTAHLIYCAATTACVTAGVNLEQKTKLAINKTEYKKQPWQIRIERKINYVRRDIGILTNYLQSSPTPSNKVKNMATNICRKQNIKVADHTQKREINTYLDLLKQKVKALGARLKRYNQTAKRRSQLKLFEQNQKAFYNSLKDNKTLGENSELPHERDLLKFWSEIWGKPASYKERLWETDVKKQCQKIELMPNVEITKNDVKMAILSAPNWKSPGPDSLHNFWIKKFKSIHATLAAQYQAILSNPQTTPKMICSGYTYLIPKSENTKDPKEYRPITCLSNIYKLLTKVLTNKINDHVDNQNILAIEQNGCRRGARGTKELLIIDSVISKQAQKKQRHLSMAWIDYKKAFDSVPHSWLIQVLRWYGINKQIVNLLEHLMGSWSTRLRIHLADKNYESPDIVIRRGIFQGDSLSPLWFCLALNPLSTILKRSRMGYNLDSNTKVSHLMYMDDLKLYANSGDQLQSMLELVAEFSKSISMEFGLSKCATIHYKKGIITGVPSTTLMDETEIDTLEGCPYKYLGILQTGQIQTKEMKRNLTKEYNERVTKILRSYLPGKQKIRAINTWAIPALSYSFGVVKWSQTELEELDRSTRRLCTKFRMHHPSSSTDRVYLSRGRGGRGLTHIESSCKKEIFNLRKYFKTNNNAIHKCLMRTDDRYSPLNLRANVEHQLTMPTQNERLNNIKEKKLFGKYAADLAADHINKQKSNSYLSTAHLTGETEGFICAIQDQIVPTRSYLKHIIGKDLSDVCRLCNIHPETIQHLTTGCNSLAPTMYLERHNNVAKIIHLSICQQAQLIDHNKKYYNHTPQPVIENDKVKIYWDTQLITDRAVSHNKPDILFINKVSNECFIVDIAVPADHNIQKTVTEKILKYQDLAHELKRIHNFRKITVKPFVVSSNGLIPNSFTENLKELQLSSHLADLSCNAAILGTVRIVRKVFNN

SEQ ID NO: 3571 - protein, 1202 aa, Haemonchus placei
MSAHLNGYPSDSQDPGDGHDALRARKRRNLWAACDLQKLRDFVDIYRRNSKISWTSLAAAWERSRRPDEVHRSAASLRSAYAKHLKGQQSVGANVPRGAAHQEVLQERDIPIQEDSTPDVGQPESPETIEAERVEPNLRDLLTQRFKVYYKYAISSHDRRPVRRPLGTIPQALLETGNEIIARTLSEYRQVSNGRRWISILNAAVYAIARAIAAVADKLRQERFTDDPKRRLKELEDQRRTQISTISVLTNEILRRRKLRKRKEEPVPGASTKYLQVAEAYGLKRRGELGRVLRKLKDQLNVTQLEIRKLQEAQQRRLLRRKGASFVVRRDSGSPTEVPVASIREYWLPIVGVQKSFEVSPELKEWSETLGSLPRETPLMSGELDEETWRNLFRKVKPWKATGPDGIQGFWWKHLPEARLQLTNWCKRAMRRPRDSIPTWLCQGRVVLIPKRKGDPNTLEPADFRPIACLNTCYKLLTGMMAVHISAAVGDRFPGSQVALRKGLWGCTHAQILDQTIIKDSERSKRELHMLWVDMTKAFDSLRHGAILWAVKQWGVPSDVRRLLSTLMKFQSVRYCGYSNGKPVKSQSLKVRNGLMQGDSLSPLLFCLTIAPISAWIDKHIKPYQSKTGSGPRSEGPLNGGHVFYMDDLKVFTPDWDNLMKARKGIQLVAGQLGLQLNNSKCAIRSMNSKDMGRNVSSGTIPILGGKQVYKYLGAEEAELVCFDQLWSRVAETAMATARRLFLSNLTVRQMVNGYNQIVVPKLKYAFSCIIFGVGRFQTMSTQARKFDLEIRRLLNESHMRFGHSCVARLYVERQHGGLGLKCVEEELQTSVAYTWSYLSSNTDLLVSYELAERLRASTKRSLTSDFQAVMAANGLEGRVSRTRIATIVVDSQTFYNATEAARAISKLIHERWMKIHLSEWKSKDVAGRILQERTEDGVPTGLCLKDSFLWSANGWVSSEVLRNVWGAQEASLLTGCSAAMRALRPTTGGLCRMHCGPYNETAEHIVSACAHWRTNIMVERHDDVARVIYHSIRKKYGITAVVNTHRPHTVEAGDVVIHWNDRIVTSENLKHDRPDILVWDKRNKAIWIIEISVSWYSRLLTQEQRKLGKYAVNSTLPEDTGPDGFHPGPSLKSVLQKDRKCRVEVVPIVVGACGEVTPNLRRHILALRLRDDPDEIIERLERSAVLGTNRLIKCHLANTLE

SEQ ID NO: 3572 - protein, 1205 aa, Haemonchus placei
MESQSPEVLTLPSDPGDPGNGHDALQARGRRNLWSACELEKLSRFVIDYRRGNRIDWPSLAQAWDSTRGPGDARRTVCALKSMHTKRRREQQRAGASVPLGAASAEELQGNDIAQEDSYPDVGPPVDPEVTRSNPVASDLEEMLIQRFEVYFKVAIGSYDRRPVRRPEGEIPRDLLAAGNAVLARKLGSLPAANGRQCISRLNAAVYAIARSIAATADSLRQERMPDDPKRRLKELIELRRSQLCVVSTLTEEIRRRQALRQRKEGAKVRPSQNFLRIAAVHHIRRRGELGRVIRKFKDQLNVTQLEIRKLEEARRRKLVRRKGASFVVQERAEFPSQVPVASVRAYWLPIVGMSRPFEVRPELEEWSRTLGPLPRETPLHSGELTEDAWKTLFTKVRPWRAAGPDGIQGFWWKHLPEARQRLKSWCLRALRQPRKSIPNWLCQGRVVLIPKKRGDPNALGPGDFRPIACLNTCYKILTGMMAEHISKIVGDRFPGSQVALRKGVWGCTHAQILDQTIVKDAERHKNELHMLWVDMTKAYDSLQHGAIKWAVRQWSVPSDVRRLLSTLMSLQTVRYCGYTNGRQVKSRPLQIRNGLMQGDTLSPLLFCLTIAPLSAWIQAHIRPYQTTSGSGPRSDGPLQASHVFYMDDLKVWTPDWDNLMKARKGIQRVAGFLGLQMNMSKCAIRSLNSEDMGQDHGSEVGSIPILGGNEVYKYLGAEQTGLVCFEDLWSRVAESATAAARRLFFSNLTVRQKVSGFNQMVVPKLKYAFSCIVFGAGRFRTLRARARCFDLEMRRLLVDSLMRFKTSCSARLYVGKESGGLGMKSVVEELDLSVTYTWCYLATNTDFLVSFELSERLRASTKRSITSDFQAVMAANGLDGRVSRTVMATIKVDNQTFYTATKAARAVSRLIRERWAKLHLDEWKGKDTAGRVLHERGRDGNLTGLCLKDSFLWSANGQVSSEVLRNVWGAQEASLLTKSSACARSMALAGDGLCRMRCGPYAETAEHVVSACGYWRTSLMVERHDEVARVLYNSIRRKYNISEVVNTHRPHVVETADVVIHWNDSIVTSEGLKHNRPDLLVWDRHASRIWIIEVSISWFTRVLAQERRKLGKYAVNSTLPEETGPDGFHPGPNLRAVLQKDRKCRVDVVPIVLGACGEVSSNLRQYIRSLELRDDATVLIERMQRSTILGTNRLVKCHLSNSME

SEQ ID NO: 3573 - protein, 1203 aa, Teladorsagia circumcincta
MSQVAEALAQSSDPGDPGNEHDALRARGRRNLWHACELEKLSRLVLEHRRGSRIDWPPLAAAWDSTRNPGDAKRTVSALKSMHAKCRKREQERAGASVPLGPVLTEELQGSSSQEGSHPDVGPPEPPEVITVDPVVPSLEEKLVQRFDIYYKIAISSYDRRPVRRPEGVIPKDLLVAGNTVLLRKLENLPATNGRQCISSLNAAVYAIAKAIAATADELRRERIPDDPKRRLRELYEKRRSLLSIVSTLSGEICRRKALRQRKEGAMPRPSKSYLRVAAEFKIRRRGELGRVVRMSKDQLNVTQLEIRKLEEARRRMLVRRKGVPFVVHERECPSDTPVASVREYWHPIVGQSRPFEVSPELEEWSRTLGSPMCDTPLRSGELTEDAWKSLFAKVRPWKATGPDGIQAFWWKHLPEARLRLTSWCLRALRQPKKSIPNWLCQGRVVLIPKKKGDPSSLGPGDFRPIACLNTCYKILTGMMAEHISKTVGDRFPGSQVALRKGVWGCTHAQILDQTIVRDAERHRNELHMLWVDMTKAYDSLRHGAIKWTVKRWGVPSDVRRLLSTLMSLQTVRYCGYASGRQVKSRPLQIRNGLMQGDTLSPLLFCLTIAPLSAWIQANIKPYQTKTGSGPRSDGALSVNHVFYMDDLKVWTTDWENLMLARKGIQRVAGQLGLKMNMSKCAIRSLNSADMGQQHADEVGSIPILGGTEVYKYLGAEQTGLVCFEELWSRVAESATVTARRLFFSNLTVRQKVNGFNQVVVPKLKYAFSCIVFGAGRFKTLRVRARKFDLEMRRLLVESHTRFKHSCCARLYVGKESGGLGMKLVEEELELSVTYTWAYLATNTDFLVSFELSERLRASTKRSITSDFQAVMAANGLDGRVTRTVMATIKVDNQTFYTATNAARAVSKLIRERWAKVHLNDWRSKGTAGRVLREHLQDGNPTGLCMKDSFLWSVNGQVSSEVLRNVWGAQEASLLTRSSACGRALALAGDGLCRMRCGPFAETAEHVVSACGYWRTSLMVERHDEVARVLYSSIRRKYNITEVVNSHRPHVVETRDVVIHWNDSIVTSEGLKHNRPDLLVWDRRAQRIWIIEISISWFTRVLAQEQRKLGKYGVNSTLPEETGPDGFHPGPNLRAVLQKDRKCRVDVVPIVLGACGEVTPNLRRYIRSLELRDNASDLIERMQRCAILGTNRLVKCHLANNAE

SEQ ID NO: 3574 - protein, 1632 aa, Lysiphlebus fabarum
MAEAVNELVIPTDLTITIPLPDTLHCPQCRGVRTRQRGGTGSFVSFAGLTKHLKFSHPGEYNVIIKCSVCGYIGKTKYQMADARKHYLKEHPELDIIPPSSAARASPRTPNVETEGDINNNNINNANGNLTAVGSGSNSNININIDTDLNDSTISINNNNNNNNSNSSINICVSVRDPDLGQSQVTSSDSQRSQPARRRSPRLALSLSPLVCPVSGASTMNHQAGSSSSDADANNNNNDNNGNNNNNNNNNSSICSALAQPATSIAVTLTTATITVSTCSKPISTSRPSLACLLDSPTISPTDAHPEIYNTNTATGLISTVSPVSPVSPIVVSPPSPETNNNNNNDNNILPVSLDRVDSEDSEYDSFTTVQRRRGRSRLQTLSASDSSVSSSRSFRTLSPIVLSSSSSSPSPARTRRRAKIGSSKVTGAQSVSDFATRLSPIAKVNGNNNINNNRQNSNVNNNNNNNNNNINSNVTTNNNNKNNNIANINSNSNTFRNSTTSTPSNNRIVRNYSRGVINNDNNNNKNNSTNNSINTINRGTATANSCSSRIISSSGIASVNCTITNNNNNSSNSSNFCNANRYSDIATGNRSLNNITASTSINNNNINTGLVSQSGAISPPSVAVPRLQQNARASTGSELAGRSAAVVNDKQRLITMASHTTTREDLERLAVELAKYLKTSAGKPLSEQRSSQPHGSNAGNNRRRGRRHGDGSRRRHNNNNNYNNNNNSNNNNSTMGGPNGLGPNRGRDQIERATEIQKAYRTNRKRAMQEVLSGPSIRCDVPLQMVDQYFRSMYSVDIGPVCANDDQFEWPDWSMLEGNERLCEALTRPFDIGEVRRRLKGTHNSAPGPDQLTYADLIKADQSAAVLTAVFNACRRLSAIPSSWKRSNTVLIFKKGNKDDLSNWRPLAMGDTVAKLFAGIIADRLTKFSTWGKRLGTEQKGFLHFEGCAEHNYVLQEILNDSRRSGKELVVAWLDLTNAFGSVPHTSIYRALKGAGVPVRIHDLIKDMYTDCSTQVRTSEGFTEPIRIAAGVKQGCPASPIMFNLTLESLIRAVIKREGGYMLGAKRWSILAYADDLALVAGSKEEMVQILETVSGEAKKIGLKFNPGKCATLHLAGKASKQRALDTVFQVQENPVDALRQGDAYKHLGIPTGYQIHQTPFTSIEHLIEDVKRVDKSLLTPWQKFDAVASFILPRLDFVLRGAQVKKFPLSTADNIIKKCAKSWFNLPQRASAEVVFIPPWRGGGGLIPLADLADVLTVSHAFRMLNCDDPDVRSLASKSLSDSVHRKIKRLPTMTEIAEYLSGSLEGIFFGPSSDTSSYWSKVRTAVGRQKKRLGLKWRYDELKAELSIECRGPHNTPVIIPPASKAQVTRRLRCAVQEFYLERLLAKPDQGKVYDLSSGVRVTNHYMRNGSYTRFAEWRFVHRARLDVLPLNGARRGGEGDKRCRKCGYALETLPHVLCHCTPHSGARQRRHDAIVARIAKASRLSGNLRVNQRVEGIVDVDLIGLRPDLVVRDEGNKSIIIVDVTVPFENRKAGFEAARREKISKYTPLALALQRQGYSVAIDALIVGTLGTWDPRNESVLRMLDISPIYAALMRRLIISETLHWSRDMYVEHVSGIRQYSTATIQSE

SEQ ID NO: 3575 - protein, 931 aa, Aphidius gifuensis
MNQRVTGRPHRQRRGQRGNRRRRDHNNNNNNNTSNINNNNNNTNASAFHRGGSRVERATEIQKAYRTNRKRAMQEVLSGPSVNCEVPMQTVNQYFRTMYSGEVGQGADGDQIEWPNWSDTQGNERLGAALSRPFEMAEVRRRLQSAHNSAPGPDKLTYADLIRADKTAAVLTAVFNVCLRLSVIPSVWKRSNTVLIFKKGDMGDLSNWRPLAMGDTVAKLFAGVLADRMTEFSMRGKRLGTEQKGFLHYEGCAEHNFVLQQIIEDSRRSGKELVVAWLDLTNAFGSVPHASIYNALKGAGIPVRIHDLIKDMYTDCTTQVRTSEGFTDPIRIAAGVKQGCPASPIMFNLTLESLIRAVAKREGGYSMKAKRWSVLAYADDLALVAGSKEEMEEVLRTVSREAGKIGLQFNPGKCATLHLSGKASKQCALDTVFGIQGSPIEALRGGDAYKHLGIPTGYQIHQTPFATIEHLIEDVRRVDKSLLTPWQKLDAVATFILPRLDFVLRGAQVKKFGLTVADHVIKRLAKSWLNLPQRASAEVVFIPPWRGGGGLIPLADLADVLTVSHAFRMLNCEDQDVSKLAMGMLSDTVKRKIGRLPTMTEVAEYLSGSAEGVFFGPSSDTSSYWSRVRTAVGRQKTRLNLKWRYDAAKAELSIECRGPHDSVIIPPAAKNQVTRRLRCAVQEFYLERLLGKPDQGKVYELSSGVRVTNHYMRNGSYTRFAEWRFVHRARLDVLPLNGARRWSEGDKRCRKCGYALETLPHVLCHCTPHSGARQRRHNSIVDRIAKASRLAGNLRVNQRVEGITDPDLAALRPDLVVRDESNKSIVIVDVTVPFENRKIGFEAARREKISKYTPLAMALQAQGYSVEIDAIIVGTLGTWDPRNERVLRMLSISQVYATMMRRLIVSETLHWSRDIYVEHVSGVRQYRLAEP

SEQ ID NO: 3576 - protein, 1246 aa, Teleogryllus occipitalis
MDTSVPHVRGGTPTASVSHVRGGCKNAGSSSKMQQPEMSRRILRNKVAGDRSLQDRAGGSDTGPPVSNVLPVSVGSGGPGTDARSGAAPLMVTAENSPSVSRRSGLRADAYATSSATSSLIGQRMKWSKEMNISVMRAYYRSTRVETESEGYRVRMHAEWKKMYPNSTLDEQRICSQLNSIQRRNALSSAELDKIKQEVQMELRQNMIQQAQTLAGELEKEHLEEETVAEIQEVTPLNIEREKLICNLKDNYEKYHILYTGISLQDRPRIPKITGNKKFYDVCKEMNLIFKDLCLTPSTLEKLAGQVHCAALAVCVCMGREIVNNNKRTSTTCFNPGIEKTPLWKRNIQEKINKARKDIGHLTQYFDKRGDISKRVKTGIRSIARRLKIRMNSKNLDQKLEAEEDRLKQRITALGARIRRYSESSEKRRQESTFSTDQKRFYRQLEAADEREQRGEPPSEDSMFNFWSKIWDAPQQHNEQAYWIRQEIEACRDIDEMQSVTITEADITAATRKTQNWKAPGSDGIHNVWWKYFPALHPHLANFFNAALQDPVTLPTYLLAGKTIMLAKQGDNSKPENFRPITCLSTLYKILTSVIASKINDHLINQNLLPPEQIGCQKGTRGCKELLVIDSVITQQVRKRLHDISVGWVDYKKAFDSVPHSWLLRALEIYKINPVLLNFLSVCMSEWKTFIHVRQGGISYQTREVRIRRGMFQGDSLSPLWFCIALIPLSRMIRESGYGYCIKRNPDVRISHQFHMDDLKLYACNKDQLHSEFMLVQQFSKDICMEFGLDKCAILNVKCGKVQDQEGGLQLSSDIIQSLGNEDTYKYLGMLQLLEISDTNARNTIQKKVISRVNKICETHINSRSKITAINTLAIPVATYTFGVIKWTDTSLQTFDRKLRTTLTKYRLHHPHSSIQRLYLSRNKAGRGLLNLEVLCRQQEEKLRNFFLSRDTPLHKAICFQDKNISPLSLAQESKSFSYLTAQDRVDVWKTKELHGRFITTLTADDIDLKWSTEWLRTAWLYGETEGFLFSIQDQVVKTRAYQKYVLGQQIDSRCRLCKINNESIQHISNGCPSLAQTEYLQRHNNVAKVIHQALVKNYQLVEQEQPYYKCKPQQVISNHLARILWDSTIITDRAVEANRPDIVLFDKTTRRAMIIDVAVPTDDKLVSTIAEKKRKYQPLAVELRDMYRLQSVDIVPVIVSANGVVAKDWLKTGQRLRLKEKHLRTMQKAALLGTANIVRKFLSLD

SEQ ID NO: 3577 - protein, 1047 aa, Teleogryllus occipitalis
MELRQNMIQQTQTQAGELEREHLEEETVAEIQEVTPLNIEKEKLICNLKDNYEKYHILYTGIPLQDRPRIPKITGNKKFYDVCKEMNLIFKDLCLTPSTLEELAGQVHCAALAVCVCMGREIVNNNKRTSTTCFNPRIEKTPLWKRNIQEKINKARKDIGHLTQYFAKRGDISKRVKTGIRSIARRLKIRMNSKNLDQKLEAEEDRLKQRITALGARIRRYSESSEKRRQESTFSTDQKRFYRQLEAADEREQRGEPPSEDSMFNFWSKIWDAPQQHNEQAYWIRQEIKACRNIDEMQSVTITEADITAATRKTQNWKAPGSDGIHNVWWKYFPALHPHLANFFNAALQDPVTLPTYLLAGKTIMLAKQGDNSKPENFRPITCLSTLYKILTSVIASKINDHLINQNLLPPEQIGCQKGTRGCKELLVIDSVITQQVRKRLHDISVGWVDYKKAFDSVPHSWLLRALEIYKINPVLLNFLSVCMSEWKTFIHVRQGGISYQTREVRIRRGMFQGDSLSPLWFCIALIPLSRMIRESGYGYCIKRNPDVRISHQFYMDDLKLYACNKDQLHSEFMLVQQFSKDICMEFGLDKCAILNVKRGKVQEQEGGLQLSSDIIIQSLGNEDTYKYLGMLQLLEISDTNARNTIQKKVISRVNKICETHINSRSKITAINTWAIPVATYTFGVIKWTDTSLQTFDRKLRTTLTKHRLHHPHSSIQRLYLSRNKAGRGLLNLEVLCRQQEEKLHNFFLSRDTPLHKAICFQDKNISPLSLAQESRSFSYITAQDRVDVWKTKELHGRFITTLTADDIDLKWSTEWLRTAGLYGETEGFLFSIQDQVVKTRAYQKYVLGQQIDSRCRLCKINNESIQHISNGCPSLAQTEYLQRHNNVAKVIHQALAKNYQLVEEEQPYYKCKPQQVISNHLARILWDSTIITDRAVEANRPDIVLFDKTTKRAMIIDVAVPTDDKLVSTIAEKKRKYQPLAVELRDMYRLQSVDIVPVIVSANGVVTKDWLKTGQRLRLKEKHLRTMQKAALLGTANIVRKFLSLD

SEQ ID NO: 3578 - protein, 930 aa, Teleogryllus occipitalis
MGREIVNNNKRTSTTCFNPRIEKTPLWKRNIQEKINKARKDIGHLTQYFAKRGDISKRVKTGIRSIARRLKIRMNSKNLDQKLEAEEDRLKQRITALGARIRRYSESSEKRRQESTFSTDQKRFYRQLEAADEREQRGEPPSEDSMFNFWSKIWDAPQQHNEQAYWIHQEIEACRNIDEMQSVTITEADITAVTRKTQNWKAPGSDSIHNVWWKYFPALHPHLANFFNAALQDPVTLPTYLLAGKTIMLAKQGDNNKPENFRLITCLSTLYKILTSVIASKINDHLINQNLLPPEQIGCQKGTRGCKELLVIDSVITQQVRKRLHDISVGWVDYKKAFDSVPHSWLLRALEIYKINPVLLNFLSVCMSEWKTFIHVRQGGISYQSREVRIRRGMFQGDSLSPLWFCIALIPLSRMIRESGYGYCIKRNPDVRISHQFYMDDLKLYACNKDQLHSEFMLVQQFSKDICMEFGLDKCAILNVKRGKVQEQEGGLQLSSDIIIQSLGNEDTYKYLGMLQLLEISDTNARNTIQKKVISRVNKICETHINSRSKITAINTWAIPVATYIFGVIKWTDTSLQTFDRKLRTTLTKHRLHHPHSSIQRLYLSRNKADRGLLNLEVLCRQQEEKLHNFFLSRDTPLHKAICFQDKNISPLSLAQESRIFSYLTAQDRVDVWKTKELHGRFITTLTADDIDLKWSTEWLRTAGLYGETEGFLFSIQDRVVKTRAYQKYVLGQQINSRCRLCKINNESIQHISNGCPSLAQTEYLQRHNNVAKVIHQALAKNYQLVEEEQPYYKCKPQQVISNHLARILWNSTIITDRAVEANRPDIVLFDKTTKRAMIIDVAVPTDDKLVSTIAEKKRKYQPLAVELRDMYRLQSVDIVPVIVSANGVVTKDWLKTGQRLRLKEKHLRTMQNAALLGTANIVRKFLSLD

SEQ ID NO: 3579 - protein, 1111 aa, Teleogryllus occipitalis
MRAYYRSTRVETESEGYRVRMHAEWKKMYPNSTLDEQRICSQLNSIQRRNALSSAELDQIKQVQMELRQNMIQQTQTQAGELEREHLEEETVAEIQEVTPLNIEKEKLICNLKDNYEKYHILYTGIPLQDRPRIPKITGNKKFYDVCKEMNLIFKDLCLTPSTLEELAGQVHCAALAVCVCMGREIVNNNKRTSTTCFNPIIEKTPLWKRNIQEKINKARKDIGHLTQYFAKRGDISKMVKTGIRSIARRLKVRMNSKNLDQKLEAEEDRLKQRITALGARIRRYSESSEKRRQESTFSTDQKRFYRQLEAADEREQRGEPPSEDSMFNFWSKIWDAPQQYNEQAYWIRLEIEACRNIDEMQSVTVTEADITAATRKTQNWKAPGSDGIHNVWWKYFPALHPHLANFFNAALQDPVTLPTYLLAGKTIMLAKQGDNSKPENFRPITCLSTLYEILTSVIASNINDHLINQNLLPPEQIGCQKGTRGCKELLVIDSVITQQVRKRLHDISVEWVDYKKAFDSVPHSWLLRALEIYKINPVLLNFLSVCMSEWKTFIHVRQGGVSYQTREVRIRRGMFQGDSLSPLWFCIALIPLSRMIRESGYGYCIKRNPDVRISHQFYMDDLKLYACNKDQLHSEFMLVQQFSKDICMEFGLDKCAILNVKRVKVQEQEGGLQLSSDIIIQSLGNEDTYKYLGMLQLLEISDTNSRNTIQKKVISRVNKICETHINSRSKITAINTWAIPVATYTFGVIKWTDTSLQTFDRKLRTTLTKHRLHHPHSSIQRLYLSRNKAGRGLLNLEVLCRQQEEKLHNFFLSRDTPLHKAICFQDKNISPLGLAQESRSFSDLTAQDRVDVWKTKELHGRFITTLTADDIDLKWSTEWLRTARLYGETEGFLFSIQDQVVKTRAYQKYVLGQQINSRCRLCKINNESIQHISNGCPSLAQTEYLQRHNNVAKVIHQALAKNYQLVEEEQPYYKCKPQQVISNHLARILWDSTIITDRAVEANRPDIVLFDKTTKRAMIIDVAVPTDDKLVSTIAEKKRKYQPLAVELRDMYRLQSVDIVPLIVSANGVVTKDWLKTGQRLRLKEKHLRTMQKAALLGTANIVRKFLSLD

SEQ ID NO: 3580 - protein, 1247 aa, Teleogryllus occipitalis
MDTSVPHVRGGTPTASVSHVRDGCKNAGSSSKMQQPKMSRRILRNKVAGDRSLQDRAGDSDTGPPVSNVLPVSVGSGGPGTDARSGAAPLMVTAENSPSVSRRSGLRADAYATSSATSSLIGQRMKWSKEMNISVMRAYYRSTRVETESEGYIVRMHAEWKKMYPNSTLDEQRICSQLNSIQRRNALSSAELDKIKQEVQMELRQNMIQQTQTQAGELEREHLEEETVAEIQEVTPLNIEKEKLICNLKDNYEKYHILYTGIPLQDRPRIPKITGNKKFYDVCKEMNLIFKDLCLTSSTLEELAGQVHCAALAVCVCMGREIVNNNKRTSTTCFNPIIEKTPLWKRNIQEKINKARKDIGHLTQYFAKRGDISKRVKTGIRSIARRLKVRMNSKNLDQKLEAEEDRLKQRITALGARIRRYSESSEKRRQESTFSTDQKRFYRQLEAADEREQRGEPPSEDSMFNFWSKIWDAPQQYNEQAYWIRQEIEACRNIDEMQSVTITEADITAATRKTQNWKAPGSDGIHNVWWKYFPALHPHLANFFNAALQDPVTLPTYLLAGKTIMLAKQCDNSKPENFRPITCLSTLYKILTSVIASKINDHLINQNLLPPEQIGCQKGTRGCKELLVIDSVITQQVRKRLHDISVGWVDYKKAFDSVPHSWLLRALEIYKINPVLLNFLSVCMSEWKTFIHVRQGGVSYQTREVRIRRGMFQGDSLSPLWFCIALIPLSRMIRESGYGYCIKRNPDVRISHQFYMDDLKLYACNKDQLHSEFMLVQQFSKDICMEFGLDKCAILNVKRGKVQEQEGGLQLSSDIIIQSLGNEDTYKYLGMLQLLEISDTNARNTIQKKVISRVNKICETHINSRSKITAINTWAIPVATYTFGVIKWTDTSLQTFDRKLRTTLTKHRLHHPHSSIQRLYLSRNKAGRGLLNLEVLCRQQEEKLHIFFLSRDTPLHKAICFQDKNIIPLGLAQESISFSYLTAQDRVDVWKTKELHGRFITTLTADDIDLKWSTEWLRTAGLYGETEGFLFSIQDQVVKTRAYQKYVLGQQINSRCRLCKINNESIQHISNGCPSLAQTEYLQQHNNVAKVIHQALAKNYQLVEEEQPYYKCKPQQVISNNLARILWDSTIITDRVVEANRPDIVLFDKTTKRAMIIDVAVPTDDKLVSTIAEKKRKYQPLAVELRDMYRLQSVDIVPVIVSANGVVTKDWLKTGQRLRLKEKHIRTMQKAALLGTANIVRKFLSLD

SEQ ID NO: 3581 - protein, 930 aa, Teleogryllus occipitalis
MGREIVNNNKRTSTTCFNPGIEKTPLWKRNIQEKINKARKDIGHLTQYFAKRGDISKRVKTGIRSIARRLKIRMNSKNLDQKLEAEEDRLKQRITALGARIRRYSESSEKRRQESTFSTDQKRFYRQLEAADEREQRGEPPSEDSMFNFWSKIWDAPQQHNEQAYWIRQEIEACRDIDEMQSVTITEADITAATRKTQNWKAPGSDGIHNVWWKYFPALHPHLANFFNAALQDPVTLPTYLLAGKTIMLAKQGDNSKPENFRPITCLSTLYKILTSVIASKINDHLINQNLLPPEQIGCQKGTRGCKELLVIDSVITQQVRKRLHDISVGWVDYKKAFDSVPHSWLLRALEIYKINPVLLNFLSVCMSEWKTFIHVRQGGISYQTREVRIRRGMFQGDSLSPLWFCIALIPLSRMIRESGYGYCIKRNPDVRISHQFYMDDLKLYACNKDQLHSEFMLVQQFSKDICMEFGLDKCAILNVKRGKVQDQEGGLQLSSDIIIQSLGNEDTYKYLGMLQLLEISDTNARNTIQKKVISRVNKICETHINSRSKITAINTWAIPVATYTFGVIKWTDTSLQTFDRKLRTTLTKYRLHHPHSSIQRLYLSRNKAGRGLLNLEVLCRQQEEKLRNFFLSRDTPLHKAICFQDKNISPLSLAQERRSFSYLTAQDRVDVWKTKELHGRFITTLTADDIDLKWSTEWLRTAGLYGETEGFLFSIQDQVVKTRAYQKYVLGQQIDSRCRLCKINNESIQHISNGCPSLAQTEYLQRHNNVAKVIHQALAKNYQLVEQEQPYYKCKPQQVISNHLARILWDSTIITDRTVEANRPDIVLFDKTTRRAMIIDVAVPTDDKLVSTIAEKKRKYQPLAVELRDMYRLQSVDIVPVIVSANGVVTKDWLKTGQRLRLKEKHLRTMQKAALLGTANIVRKFLSLD

SEQ ID NO: 3582 - protein, 857 aa, Teleogryllus occipitalis
MNSKNLDQKLEAEEDRLKQRITALGARIRRYSESSEKRRQESTFSTDQKRFYRQLEAADEREQRGEPPSEDSMFNFWSKIWDAPQQHNEQAYWIRQEIEACRDIDEMQSVTITEADITAATRKTQNWKAPGSDGIHNVWWKYFSALHPHLANFFNAALQDPVTLPTYLLAGKTIMLAKQGDNSKPENFRPITCLSTLYKILTSVIASKINEHLINQNLLPPEQIGCQKGTRGCKELLVIDSVITQQVRKRLHDISVGWVDYKKAFDSVPHSWLLRALEIYKINPVLLNFLSVCMSEWKTFIHVRQGGISYQTREVRIRRGMFQGDSLSPLWFCIALIPLSRMIRESGYGYCIKRNPDVRISHQFYMDDLKLYACNKDQLHSEFMLVQQFSKDICMEFGLDKCAILNVKRGKVQDQEGGLQLSSDIIIQSLGNEDTYKYLGMLQLLEISDTNARNTIQKKVISRVNKICETHINSRSKITAINTWAIPVATYTFGVIKWTDTSLQTFDRKLRTTLTKYRLHHPHSSIQRLYLSRNKAGRGLLNLEVLCRQQEEKLRNFFLSRDTPLHKAICFQDKNISPLSLAQESRSFSYLTAQDRVDVWKTKELHGRFITTLTADDIDLKWSTEWLRTAGLYGETEGFLFSIQDQVVKTRAYQKYVLGQQIDSRCRLCKINNESIQHISNGCPSLAQTEYLQRHNNVAKVIHQALAKNYQLVEQEQPYYKCKPKQVISNHLARILWDSTIITDRAVEANRPDIVLFDKTTRRAMIIDVAVPTDDKLVSTIAEKKRKYQPLAVELRDMYRLQSVDIVPVIVSANGVVTKDWLKTGQRLRLKEKHLRTMQKAALLGTANIVRKFLSLD

SEQ ID NO: 3583 - protein, 1123 aa, Teleogryllus occipitalis
MKWSKEMNISVMCAYYRSTRVETESEGYRVRMHAEWKKMYPNSTLDEQRICSQLNSIQRRNALSSAELDKIKQEVQMELRQNMIQQAQTLAGELEKEHLEEETVAEIQEVTPLNIEREKLICNLKDNYEKYHILYTGIPLQGRPRIPKITGNKKFYDVCKEMNLIFKDLCLTPSTLEELAGQVHCAALAVCVCMGREIVNNNKRTSTTCFNPGIEKTPLWKRNIQEKINKASKDIGHLTQYFAKRGDISKRVKTGIRSIARRLKIRMNSKNLDQKLEAEEDRLKQRITALGTRIRRYSESSEKRRQESTFSTDQKRFYRQLEAADEREQRGEPPSEDSMFNFWSKIWDAPQQHNEQAYWIRQEIEACRDIDEMQSVMITEADITAATRQTQNWKAPGSDGIHNVWWKYFPALHPHLANFFNAALQDPVTLPTYLLAGKTIMLAKQGDNSKPENFRPITCLSTLYKILTSVIASKINDHLINQNLLPPEQIGCQKGTRGCKELLVIDSVITQQVRKRLHDISVGWVDYKKAFDSVPHSWLLRALEIYKINPVLLNFLSVCMSEWKTFIHVRQGGISYQTREVRIRRGMFQGDSLSPLWFCIALIPLSRMIRESGYGYCIKRNPDVRISHQFYMDDLKLYACNKDQLHSEFMLVQQFSKDICMEFGSDKCAILNVKRGKVQDQEGGLQLSSDIIIQSLGNEDTYKYLGMLQLLEISDTNARNTIQKKVISRVNKICETHINSRSKITAINTWAIPVATYTFGVIKWTDTSLQTFDRKLRTTLTKYRLHHPHSSIQRLYLSRNKAGRGLLNLEVLCRQQEEKLRNFFLSRDTPLHKAICFQDKNISPLSLAQESRSFSYLTAQDRVDVWKAKELHGRFITTLTADDIDLKWSTEWLRTAGLYGETEGFLFSIQDQVVKTRAYQKYVLGQQIDSRCRLCKINNESIQHISNGCPSLAQTEYLQRHNNVAKVIHQALAKNYQLVEQEQPYYKCKPQQVISNHLARILWDSTIITDRAVEANRPDIVLFDKTTRRAMIIDVAVPTDDKLVSTIAEKKRKYQPLAVELRDMYRLQSVDIVPVIVSANGVVTKDWLKTGQRLRLKEKHLRTMQKAALLGTANIVRKFLSLD

SEQ ID NO: 3584 - protein, 849 aa, Teleogryllus occipitalis
MNSKNLDQKLEAEEDRLKQRITALGARIRRYSESSEKRRQESTFSTDQKRFYRQLEAADEREQRGEPPSEDSMFNFWSKIWDAPQQHNEQAYWIRQEIEACRDIDEMQSVTITEADITAATRKTQNWKAPGSDGIHNVWWKYFPALHPHLANFFNAALQDPVTLPTYLLAGKTIMLAKQGDNSKPENFRPITCLSTLYKILTSVIASKINDHLINQNLLPPEQIGCQKGTRGCKELLVIDSVITQQVRKRLHDISVGWVDYKKAFDSVPHSWLLRALEIYKINPVLLNFLSVCMSEWKTFIHVRQGGISYQTREVRIRRGMFQGDSLSPLWFCIALIPLSRMIRESGYGYCIKRNPDVRISHQFYMDDLKLYACNKDQLHSEFMLVQQFSKDICMEFGLDKCAILNVKRGKVQDQEGGLQLSSDIIIQSLGNEDTYKYLGMLQLLEISDTNARNTIQKKVISRVNKICETHINSRSKITAINTWAIPVATYTFGVIKWTDTSLQTFDRKLRTTLTKHRLHHPHSSIQRLYLSRNKAGRGLLNLEVLCRQQEEKLRNFFLSRDTPLHKAICFQDKNISPLSLAQESRSFSYLTAQDRVDVWKTKELHGRFITTLTADDIDLKWSTEWLRTAGLYGETEGFLFSIQDQVVKTRAYQKYVLGQQIDSRCRLCKINNESIQHISNGCPSLAQTEYLQRHNNVAKVIHQALAKNYQLVEQEQPYYKCKPQQVISNHLARILWDSTIITDRAVEANRPDIVLFDKTTRRAMIIDVAVPTDDKLVSTIAEKKRKYQPLAVELRDMYRLQSVDIVPVIVSANGVVTKDWLKTGQRLRLKEKHLRTMQKAALLGILKL

SEQ ID NO: 3585 - protein, 1172 aa, Teleogryllus occipitalis
MDTSVPHVRGGTPTASVSQVRGGCKNAGSSSKMQQPEMSRRILRNKVAGDRSLQDRAGGSDTGPPVSNVLPVSVGSGGPGTDARSGAAPLMVTAENSPSVSRRSGLRADAYATSSATSSLIGQRMKWSKEMNISVMRAYYRSTRVETESEGYRVRMHAEWKKMYHNSTLDEQRICSQLNSIQRRNALSSAELDQIKQEVQMELRQNMIQQAQTQAGELEREHLEEETVAEIQEVTPLNIEKEKRICNLKDNYEKYHILYTGIPLQDRPRIPKITGNKKFYDVCKEMNLIFKDLCLKPSTLEELAGQVHCAALAVCVCMGREIVNNNKRTSTTCFNPGIEKTPLWKRNIQEKINKARKDIGHLTQYFAKRGDISKRVKTGIISIARRLKIRMNSKNLDQKLEAEEDRLKQRITALGSRIRRYSKSSEKRRQESTFSTDQKRFYRQLEAADEREQRGEPPIEDSMFNFWSKIWDAPQQHNEQAYWIHQEIEACRDVDEMQSVTITEADITAATRKTQNWKAPGSDGIHNVWWKYFPDLHPHLANFFNAALQDPATLPTYLLAGKTIMLAKQGDNSKPEKFQPITCLSTLYKILTSVIASKINDHLINQNLLPPEQIGCQKGTRGCKELLVIDSVITQQVRKRLHDISVGWVDYKKAFDSVPHSWLLRALEIYKINPVLLNFLSVCMSEWKTFIHVRQGGISYETREVRIRRGMFQGDSLSPLWFCIDLISLSRMIRESGYGYCIKRNPDVRISHQFYMDDLKLYACNKDQLHSEFMLVQQFSKDICMEFGLDKCAILNVKRGKVQDQEGGLQLSSNIIIQSLGNEDTYKYLGMLQLLEISDTNARNTIQKKVISRVNKICETHINSRSKITAINTWAIPVATYTCGVIKWTDTSLQTFDRKLRTTLTKHRLHHPHSSIQRLYLSRNKAGRGLINLEVLCRQQEEKLRNFFLSRDTPLHKAICFQDKNISPLSLAQERRSFSYLTAQDRVDVWKTKELHGRFITTLTAGDIDLKWSTEWLRTAGLYGETEGFLFSIQDQVVKTRAYQKYVLGQQIDSRGRLCKINNESIQHISNGCPSLAQTEYLQRHNNVAKVIHQALAKNYQLVEQEQPYYKCKPQQVISNHLARILWDSTIITDRAVEANRPDIVLFDKKNKKSKDNRCCSSHRRQTGVNYC

SEQ ID NO: 3586 - protein, 962 aa, Teleogryllus occipitalis
MNLIFKDLCLTPSTLEELAGQVHCAALAVCVCMGREIVNNNKRTSTTCFNPRIEKTPLWKRNIQGKINKARKDIGHLTQYFAKRGDISKRVKTGIRSIARRLKIRMNSKNLDQKLEAEEDRLKQRITALGARIRRYSESSEKRRQESTFSTDQKRFYRQLEAADEREQRGEPPSEDSMFNFWSKIWDAPQQHNKQAYWIRQEIEACRNIDEMQSVTITEADITAATRKTQNWKAPGSDGIHNVWWKHFPALHPHLANFFNAALQDPVTLPTYLLVGKTIMLAKQGDNSKPENFRPITCLSTLYKILTSVITSKINDHLINQNLLPPEQIGCQKGTRGCKELLVIDSVITQQVRKRLHDISVGWVDYKKAFDSVPHSWLLRALEIYKINPVLLNFPSVCMSEWKTFIHVRQGGISYQTREVRIRRGMFQGDSLSPLWFCIALIPLSRMIRESGYGYCIKRNPDVRISHQFYMDDLKLYACNKDQLHSEFMLVQQFSKDICMEFGLDKCAILNVKRGKVQEQEGGLQLSSDIIIQSLGNEDTYKYLGMLQLLEISDTNARNTIQKKVISRVNKICETHINSRSKITAINTWAIPVATYTFGVIKWTDTSLQTFDRKLRTTLTKHRLHHPHSSIQRLYLSRNKAGRGLLNLEVLCRQQEEKLHNFFLSRDTPLHKAICFQDKNISPLSLAQESRSFSYLTAQDRVDVWKTKELHGRFITTLTADDIDLKWSTEWLRTAGLYGETEGFLFSIQDQVVKTRAYQKYVLDQQINSRCRLCKINNESIQHISNGCPSLAQTEYLQRHNNVAKVIHQALAKNYQLVEEEQPYYKCKPQQVISNHLARILWDSTIITDRAVEANRPDIVLFDKTTKRAMIIDVAVPTDDKLVSTIAEKKRKYQPLAVELRDMYRLRSVDIVPVIVSANGVVTKDWLKTGQRLRLKEKHLRTMQKAALLGTANIVRKFLSLD

SEQ ID NO: 3587 - protein, 1059 aa, Owenia fusiformis
MKCGPTLKICSQAPAEHETEVISDQDSNHSVRENHTEEEANTSAQEEVVNEPVKERRQQLKLPPASSSEWKQLDEDLDKILQANLRGDIVRKLDQFPTLVYAVCEERFGLVERNDNSRKQTGPNRRQEQIANTRRELRQLRNAYLQAEDGQRHALSVLRDNLRAKLRSLRQAERLRKRRNERRKTRSKFFKNPFTFIGELLGKPKAGQLQSSRDEIEASLMDSHSDPQRDVPLGEPPNITPAPPPLHQFDLDEIKLKEVKDIIRKARAKSSPGPSGLSYKVYKNCPLLTNRLWKLLKTAWKLKQLPPSWLIAEGCFVPKEEKSSTLDQFREISLLSVEGKIFWSIISRRMTNFFTKNSYIDTSAQKGGIAGFAGCIEHTSAMSQLIAEAKKNKTDLAIVWLDLAKTYPSVPHQLIFTALQHYHVPEDVISLVKQHLGGMKMRFTSGTITTTWQRLEKGIMAGCTISVILFVAAMNIMLKEASKECRGPKAMDGTCHPPCRAFMDDITAMTIREIGMRWILKRLEAIATWGRLTFKPHKSRSLVLKKGTMSPTKFTVQGRGIPTISEQPIKALGKYFDASLGDRKITKELVSQLRTWLEAIDRTTLPGKIKVWCFQYGVLPRLSWPFSLYDIPLTVVEMMERMVNKKLRKWLGVSKSFSDVNLYSSSSPAALPVDSVVEEFKVAKVRTIMLLRDSKDKVANRTEAKTPKNRKWSPQDTITKAETRLHQSDIIGTVAQGRKGLGSYGRIPWSKANSKERRKMVTSEVRQMEEESRRVKAVTMSNQGAWMKWEGVESRKLTGSDLLQTSNVPVAFFLKAFSDTLPTGTNLALWKLSDDPTCQLCQDRAASLRHVLSSCKVALAEHRYTWRHDQVLKEIARQLDPLISDPSLTSPPSQPLTIGFVKAGQATAKPTVNQPSRGILHSASDWVMKVDVGKQLVFPQHVVSTTLRPDIIITSETTQTIILVELTVPWEERVEESHELKKLKYEDIVTNAKRRGWQPHCFPVEVGCRGFPAKSMDWMLKSLGLPSRKRKTAMITLGKEAERCSRWLWLRRNANWLPQ

SEQ ID NO: 3588 - protein, 1059 aa, Owenia fusiformis
MKCGPTLKICSQAPAEHETEVISDQDSNHSVRENHTEEVANTSAQEEVANEPVKERRQQLKLPPASSPEWKQLDEDLDKVLQANLRGDIVRKLDQFPTLVYAVCEERFGLVERSDNSRKQTGPSRRQEQIANIRRELRQLRNAYLQAEDGQRQALSVLRDNLRAKLRSLRQAERLRKRRNERRKTRSKFFKNPFTFIGELLGKPKSGQLQSSRDEIEASLMDSHSDPQRDVPLDEPPNISPAPPPLHQFDLDEIKLKEVKDIIRKARAKSSPGPSGLSYKVYKNCPLLTNRLWKLLKTAWRLKQLPPSWLIAEGCFVPKEEKSSTLDQFREISLLSVEGKIFWSIISRRMTDFFTKNSYIDTSAQKGGIAGFAGCIEHTSAMSQLIAEAKKNKTDLAIVWLDLAKAYPSVPHQLIFTALQHYHVPEDVISLVKQHLGGMKMRFTSGTITTNWQRLEKGIMAGCTISVILFVAAMNIMLKEASKECRGPKAMDGTCHPPCRAFMDDITAMTIHEIGMRWILKRLEAIATWGRLTFKPHKSRSLVLKKGTMSPTKFTVQGKGIPTISEQPIKALGKYFDASLGDRKITKELVSQLRTWLEAIDRTTLPGKIKVWCFQYGILPRLSWPFSLYDIPLTVVEMMERMINKKLRKWLGVSKSFSDVNLYSSSSPAALPIDSVVEEYKVAKVRTIMLLRDSKDKVANRTEAKTPKNRKWSPQDTITKAETRLHQSDIVGTVAQGRKGLGSYGRIPWSKANSKERRKMVTSEVRQMEEESRRVKAVTMSNQGAWMKWEGVESRKLTGSDLLQTSNVPVAFFLKAFSDTLPTATNLALWKLSDDPTCQLCQDRAASLRHVLSSCKVALAEHRYTWRHDQVLKEIARQLDPLISDPSLTSPPSQPLTIGFVKAGQATAKPTVNQPSRGILHSASDWVMKVDVGKQLVFPQHVVSTTLRPDIIITSETTQTIILVELTVPWEERVEESHELKKLKYEDIVTDAKRRGWQPHCFPVEVGCRGFPAKSMDWMLKSLGLPSRKRKKAMITLGREAERCSRWLWLRRNANWLPQ

SEQ ID NO: 3589 - protein, 1059 aa, Owenia fusiformis
MKCGPTLKICSQAPAEHETEVISDQDSNHSVRVNHTEEEANTSAQEEVVNEPVKERRQQLKLPPASSSEWKQLDEDLDKILQANLRGDIVRKLDQFPTLVYAVCEERFGLVERNDNSRKQTGPNRRQEQIANIRRELRQLRNAYLQAEDGQRHALSVLRDNLRAKLRSLRQAERLRKRRNERRKTRSKFFKNPFTFIGELLGKPKSGQLQSSRDEIEASLTDSHSDPQRDVPLGEPPNITPAPPPLHQFDLDEIKLKEVKDIIRKARAKSSPGPSGLSYKVYKNCPLLTNRLWKLLKTAWKLKQLPPSWLIAEGCFVPKEEKSSTLDQFREISLLSVEGKIFWSIISRRMTDFFTKNSYIDTSAQKGGIAGFAGCIEHTSAMSQLIAEAKKNKTDLAIVWLDLAKAYPSVPHQLIFTALQHYHVPEDVISLVKQHLGGMKMRFTSGTITTNWQRLEKGIMAGCTISVILFVAAMNIMLKEASKECRGPKAMDGTCHPPCRAFMDDITAMTIREIGMRWILKRLEAIATWGRLTFKPHKSRSLVLKKGTMSPTKFTVQGRGIPTISEQPIKALGKYFDASLGDRKITKELVSQLRTWLEAIDRTTLPGKIKVWCFQYGILPRLSWPFSLYDIPLTVVEMMERMVNKKLRKWLGVSKSFSDVNLYSSSSPAALPVDSVVEEFKVAKVRTIMLLRDSKDKVANRTEAKTPKNRKWSPQDTITKAETRLHQSDIIGTVAQGRKGLGSYGRIPWSKANSKERRKMVTSEVRQMEEESRRVKAVTMNNQGAWMKWEGVESRKLTGSDLLQTSNVPVAFFLKAFSDTLPTGTNLALWKLSDDPTCQLCQDRAASLRHVLSSCKVALAEHRYTWRHDQVLKEIARQLDPLISDPSLTSRPSQPLTIGFVKAGQATAKPTVNQPSRGILHSASDWVMKVDVGKQLVFPQHVVSTTLRPDIIITSETTQTIILVELTVPWEERVEESHELKKLKYEDIVTDAKRRGWQPHCFPVEVGCRGFPAKSMDWMLKSLGLPSRKRKKAMITLGKEAERCSRWLWLRRNANWLPQ

SEQ ID NO: 3590 - protein, 1152 aa, Ctenoptilum multiguttatum
MALSALNTSRTPSAVIVEGNDMVILMPVADDVCVQCPLCVIRQYTGVRRVENFYRHCKEAHTTMCIVYRCGNCGFMAPEGKRYPRKIVSQHCATCVPQAVHPLPSGTDRERRCAIRRRLRGEGTPPPSVQNASPSAAGSGTAVLTPPRVPPVPADIVVDHSSASPETAAWTRPLTSNRDSRHSPAFAEASPPQVESSSPLVTSRRNDQPSISNRERPSRRYPTDEQMSLVAQLDAITDTTTLNETAQRASRFLGRLADHTSSRPPRPPRPHTNQNSDRIAEATRLQRLYRVNRKKAVRQVLAGPSQTCAIDVTDVENHFKILAAARDGQQEWPDVFNQDPPTQESSMRFIDPLKRGEVLQKLKGRTNSSPGPDGLTYVDLRISDPGAFVLTSLFNAVWRLEVVPECWKDSTTVLIYKKGDEADVANWRPIAMSNTCPKLFAALLADRLKKWATTNRRFSASQKGFLQYEGCYEHNFVLQEAIREAKHKKKELVVAWLDLANAFPSVPHSSLYRALRDHGVPDKILNIYRSLNTGNRTRVRVGSALTGPIDLQSGVRQGCPLSPDVFNLTLEVVLREVERTGEGFSVGDQRVSVLAYADDLAILSHSVEGMKRMLSVAESSARAVGLTFNPTKCGVLHMVGGEEVGRQRDELHIHGQAIRYLARGEAYVHLGIPTGLQVKQTPISDIADLITDVEKVDKSLLAPWQKLDAVGSFILPRMDFIMRGADIEKEYLVEVDRLIRKVAKRWLHLPRRASAELLFLPPSQGGGGLLPLADLYDLYTVVHGYKMLYAADPVVSAIARSTLRGTVSGRLRRSPTSGEVAQYLSGNLDLPRSSGKATFWSKVRQATSRLSAKARLAWIWNRESESFRIQLEDRATVTPESKGIACRFLRQQIVDYYARRLLDKKDQGKVFEVTRGSRHANYFLRSGRNIRFCDWRFIHRARLGVLPLNASMRWQSQDKRCRRCGYDAETIPHVLNHCGVHSAARQLRHNAIQDRLVKAAGCPGTVLVNRTVEGVSGEAAALRPDIVVRDEVGKTVTIIDVAVPFENRCTAIDAARQAKLEKYACLAEQLRARGYSVTVEAFLVGALGAYDTRNERALKLLRVNKKYAIMMRRFMVADTIRWSRDIYVEHVTGSRQYATRQTDEGGGRPADA

SEQ ID NO: 3591 - protein, 718 aa, Celaenorrhinus aurivittatus
MGDTCPKLFAALLADRVKRWATTNQRFSSTQKGFLQYEGCYEHNFVLQEVIREAKAKGRELVVAWLDLANAFTSVPHSSISRALIEHGMPGKITKLIGSLNYKNRTRVRVGSCLSDMMVLQSGVRQGCPLSPDIFNLTLEVVLRELDRTGGGFTVGDRRVSNLAYADDLAILADSADGMRRLLRAAETSAQAIGLTFNPAKCGILHIVRGEQSEVENTQFLLGGETIRSMGPTDTYEHLGIPTGFQVNQTPVCNIREVIANARKIDESLLAPWQKLDAVGTFVLPCMDFIMRGAVMHKEYLVEADRVIRKLAKKWLHLPRRASAELVFLPPSHGGGGLLPLADLYDMYTVVHAYRMLYASDSLVSTLAKNTLRETVTQRLRRSPSGTEVARYLSSNVDLPRSSNRATFWSNVRQATARLMTKLNLRWIWSSETETLQIQLGNKPSVTPDSRGMACKLLRRQMVEHYTHRLLLKPDQGKVLEVTRSTRYANHFLRSGRNMRFCDWRFIHRARLGVLPLNAGKKWQTGVDKRCRRCGYELETAPHVLNHCGVHSAARQFRHNEIQDRLVRAARSPGTITVNRTIEGATGEAALLRPDIVVRDEVGKAINIIDVAVPFENRKSAIDSSRQLKLDKYACLADQMSRMGYRVRVEAFIVGSLGGWDVRNERVLKMLHINRYYAAMMRRLMISDTIRWSRDIYVEHVTGHRQYGAPRAHEQAAP

SEQ ID NO: 3592 - protein, 975 aa, Metaphire vulgaris
MSLPSDQPWPTSQTLQKAKGICSVCHQVRQLHNRDGLIHRHGPRNSPCPGSHREPESILHSSVDQRKNAELSNRPDSGEIADQKVDNAESSTDSTLLSHPCVSGRLLRHIPASARPSVSEALSKLLDDIVAHPDNCNLWSKLLHFGEYILPVPKRGGKRQLLSTRIKKNVTLFSETSFSNDFMLTTIKSSGHFDTSRRIFSRDEKTAAAVSAKLEEGNIRAAVRILCSEDEPVLPNRDRLRELLTKHPEPEASESMPSQQLPSTVFQASPNDVLKAIRSFPPGSAGGPDGIRPQHILSLIKCKEAGNMLLSSVTSFINLLLRGICPEPVSPVLFGGTLMALQKKTGGLRPIAIGYYWRRLASKCANTYAICQLCNFFAPKQLGVGIPGGCEAAVHSARRFVEQMHDDEVLVKLDFSNAFNSLSRAAMLSAVCSHIPDIYPYCHLAYSKPSILKFGEFSITSQRGAQQGDPLGPLLFCLPLQQLLMRLKSPLVIGYLDDVSLGGASTVVAKDVEILKDEANTIGLSLNTSKCEIISKSTTTHPLNLFTLTNPDDACLLGAPLSTGAALTNALESIISKLSVGFSRMPLLDSQEALIILRCSLGFQRMLFTLRATPCMQHPLLEKFDNMLRECLSSVLNISLSDSQWIQASLPIRHGGFGIRRVSPLALPAFLASAAGTASLQSAILQGTPLSEDERLSSATAEWCSITSLQTPNIEKQHQQSQWDNPLIEKEFSSLFSSQTSHIDRARLNAVTSQHSGDWLFALPISNCGLRLDNESVRVAAGLRLGTTLCMPHSCPCGTLVEQDGHHGLSCRLGPGRIARHAALNDILCRSLIKAGFPSSKEPSGLSRSDGKRPDGCTLIPWRTGKCVIWDVTVADTFAASYCHQTASTAGVAAERAAERKTAKYLQLSGQYHFIPLALETMGPINEEGLRFLKEVGGLLKRQSGDERETSFLLQRISVTLQRFNAAAFRGTFKT

SEQ ID NO: 3593 - protein, 975 aa, Metaphire vulgaris
MSLPPDQPWPTTQTLQKAKGICSVCHQVRQLHNRDGLIHRHGPRNSPCPGSHREPASILHSSVDQRKNAELSNRPDSDEIADQKVDNAESSTDSTLLSHPCVPGRPLRHIPASARPSVSEALSKLLDDIVAHPDNCNLWSKLFHFGEYILPVPNRGGKRQLLSTRIKKNVTVFSETSFSNDFMLTTVKSSGNFDTSRKIFSRDEKTAAAVSAKLEEGNIRAAVRILCSEDEPVLPDRDRLRELITKHPEPEASESMPSQQLPPTVFQASPNDVLKAIRSFPPGSAGGPDGIRPQHILSLIKCKEAGNMLLSSLTSFINLLLRGTCPEPVSPVLFGGTLMALQKKTGGLRPIAIGYYWRRLASKCANTYAICQLCNFFAPKQLGVGIPGGCEAAVHSARRFVEQMHDDEVLVKLDFSNAFNSLSRAAMLSAVYSHIPDIYPYCHLAYSKPSILKFGEFSITSQRGAQQGDPLGPLLFCLPLQQLLMRLKSPLVIGYLDDVSLGGASTVVAKDVEILKDEANTIGLSLNISKCEIISKSTSTHPLNLFTLTNPDDACLLGAPLSTGAALTNALESIISKLSVGFSRMPLLDSQEALIILRCSLGFQRMLFTLRAAPCMQHPLLEKFDNMLCECLSSVLNISLSDSQWIQASLPIRHGGFGIRRVSPLALPAFLVSAAGTASLQSAILQGTPLSEDERLSSATAEWCSITSLQTPNIEKQHQQSQWDNTLIEKEFSSLFSSQTSHIDRARLNAVTSQHSGDWLFALPISNCGLRLDNESVRVAAGLRLGTTLCMPHSCPCGTLVEQDGHHGLSCRLGPSRIARHATLNDILCRSLIKTGFPSSKEPSGLSRSDGKRPDGCTLIPWTTGKCVIWDVTVADTFAASYCHQTASTAGAAAERAAERKTAKYLQLSGSYRFIPLALETMGPINEEGLHFLKEIGGLLMRQSGDERETSFLLQRISVTLQRFNAVAFRGTFKT

SEQ ID NO: 3594 - protein, 796 aa, Metaphire vulgaris
MLTTVKSSGHFDTSRRIFSRDEKTAAALSANLEEGNIRAAVRILCSEDEPVLPNRDRLRELLTKHPEPEASESMPSQQLPSTVFQASHDDDMLKAIRSFPPGSAGGTDGIRPQHILSLIKCKEAGNMLLSSLTSFINLLLKGTCPEPVSPVLFGGTLMALQKKTGGLRPIAIGYYWRRLASKCANTYAICQLCNFFAPKQLGVGIPGGCEAAVHSARRFVEQMHDDEVLVKLDFSNAFNSLSRAAMLSAVCSHIPDIYPYCHLAYSKPSILKFGEFSITSQRGAQQGDPLGPLLFCLPLQQLLMRLKSPLVIGYLDDVSLGGASTVVAKDVEILKDEANTIGLSLNISKCEIISKSTTTHPLNLFTLTNPDDACLLGAPLSTGAALTNALESIISKLSVGFSRMPLLDSQEALIILRCSLGFQRMLFTLRAAPCMQHPLLEKFDNMLRECLSSVLNISLSDSQWIQASLPIRHGGFGIRRVSPLALPAFLASAAGTASLQSAILQGTPLSEDERLSSATAEWCSITSLQTPNIEKQHQQSQWDNPLIEKEFSSLFSSQTSHIDRARLNAVTSQHSGDWLFALPISNCGLRLDNESVRVAAGLRLGTTLCSVHATQLSLRYSSRTRWAPWSLLSARTWSNRPPRRPERYLMSFADKTGFPSSKEPSGLSRSDGKRPDGCTLIPWRTGKCVIWDVTVADTFAASYCHQTASTAGAAAERAAERKTAKYLQLSGQYHFIPLALETMGPINEEGLRFLKEVGGLLKRQSGDERETSFLLQRISVTLQRFNAAAFRGTFKT

SEQ ID NO: 3595 - protein, 999 aa, Metaphire vulgaris
MYNNNNNVIIIIIIIIIIMYNKIMSLPPDQPWPTSQTLQKAKGICSVCHQVRQLHNRDGLIHRHGPRNSPCPGSHREPASILHSSVDQRKNAELSNRPDSDEIAEQKVDNAESLTDSTLLSHPCVSGRLLRHIPASARPCVSEALSKLFDDIVAHPDNCNLWSKLLHFGEYILPVPKRGGKRQLLSTRIKKNVTEFSETSFSNDVMLTTVKSSGNFDTSRRIFSRDEKTAAAVSAKLEEGNIRAAVRILCSEDEPVLPNRDRLRELLTKHPEPEASESMPSQQLPSTVFQASPNDVLKAIRSFPPGSAGGPDGIRPQHILSLIKCKEAGNMLLSSLTSFINLLLRGICPEPVSPVLFGGTLMALQKKTGGLRPIAIGYYWRRLASKCANTYAICQLCNLFAPKQLGVGIPGGCEAAVHSARRFIEQLHDDEVLVKLDFSNAFNSLSRAAMLSAVCSHIPDIYPYCHLAYSKPSILKFGEFSITSQRGAQQGDPLGPLLFCLPLQQLLMRLKSPLVIGYLDDVSLGGASTVVAKDVEILKDEANTIGLSLNISKCEIISKSTTTTHPLNLFTLTNPDDACLLGAPLSAGAALTNALESIISKLSVGFSRMPLLDSQEALIILRCSLGFQRMLFTLRAAPCMQHPLLEKFDNMLRECLSSVLNISLSDSQWIQASLPIRHGGFGIRRVSPLALPAFLASAAGTASLQSAILQGTPLSEDERLSSATAEWCSITSLQTPNIEKQHQQSQWDNPLIEKEFSSLFSSQTSHIDRARLNAVTSQHSGDWLLALPISNCGLRLDNESVRVAAGLRLGTTLCMPHSCPCGTLVEQDGHHGLSCRLGPGRIARHAALNDILYRSLIKAGFPSSKEPSGLSRSDGKRPDGCTLIPWRTGKCVIWDVTVADTFAASYCHRTASTAGAAAERAAERKTAKYIELSGSYRFIPLALETMGPINEEGLRFLKEIGGLLKRQSGDERETSFLLQRISVSLQRFNAVAFRGTFNT

SEQ ID NO: 3596 - protein, 1312 aa, Lethrus apterus
MMNRAKALPDKGAKSLSGSPPIVAKRFACIKCNSPFQTAAGLRSHIKACTDTSRDRNICLHCSKRFDTFALARQHERRNHEAEYQKSMATKLPAADSTIFSQMAEVEAVHLKGNLFEAMSSATGLTVHQVRHRRLKPLYQKYLDRAKIATRKNSRLVFSCGAKTSGPANLATTPGPSIGPAASTSGPTLAERSPVLPIKGQPALTGPSSPPRNPKRRTPPSLPPIQPPTKKPTTSHNPAYPIDKRVTVLSTYTFLPSSAPKVPGLQPIPMSDAPGPQPSTSAVHISLSPSPSGDNIPDYCSEATPALPPSGPLKRRVFSPLANEEVDNSIYFDAEEASTLGSPGREENVSNNIIPPTPDLRTPPTPPSPPAQKRRVTFADARDDALLGTETLPVKSSPPIPTTSCLPTSTVPCTDHEDDDDFQFIAPRPKRQRPPPRMGDDTFVARLVDLRTRVGDREDLRTLLDSAIVDSDQTFLQILDHWIESQFGKPKKQPGINRPRAPRNYNQAYTGRGPRASAFKKAQDLFQKNKRLLAESIMAGRPLLSEEVYPLVTDVEELYGSILESPSPHDDEPYPEPASPVDLHKPISAEEIDALRLSWKPSAPGTDGITIPQVKSKPVIDLEVLFNAVLHRGTIPDSWRLMRTTLVPKDGDRRSANNWRPITIGSALQRLLNKILAARLKNATTLNTNQRGFIDADGTLANTLILDNFIRSRSAAGRSYCVVSLDIRKAFDTVSHHSIERALLSHGIDHRTVDFIMDGLSNSTTTIKLGNHEKTRQLHVRRGVKQGDPISPILFNLVMDELLAKLNGADFPGGSVYEDLRCTAMAFADDLIIMGDNDKEMPFVLDAVDDFLARRGMAINPSKCVSLTAGSLWKEKKVVVRSEKLFKIGGRSISSVGYFNCFKYLGHQYNCSGVLKPSLVNLPTWLKNISSAPLKPDQKLAIIKDHLLPRLLYGLQTPKVTGKLLRDADRLIRLHVKKILHLNVHTPDAALYGKIRDGGLGLLNLRMQIPRILLGRMAKLLDHGDSLISVILQSDASVRQFDRLTTLAGEVPSDQLWREKIMSGPLTRGIETASDDAASRSWIRSKPRGWTGRDFVRAVQLRTANLPTLAVPSTPHGQRTCRGCGECDETISHVLQKCKTTHWERIDRHNEIAKKLSRHCKKMTWTVEEEPHIRHSDGTLYKPDLVIHRQGRIVVTDVQVSWEGSVASLETTHSNKEAKYNCGKFIEAASSRYPSKEITFHPVIIGARGIWPRCNTSATRELSIPASVRASCVHSALKWGSTIHAAFGRAVWSRTQRFPHIRAVNKAGTPSV

SEQ ID NO: 3597 - protein, 1266 aa, Hypermnestra helios
MERLRNRKRIGPLPGGDRRGTSGAGAGRDSLQAASGSQLNRRVGVGEPENTTADQVTVMRTDDALQRRDSPTNHSAGTSVMTTTSLPVSDDRRRKWSQQEMSELMYCFFKARFAGPGYQGRLEQLFRERNPDNPKIHRFNKNTLANQARRILKDNVISKEVLSRIQKEAENREETETNNEQNGEHINSGRQRSTNHDEESEIIQSVMPSPRHACAETPTYQPEDTRISEQINTTNRLEGNVNIYEDQDPIIFKFLQIFAETKEINVMNREYLPKAKINKQFMKNLSILNNYLPTILEANCSLQAINNIIYATAKTLIINNNQKPFIPKPIIKKDKDPPWKIRLKIRIEKLRKELGQLTEIEKGTSSKKLERIKNNIFNKYNILNENDQRNTIEIMKQRIKAWAGRIKRYDDMNKRKEQNRLFKDNEHNFYKRIGNKESEITEMPTKDGIQNFWKSIMSQPISYNRQADWIKDLETTHRNVTTNEFEEVNEEHVKKAVKKLPNWKAPGVDKVQNFYLKYLTSTHSYLAILFTNILQGIEQCEDWFALGRVILIPKNDNTEDPKNWRPISCLPTMYKVLTSILADELYNHCQTNNIMSSEQRGCRRAARGCKDHLMVNKAIVEDAHQSQKNLSMAWIDYRKAFDSISHDWLIKVLDIYNCPSAIKRFLQKIMPSWRVIMSARTTKHSVVTEPLHIRRGIFQGDSLSPLLFCLAINPVSFLLKRYEMKGYKLKDSIYINHLIYMDDLKVYANNKNNLKVLIDSIEVFTNDIGMSFGLNKCNVLHMRAGHRITTEGEGHILLSGESFDHLKIGEKYKYLGIHESGKIEHSQLREQVTKEYINRVNKILNTHLNGRNLVKAINTYAVPVLLYTFGIVNFKISDLKKIDIKTRKLLTIKKAHQQKADVIRLYLPVHLGGRGLINIELSYKSQIIKYKQYLNAGLDYLVQAITQHDKTRDKYSIIKEAERIEGDLQISNTQPHTDEEIKKAINRHQNQLWRNKNLHGQFPKAVLDQGNIDAEASFRWMKKQPVSANVESTVFAIQDQALLTRQIERDVLKHETDGKCRLCLEKDETAQHIISGCNKLAGSFYVKRHNNLTQYVHWCLARKHNMQVATLWWKEELKQPTVKENDTAKILWEIPLQTDKTITHNRPDIVYIDKIQNKTYLIDVTVPSDYNIGAKEIEKLSKYHPLKVELNRLWNTQTTVIPIVIGATGVIAKSVSRYCDKLEAKININILQKQAALHSSTIISKVLNDTIFLHNMQDTRDTCNLN

SEQ ID NO: 3598 - protein, 1259 aa, Zygaena filipendulae
MTNGALASPSNMKRQLRNWRPGPLPGGDRRGTSGAGAGRDSMQTASGIQLSRRAGTGEPEYTTADQVSDVRIDDALQRRDSPTNNSAGTSGLATTRLPIINDRRKKWSQQEMEELMHCLFKAKSDGPGYIKRLERLFRERNANNPKIHQFNGNTLATQARRILKQNIISTEVLDRIQKSAENGNEIESNEQTTEPEMQQVGHIEDNIQSPPLSPTPTEIQSPHIITQAETTEQLVTNINDNEDQDPLILKFLQILAETKEISIIDREYLPKAKINKQFMQNVHILNKYLPYLLVTNSSLQEINNIIYATAKTLIISNNQSPYMPKATITEKKDPPWKFRLKSRIEKHRKELGQLVEIEKGTVSNKLRRIKNKLYDKYRICNENDLRNKIENMKQRIKAWAGRIKRYEDINNRKEQNRLFMENEHNFYRNINMKRQAQFNLPTVERTQDFWKSILSQPISFNKEATWIKNLEMTYGDTITKDLEQITEEHVKTAIRKTSNWKAPGIDKIQNFYLKYLTSIHTYLAILYTNIIQGNEQCEEWFTLGRVILIPKNEDTEDPRNWRPIACLPSMYKVLTSILADELYSHCQMNNIMAPEQRGCRRAVRGCKDHLMINKAILEDAHQSQKSLGMAWIDYRKAFDSISHDWLMKILDIYKCPPAVKRFLRLSMPSWKVIMTARSTRQSFTTEPICIRRGIFQGDSLSPLLFCLAINPISHLLKKYETKGYRLREGMCINHLLYMDDLKVYANNKHNLKVLLDSIEVFTNDIGMSFGLNKCNILHIMTGHRSRAEGEGHILLSGETFDHLKLGEKYKYLGIHESGKIEHKQLRQQITKEYLNRIKKVTNTYLNGRNLIKAINVYAVPVLLYSFGIINFKISDIKKIDIKTRKLLTIKKAHRQKADIERLYLPVEHGGRGLINIELTYKKQIIKYSRYLHSDIDYLTQAIIQHDKNRQKYSIVKDAKEIERELHISHTQTYTDEQIKEIITKKQNETWRSKNMHGQFPKTVLDQANIDTKASFAWMKKQPVAPTLEASVFAMQDQAIFTRQLERDILNRNIDGKCRICAEKDETIQHVISGCSKLTGTYYMKRHNNLVQYVYWCLAKKHNIQVAQQWWKEELKEPQVKENDTAKILWEIPLQTDITITHNRPDLVYMDKAHNITYLIDVTVPSDYNIGAKEIEKLSKYHPLKIEISRLWNTQAIIIPIVIGATGVVAKSSSRYCDKLEAMLNISILQKQAALHSTTIINKVLGDSVFTNCTQNTTDE

SEQ ID NO: 3599 - protein, 1148 aa, Zygaena filipendulae
MEELMHCLFKAKSDGPGYIKRLERLFRERNANNPKIHQFNGNTLATQARRILKQNIISTEVLDRIQKSAENGSEIESNEQTTEPEMQQVGHIEDNIQSPSLSPTPTEIQSPHIITQSETTEQLVTSINDNEDQDPLILKFLQILAETKEISIIDREYLPKAKINKQFMQNVHILNKYLPCLLVTNSSLQEINNIIYATAKTLIISNNQFPYMPKATITEKKDPPWKFRLKSRIVKHRKELGQLVEIEKGTVSNKLRRIKNKLYDKYKICNENDLRNKIENMKQRIKAWAGRIKRYEDINNRKEQNRLFMENEHNFYRNINMKRQVQFNLPTVERTQDFWKSILSQPISFNKEATWIKNLEMTYGDTTTKDLEQITEEHVKTAIRKTSNWKAPGIDKIQNFYLKYLTSIHTYLAILYTNIIQGNEQCEEWFTLGRVILIPKNEDTEDPRNWRPIACLPSMYKVLTSILADELYSHCQMNNIMAPEQRGCRRAVRGCKDHLMINKAILEDAHQSQKSLGMAWIDYRKAFDSISHDWLMKILDIYKCPPAVKRFLRLSMPSWKVIMTARSTRQSFTTEPICIRRGIFQGDSLSPLLFCLAINPISHLLKKYETKGYRLREGMCINHLLYMDDLKVYANNKHNLKVLLDSIEIFTNDIGMSFGLNKCNILHIMTGHRSRAEGEGHILLSGETFDHLKLGEKYKYLGIHESGKIEHKQLRQQITKEYLNRIKKVTNTYLNGRNLIKAINVYAVPVLLYSFGIINFKFSDIKKIDIKTRKLLTIKKAHRQKADVERLYLPVEHGGRGLINIESMYKKQIIKYSRYLHSDIDYLTQAIIQHDKNRQKYSIVKDAKEIERELHISHTQAYTDEQIKEIITKKQNETWRSKNMHGQFPKTVLDQANIDTKASFTWMKKQPVAPTLEASVFAMQDQAIFTRQLERDILNRNIDGKCRICAEKDETIQHVISGCSKLTGTYYMKRHNNLVQYVYWCLAKKHNIQVAQQWWKEELKEPQVKENDTTKILWEIPLQTDITITHNRPDLVYMDKAHNITYLIDVTVPSDYNIGAKEIEKLSKYHPLKIEISRLWNTQAIIIPIVIGATGVVAKSSSRYCDKLEAMLNISILQKQAALHSTTIINKVLGDSVFTNCIQNTTDE

SEQ ID NO: 3600 - protein, 1259 aa, Zygaena filipendulae
MTNGALASPSNMKRQLKNWRPGPLPGGDRRGTSGAGAGRDSMQTASGIQLSRRAGTGEPEYTTADQVSDVRIDDALQRRDSPTNNSAGTSGLATTRFPIINDRRKKWSQQEMEELMHCLFKAKSDGPGYIKRLERIFRERNANNPKIHQFNGNTLATQARRILKQNIISTEVLDRIQKSAENGNETESNEQTTEPEIQQVGHIEDNIQSPPLSPTPTEIQSPHIITQAETTEQLVTNINDNEDQDPLILKFLQILAETKEISIIDREYLPKAKINKQFMQNVHILNKYLPYLLVTNSSLQEINNIIYATAKTLIISNNQSPYMPKATITEKKDPPWKFRLKSRIEKHRKELGQLVELEKGTVSNKLRRIKNKLYDKYKICNENDLRNKIENMKQRIKAWAGRIKRYEDINNRKEQNRLFMENEHNFYRNINMKRQVQFNLPTVERTQDFWKSILSQPISFNKEATWIKNLEMTYDDTTTKDLEQITEEHVKTAIRKTSNWKAPGIDKIQNFYLKYLTSIHTYLAILYTNIIQGNEQCEEWFTLGRVILIPKNEDTEDPRNWRPIACLPSMYKVLTSILADELYSHCQMNNIMAPEQRGCRRAVRGCKDHLMINKAILEDAHQSQKSLGMAWIDYRKAFDSISHDWLMKILDIYKCPPAVKRFLRLSMPSWKVIMTARSTRQSFTTEPICIRRGIFQGDSLSPLLFCLAINPITHLLKKYETKGYRLREGMCINHLLYMDDLKVYANNKHNLKVLLDSIEIFTNDIGMSFGLNKCNILHIMTGHRSRAEGEGHILLSGETFDHLKLGEKYKYLGIHESGKIEHKQLRQQITKEYLNRIKKVTNTYLNGRNLIKAINVYAVPVLLYSFGIINFKISDIKKIDIKTRKLLTIKKAHRQKADVERLYLPVEHGGRGLINIELMYKKQIIKYSRYLHSDIDYLTQAIIQHDKNRQKYSIVKDAKEIERELHISHIQAYTDEQIKEIITKKQNETWRSKNMHGQFPKTVLDQANIDTKASFTWMKKQPVAPTLEASVFAMQDQAIFTRQLERDILNRNIDGKCRICAEKDETIQHVISGCSKLTGTYYMKRHNNLVQYVYWCLAKKHNIQVAQQWWKEELKEPQVKENDTAKILWVIPLQTDITITHNRPDLVYMDKAHNITYLIDVTVPSDYNIGAKEIEKLSKYHPLKIEISRLWNTQAIIIPIVIGATGVVAKSSSRYCDKLEAMLNISILQKQAALHSTTIINKVLGDSVFTNCTQNTIDE

SEQ ID NO: 3601 - protein, 1060 aa, Hypermnestra helios
MPSPRHACAETPTYQPEDTRISEQINTTNRLEGNVNIYEDQDLIIFKFLQIFAETKEIIVMNREYLPKAKINKQFMKNLSILNNYLPTILEANCSLQAINNIIYATAKTLIINNNQKPFIPKPIIKKDKDPPWKIRLKIRIEKLRKELGQLTEIEKGTSSKKLERIKNNIFNKYNILNENDQRNTIEIMKQRIKAWAGRIKRYDDMNKRKEQNRLFKDNEHNFYKRIGNKESEITEMPTKDGIQNFWKSIMSQPISYNRQADWIKDLETTHRNVTTNEFEEVNEEHVKKAVKKLPNWKAPGVDKVQNFYLKYLTSTHSYLAILFTNILQGIEQCEDWFALGRVILIPKNDNTEDPKNWRPISCLPTMYKVLTSILADELYNHCQTNNIMSSEQRGCRRAARGCKDHLMVNKAIVEDAHQSQKNLSMAWIDYRKAFDSISHDWLIKVLDIYNCPSAIKRFLQKIMPSWRVIMSARTTKHSVVTEPLHIRRGIFQGDSLSPLLFCLAINPVSFLLKRYEMKGYKLKDSIYINHLIYMDDLKVYANNKNNLKVLIDSIEVFTNDIGMSFGLNKCNVLHMRAGHRITTEGEGHILLSGESFDHLKIGEKYKYLGIHESGKIEHSQLREQVTKEYINRVNKILNTHLNGRNLVKAINTYAVPVLLYTFGIVNFKISDLKKIDIKTRKLLTIKKAHQQKADVIRLYLPVHLGGRGLINIELSYKSQIIKYKQYLNAGLDYLVQAITQHDKTRDKYSIIKEAERIEGDLQISNTQPHTDEEIKKAINRHQNQLWRNKNLHGQFPKAVLDQGNIDAEASFRWMKKQPVSANVESTVFAIQDQALLTRQIERDVLKHETDGKCRLCLEKDETAQHIISGCNKLAGSFYVKRHNNLTQYVHWCLARKHNMQVATLWWKEELKQPTVKENDTAKILWEIPLQTDKTITHNRPDIVYIDKIQNKTYLIDVTVPSDYNIGAKEIEKLSKYHPLKVELNRLWNTQTTVIPIVIGATGVIAKSVSRYCDKLEAKININILQKQAALHSSTIISKVLNDTIFLHNMQDTRDTCNLN

SEQ ID NO: 3602 - protein, 1158 aa, Ips nitidus
MIWTTLVPFEDQSCAVCLRDGVNLLLLSVAEADKHYRSAHAKTPMQYQCRGCDKRYVKRHAALCHVPKCPGRAEPARGDYVCPTCGAPFTTARGLSTHERSRHPVARNAARAAGLVRHERRIPPPEQVPSPPRRNIARRVFSEQDIATMLQCELRFRGDVNMAIRMREHLPNKTLKQFRDKRREATYVRRRELLYAQRDEELRRAEVGPPQPVEPARHEPVDEPQPPPLEQVAEPVPIVLPDIVVEEVADFSQTEEFIRWKLELLVGAIAVNANGRIGRLEPSPEAANVIRALRGCLSWAADTEGDIPQYMVDHMYQLALGILVRTEDPNNANTPARGGRPKRSRGRKRVKRYIYSRTQGLYAQNPGLLAKMVRKGIDWMSEPGIQCPDAAVEALYRELWESKPGAVQFEEAPAEQDEVAIGHVLSAITPLEVLQRVRRLKKAVAAGVDGIRKKDLNNAVAREVLRLVFNFLLVAGKQPKDWRMNRTTLLLKEGKDGRMAENYRPITISSLISRVYYGILDARIRSVVTFSPRQKGFVSEPGCFRNVHILNELLRHAKAHQGLVLTQLDVSKAFDTVPHEVLGPALRSKGLPDHVVRIVQEAYRDVDTVIDLNRSRVNVRLQRGVKQGDPLSPTLFNIVCDKLLRLLESREGYKLNEDNSISCLAFADDLLLVASNEEIAQRQLDDVQTFLGGLGMSLSAPKCCAFSIRTTRDSWFLTDPSLHFECGAPVRALAAGEGLDYLGMVVSPWSGIDIQKVSTTLLGAIKRVRKLTLKPFQKLDLITTYLIPHYSYAMQIAIPGVTWMRNLDQELRVQVREILHLPQSVTDHVIYCRRRDGGLGFPRLEWLTTAGALKAGTSFLNCDDPAVRAIGAGTQLEARLRRLCLAQRLHWPPEERVLKDYVSSNKRRSLSQWGQLGSQGKSARAFADSVVSNAWLMDNSLLKPCRAITALKMRTNSCANRAAMSRAQPMDDVSCRLCRAQTETLGHILGYCNGTKAQRIRRHDEIVHLLRDDLATQGPEVAVAEEPRLVLDLPGAGNLRPDLVVKSHGRVFVVDVTVRHEDGRGLEQGRLQKISKYRHLLPQLAARFQASAAEVLPIVVGTRGAIPKETAAALTKLGIRGRRTQLTMSLIALRSSIELYHNFMDNVPLPRRRLRQPP

SEQ ID NO: 3603 - protein, 1081 aa, Alosa sapidissima
MRRHPGRGFVAHCLRCKGSWVTVRECESHLESCRGVSGDHQMGSSPQSNRAATGQLFLTPARQRIQPSVRLIQRPSPTWSLNELQVLRAALARSPGRLPATPVLARMLPRKTKQHVAAMRSALMRRRTVSDSGSGRVPDPAVLQDLGVPATRAPSVQGLERRLRWKAGELVDRLGGQDCPLSRALKLGSMKAPNAKQVIEGVTEQVIREMAPSDMTSGQGNSGGTRVTPSPLLKRSKCAVKRDYVRKVRRLARVDPSKLIDLLLDGRDDVSCPVPLDELKPVFEERWTRVEGAFRGLGQFKSAGGAENKCFEELFGPEEVMDHLLAIGNKSAPGPDRLTKSDLLEWDPTCEKLCLLFNSWLTVGYVPNAVKPARTVLLPKSSDPDTVSDPGNWRPITIGSILLRLYSKLLHGRLKEACLINTRQRGFISAPGCSENLHILQSLVKSFNRERKTLAVVFIDIAKAFDTIAHEHLFEVLHHRGLDVHMVEALRQSYADTSTRISLRGELSEPIATTRGVRQGDPLSPLLFNLAIDPLIGALEMAGRGVEIADVSLTSLAFADDLVIVSDSWDNMAHNLQILELFCELTGLRVQPKKCQGFLTTPGHRRSAAMRVNDCRPWPVCGDQVTMVSVGSTAKYLGVELGPGKGIVKPQMKAKISEWLQRVGAAPLEPSQKVWLLMRFVLPRLTYQLDHCNFGNVLLAEMDRLIRVSVKQWLGLPQSTCNGLLYSRCRDGGLGLQKLAVTIPTAQCKRILGLLQSEDTVTRQTAWKLIGYAGFIDRWSAAGGHRMEAPILRQYPDPVDDSPSGESISNTTPPTAIKVQWRVPCDWREDEFRDWTVKEVQGAGISGFRGSREANAWLQPAGKPRKWLGSALQLRAQVYPTREFFARGLGKSNATCRACHARLESCSHILGICCSVRGQRYARHNWVRDRLAKLGADLGWRVHSERSFRSSSGRALRPDLVFCKGGTALVVDVTVRYEVRDDSLSVTSRAKANKYIPAAQAVRTDLGVSNVVTFGFVVGARGQWLSANHRLLKRLGCGKSRCRAVARRLCEGTLRRSLGMLEAFFRNANPTNPCSGQGSPV

SEQ ID NO: 3604 - protein, 1040 aa, Zaprionus vittiger
MNNEPRINNRNIPMVNSLGNQQRGSIIEVLSNQTSFVCEICGQICRSKGGLGVHMARKHKDELDIARLRVDVKLRWSDEELLMMARKEIELTEYGNIRNINQRLAEAFAPRTVDAIKKCRQRDNYKTKIEQLRGQAALIPIPNVEVAIIRPSESEQDRQVSIPSTVRVNPLERSNSEILRRLQGLGPVECARRWKVDVLQTIIDRAHTLGKSGTLQCLSNYLREIFPVQDRARTVLSRRSPNRPRNRRQLRRQQYARVQRNWDKHKSRCIKSLLDGPDESVMPNQEIMAPYWREVMTHPNPSNLTSTVVVPMNHLLEGVWDTITPAELKKFSVSLTSSPGPDGITPRVAKSVPSGVMVRIMNLILWCGNIPKAVRPARTIFIPKTVRASLPQDFRPISVPSVLVRQLHAILASRLNSRIQWDPRQRGFLPTDGCADNTTMVDLILRDHHKRHASCYIATLDVSKAFDSVSHAAIITILKSYGVPDELVNYVRTLYKEGSTTLNGVDWCTEEFVPAHGVKQGDPLSPILFNLVIDQLLRTLPREIGVKVGSAMTNAAAFADDLVLFASTPKGLQKLLDTTVDFLSTVGLTLNANKCFTVSIKGQPKQKCTVVVPQTFCVGSRTCPALKRSEEWKYLGIHFTADGRTRYYPSEALKPKLECISKSPLKPQQKLFALRTVLMPQLNHQLTLGSVSIGVLRKCDKLIRFYIRRWLDLPMDVPVAFFHAPHSHGGLGIPSVRYAAPMLRVRRLSNINWPHLEQSGVANAFISAELERARGRCQAEGNELSSRAIINSYWANRLYMSVDGSGLREASQFGPQHGWVSQPTRLLTGKDYLNGIKLRINALPTRSRTTRGRHELGRRCRAGCDAPETTNHILQKCYRTHGRRVARHNSIVKFIKGNLETRGYVVHAEPSLQGDSGLNKPDLVALRQGHAYVIDAQIVTDGYALDQAHQRKVEKYDQPDIKEAVRRDFQVEGNVEVVSATLNWRGIWSGQSVKRLIALGILNASDSNVMSARTVTGGISCYRAFMFYSGYSRFRQYENG

SEQ ID NO: 3605 - protein, 864 aa, Drosophila saltans
MIPQQSNCEILRILQGYRPVVCNPRWRAEVLQSIIDSAPDLGRETTLQRLSIYLLEIFPKPKQVELSRPPRRPRNRRQLRRQQYAAVQRNWDKHNGRCIKSLLDGADESVLPNREIMEPYWREVMSQPSTCSCDNAMFHLEHSLEKVWSAITAHDLRVNKVKLSSSPGPDGISPKTARSIPTGIMLRIMNLILWCGNIPQPIRLARTVFIPKTVTANRPQDFRPITVSSVLVRQLNAILASRLTSSVNWDPRQRGFLPTDGCADNATMVDLILREHHKRWKSCYIATLDVSKAFDSVSHQAVYNTLTAYGAPKDFIDYLRKLYEGGGTTLNGEGWRSEEFVPARGVKQGDPLSPILFNLIIDRLLRSFPDRVGAKVGNAITNAAAFADDLVLFAETPMGLQKLLDITVDFLSSVGLTLNADKCFTVSIKGQAKQKCTVVERRSFCVGSRECPSLKRTEEWKYLGIRFNADGRARFDPADDFGPKLLRLSRAPLKPQQKLFALRTVLIPQLYHKLTLGSVTIGVLRKLDRLVRSTVRRWLDLPLDVSVAFFHAPHTCGGLGIPSLRWTAPMLRLKRLSNIKWPHLEQSEVASSFIDDEMQRARDRLLAGIGRLLTRAEIDSYWANRLHMSVDGSGLREAGHFRQQHGWVCQPTRLVTGKEYLNGIKLRINALPSKSRTTRGRHELGRRCRAGCDAPETTNHILQQCYRTHGRRIVRHNGVVNALKRGLERKGYVVHVEPSLQCETELNKPDLVAIRQNHAYVIDAQVVTDGLSLDDAHQRKVERYDRQDVRTELRRIFGVTGNIEFHSATLNWRGIWSGQSVKRLIAKDLLITGDSNIISVRVVKGGLLCFKQFMHYCGYSRAWT

SEQ ID NO: 3606 - protein, 1042 aa, Drosophila saltans
MSHVGESMNSAPRITALTATNSTPTANSLGAQHEPGTAVNPASQVPCMVCGRLFKTSRGLGVHMSHRHKDELDTARRRVDVNLRWSEEEAYLLARKELELEASGNLRYPNKKLAEFFNHRSSEAIKCYRKRGEYKAKLEQLRGQAAHAPEALEPNTTQRRPSSIERRDRVSTTDAPPIMIPQQSNCEILRILQGYRPVVCNPRWRAEVLQSIIDSAPDLGRETTLQRLSIYLLEIFPKPKQVELSRPPRRPRNRRQLRRQQYAAVQRNWDKHNGRCIKSLLDGADESVLPNREIMEPYWREVMSQPSTCSCDNAMFHLEHSLEKVWSAITAHDLRVNKVKLSSSPGPDGISPKTARSIPTGIMLRIMNLILWCGNIPQPIRLARTVFIPKTVTANRPQDFRPITVSSVLVRQLNAILASRLTSSVNWDPRQRGFLPTDGCADNATMVDLILREHHKRWKSCYIATLDVSKAFDSVSHQAVYNTLTAYGAPKDFIDYLRKLYEGGGTTLNGEGWRSEEFVPARGVKQGDPLSPILFNLIIDRLLRSFPDRVGAKVGNAITNAAAFADDLVLFAETPMGLQKLLDITVDFLSSVGLTLNADKCFTVSIKGQAKQKCTVVERRSFCVGSRECPSLKRTEEWKYLGIRFNADGRARFDPADDFGPKLLRLSRAPLKPQQKLFALRTVLIPQLYHKLTLGSVTIGVLRKLDRLVRSTVRRWLDLPLDVSVAFFHAPHTCGGLGIPSLRWTAPMLRLKRLSNIKWPHLEQSEVASSFIDDEMQRARDRLLAGIGRLLTRAEIDSYWANRLHMSVDGSGLREAGHFRQQHGWVCQPTRLVTGKEYLNGIKLRINALPSKSRTTRGRHELGRRCRAGCDAPETTNHILQQCYRTHGRRIVRHNGVVNALKRGLERKGYVVHVEPSLQCETELNKPDLVAIRQNHAYVIDAQVVTDGLSLDDAHQRKVERYDRQDVRTELRRIFGVTGDIEFHSATLNWRGIWSGQSVKRLIAKDLLITGDSNIISVRVVKGGLLCFKQFMHYCGYSRAWI

SEQ ID NO: 3607 - protein, 1029 aa, Zaprionus ornatus
MPMVDSLGNQQRGSIMEVQSDPTSFICEICGQICRSKGGLGVHMARRHKDELDVARLRADVKLRWSDEELLMMARKEMELIENGNVRNINQRLAEAFAPRTLEAIKKCRHRDNYKSKIEQLRGQAVLIPIPNVEAAIIRPSESEGNRQVSMSSTARVNPLERSNSEILRRLQGLGPVQCARSWKGDVLQTIVDRAHTLEKSATLQCLSNYLREIFPVQNRAHTVLSRRSPNRPRNRRQLRRQQYARVQRNWDKHKSRCIKSLLDGPDESVMPIKEIMEPYWREVMTHPNPSNLTSTVHVPMNHLLEEVWAPITPAELKKFSVSLTSSPGPDGITPRVARSVPSGIMLRIMNLILWCGKIPRSVRPARTIFVPKTVRASLPQDFRPISVPSVLVRQLHAILASRLNSRIQWDPRQRGFLPTDGCADNTTIVDLILRDHHKRHSSCYIATLDVSKAFDSVSHAAIVKILKSYGVPDELVNYVRNLYNEGSTTLNGVDWCSEEFVPAHGVKQGDPLSPILFNLVIDQLLRTLPHEIGVKVGSATTNAAAFADDLVLFASTPKGLQKLLDTTVDFLSTVGLTLNANKCFTVSIKGQPKQKCTVVVPQTFRVGSRTCPALKRSEEWKYLGIHFTADGRSRYYPAEALKPKLECISKSPLKPQQKLFALRTVLIPQLNHQLTLGSVSIGVLRKCDKLLRFYIRRWLDLPMDVPVAFFHAPHSHGGLGIPSVRYAAPMLRVRRLTNISWPHLEQSEVANSFISAELERARGRCQAEGNELLSRASINSYWANRLYVSVNGNGLREGSHFGPQHGWVSQPTRLLSGKEYLNGIKLRINALPTRSRTTRGRHELGRLCRAGCDAPETTNHILQKCYRTHGRRVARHNSIVKFIKDKLETRGYVVHAEPSLQGDSAISKPDLVALRQGHAYVIDAQIVTDGIALDQAHQRKIEKYDRQDIKEAVRRDFQVAGNVEVISATLNWRGIWSGQSAKRLIALGTLNASDSNVISARTVTGGISCYRAFMFYSGYSRFRLYENG

SEQ ID NO: 3608 - protein, 752 aa, Drosophila paulistorum
MPNQAIMEPYWKQIMTNPSTCSCDNTRFRMEHSLETVWSAITLRDLRENKLKLSSSPGPDGVTPRTARSVPSGIMLRIMNLILWCGKLPYSTRLARTIFIPKTVKANRPQDFRPITVPSVLVRQLNAVLASRLASKVSWDPRQRGFLPTDGCADNATLVDLILREHHKRWKSCYLATVDVSKAFDSVSHQAIIKTLQAYGAPANFVSFTAEQYKGGGTSLNGAGWSSEVFIPASGVKQGDPLSPILFNLIIDRLLRSYPKEIGAKVGNTITSAAAFADDLVLFAETPMGLQKLLDTTVGFLASVGLTLNSDKCFTISIKGQAKQKCTVVERRSFCVGERECPSLKRTEEWKYLGIRFTADGRARYSPADDLGPKLLRLTRAPLKPQQKLFALRTVLIPQLYHQLTLGSVRIGVLRKCDRLVRQFVRRWLDLPLDVPTAFYHAPHIYGGLGIPSIRWIAPMLRLKRLSNIKWPHLEQSEVASSFIDDELQRARDRLKAEDMELGSRPEIDSYFANRLYMSVDGCGLREAGHYGPQHGWVSQPTRLLTGKEYLHGVKLRTNALPSKSRTTRGRHELERRCRAGCDAPETTNHILQKCYRTHGRRVARHNSVVNAVKRGLEGRDCVVHVEPSLQCDSGLHKPDLVGIRQNHMYVIDVQVVTDGHSLDQADQRKVERYDRADIRSQMRRSFGATGDIEFHSVTLNCRGIWSGQSVKRLIAKDLLIASDTNIISVRAVTGGVTSFKYFMYCAGYTRS

SEQ ID NO: 3609 - protein, 1005 aa, Zaprionus ghesquierei
MQNDAFPCDVCGRSFSTKTGLGVHMSRMHKDRFDELRLRVDVKARWSEEEIAMMARKELELTANGERFINKKLAEVYTHRSVESIKKTRQRDTYKAKIEQLRSEAARIPEAQNEPPTTSPRPSYGEPGTSSRSRPPPIAPLVHSDMVLLRMLQGLPPVECSQPWRVEVLQSIVDRAQVSGKEATLQCLSNYLLELFPNRNIRPVPASERVRPPPRNRRQNRRQQYARVQRNWDKHKGRCIGSLLEGPDESVMPSQEVMEPFWRQVMTQPSTSSLNCQPLPMGHLLEGVWSPITLGDLRAHKVSLTTSPGPDGISARNARSIPNGIMLRIMNLILWCGNLPTLFRMARTVFIPKTGKASRPQDFRPISVPSIVVRQLNAILASRLSSSVSWDPRQRGFLPTDGCADNTTIVDLVLRDHHKRFASCYIGTLDVSKAFDSISHQAIIDCLNACGAPKGFVDYIQNVYKGGGTFLKGRDWSSEAFIPARGVKQGDPLSPVLFNMVIDRLLRSLPDEIGVKVGNATTNAAAFADDLVLFASTRNGLQKLLDTTVDFLSSVGLTLNADKCFTVSVKGQPKQKCTVVEHRTFRVGSRTCPALKRSEEWKYLGIHFTAEGRARYDPAADLGPKLDRITKSPLKPQQKMFALRTVLIPQLYHKLTLGSVALGVLRKCDKLVRSTIRKWLDLPLDVSVAFFHAPHLSGGLGIPSLRWMAPMLRMKRLESIKWPHLEQSVVANSFLSAEQQRARDRCQAGIELLSSRTKVDSYWADRLFSSVDGGGLREANRFGAQHGWVCQPTRLLTGKAYLNGIKLRINALPTRSRTTRGRHELARQCRAGCDAPESLNHILQKCHRTHGRRVARHNSVVTRIKQGLVRRGYAVIAEPSLQGENGIYKPDLVAFREDRTLVLDAQIVTDGLELDRAHQSKIDKYSGRDVLTALRRDHLVHGNVEVVSATLNWRGIWSYQSVTRLRALDVITASDSNIISARVVTDGVCGFKTFMHHAGYHRGVS

SEQ ID NO: 3610 - protein, 1005 aa, Zaprionus ghesquierei
MQNDAFPCDVCGRSFSTKTGLGVHMSRMHKDRFDELRLRVDVKARWSEEEIAMMARKELELTANGERFINKKLAEVYTHRSVESIKKTRQRDTYKAKIEQLRSEAARIPEAQNEPPTTSPRPSYGEPGTSSRSRPPPIAPLVHSDMVLLRMLQGLPPVECSQPWRVEVLQSIVDRAQVSGKEATLQCLSNYLLELFPNRNIRPVPASERVRPPPRNRRQNRRQQYARVQRNWDKHKGRCIGSLLEGPDESVMPSQEVMEPFWRQVMTQPSTSSLNCQPLPMGHLLEGVWSPITLGDLRAHKVSLTTSPGPDGISARNARSIPNGIMLRIMNLILWCGNLPTLFRMARTVFIPKTGKASRPQDFRPISVPSIVVRQLNAILASRLSSSVSWDPRQRGFLPTDGCADNTTIVDLVLRDHHKRFASCYIGTLDVSKAFDSISHQAIIDCLNACGAPKGFVDYIQNVYKGGGTFLKGRDWSSEAFIPARGVKQGDPLSPVLFNMVIDRLLRSLPDEIGVKVGNATTNAAAFADDLVLFASTRNGLQKLLDTTVDFLSSVGLTLNADKCFTVSVKGQPKQKCTVVEHRTFRVGSRTCPALKRSEEWKYLGIHFTAEGRARYDPAADLGPKLDRITKSPLKPQQKMFALRTVLIPQLYHKLTLGSVALGVLRKCDKLVRSTIRKWLDLPLDVSVAFFHAPHLSGGLGIPSLRWMAPMLRMKRLESIKWPHLEQSVVANSFLSAEQQRARDRCQAGIELLSSRTKVDSYWADRLFSSVDGGGLREANRFGAQHGWVCQPTRLLTGKAYLNGIKLRINALPTRSRTTRGRHELARQCRAGCDAPESLNHILQKCHRTHGRRVARHNSVVTRIKQGLVRRGYAVIAEPSLQGENGMYKPDLVAFREDRTLVLDAQIVTDGLELDRAHQSKIDKYSGRDVLTALRRDHLVHGNVEVVSATLNWRGIWSYQSVTRLRALDVITASDSNIISARVVTDGVCGFKTFMHHAGYHRGVS

SEQ ID NO: 3611 - protein, 1041 aa, Drosophila innubila
MDRQTDGAMNRNEPRIYEQSSRNSPTATRRGTHQERNAVVNTQAMFPCCECDRSFSTKTGLGVHMSRQHKDALDECRRRVDVKARWNDEELSMMARKEIELTANGERFINKKLAEVFANRSVDAIKKCRQRDSYKAKIEQLKGQAVPIPAANESPTIQRRPSLSEPGSSSSISQAPPLAPSRHSDDILMRMLRGLQPVACNRSWRAEVLQSIVNEAQDSGKEVTLQRLSVYLLELFPTRNNRPVPARVHRPAPRNRRQRRRQEYARVQRNWDKHKGRCIKSLLDGPDESTMPNQGIMEPYWKEVMTAPSPSSCNTTVPHMGHTLEGVWSPILSSDLKAHKVSLTSSPGPDGISAKHAAGIPRGIMLRIMNLILWCGDLPGLFRMARTVFIPKSVKASRPQDFRPISVPSIVVRQLNAILAARLTSSVNWDPRQRGFLPTDGCADNATIVDLVLRDHHRRSASCYIATLDVSKAFDSVSHKAVFDTLTAYGAPPGFVDYVRNMYRGGGTYLSGNGWRSEEFIPARGVKQGDPLSPVLFNLIIDRLLRSFPVEIGVSVGNAKTNAAAFADDLMLFASTPKGLQALLDTTVGFLSSVGLTLNAEKCFTVSIKGQPKQKCTVVEPRSFCIGSRTCPALKRSQEWKYLGIKFTAEGRARYSPSEDIGPKLERLTQSPLKPQQKLFALRTVLIPQLFHQLTLGSVSLGVLRKCDRLVRSIVRKWLDLPLDVSAAFFHAPHSDGGLGVPSIRWTAPMLRVKRLCGIKWPHLEQSEVAITFLETEQRKARDRCQAGVNELLSRSKIDSYLANRLHMSVDGSGLREAGRFAPQHGWVVQPTRLLTGKAYLNGIKLRINALPTRSRTTRGRHELGRQCRAGCDAPETLNHILQKCHRTHGRRVARHNGVADFLKKGLESRGYSVIAEPSLQGENRMFKPDLVAFRHDRTIVLDAQVVTDGHDLDRAHQSKVHIYDRQDIRTVLRRDFQAHENIEVVSATLNWRGIWSFQSVTRLRALDVLSASDSTVISARVVSGGVSGFRAFMFHTGFHG

SEQ ID NO: 3612 - protein, 979 aa, Drosophila cardini
MSRQHKDRLDQLRLRVDVKARWNEEELSMMARKEIELTANGERFINKKLAEVFTHRSVDAIKKCRQRDIYKATIEQLRGQAAHIPEANESPTIQRRPSLSESVFPSTSRRAPIAPLNHSDDILMRTLRGLPPVACRRSWRVEVLQSIVDEAQTLGKVATLQRLSNYLQDLFPTRNDRPVPARVSRPVPRNRRQSRRQQYARVQRNWDKHKGRCIKSLLDGTDESTLPNQEIMIPYWKQVMTQPSPSSCRTTVPNMGHLLEGVWSPICIRDLRAHKVSLTSSPGPDGISAKIARDIPNGIMLRIMNLILWCGDLPVLFRMARTVFIPKSARASLPQDFRPISVPSIVVRQLNAILASRLTSSISWDPRQRGFLPTDGCADNATIVDLVLRDHHRRHASCYIGTLDVSKAFDSVSHDAVFDTLVAYGAPKAFVDYVRTTYKGGGTYLSGDGWGSEEFIPARGVKQGDPLSPVLFNLIIDRLLRSFPAEIGVRVGDAKTNAAAFADDLMLFASTPKGLQTLLDTTVDFLSSVGLTLNANKCFTVSIKGQPKQKCTVVEPRSFCIGSRTCPALKRSEEWKYLGIRFSAEGRARYNPSEDIGPKLDILTRSPLKPQQKLFALRTVLIPQLYHKLTLGSVSLGVLRKCDRLVRSIVRKWLDLPLDVSVAFFHAPHICGGLGIPSIRWIAPMLRINRLSGIKWPHLEQSGVASAFLEIEQRKARDRLKAGVNELSSRSKIDSYWANRLHMSVDGSGLREAGRFAPQHGWVVHPTRLLTGKAYLNGIKLRINALPTRSRTTRGRHELERQCRAGCDAPESLNHILQKCHRTHGRRVARHNGVVDRLKKGLEARGFSVIAEPSLQGETRMFKPDLVATRHDKTIVLDAQIVTDGLDLDSAHHSKVAIYDRTDVRTSLRRNFQVHANIEVVSATLNWRGIWSYQSVKRLMALGVLNAGDSNVISARVVSSGVFGFKTFMYHTGFRGGTH

SEQ ID NO: 3613 - protein, 998 aa, Zaprionus kolodkinae
MCVVCGRSFSTKTGLGVHMSRMHKDRFDELRLRVDVKARWNEEEIAMMARKELELIAKGERFINKKLAEVYTHRSVESIKKTRQRDTYKAKIEQFRREAARIPEANNEPSPTPRPSNNEPGPSTRSRLSPIDPLVHSDMVLLRILQDLPPVRCHQSWRVEVLQSIVDRAQVSGKVATLQCLSNYLLDIFPNRNPTPVPARARVRPQPRNRRQDRRQQYASVQRNWDKHKGRCIKSILEGPDESVMPNKEVMEPYWRQVMTQPSTSSYSPETLPWGHLLEDVWSPITIGDLKAHKVSLTTSPGPDGISAKTARSIPNGIMLRIMNLILWCGELPKLFRMARTVFIPKTGKASRPQDFRPITVPSIVVRQLNAILASRLSSSVSWDPRQRGFLPTDGCADNTTIIDLVLRYHHKRFASCYIGTLDVSKAFDAISHQAVITCLNTCGAPKGFVNYIQNMYKGGGTSLKGRGWSSEEFIPARGVKQGDPLSPILFNLVIDRLLRSLPDEIGVKVGNATTNAAAFADDLVLFASTPKGLQKLLDTTVDFLSSVGLTLNADKCFTVSIKGQPKQKCTVVEHRSFSVGSRMCPALKRSEEWKYLGVHFTAEGRARYDPAADLGPKLDRLTKSPLKPQQKMFALRTVLIPQLYHKLTLGSVALGVLRKCDKLVRSTIRKWLDLPMDVSVGFFHAPHISGGLGIPSLRWIAPMLRMKRLENIKWPHLEQSVEANSFLSAELQRARDRCQAGIELLISRTTVDTYWANRLFSSVDGSGLREANRFGAQHGWVSQPTRLLTGKAYLNGIKLRINALPTRSRTTRGRQELARQCRAGCDAPESLNHVLQQCHRTHGRRVARHNNVVTRIKQGLVRRGYVVIAEPSLQGENRIYKPDLVALRHDRTLVLDAQVVTDGLELDRAHQSKIDKYSGQDLQTALRRDHPVHGDIEVVSATLNWRGIWSYRSYTRLRALDVITASDSNIISARVVTDGICGFKMFMHHAGYHRGVT

SEQ ID NO: 3614 - protein, 998 aa, Zaprionus kolodkinae
MCVVCGRSFSTKTGLGVHMSRMHKDRFDELRLRVDVKARWNEEEIAMMARKELELIAKGERFINKKLAEVYTHRSVESIKKTRQRDTYKAKIEQFRREAARIPEANNEPSPTPRPSNNEPGPSTRSRLSPIDPLVHSDMVLLRILQDLPPVRCHQSWRVEVLQSIVDRAQVSGKVATLQCLSNYLLDIFPNRNPTPVPARARVRPQPRNRRQDRRQQYASVQRNWDKHKGRCIKSILEGPDESVMPNKEVMEPYWRQVMTQPSTSSYSPETLPWGHLLEDVWSPITIGDLKAHKVSLTTSPGPDGISAKTARSIPNGIMLRIMNLILWCGELPKLFRMARTVFIPKTGKASRPQDFRPITVPSIVVRQLNAILASRLSSSVSWDPRQRGFLPTDGCADNTTIIDLVLRYHHKRFASCYIGTLDVSKAFDAISHQAVITCLNTCGAPKGFVNYIQNMYKGGGTSLKGRGWSSEEFIPARGVKQGDPLSPILFNLVIDRLLRSLPDEIGVKVGNATTNAAAFADDLVLFASTPKGLQKLLDTTVDFLSSVGLTLNADKCFTVSIKGQPKQKCTVVEHRSFSVGSRMCPALKRSEEWKYLGVHFTAEGRARYDPAADLGPKLDRLTKSPLKPQQKMFALRTVLIPQLYHKLTLGSVALGVLRKCDKLVRSTIRKWLDLPMDVSVGFFHAPHISGGLGIPSLRWIAPMLRMKRLENIKWPHLEQSVEANSFLSAELQRARDRCQAGIELLISRTTVDTYWANRLFSSVDGSGLREANRFGAQHGWVSQPTRLLTGKAYLNGIKLRINALPTRSRTTRGRQELARQCRAGCDAPESLNHVLQQCHRTHGRRVARHNNVVTRIKQGLVRRGYVVIAEPSLQGENRIYKPDLVALRHDRTLVLDAQVVTDGLELDRAHQSKIDKYSGQDVQTALRRDHPVHGDIEVVSATLNWRGIWSYRSYTRLRALDVITASDSNIISARVVTDGICGFKMFMHHAGYHRGVT

SEQ ID NO: 3615 - protein, 1027 aa, Zaprionus camerounensis
MVSSLGNQQRGSIMEVLSNQTSFVCEICGQICRSKGGLGVHMARKHKDELDLARLRVDVKLRWSDEELLMMARKEIELTEHGNIRNINQRLAEAFAPRTVDAIKKCRQRDNYKSKIEQLRGQAALIPIPNVEVAIVRPSESEQDRQVSIPSTVRVNPLERSNSEILRRLQGLGPVECARRWKVDVLQTIIDRAHTLGKSGTLQCLSNYLREIFPVQNRVRTVLSRRSPNRPRNRRQLRRQQYARVQRNWDKHKSRCIKSLLDGPDESVMPNQEIMAPYWREVMTHPNPSNLTSTVVVPMNHLLEGVWDSITPAELKKFSVSLTSSPGPDGITPRVAKSVPSGVMVRIMNLILWCGNIPKAVRPARTIFIPKTVRASLPQDFRPISVPSVLVRQLHAILASRLNSRIQWDPRQRGFLPTDGCADNTTMVDLILRDHHKRHASCYIATLDVSKAFDSVSHAAIITILKSYGVPDELVNYVRTLYKEGSTTLNGVDWCSEEFVPAHGVKQGDPLSPILFNLVIDQLLRTLPREIGVKVGSAMTNAAAFADDLVLFASTPKGLQKLLDTTVDFLSTVGLTLNANKCFTVSIKGQPKQKCTVVVPQTFCVGSRTCPALKRSEEWKYLGIHFTADGRTRYYPSEALKPKLESISKSPLKPQQKLFALRTVLMPQLNHQLTLGSVSIGVLRKCDKLIRFYIRRWLDLPMDVPVAFFHAPHSHGGLGIPSVRYAAPMLRVRRLSNINWPHLEQSGVANAFISAELERARGRCQAEGNELSSRAIINSYWANRLYMSVDGSGLREASHFGPQHGWVSQPTRLLTGKDYLNGIKLRINALPTRSRTTRGRHELGRRCRAGCDAPETTNHILQKCYRTHGRRVARHNSIVKFIKGNLETRGYVVHAEPSLQGDSGLNKPDLVALRHGHAYVIDAQIVTDGHALDQAHQRKVEKYDQRDIKEAVRRDFQVEGNVEVVSATLNWRGIWSGQSVKRLIALGILNASDSNVMSARTVTGGISCYRAFMFYSGYSRFRQYENG

SEQ ID NO: 3616 - protein, 1062 aa, Zaprionus kolodkinae
MFLPGSRYERRNGPWGYQPPGLQPVGANSNNEPRIYYNSSNTPAVLRPGAQQGDAEVLPQNGSSMCVVCGRSFSTKTGLGVHMSRMHKDRFDELRLRVDVKARWNEEEIAMMARKELELIAKGERFINKKLAEVYTHRSVESIKKTRQRDTYKAKIEQFRREAARIPEANNEPSPTPRPSNNEPGPSTRSRLSPIDPLVHSDMVLLRILQDLPPVRCHQSWRVEVLQSIVDRAQVSGKVATLQCLSNYLLDIFPNRNPTPVPARARVRPQPRNRRQDRRQQYASVQRNWDKHKGRCIKSILEGPDESVMPNKEVMEPYWRQVMTQPSTSSYSPETLPWGHLLEDVWSPITIGDLKAHKVSLTTSPGPDGISAKTARSIPNGIMLRIMNLILWCGELPKLFRMARTVFIPKTGKASRPQDFRPITVPSIVVRQLNAILASRLSSSVSWDPRQRGFLPTDGCADNTTIIDLVLRYHHKRFASCYIGTLDVSKAFDAISHQAVITCLNTCGAPKGFVNYIQNMYKGGGTSLKGRGWSSEEFIPARGVKQGDPLSPILFNLVIDRLLRSLPDEIGVKVGNATTNAAAFADDLVLFASTPKGLQKLLDTTVDFLSSVGLTLNADKCFTVSIKGQPKQKCTVVEHRSFSVGSRMCPALKRSEEWKYLGVHFTAEGRARYDPAADLGPKLDRLTKSPLKPQQKMFALRTVLIPQLYHKLTLGSVALGVLRKCDKLVRSTIRKWLDLPMDVSVGFFHAPHISGGLGIPSLRWIAPMLRMKRLENIKWPHLEQSVEANSFLSAELQRARDRCQAGIELLISRTTVDTYWANRLFSSVDGSGLREANRFGAQHGWVSQPTRLLTGKAYLNGIKLRINALPTRSRTTRGRQELARQCRAGCDAPESLNHVLQQCHRTHGRRVARHNNVVTRIKQGLVRRGYVVIAEPSLQGENRIYKPDLVALRHDRTLVLDAQVVTDGLELDRAHQSKIDKYSGQDLQTALRRDHPVHGDIEVVSATLNWRGIWSYRSYTRLRALDVITASDSNIISARVVTDGICGFKMFMHHAGYHRGVT

SEQ ID NO: 3617 - protein, 892 aa, Zaprionus kolodkinae
MNLRQHPALVTMSQALPQDLGYLQSIHWCIRTWSFYGFCRIYPPVRCHQSWRVEVLQSIVDRAQVSGKVATLQCLSNYLLDIFPNRNPTPVPARARVRPQPRNRRQVRRQQYASVQRNWDKHKGRCIKSILEGPDESVMPNKEVMEPYWRQVMTQPSTSSYSPETLPWGHLLEDVWSPITIGDLKAHKVSLTTSPGPDGISAKTARSIPNGIMLRIMNLILWCGELPKLFRMARTVFIPKTGKASRPQDFRPITVPSIVVRQLNAILASRLSSSVSWDPRQRGFLPTDGCADNTTIIDLVLRYHHKRFASCYIGTLDVSKAFDAISHQAGITCLNTCGAPKGFVNYIQNMYKGGGTSLKGRGWSSEEFIPARGVKQGDPLSPILFNLVIDRLLRSLPDEIGVKVGNATTNAAAFADDLVLFASTPKGLQKLLDTTVDFLSSVGLTLNADKCFTVSIKGQPKQKCTVVEHRSFSVGSRMCPALKRSEEWKYLGVHFTAEGRARYDPAADLGPKLDRLTKSPLKPQQKMFALRTVLIPQLYHKLTLGSVALGVLRKCDKLVRSTIRKWLDLPMDVSVGFFHAPHISGGLGIPSLRWIAPMLRMKRLENIKWPHLEQSVEANSFLTAELQRARDRCQAGIELLISRTMVDTYWANRLFSSVDGSGLREANRFGAQHGWVSQPTRLLTGKAYLNGIKLRINALPTRSRTTRGRQELARQCRAGCDAPESLNHVLQQCHRTHGRRVARHNNVVTRINQGLVRRGYVVIAEPSLQGENRIYKPDLVALRHDCTLVLDAQAVTDGLELDRAHQSKIDKYSGQDVQTALRRDHPVHGDIEVVSATLNWRGIWSYRSYTRLRALDVITASDSNIISARVVTDGICGFKMFMHHAGYHRGVP

SEQ ID NO: 3618 - protein, 998 aa, Zaprionus kolodkinae
MCVVCGRSFSTKTGLGVHMSRMHKDRFDELRLRVDVKARWNEEEIAMMARKELELIAKGERFINKKLAEVYTHRSVESIKKTRQRDTYKAKIEQFRREAARIPEANNEPSPTPRPSNNEPGPSTRSRLSPIDPLVHSDMVLLRVLQDLPPVRCHQSWRVEVLQSIVDRAQVSGKVATLQCLSNYLLDIFPNRNPTPVPARARVRPQPRNRRQDRRQQYASVQRNWDKHKGRCIKSILEGPDESVMPNKEVMEPYWRQVMTQPSTSSYSPETLPWGHLLEDVWSPITIGDLKAHKVSLTTSPGPDGISAKTARSIPNGIMLRIMNLILWCGELPKLFRMARTVFIPKTGKASRPQDFRPITVPSIVVRQLNAILASRLSSSVSWDPRQRGFLPTDGCADNTTIIDLVLRYHHKRFASCYIGTLDVSKAFDAISHQAVITCLNTCGAPKGFVNYIQNMYKGGGTSLKGRGWSSEEFIPARGVKQGDPLSPILFNLVIDRLLRSLPDEIGVKVGNATTNAAAFADDLVLFASTPKGLQKLLDTTVDFLSSVGLTLNADKCFTVSIKGQPKQKCTVVEHRSFSVGSRMCPALKRSEEWKYLGVHFTAEGRARYDPAADLGPKLDRLTKSPLKPQQKMFALRTVLIPQLYHKLTLGSVALGVLRKCDKLVRSTIRKWLDLPMDVSVGFFHAPHISGGLGIPSLRWIAPMLRMKRLENIKWPHLEQSVEANSFLSAELQRARDRCQAGIELLISRTTVDTYWANRLFSSVDGSGLREANRFGAQHGWVSQPTRLLTGKAYLNGIKLRINALPTRSRTTRGRQELARQCRAGCDAPESLNHVLQQCHRTHGRRVARHNNVVTRIKQGLVRRGYVVIAEPSLQGENRIYKPDLVALRHDRTLVLDAQVVTDGLELDRAHQSKIDKYSGQDLQTALRRDHPVHGDIEVVSATLNWRGIWSYRSYTRLRALDVITASDSNIISARVVTDGICGFKMFMHHAGYHRGVT

SEQ ID NO: 3619 - protein, 873 aa, Zaprionus kolodkinae
MNLRQHPALVTMDMVLLRILQDLPPLRCHQSWRVEVLQSIVDRAQVSGKVATLQSLSNYLLDIFPNRNPTPVPARARVRPQPRNRRQVRRQQYASVQRNWDKHKSRCIKSILEGPDESVMPNKEVMEPYWRQVMTQPSTFSYSPKTLPWGHLLEDVWSPITIGDLKAHKVSLTTSPGPDEISAKTARSIPNGIMLRIMNLILWCGELPKLFRMARTVFIPKTGKASRPQDFRPITVPSIVVRQLNAILASRLSSSVSWDPRQRGFLPTDGCADNTTIIDLVLRYHHKRFASCYIGTLDVSKAFDAISHQAVITCLNTCGAPKGFVNYIQNIYKGGGTSLKGRGWSSEEFIPARGVKQGDPLSPILFNLVIDRLLRSLPDEIGVKVGNATTNAAAFADDLVLFASTPKGLQKLLDTTVDFLSSVGLTLNADKCFTVSIKGQPKQKCTVVEHRSFSVGSRMCPALKRSEEWKYLGVHFTAEGRARYDPAADLGPKLDRLTKSPLKPQQKMFALRTVLIPQLYHKLTLGSVALGVLRKCDKLVRSTIRKWLDLPMDVSVGFFHAPHISGGLGIPSLRWIAPMLRMKRLENIKWPHLEQSVEANSFLSAELQRARDRCQAGIELLISRTTVDTYWANRLFSSVDGSGLREANRFGAQHGWVSQPTRLLTGKAYLNGIKLRINALPTRSRTTRGRQELARQCRAGCDAPESLNHVLQQCHRTHGRRVARHNNVVTRIKQGLVRRGYVVIAEPSLQGENRIYKPDLVALRHDRTLVLDAQVVTDGLELDRAHQSKIDKYSGQDLQTALRRDHPVHGDIEVVSATLNWRGIWSYRSYTRLRALDVITASDSNIISARVVTDGICGFKMFMHHAGYHRGVT

SEQ ID NO: 3620 - protein, 1042 aa, Drosophila prosaltans; identical to SEQ ID NO: 2941

SEQ ID NO: 3621 - protein, 1042 aa, Drosophila prosaltans
MSHVGESMNSAPRITALTATNSTPTANSLGAQHEPGTAVNPASQVPCMVCGRLFKTSRGLGVHMSHRHKDELDTARRRVDVNLRWSEEEAYLLARKELELEASGNLRYPNKKLAEFFNHRSSEAIKCYRKRGEYKAKLEQLRGQAAHAPEALEPNTTQRRPSSIERRDRVSTTDAPPIMIPQQSNCEILRILQGYRPVVCNPRWRAEVLQSIIDSAPDLGRETTLQRLSIYLLEIFPKPKQVELSRPPRRPRNRRQLRRQQYAAVQRNWDKHNGRCIKSLLDGADESVLPNREIMEPYWREVMSQPSTCSCDNAMFHLEHSLEKVWSAITAHDLRVNKVKLSSSPGPDGISPKTARSIPTGIMLRIMNLILWCGNIPQPIRLARTVFIPKTVTANRPQDFRPITVSSVLVRQLNAILASRLTSSVNWDPRQRGFLPTDGCADNATMVDLILREHHKRWKSCYIATLDVSKAFDSVSHQAVYNTLTAYGAPKDFIDYLRKLYEGGGTTLNGEGWRSEEFVPARGVKQGDPLSPILFNLIIDRLLRSFPDRVGAKVGNAITNAAAFADDLVLFAETPMGLQKLLDITVDFLSSVGLTLNADKCFTVSIKGQAKQKCTVVERRSFCVGSRECPSLKRTEEWKYLGIRFNADGRARFDPADDFGPKLLRLSRAPLKPQQKLFALRTVLIPQLYHKLTLGSVTIGVLRKLDRLVRSTVRRWLDLPLDVSVAFFHAPHTCGGLGIPSLRWTAPMLRLKRLSNIKWPHLEQSEVASSFIDDEMQRARDRLLAGIGRLLTRAEIDSYWANRLHMSVDGSGLREAGHFRQQHGWVCQPTRLVTGKEYLNGIKLRINALPSKSRTTRGRHELGRRCRAGCDAPETTNHILQQCYRTHGRRIVRHNGVVNALKRGLERKGYVVHVEPSLQCETELNKPDLVAIRQNHAYVIDAQVVTDGLSLDDAHQRKVERYDRQDVRTELRRIFGVTGNIEFHSATLNWRGIWSGQSVKRLIAKDLLITGDSNIISVRVVKGGLLCFKQFMHYCGYSRAWT

SEQ ID NO: 3622 - protein, 860 aa, Zaprionus kolodkinae
MVLLRVLQDLPPVRCHQSWRVEVLQSIVDRAQVSGKVATLQCLSNYLLDIFPNLNATPVPARARVRPQPRNRRQVRRQQYASVQRNWDKHKGRCIKSILEGPDESVMPNKEVMEPYWRQVMTQPSTSSYSPETLPWGHLLEDVWSPITIGDLKAHKVSLTTSPGLDGISSKTARSIPNGIMLRIMNLILWCGELPKLFRMARTVFIPKTGKASRPQDFRPITVPSIVVRQLNAILASRLSSSVSWDPRQRGFLPTDGCADNTTIIDLVLRYHHKRFASCYIGTLDVSKAFDAISHQAVITCLNTCGAPKGFVNYIQNMYKGGGTSLKGRGWSSEEFIPARGVKQGDPLSPILFNLVIDRLLRSLPDEIGVKVGNATTNAAAFADDLVLFASTPKGLQKLLDTTVDFLSSVGLTLNADKCFTVSIKGQPKQKCTVVEHRSFSVGSRMCPALKRSEEWKYLGIHFTAEGRARYDPAADLGPKLDRLTKSPFKPQQKIFALRTVLIPQLYHKLTLGSVALGVLRKCDKLVRSTIRKWLDLPMDVSVGFFHAPHFSGGLGIPSLRWIAPMLRMKRLENIKWPHLEQSVEANSFLSAELQRARDRCQAGIELLISRTTVDTYWANRLFSSVDGSGLREANRFGAQHGWVSQPTRLLTGKAYLNGIKLRINALPTRSRTTRGRQELARQCRAGCDAPESLNHVLQQCHRTHGRRVARHNNVVTRIKQGLVRRGYVVIAEPSLQGENRIYKPDLVALRHDRTLVLDSQVVTDRLELDRAHQSKIDKYSGQDVQTALRRDHPVHGDIEVVSATLNWRGIWSYRSYTRLRALDVITASDSNIISARVVTDGICGFKMFMHHAGYHRGVT

SEQ ID NO: 3623 - protein, 859 aa, Zaprionus tsacasi
MEWSNSEILRRLQGLVPVECDRRWQYDVLQTIIDRAHTIGKSATLQCLSNYLRDIFPVQNRASTVLSRSPNRPRNRRQLRRQEYARVQRNYDKNKRRCIKSLLDGPDESVMPIKEMMVPYWRDVMTHPNPSNLTSTVMVPMNHLLEGVWKLITPAELKKFSVSLTSSPGPDGITPRVAIMNLILWCGNIPREIRPARTIFIPKTVKATLPQDFRPISVPSVLVRQLHAILAFRLNSRIQWDPRQRGFLPTDGCADNTTIVDLILRDHHKRHSSCFIATLDVSKAFDSVSHAAIVKILKSYGVPDKLVNYVQNLYKEGSTTLNGVDWCSEEFVPAHGVKQGDPLSPILFNLVIDQLLRTLTPEIGVKVGSAMTNAATFADDLVLFASTPKGLQKLLDTTVDFLSTVGLNLNANKCFTVSIKGQPKQKCTVVIPQTFRVGSRTCPALKRSKEWKYLGIDFTADGRSRYYPSEALKPKLECISKAPLKPQQKLFALRTVLMPQLNHQLTLGSVTIGVLRKCDKIIRFYIRRWLDLPLDVPIAFFHAPHSHGGLGIPSVRYAAPMLRIRRLSNINWPHLEQSEVANGFISAELERARGRCQAGGDVLLSRASINSYWANRLYMSVDGSGLHEAKHFGPQHGWVSQPTRLLTGKDYLNGVKLRTNALPTRSRTTRGRHELERLCRAGCDAPEITNHILQKCYRTHGRRVARHNSIVKFIKGYLETRGYVVHAEPSLQADSGISKPDLVALKQGHAYVIDAQIVTDGYALDQAHQRKVGKYDQPDIKEAVRREFQVANNVELISATLNWRGIWSGQSVKRLIALGILNASDSNVISARTVTGGISCFRTFMFYSGYSRYSPYDNG

SEQ ID NO: 3624 - protein, 1035 aa, Zaprionus tsacasi
MNNNINMPTVNSLGNQQRGSVIEVLVNPTSIECEICGQICRSKGGLGVHMARKHKDELDVARLRVDVKLRWSDEELLMMARKEIELTENGSIRNVNQRLAEAFAPRTVDAIKKCRQRDNYKSKIEQLRGQAALIPIPNVEVAIIRPSLSEQDPQVPISSAALVNPMERSNSEILRRLQGLGPVECDRRWQYDVLQTIVDRAHTIGKSATLQCLSNYLRDIFPVQNRASTVLSRRSPNRPRNRRQLRRQEYARVQRNYDKNKSRCIKSLLDGPDESVMPIKEMMVPYWREVMTHPNPSNLTSTVMVPMDHLLEGVWELITPAELKKFSVSLTSSPGPDGITPRVARSVPSGIMLRIMNLILWCGNIPRAIRPARTIFIPKTVKATLPQDFRPISVPSVLVRQLHAILAFRLNSRIQWDPRQRGFLPTDGCADNTTIVDLILRDHHKRHSSCYIATLDVSKAFDSVSHAAIVKILKSYGVPDELVNYVQNLYKEGSTTLNGVDWCSEEFVPAHGVKQGDPLSPILFNLVIDQLLRTLTPEIGVKVGSAMTNAAAFADDLVLFASTPKGLQKLLDTTVDFLSTVGLTLNANKCFTVSIKGQPKQKCTVVIPQTFRVGSRTCPALKRSEEWKYLGIHFTADGRSRYYPSEALKPKLECISKAPLKPQQKLFALRTVLMPQLNHQLTLGSVSIGVLRKCDKIIRFYIRRWLDLPLDVPVAFFHAPHSHGGLGIPSVRYAAPMLRIRRLSNINWPHLEQSEVANGFISAELERARGRCQAGGDVLLSRASINSYWANRLYMSVDGSGLREASHFGPQHGWVSQPTRLLTGKDYLNGVKLRINALPTRSRTTRGRYELERLCRAGCDAPETTNHILQKCYRTHGRRVARHNSIVKFIKGNLETRGYVVHAEPSLQGDSGISKPDLVALKQGHAYVIDAQIVTDGYALDQAHQRKVEKYDQPDIKEAVRREFQVANNVEVISATLNWRGIWSGQSVKRLIALGILNASDSNVISARTVTGGVSCFRTFMFYSGYSRYLPYDNG

SEQ ID NO: 3625 - protein, 1027 aa, Zaprionus lachaisei
MVNSLGNQQRGSSMEVLSNQTSFICEICGQICRSKGGLGVHMARRHKDELDIARLRVDVKLRWSDEELLMMARKEIELTENGNVRNINQRLAEAFAPRTVDAIKKCRQRDNYKSKIEQLRGQAALIPIPNVEAAINRPSESEQDRQVSIPSTVRVNPLERSNSEILRRLQGLGPVQCARCWKVDVLQTIIDRAHTLGKSGTLQCLSNYLREIFPVQNRVRTALSRRSPNRPRNRRQLRRQQYARVQRNWDKHKSRCIKSLLDGPDESVMPNQEIMAPYWREVMTHPNPSNLTSTVVVPMNHLLEGVWASITPAELKKFSVSLTSSPGPDGITPRVAKSVPSGVMVRIMNLILWCGNIPKAVRPARTIFIPKTVRASLPQDFRPISVPSVLVRQLHAILASRLNSRIQWDPRQRGFLPTDGCADNTTIVDLILRDHHKRHASCYIATLDVSKAFDSVSHAAIITILKSYGVPDELVNYVRTLYKEGSTTLNGVDWCSEEFVPAHGVKQGDPLSPILFNLVIDQLLRTLPREIGVKVGSAITNAAAFADDLVLFASTPKGLQKLLDTTVDFLSTVGLTLNANKCFTVSIKGQPKQKCTVVVPQTFCVGSRTCPALKRSEEWKYLGIHFTADGRTRYYPSEALKPKLECISKSPLKPQQKLFALRTVLMPQLNHQLTLGSVSIGVLRKCDKLIRFYIRRWLDLPMDVPVAFFHAPHSHGGLGIPSVRYTAPMLRVRRLSNINWPHLEQSEVANAFISAELERARGRCQAEGNELSSRAIINSYWANRLYMSVDGSGLREASHFGPQHGWVSQPTRLLTGKDYLNGIKLRINALPTRSRTTRGRHELGRRCRAGCDAPETTNHILQKCYRTHGRRVARHNSIVKFIKGNLETRGYVVHAEPSLQGDSGLNKPDLVALRLGHAYVIDAQIVTDGHSLDHAHQRKVERYDQLDIKEAVRRDFQVEGNVEVVSATLSWRGIWSGQSVKRLIALGILNASDSNVMSARTVTGGISCYRAFMFYSGYSRFRQYENG

SEQ ID NO: 3626 - protein, 1042 aa, Drosophila saltans
MSHVGESMNSAPRITALTATNSTPTANSLGAQHEPGTAVNPASQVPCMVCGRLFKTSRGLGVHMSHRHKDELDTARRRVDVNLRWSEEEAYLLARKELELEASGNLRYPNKKLAEFFNHRSSEAIKCYRKRGEYKAKLEQLRGQAAHAPEALEPNTTQRRPSSIERRDRVSTTDAPPIMIPQQSNCEILRILQGYRPVVCNPRWRAEVLQSIIDSAPDLGRETTLQRLSIYLLEIFPKPKQVELSRPPRRPRNRRQLRRQQYAAVQRNWDKHNGRCIKSLLDGADESVLPNREIMEPYWREVMSQPSTCSCDNAMFHLEHSLEKVWSAITAHDLRVNKVKLSSSPGPDGISPKTARSIPTGIMLRIMNLILWCGNIPQPIRLARTVFIPKTVTANRPQDFRPITVSSVLVRQLNAILASRLTSSVNWDPRQRGFLPTDGCADNATMVDLILREHHKRWKSCYIATLDVSKAFDSVSHQAVYNTLTAYGAPKDFIDYLRKLYEGGGTTLNGEGWRSEEFVPARGVKQGDPLSPILFNLIIDRLLRSFPDRVGAKVGNAITNAAAFADDLVLFAETPMGLQKLLDITVDFLSSVGLTLNADKCFTVSIKGQAKQKCTVVERRSFCVGSRECPSLKRTEEWKYLGIRFNADGRARFDPADDFGPKLLRLSRAPLKPQQKLFALRTVLIPQLYHKLTLGSVTIGVLRKLDRLVRSTVRRWLDLPLDVSVAFFHAPHTCGGLGIPSLRWTAPMLRLKRLSNIKWPHLEQSEVASSFIDDEMQRARDRLLAGIGRLLTRAEIDSYWANRLHMSVDGSGLREAGHFRQQHGWVCQPTRLVTGKEYLNGIKLRINALPSKSRTTRGRHELGRRCRAGCDAPETTNHILQQCYRTHGRRIVRHNGVVNALKRGLERKGYVVHVEPSLQCETELNKPDLVAIRQNHAYVIDAQVVTDGLSLDDAHQRKVERYDRQDVRTELRRIFGVTGDIEFHSATLNWRGIWSGQSVKRLIAKDLLITGDSNIISVRVVKGGLLCFKQFMHYCGYSRAWT

SEQ ID NO: 3627 - protein, 998 aa, Zaprionus tsacasi
MCDVCGRSFSTKTGLGVHMSRMHKDRFDELRLRVDVKARWNEEEIAMMARKELELIAKGERFINKKLAEVYTHRSVESIKKTRQRDTYKAKIEQYRSEAARIPEANNEPSPTPRPSNNEPGPSTRSRLSPIDPLVHSDMVLLRILQDLPPVRCHQLWRVEVLQSIVDRAQVSGKVATLQCLSNYLLDIFPNRNPTSVPARARVRPQPRNRRQVRRQQYASVQRNWDKHKSRCIKSLLEGPDESVMPSKEVMEPYWRQVMTQPSTSSYSPETLPWGHLLENVWSPITIGDLKAHKVSLTTSPGPDGISAKTARSIPNGIMLRIMNLILWCGELPKLFRMARTVFIPKTGKASRPQDFRPITVPSIVVRQLNAILASRLSSSVSWDPRQRGFLPTDGCADNTTIVDLVLRYHHKRFASCYIGTLDVSKAFDAISHQAVINCLNTCGAPKGFVNYIQNIYKGGGTSLKGRGWSSEEFIPARGVKQGDPLSPILFNLVIDRLLRSLPDEIGVKVGNATTNAAAFADDLVLFASTPKGLQKLLDTTVDFLSSVGLTLNADKCFTVSIKGQPKQKCTVVEHRTFSVGSRMCPALKRSEEWKYLGVHFTAEGRARYDPAADLGPKLDRLTKSPLKPQQKMFALRTVLIPQLYHQLTLGSVALGVLRKCDKLVRSTIRKWLDLPMDVSVGFFHAPHISGGLGIPSLRWIAPMLRMKRLENIKWPHLEQSVEANSFLSAELQRARDRCQAGIELLLSRTMVDTYWANRLFSSVDGSGLREANRFGAQHGWVSQPTRLLTGKAYLNGIKLRINALPTRSRTTRGRQELARQCRAGCDAPESLNHVLQQCHRTHGRRVARHNNVVTRIKQGLVRRGYVVIAEPSLQGENRIYKPDLVALRHDRTLVLDAQVVTDGLELDRAHQSKIDKYSGQDLQTALRRDHPVHGEIEVVSATLNWRGIWSYRSYTRLKALDVITASDSNIISARVVTDGVCGFKIFMHHAGYHRGVT

SEQ ID NO: 3628 - protein, 1042 aa, Drosophila saltans; identical to SEQ ID NO: 3621

SEQ ID NO: 3629 - protein, 996 aa, Lordiphosa clarofinis
MCERSFASNRGLGQHMSRTHKDRFDELRLRTDIKARWSDEELWMMARKEIELTANGERFINKALVQFFAPRTVDAIKKCRQRDMYKEKIEQLRGQAAHILTPNETLSIPRRPSLSEQDSLGLPSEGTVAPSMEHSDSEIMRTLQNLGSVRCSDRWRVDDLQSIIDRMQTSSKEATLQCLSNYLREIFPDQNNRPVLARRSVAAPRNRRQFRRQQYAMVQRNWDKHKGRCIKSLLDGPDESVMPNQEVMEPYWKEIMTQPNPSSCSNALFHMEHQLERAWAPITLGELKASKVTLSSSPGPDGISPATARSIPNGIMLRIMNLILWCGKLPKLFRMARTIFIPKMARASRPQDFRPISIPSVMVRQLNAILASRLTTLVDWDPRQRGFLPTDGCADNATIVDLILRDRRRTYSSCYIATLDVSKAFDSVSHAAVFNTLTAYGLPKGFVNYVQNLYKDGGTSLNGEGWRSAEFIPARGVKQGDPLSPPIFNLIIDRLLRSLPEEIGVNVGNAMTNAAAFADDLVLFATTPKGLQKLLDTTVDFLSSVGLTLNADKCFTVSIKGQPKQKCTVVEPRSFRVGLRTCPALKRSGEWKYLGIQFTADGRARFNPSENLGPKLERLSQSPLKPQQKLFALRTVLIPALAHQLTLGSVTIGVLRKCDKLVRAFIRKWLDLPADVSVAFFHASHTSGGLGIPSFRWTAPMWRLSRLTSIKWPHLVQSEVASTFLEEEKRKARARLLEGVNELLSRTKIDEYWANRLHNSVDGSGLREAANFKQQHGWVSQPTRLLTGKEYLNGIKLRINALPSRSRTTRGRRELERQCRAGCDAPETTNHILQKCYRTHGRRILRHNSIVKYLKHGLERRGYVVIAEPSLQGENGLNKPDLVAYRRDRTLVIDAQIVTDGRGTLDQAHQRKVEKYDRQDIRTALRRDFQLDGETEVVSATLSWRGIWSGQSVKRLINLGVINAGDSSVISARVLTGGVYCFRHFMYYYGYSNEIT

SEQ ID NO: 3630 - protein, 996 aa, Lordiphosa clarofinis
MCERSFASNRGLGQHMSRTHKDRFDELRLRTDIKARWSDEELWMMARKEIELTANGERFINKALVQFFAPRTVDAIKKCRQRDMYKEKIEQLRGQAAHILTPNETLSIPRRPSLSEQDSLGLPSEGTVAPSMEHSDSEIMRTLQNLGSVRCSDRWRVDDLQSIIDRMQTSSKEATLQCLSNYLREIFPVQNNRPVLARRSVAAPRNRRQFRRQQYAMVQRNWDKHKGRCIKSLLDGPDESVMPNQEVMEPYWKEIMTQPNPSSCSNALFHMEHQLERAWAPITLGELKASKVTLSSSPGPDGISPATARSIPNGIMLRIMNLILWCGKLPKLFRMARTIFIPKMARASRPQDFRPISIPSVMVRQLNAILASRLTTLVDWDPRQRGFLPTDGCADNATIVDLILRDRRRTYSSCYIATLDVSKAFDSVSHAAVFNTLTAYGLPKGFVNYVQNLYKDGGTSLNGEGWRSAEFIPARGVKQGDPLSPPIFNLIIDRLLRSLPEEIGVNVGNAMTNAAAFADDLVLFATTPKGLQKLLDTTVDFLSSVGLTLNADKCFTVSIKGQPKQKCTVVEPRSFRVGLRTCPALKRSGEWKYLGIQFTADGRARFNPSENLGPKLERLSQSPLKPQQKLFALRTVLIPALAHQLTLGSVTIGVLRKCDKLVRAFIRKWLDLPADVSVAFFHASHTSGGLGIPSFRWTAPMWRLSRLTSIKWPHLVQSEVASTFLEEEKRKARARLLDGVNELLSRTKIDEYWANRLHNSVDGSGLREAANFKQQHGWVSQPTRLLTGKEYLNGIKLRINALPSRSRTTRGRRELERQCRAGCDAPETTNHILQKCYRTHGRRILRHNSIVKYLKHGLERRGYVVIAEPSLQGENGLNKPDLVAYRRDRTLVIDAQIVTDGRGTLDQAHQRKVEKYDRQDIRTALRRDFQLDGETEVVSATLSWRGIWSGQSVKRLINLGVINAGDSSVISARVLTGGVYCFRHFMYYYGYSNEIT

SEQ ID NO: 3631 - protein, 996 aa, Lordiphosa stackelbergi
MCPRSFASNRGLGQHMSRTHKDRFDELRLRTDIKARWSNEELWMMARKEIELTANGERFINKALVQFFAPRTVDAVKKCRQRDIYKEKIEQLRRQAAHIPIPNETQSIPRRPSLSEQDFLGLPSEGTVAPSMEHSDSEIMRTLQSLSSVRCSDRWRVDDLQSIVDRMQTSGKEATLQCLSNYLREIFPDQNNRPVLARRSVAAPRNRRQLRRQQYAWVQRNWDKHKGRCIKSLLDGPDESVMPEQEVMEPYWKEIMTQPNPSTCSNTLFNMEHQLERAWAPITLGELKASKVSLSSSPGPDGISPATARNIPNGIMLRIMNLILWCGKLPKLFRMARTIFIPKMAKASRPQDFRPISVPSVIVRQLNAILASRLTNMVDWDPRQRGFLPTDGCADNATIVDLILRDRRRTYSSCYIATLDVSKAFDSVSHAAVFNTLTAYGLPKGFVDYVRNLYEGGGTSLNGEGWRSAEFIPARGVKQGDPLSPPIFNLIIDRLLRSLPEEIGVNVGNAITNAAAFADDLVLFATTPKGLQKLLDTTVDFLSSVGLTLNADKCFTVSIKGQPKQKCTVVEPRSFRVGLRTCPALKRSEEWKYLGIHFTADGRARFNPSENLGPKLERLSQSPLKPQQKLFALRTVLIPALAHQLTLGSVTIGVLRKCDKLVRAIIRKWLDLPSDVSVAFFHAPHTSGGLGIPSFRWTAPMWRLSRLTSIKWPHLEQSEVASTFLEEEKRKARARLLEGVNELLSRTKIDEYWANRLHKSVDGSGLREAANFKQQHGWVSQPTRLLTGKEYLNGIKLRINALPSRSRTTRGRHELARQCRAGCDAPETTNHILQKCYRTHGRRILRHNSIVKYLKIGLERRGYVVIAEPSLQCENGLNKPDLVAYRHDRTLVIDAQIVTDGHDTLDHAHQRKVEKYDRQDIRTALRRDFRLDGQTEVVSATLNWRGIWSGQSVKRLINLGVITAGDSSVISARVITGGVYCFRHFMYYCGYSNEIT

SEQ ID NO: 3632 - protein, 1093 aa, Lordiphosa collinella
MESCCLSFGNVQKSILHLLVVTLVIIRTVLVRISKASGDPGPCGLPAPWTRLKILVTDRINEPRIMEPRVPSSPVALAMGYQDLPVELQNPLECPCPLCERSFSSKRGLGQHMARTHKNEFDELRRRTDVKARWSDEELWMMARKEIELTANGEKFINKALVQFFAPRTVDAIKKCRQRGIYKEKIEQLRGQAAHTPINNETLSIRRRPSLSEQDLPLTSSEGTVIPSTDHSDSEIMRTLQNFGSVRCSDRWRVDSLQTIVDGMQESGKEATLQCLSNYLREIFPDQNNRPVLARRNAAPPRNRRQARRQEYARVQRNWDKHKGRCIKSLLDGPDESVMPIQEVMEPYWKEVMTQPNPSSCSNASFRMEHLLERAWAPITLGELKASKVELSSSPGPDGISPATARNIPNGIMLRIMNLIIWCGKLPRLFRMARTIFIPKTARASLPQDYRPISIPSVIVRQLNAILATRLTSLVNWDPRQRGFLPTDGCADNATMVDLILRDRRRTYSSCYIATLDVSKAFDSVSHAAVINTLTAYGLPKGFVDYVRNLYEGGGTSLNGEGWRSDEFIPARGVKQGDPLSPPIFNLIIDRLLRSLPNEIGVEVGNVKINAAAFADDLVLFATTPKGLQKLLDTTVDFLSSVGLSLNADKCFTVSIKGQPKQKCVVVEPQTFRVGSRTCPALKRTGEWKYLGIHFTADGRARFSPTEDLGPKLERLSQSPLKPQQKLFALRTVLIPALAHRLTLGSVTIGVLRNCDKLVRAVIRKWLDLPADVSVAFFHAPILSGGLGIPSLRWTAPMWRLSRLTSIKWPHLEQSEVASTFLEEEKRRARARLLEGVNELSSRLKIDEYWANRLHMSVDGSGLREAANFKQQHGWVSQPTRLLTGKEYLNGIKLRINALPSRSRTTRGRHELDRQCRAGCDGPETTNHILQRCYRTHGTRVARHNSVVKYIRSGLIRRGYTVIAEPSLHCESGLKKPDLLAFRHDRTFVIDAQVVTDGQGTLDQAHQRKVEKYDRQDVRTIIGRDFELDGREAEVVSVTLNWRGIWSGQSVRRLIGLGVINAGDSNVISARVVTWGYCFPHFMSHYGFNNGVT

SEQ ID NO: 3633 - protein, 1019 aa, Lordiphosa collinella
MEPRVPSSPVVLATGNQNLPVDLQNPLECPCPLCERSFSSKKGLGQHMARTHKDENDARRLRTDIKARWSDEELLMMARKEIELTANGERFINKALVQFFAPRTVDAIKKCRQRGIYKEKIEQLRGQAAHTPINNETLSIRRRPSLSEQDLPGTSSQQGNVIPSTDHSDSEIMRTLQNLGPVRCSRLWRVDSLQTIVDGMQESGKEATLQCLSNYLREIFPDQNNRPVLARRNAIPPRNRRQARRQEYARVQRNWDKHKGRCIKSLLDGPDESVMPIQEVMEPYWKEVMTQPNPSSCSNASFHMEHLLERAWAPITLGELKASKVELSSSPGPDGISPATARNIPNGIMLRIMNLIIWCGKLPRLFRMARTIFIPKTARASLPQDYRPISIPSVIVRQLNAILATRLTSLVNWDPRQRGFLPTDGCADNATMVDLILRDRRRTYSSCYIATLDVSKAFDSVSHAAVINTLTAYGLPKGFVDYVRNLYEGGGTSLNGEGWRSDEFIPARGVKQGDPLSPPIFNLIIDRLLRSLPNEIGVEVGNVRINAAAFADDLVLFATTPKGLQKLLDTTVDFLSSVGLSLNADKCFTVSIKGQPKQKCVVVEPQTFRVGLRTCPALKRTGEWKYLGIHFTADGRARFSPTEDLGPKLERLSQSPLKPQQKLFALRTVLIPALAHRLTLGSVTIGVLRNCDKLVRAVIRKWLDLPADVSVAFFHAPLLSGGLGIPSLRWTAPMWRLSRLTSIKWPHLEQSEVASTFLEEEKRRARARLLEGVNELSSRLKIDEYWANRLHMSVDGSGLREAANFKQQHGWVSQPTRLLTGKEYLNGIKLRINALPSRSRTTRGRHELDRQCRAGCDGPETTNHILQRCYRTHGTRVARHNSVVKYIRSGLIRRGYTVIAEPSLHCESGLKKPDLLAFRHDRTFVIDAQIVTDGQGTLDQAHQRKVEKYDRQDVRTRLGRDFELDGREAEVVSVTLNWRGIWSGQSVRRLIGLGVINAGDSNVISARVVTWGGIVSATL

SEQ ID NO: 3634 - protein, 994 aa, Lordiphosa clarofinis
MCERSFASNRGLGQHMSRTHKDRFDELRLRTDIKARWSDEELWMMARKEIELTANGERFINKALVQFFAPRTVDAIKKCRQRDMYKEKIEQLRGQAAHILTPNETLSIPRRPSLSEQDSLELPSEGTVAPSMEHSDSEIMRTLQNLGSVRCSDRWRVDDLQSIIDRMQTSSKEATLQCLSNYLREIFPDQNNHPLLARRSVAAPRNRRQLRRQEYAMVQRNWDKHKGRCIKSLLDGPDESVMPNQEVMEPYWKEIMTQPNPSSCSNALFHMEHQLERAWAPITLGELKASKVTLSSSPGPDGISPATARSIPNGIMLRIMNLILWCGKLPKLFRMARTIFIPKMARASRPQDFRPISIPSVMVRQLNAILASRLTTLVDWDPRQRGFLPTDGCADNATIVDLILRDRRRTYSSCYIATLDVSKAFDSVSHAAVFNTLTAYGLPKGFVNYVKNLYKDGGTSLNGEGWRSAEFIPARGVKQGDPLSPPIFNLIIDRLLRSLPEEIGVNVGNAMTNAAAFADDLVLFATTPKGLQKLLDTTVDFLSSVGLTLNADKCFTVSIKGQPKQKCTVVEPRSFRVGLRTCPALKRSGEWKYLGIQSTADGRARFNPSENLGPKLERLLQSPLKPQQKLFALRTVLIPALAHQLTLGSVTTGVLRKCDKLVRAFIRKWLDLPTDVSVAFFHASHTSGGLGIPSFRWTAPMWRLSRLTSIKWPHLVQSEVASAFLEEEKRKARARLLEGVNELLSRTKIDEYWANRLYNSVDGSGLREAANFKQQHGWVSQPTRLLTGKEYLNGIKLRINALPSRSRTTRGRRELERQCRAGCDAPETTNRILQKCYRTHGRRILRHNSIVKYLKHGLERRGYVVIAEPSLQGENGLNKPDLVAYRRDRTLVIDAQIVTDGRGTLDQAHQRKVEKYDRQDIRTALRRDFQLDGETEVVSATLSWRGIWSGQSVKRLINLGVINAGDSSVISARVLTGGYTASATSCIIMGTPTK

SEQ ID NO: 3635 - protein, 1029 aa, Drosophila nasuta
MPRIAESYSVNSPTASVGAHQGRNVDANPVVGHLCVECGRSFRTKTGLGVHMSRQHKDRLDELRTRVDVKTRWCEEELAMMARKELELIANGERFINKKLALHFPERSVDAIKKCRQRDNYKAKIEQLRGQAALIPEISEPQTITRRPSISGLESSSSMSESVPITPSIHSDDVLMRILRGFGPVGCNRSWRVEVLQSIIDGAQTSGKEATLQCLSNYLLEIFPNRNEGPVSARVFPEPRNRRQNRRQQFARVQRNWDKHKGRCIGSLLAGPDESVMPNQEIMEPYWREVMTQQSLSSCNSTVPHMGHLLEGVWSPITSRDLQLHQVPLTSSPGPDGISPRTARSIPSGVMLRIMNLILWCGKLPTLFRMARTVFIPKTVRASRPEDFRPISVPSVIVRQLNAILASRLASSVDWDPRQRGFLPTDGCADNATIVDLILRDHHRRHASCYIATLDVSKAFDSVSHAAVIDTLSAYGAPTGFVDYVRSLYLGGGTSLNGKGWRSEEFVPARGVKQGDPLSPHMFNLVIDRLLRSLPDEIGVSVGNAKTNAAAFADDLVLFASTPKGLQALLDTTVSFLASVGLTLNANKCFTVSVKGQPKQKCTVIESRSFCVGSRTCPSLKRSEEWRYLGIQFTADGRARYNPTEDIGPRLDIISRSPLKPQQKLFTLRTVLIPQLYHKLTLGSVAIGVLRKCDRLVRSVVRKWLDLPMDVSVAFFHAPHTSGGLGVPSVRRTAPMLRIQRLTNIKWPHLEQSETASSFLSAEIRRARDRCKASGDADTRLLIDSYWADRLHSSVDGSGLREAGRYAPQHGWVVAPTRLLTGKAYLNGIKLRINALPTRSRTTRGRHELERQCRAGCDAPESLNHILQKCHRTHGRRVARHNSVANYLKRGLETRGYSVIAEPSLQGENRIYKPDLVGFRPDHTIVIDAQVVTDGLDLDQAHQSKVEIYDRQDVRTALVRDYRAHEDIKIVSATLNWRGIWSYRSVKRLIALGVLNAGDSNIISTRVVDGGVCGFKTFMFHTGYRQGVG

SEQ ID NO: 3636 - protein, 985 aa, Drosophila saltans
MVCGRLFKTSRGLGVHMSHRHKDELDTARRRVDVNLRWSEEEAYLLARKELELEASGNLRYPNKKLAEFFNHRSSEAIKCYRKRGEYKAKLEQLRGQVAHAPEALGPNTTQRRPSSIERRDRVSTTDAPPIMIPQQSNCEILRILQGYRPVVCNPRWRAEVLQSIIDSAPDLGRETTLQRLSIYLLEIFPKPKQVELSRPPRRPRNRRQLRRQQYAAVQRNWDKHNGRCIKSLLDGADESVLPNREIMEPYWREVMSQPSTCSCDNAMFHLEHSLEKVWSAITAHDLRVNKVKLSSSPGPDGISPKTARSIPTGIMLRIMNLILWCGNIPQPIRLARTVFIPKTVTANRPQDFRPITVSSVLVRQLNAILASRLTSSVNWDPRQRGFLPTDGCADNATMVDLILREHHKRWKSCYIATLDVSKAFDSVSHQAVYNTLTAYGAPKDFIDYLRKLYEGGGTTLNGEGWRSEEFVPARGVKQGDPLSPILFNLIIDRLLRSFPDRVGAKVGNAITNAAAFADDLVLFAETPMGLQKLLDITVDFLSSVGLTLNADKCFTVSIKGQAKQKCTVVERRSFCVGSRECPSLKRTEEWKYLGIRFNADGRARFDPADDFGPKLLRLSRAPLKPQQKLFALRTVLIPQLYHKLTLGSVTIGVLRKLDRLVRSTVRRWLDLPLDVSVAFFHASLRWTAPMLRLKRLSNIKWPHLEQSEVASSFIDDEMQRARDRLLAGIGRLLTRAEIDSYWANRLHMSVDGSGLREAGHFRQQHGWVCQPTRLVTGKEYLNGIKLRINALPSKSRTTRGRHELGRRCRAGCDAPETTNHILQQCYRTHGRRIVRHNGVVNALKRGLERKGYVVHVEPSLQCETELNKPDLVAIRQNHAYVIDAQVVTDGLSLDDAHQRKVERYDRQDVRTELRRIFGVTGNIEFHSATLNWRGIWSGQSVKRLIAKDLLITGDSNIISVRVVKGGLLCFKQFMHYCGYSRAWT

SEQ ID NO: 3637 - protein, 983 aa, Drosophila serrata
MSRLHKNEFDELRRREDVNLRWSEEEKWMMARKEFELAASGILRHANKQLAEFFTHRSVEAIKKIRQRGDYKAKMEQIRGQSVSTPEVADTRTTQRRPSNSEQEHRVPTSEAPPIIPSEQSGEIMRKLRGLRPVVCNPLWRAEVLQSIVDRAEGLGKETTLQCLSNYLLEIFPARNAPHILTRPPRRPRNRRQSRRQQYARVQRNWDKHKGRCIKSLLDGADESVMPNQECMEPYWREVMTRPSPCSCGNVVFPMEHLHERVWSAITERDLRANKVPLSSSPGPDGISPKTARSIPTGIMLRIMNLVLWCGNLPQPSRLARTVFIPKTVTATRPQDFRPITVPSVLVRQLNAILASRLTSSINWDSRQRGFQPTDGCADNATMVDLILRESHKSCKSCYIATLDVSKAFDSLSHAAIINTLTAYGLPKDFIDYVQKTYEVGGTTLNGDGWSSEVIKPARGVRQGDPLSPILFNLVMDRLLRCLPKEIGVKVGNAMTNAAAFADDIVLFAETPMGLQKLLDKTVEFLGTVGLTLNADKCFTIGIKGQPKQKCTVVTQHSFRIGLRECPSLKRTDEWKYLGICFTAEGRVRYNPAEDLGPKLLRLTRAPLKPQQKLFALRTVLIPQLFHKLTLGSVTIGVLRKFDKLVRFYIRKWLDLPGDVSVAYFHAPHNCGGLGIPSLRWLAPMLRLKRLSNIRWPNLEQSEVVSSFLENEMQRARVRLRAGNVELLSRLEIESYWANRLHMSVDGSGLREAGKFHPQHGWVSQPTRLLTGKEYLNGIKLRINALPSKSRTTRGRHELDRRCRAGCDASETTNHILQKCYRTYGRRIARHNSVVNSIKLGLERKGCVVHVEPSLQCESGLNKPDLVALRHNRIYVIDAQVVTDGHSIDDAHQRKIERYDRQDIRTELRRRFGEASGIEFHSATLNWRGIWSNRSVKRLIASDLLTTSDSNIISVRVVKGGIYCFRHFMYWNGYSRRLGNGRH

SEQ ID NO: 3638 - protein, 980 aa, Drosophila paulistorum
MSHQHKDELDTQRQREDVKLRWSEEEACMMARKEVELEASGNLRFPNKKLAEVFTHRSSEAIKCFRKRGEYKAKLEQIRGQSTPTPEALDSNTSQRRPSLIERHHQVSSSEARPINPSEEQSNWEILRILQGYRPVECSPRWRAQVLQSIVDSAQTAGKETTLQCLSNYLLDIFPSPNEPHTIRPRNSRGHQTRRQLRQQEYAQVQRRWDKNTGRCIRSLLDGTDESVMPNQEIMEPYWKQIMTNPSTCSCDNTRFRMEHSLETVWSAITLRDLRENKLKLSSSPGPDGVTPRTARSVPSGIMLRIMNLILWCGKIPYSTRLARTIFIPKTVMANRPQDFRPITVPSVLVRQLNAVLASRLASKVSWDPRQRGFLPTDGCADNATLVDLILREHHKRWKSCYLATVDVSKAFDSVSHQAIIKTLQAYGAPANFVSFIAEQYKGGGTSLNGAGWSSEVFIPASGVKQGDPLSPILFNLIIDRLLRSYPKEIGAKVGNTITSAAAFADDLVLFAETPMGLQKLLDTTVGFLASVGLTLNSDKCFTISIKGQAKQKCTVVERRSFCVGERECPSLKRTEEWKYLGIRFTADGRARYSPADDLGPKLLRLTRAPLKPQQKLFALRTVLIPQLYHQLTLGSVRIGVLRKCDRLVRQFVRRWLDLPLDVPTAFYHAPHIYGGLGIPSIRWIAPMLRLKRLSNIKWPHLEQSEVASSFIDDELQRARDRLKAEDMELGSRPEIDSYFANRLYMSVDGCGLREAGHYGPQHGWVSQPTRLLTGKEYLHGVKLRINALPSKSRTTRGRHELERRCRAGCDAPETTNHILQKCYRTHGRRVARHNSVVNAVKRGLEGRGCVVHVEPSLQCDSGLHKPDLVGIRQNHMYVIDVQVVTDGHSLDQAHQRKVERYDRADIRSQMRRSFGATGDIEFHSVTLNWRGIWSGQSVKRLIAKDLLIASDTNIISVRAVTGGVTSFKYFMYCAGYTRS

SEQ ID NO: 3639 - protein, 980 aa, Drosophila paulistorum
MSHQHKDELDTQRQREDVKLRWSEEEAWMMARKEVELEASGNLRFPNKKLAEVFTHRSSEAIKCFRKRGEYKAKLEQIRGQSTPTPEALDSNTSQRRPSLIERHHQVSSSEARPINPSEEQSNWEILRILQGYRPVECSPRWRAQVLQSIVDSAQTAGKETTLQCLSNYLLDIFPSPNEPHTIRPRNSRGHQTRRQLRQQEYAQVQRRWDKNIGRCIRSLLDGTDESVMPNQEIMEPYWKQIMTNPSTCSCDNTRFRMEHSLETVWSAITLRDLRENKLKLSSSPGPDGVTPRTARSVPSGIMLRIMNLILWCGKLPYSTRLARTIFIPKTVTANRPQDFRPITVPSVLVRQLNAVLASRLASKVSWDPRQRGFLPTDGCADNATLVDLILREHHKRWKSCYLATVDVSKAFDSVSHQAIIKTLQAYGAPANFVSFIAEQYKGGGTSLNGAGWSSEVFIPAGGVKQGDPLSPIPFNLIIDRLLRSYPKEIGAKVGNTITSAAAFADDLVLFAETPMGLQKLLDTTVGFLASEGLTLNPDKCFTISIKGQAKQKCTVVERRSFCVGERECPSLKRTEEWKYLGIRFTADGRARYSPADDLGPKLLRLTRAPLKPQQKLFALRTVLIPQLYHQLTLGSVRIGVLRKCDRLVRQFVRRWLDLPLDVPTAFYHAPHIYGGLGIPSIRWIAPMLRLKRLSNIKWPHLEQSEVASSFIDDELQRARDRLKAEDMELGSRPEIDSYFANSLYMSVDGCGLREAGHYGPQHGWVGQPTRLLTGKEYLHGVKLRINGLPSKSRTTRGRHELERRCRAGCDAPETTNHILQKCYRTHGRRVARHNSVVNDVKRGLEGRGCVVHVEPSLQCDSGLHKPDLVGIRQNHMYVIDVQVVTDGHSLDQAHQRKVERYDRADIRSQMRRSFGATGDIEFHSVTLNWRGIWSGQSVKRLIAKDLLIASDTNIISVRAVTGGVTSFKYFMYCAGYTRS

SEQ ID NO: 3640 - protein, 980 aa, Drosophila paulistorum
MSHQHKDELDTQRQREDVKLRWSEEEAWMMARKEVELEASGNLRFPNKKLAEVFTHRSSEAIKCFRKRGEYKAKLEQIRGQSTPTPEALDSNTSQRRPSLIERHHQVSSSEARPINPSEEQSNWEILRILQGYRPVECSPRWRAQVLQSIVDSAQTAGKETTLQCLSNYLLDIFPSPNEPHTIRPRNSRGHQTRRQLRQQEYAQVQRRWDKNTGRCIRSLLDGTDESVMPNQEIMEPYWKQIMTNPSTCSCDNTRFRMEHSLETGWSAITLRDLRENKLKLSSSPGPDGVTPRTARSVPSGIMLRIMNLILWCGKLPYSTRLARTIFIPKTVKANRPQDFRPITVPSVLVRQLNAVLASRLASKVSWDPRQRGFLPTDGCADNATLVDLILREHHKRWKSCYLATVDVSKAFDSVSHQAIIKTLQAYGAPENFVSFIAEQYKGGGTSLNGAGWSSEVFIPASGVKQGDPLSPILFNLIIDRLLRSYPKEIGAKVGNTITSAAAFADDLVLFAETPMGLQKLLDTTVGFLASVGLTLNSDKCFTISIKGQAKQKCTVVERRSFCVGERECPSLKRTEEWKYLGIRFTADGRARYSPADDLGPKLLRLTRAPLKPQQKLFALRTVLIPQLYHQLTLGSVRIGVLRKCDRLVRQFVRRWLDLPLDVPTAFYHAPHIYGGLGIPSIRWIAPMLRLKRLSNIKWPHLEQSEVASSFIDDELQRARDRLKAEDMELGSRPEIDSYFANRLYMSVDGCGLRESGHYGPQHGWVSQPTRLLTGKEYLHGVKLRINALPSKSRTTRGRHELERRCRAGCDAPETTNHILQKCYRTHGRRVARHNSVVNAVKRGLEGRGCVVHVEPSLQCDSGLHKPDLVGIRQNHMYVIDVQVVTDGHSLDQAHQRKVERYDRADIRSQMRRSFGATGDIEFHSVTLNWRGIWSGQSVKRLIAKDLLIASDTNIISVRAVTGGVTSFKYFMYCSGYTRS

SEQ ID NO: 3641 - protein, 960 aa, Drosophila paulistorum
MSHQHKDELVTQRQREDVKLRWSEEEAWMMARKEVELEASGKLRFPNKKLAEVFTHRSSEAIKCFRKRGEYKAKLEQIRGQSTPTPEALDSNTSQRRPSLIERHHQVSSSEARPINPSEEQSNWEILRILQGYRPVECNPRWRDQVLQSIVDSAQTAGKETTLQCLSNYLLDIFPSPNEPHTIRPRNLRRHQTRRQLKQQEYAQVQRRWDKNTGRFIRSLLDGIDESVMPNQEIMEPYWKQIMTNPSTCSCDNTRFRMEHSLETVWSAITLRDLRENKLKLSSSPGPDGVTPRTARSVPLGIMLRIMNLILWCGKLPYSTRLARTIFIPKTVKANRPQDFRPITVPSVLLRQLNAVLASRLASKVSWDPRQRGFLPTDGCADNATLVDLILREHHKRWKSCYLATVDVSKAFDSVSHQAIIKTLQAYGAPENFVSFIAEQYKGGGTSLNGAGWSSKVFIPASGVKQGDPLSPILFNLIIDRLLRSYPKEIGAKFGNTITSAASFADDLVLFAETPMGLQKLLDTTVGFLASVGLTLNSDKCFTISIKGQAKQKCTVVERRSFCVGERECPSLKRTEEWKYLGIRFTADGRARYSPADDLGPKLLRLTRAPLKPQQKLFALRTVLIPQLYHQLTLGSVRISVLKKCDRLVRQFVRRWLDLPLDVPTAFYHAPHIYGGLGIPSIRWIAPMLRLKRLGNIKWPHLEQSEVASSFIDDELQRARDRLKAEGMELDSRPEIDSYFANRLYMSVDGCGLREAGHYGPQNGWVSQPTRLLTGKEYLHGVKLRINALPSKSRTTRGRHELERRCRAGCDAPETTNHILQKCYRTHGRRVARHNSVVNAVKRGLEGRGCVVHVEPSLQCDSGLHKPDLVGIRQNHMYVIDAQVVTDGHSLDQAHQRKVERYDRADIRSQMRRSFGATGDIEFHSVTGPPALGGGIPAALPSSEASMPLRAALRLTCWCV

SEQ ID NO: 3642 - protein, 980 aa, Drosophila sucinea
MSHQHKDELDEQRQRVDVKLRWSEEEAWMMARKEVELEASGNLRFPNKKLAEVFTHRSSEAIKSFRKRGEYRAKLEQIRGQSAPTPEAADSITTQRRPSSIELDHQVSRSEAPPINLSEQSNCEIMRILQGYHPVECNPRWRAEVLQSIIDRAVTLGKEPTLQCLSNYLLDIFPPPNEPHTITRPPRRPRNRRQCRSQEYARVQRNWDKHNGRCIKSLLEEVDESVMPNQEIMEPYWREVMTTPSTCSCDNAMFHMEHSLEPVWSAITVSDLRVNKIKLSGSPGPDGITPRTARSIPTGIMLRIMNLILWCGKLPQPIRLARTIFIPKLATANQPQDYRPITVPSVLVRQLNAILASRLTAAVNWDPRQRGFLPTDGCADNATLVDLILREHHQRWKSCYLATVDVSKAFDSVSHQAVYRILKSYGAPSNFVNYIKQMYEGGGTTLNGEGWRSGVFIPARGVKQGDPLSPIIFNLVIDRLLRSFPKEIGAKVGNTMTNAAAFADDLVLFAETPMGLQKLLDLTVEFLSTVGLTLNADKCFTVSVKGQPKQKCTVVERRSFRVGQRECPSLKRTEEWKYLGIRFTADGRARYSPADDLGPKLLRLTRAPLKPQQKLFALRTILIPQLYHKLTLGSVTIGVLRKCDKLVRTFVRRWLDLPLDVVVAFFHAPHKCGGLGIPSFRWISPMLRLNRLSNIKWPHLEQSEVASSFLDSELRRARDRLKAESGQLQSRLEIDSYFANRLHMSVDGCGLREAGHFGQQHGWVSQPTRLLTGKEYLNGIKLRINALPSKSRTTRGRHELERRCRAGCDAPETTNHILQKCYRTHGRRIARHNSAVNAIKRGLERKGCVVHVEPSLHCESGLNKPDLVAIRQNHIYVIDAQVVTDGHSLDQAHQRKVERYDNEEIRSELRRFFRVTGDIEFHSATLNWRGIWSGQSIKRLVAKDLLTTGDSNIISVRVVTGGVTSFKYFMHCCGYSRARA

SEQ ID NO: 3643 - protein, 857 aa, Drosophila takahashii
MRTLQGYRQIVGCNSKWRAQQLQHIIDVAQFEGKETTLQSLSGYLQDIFPIQNERHILSRPPRRPRNRRETRRQQFAQTQRNWDKHKGRCIKSLLNGTDESVMPNREYMEPYWREVMTRPSPCSCADEVIQDGHLHERVWSAVTVRDLRANKVSLSSAPGPDGISPKSVKEVPSCIMLRILNLILWCGKLPDFIRPARTIFIPKTATANRPQDFRPITVPSVLVRQLNAILATRLTSSINWDPRQRGFLPTDGCADNATIVDLILRNSHRKYKSCYIATLDVSKAFDAVSHAAVTNTMTAYGLPKDFVDYVQKTYEGGGTTLNGEGWMSEEFVPARGVKQGDPLSPILFNLIIDRLLRSLPNEIGAKLGNTMTNAAAFADDLVLFAETRMGLQTLLDHTVGFLASVGLNLNADKCFTISIKGQPKQKCTVVDRHVFRIGLNECPALKRTDEWKYLGIIFNANGRVRYNPAEDLGPKLMRLTRAPLKPQQKLFALRTILIPQLYHKLTLGSVTIGVLRKFDKLVRFYVRRWLSLPLDVPVAFIHAPHVCGGLGIPSIRWMAPMLRLRRLSSIKWPHLEQSEIASSFIEDEKRRARVRLLAEHTELLSRPAIEKYFANRLYMSVDGSGLREAEHYAPQHGWVSQPTRLLTGKEYLNGIRIRINALPSKSRTTRGRHELDRQCRAGCDASETTNHIMQKCYRTHGRRVARHNCVVNSIKVGLERRGCVVIVEPSLHCESGLNKPDLVVIRDNRIHVIDAQVVTDGQSIDEAHQRKIKRYDRPDIRTELRRRFGAICEIEFHSATLNWRGIWSGQSVKRLIATDLLSRHESHMISIRVIRGSHNCFTQFMCLSGYIRGGRS

SEQ ID NO: 3644 - protein, 980 aa, Drosophila paulistorum
MSHQHKDELDTQRQREDVKLRWSEEEAWMMARKEVELEASGNLRFPNKKLAEVFTHRSSEAIKCFRKRGEYKAKLEQIRGQSTPTPEALDSNTSQRRPSLIERHHQVSSSEARPINPSEEQSNWEILRILQGYRPVECSPRWRAQVLQSIVDSAQTAGKETTLQCLSNYLLDIFPSPNEPHTIRPRNSRGRQTRRQLRQQEYAQVQRRWDKNTGRCIRSLLDGTDESVMPNQEIMEPYWKQIMTNPSTCSCDNTRFRMEHSLETVWSAITLRDLRENKLKLSSSPGPDGVTPKTARSVPSGIMLRIMNLILWCGKLPYSTRLARTIFIPKTVMANRPQDFRPITVPSVLVRQLNAVLASRLASKVSWDPRQRGFLPTDGCADNATLVDLILREHHKRWKSCYLATVDVSKAFDSVSHQAIIKTLQAYGAPANFVSFIAEQYKGGGTSLNGAGWSSEVFIPASGVKQGDPLSPILFNLIIDRLLRSYPKEIGAKVGNTITSAAAFADDLVLFAETPMGLQKLLDTTVGFLASVGLTLNSDKCFTISIKGQAKQKCTVVERRSFCVGERECPSLKRTEEWKYLGIRFTADGRARYSPADDLGPKLLRLTRAPLKPQQKLFALRTVLIPQLYHQLTLGSVRIGVLRKCDRLVRQFVRRWLDLPLDVPTAFYHAPHIYGGLGIPSIRWIAPMLRLKRLSNIKWPHLEQSEVASSFIDDELQRARDRLKAEDMELGSRPEIDSYFANRLYMSVDGCGLREAGHYGPQHGWVSQPTRLLTGKEYLHGVKLRINALPSKSRTTRGRHELERRCRAGCDAPETTNHILQKCYRTHGRRVARHNSVVNAVKRGLEGRGCVVHVEPSLQCDSGLHKPDLVGIRQNHMYVIDVQVVTDGHSLDQAHQRKVERYDRADIRSQMRRSFGATGDIEFHSVTLNWRGIWSGQSVKRLIAKDLLIASDTNIISVRAVTGGVTSFKYFMYCAGYTRS

SEQ ID NO: 3645 - protein, 980 aa, Drosophila sucinea
MSHLHKDELDEQRQRVDVKLRWSEEEAWMMARKEVELEASGNLRFPNKKLAEVFTHRSSEAIKAFRKRGEYRAKLEQIRGQSAPTPEAADSITTQRRPSSIELDHQISRSEAPPINPSEQSNYEIMRTLQGYRPVECNPRWRAEVLQVIIDRAATLGKEPTLQCLSNYLLDIFPTPNEPHTITRPPRRPRNRRQCRSQEYARVQRNWDKHNGRCIKSLLEEVDESVMPTQEIMEPYWREVMTTPSTCSCDNAMFHMEHSLETVWSAITESDLRVNKIKLSGSPGPDGITPKTARSIPTGIMLRIMNLILWCGKLPQPIRLARTIFIPKSATANQPQDYRPITVPSVLVRQLNAILASRLTAAVNWDPRQRGFLPTDGCADNATLVDLILREHHQRWKSCYLATVDVSKAFDSVSHQAVYKILKSYGAPSNFVNYIKQMYEGGGTTLNGEGWRSEVFIPARGVKQGDPLSPIIFNLVIDRLLRSFPKEIGAKVGNTMTNAAAFADDLVLFAETPMGLQKLLDLTVEFLSTVGLTLNADKCFTVSVKGQPKQKCTVVERRSFRVGQRECPSLKRTEEWKYLGIRFTADGRARYGPADDLGPKLLRLTRAPLKPQQKLFALRTILIPQLYHKLTLGSVTIGVLRKCDKLVRTFVRRWLDLPLDVVVAFFHAPHKCGGLGIPSFRWISPMLRLNRLSNIKWPHLEQSEVASSFLDSELRRARDRLKAESGQLQSRLEIDSYFANRLHMSVDGCGLREAGHFGQQHGWVSQPTRLLTGKEYLNGIKLRINALPSKSRTTRGRHELERRCRAGCDAPETTNHILQKCYRTHGRRVARHNSVVNAIKRGLERKGCVVHVEPSLHCESGLNKPDLVAIRQNHIYVIDAQVVTDGHSLDQAHQRKVERYDKEDIRSEMRRFFRTTGDIEFHSATLNWRGIWSGQSIKRLVTKDLLTTGDSNIISVRVVTGGVTSFKYFMHCCGYSRASA

SEQ ID NO: 3646 - protein, 990 aa, Drosophila ananassae
MTFSSKRGLGVHMSHRHKDDLDAQRLRVDKKARWSEEETLMMARKEVELAASGVRFLNKKLAEIFTHRSADAISSYRKRSEYKAKLEQIRGQSVPTPEAEEINTTQRRPSNSEQNRRVPRSEGGPIAPTEQTNNEILRVLQGLAPVVCLPRWRAEVLQNIVDNAQVSGQETTLQSLSSYLMEIFPPRNEPHILTRPRTEPRNMRQRRRQQYARVQRNWDKHPGRCIKSLLEEDDESVMPNQEVMEPYWRRVMTQPSSSSIKRDMFNMEHSLERVWSAVNQRDLRATKVKLSSSPGPDGITPKTARSVPEGIMLRIMNLILWCGNLPYSIRLARTIFIPKKATANQPQDYRPISVPSVIVRQLNAILASRLSAAINWDTRQRGFLPTDGCADNTTIVDLVLREHHKRFKSCYIGTLDVSKAFDAVAHEAVYNTLASYGAPKGFINYLRKAYEGGGTMLAGNGWVSEAFIPARGVKQGDPLSPILFNLVIDRLLRSLPSEIGAKVGNAMTNAAAFADDIVLFAETPMGLQKLLDTTVCFLSSVGLTLNTDKCFTVSIKGQAKQKCTVVERRSFLIGGRECPSLKRTDEWKYLGIKFTAEGRARYDPAEDLGPKLLRLTRAPLKPQQKLFALRTVLIPQLYHKLTLGSVTIGVLKKFDKLVRYTARKWLGLPVDVPVSFFHAPHKSGGLGLPSLRWTAPMLRLKRLSNIKWPHLERSEVASSFVEEEMRRARDRLQAGSEELLTRSQVDSYLANRLHMSVDGCGLREAERFAPQHGWVSQPTRLLTGKEYTDGIKLRINALPSRSRTTRGRHELERRCRAGCDAPETTNHILQQCYRTHGRRIARHNGVVNFLKRGLERRGCVVHVEPSLQGETGLNKPDLVAIRQNRIYVIDTQIVTDGHSLDQAHQRKVGKYDTPDIRTNLRRSFGAFDIEFHSATVNWRGIWSGQSVKRLIASDLLSSGDSNIISVRVISGGLWSWRQFMYLSGYTRDWT

SEQ ID NO: 3647 - protein, 980 aa, Drosophila paulistorum
MSHQHKDELDTQRQREDVKLRWSEEEAWMMARKEVELEASGNLRFPNKKLAEVFTHRSSEAIKCFRKRGEYKAKLEQIRGQSTPTPEALDSNTSQRRPSLIERHHQVSSSEARPINPSEEQSNWEILRILQGYRPVECSPRWRAQVLQSIVDSAQTAGKETTLQCLSNYLLDIFPSPNEPHTIRPRNSRGHQTRRQLRQQEYAQVQRRWDKNTGRCIRSLLDGTDESVMPNQEIMEPYWKQIMTNPSTCSCDNTRFRMEHSLETVWSAITLRDLRENKLKLSSSPGPDGVTPRTARSVPSGIMLRIMNLILWCGKIPYSTRLARTIFIPKTVMANRPQDFRPITVPSVLVRQLNAVLASRLASKVSWDPRQRGFLPTDGCADNATLVDLILREHHKRWKSCYLATVDVSKAFDSVSHQAIIKTLQAYGAPANFVSFIAEQYKGGGTSLNGAGWSSEVFIPASGVKQGDPLSPILFNLIIDRLLRSYPKEIGAKVGNTITSAAAFADDLVLFAETPMGLQKLLDTTVGFLASVGLTLNSDKCFTISIKGQAKQKCTVVERRSFCVGERECPSLKRTEEWKYLGIRFTADGRARYSPADDLGPKLLRLTRAPLKPQQKLFALRTVLIPQLYHQLTLGSVRIGVLRKCDRLVRQFVRRWLDLPLDVPTAFYHAPHIYGGLGIPSIRWIAPMLRLKRLSNIKWPHLEQSEVASSFIDDELQRARDRLKAEDMELGSRPEIDSYFANRLYMSVDGCGLREAGHYGPQHGWVSQPTRLLTGKEYLHGVKLRINALPSKSRTTRGRHELERRCRAGCDAPETTNHILQKCYRTHGRRVARHNSVVNAVKRGLEGRGCVVHVEPSLQCDSGLHKPDLVGIRQNHMYVIDVQVVTDGHSLDQAHQRKVERYDRADIRSQMRRSFGATGDIEFHSVTLNWRGIWSGQSVKRLIAKDLLIASDTNIISVRAVTGGVTSFKYFMYCAGYTRS

SEQ ID NO: 3648 - protein, 972 aa, Drosophila paulistorum
MSHQHKDELDTQRQREDVKLRWSEEEAWMMARKEVELEASGNLRFPNKKLAEVFTHRSSEAIKCFRKRGEYKAKLEQIRGQSTPTPEALDSNTSQRRPSLIERHHQVSSSEARPINPSEEQSNWEILRILQGYRPVECSPRWRAQVLQSIVDSAQTAGKETTLQCLSNYLLDIFPSPNEPHTIRPRNSRGHQTRRQLRQQEYAQVQRRWDKNTGRCIRSLLDGTDESVMPNQEIMTNPSTCSCDNTRFRMEHSLETVWSAITLRDLRENKLKLSSSPGPDGVTPRTARSVPSGIMLRIMNLILWCGKIPYSTRLARTIFIPKTVMANRPQDFRPITVPSVLVRQLNAVLASRLASKISWDPRQRGFLPTDGCADNATLVDLILREHHKRWKSCYLATVDVSKAFDSVSHQAIIKTLQAYGAPANFVSFISEQYKGGGTSLNGAGWSSEVFIPASGVKQGDPLSPILFNLIIDRLLRSYPKEIGAKVGNTITSAAAFADDLVLFAETPMRLQKLLDTTVGFLASVGLTLNSDKCFTISIKGQAKQKCTVVERRSFCVGERECPSLKRTEEWKYLGIRFTADGRARYSPADDLGPKLLRLTRAPLKPQQKLFALRTVLIPQLYHQLTLGSVRIGVLRKCDRLVRQFVRRWLDLPLDVPTAFYHAPHIYGGLGIPSIRWIAPMLRLKRLSNIKWPHLEQSEVASSFIDDELQRARDRLKAEDMELGSRPEIDSYFANRLYMFVDGCGLREAGHYYPQHGWVSQPTRLLTGKEYLHGVKLRINALPSKSRTTRGRHELERRCRAGCDAPETTNHILQKCYRTHGRRVARHNSVVNAVKRGLEGRGCVVHVEPSLQCDSGLHKPDLVGIRQNHMYVIDVQVVTDGHSLDQAHQRKVERYDRADIRSQMRRSFGATGDIEFHSVTLNWRGIWSGQSVKRLIAKDLLIASDTNIISVRAVTGGVTSFKYFMYCAGYTRS

SEQ ID NO: 3649 - protein, 983 aa, Drosophila aff.
MSRLHKNEFDVLRRREDVNLRWSEEEKWMMARKEFELAASGVLRHANKQLAEVFTNRSVEAIKKIRQRSDYKAKMEQIRGQSVPTPEVAETRTTQRRPSNSEREHLEPTSEASPITLSEQSGEIMRKLRGYRPVVCNPQWRAEVLQSIIDGAEGLGKETTLRCLSNYLLEIFPAQNAPHILTRPPRRPRNRRQSRRQQYARVQRNWDKHKGRCIKSLLDGADESVMPNRELMEPYWREVMSQPSPCSCDNTVFHMEHLHERVWSAITERDLRANKVPLSSSPGPDGISPKTARSIPTGIMLRIMNLILWCGNLPQPSRLARTVFIPKTVTANRPQDFRPITVPSVLVRQLNAILASRLTSSINWDTRQRGFQPTDGCADNATMVDLILRESHKCKKSCFIATLDVSKAFDSVSHAAVINTLTAYGLPKDFVDYVQKTYEVGGTTLNGEGWSSEVIYPARGVRQGDPLSPVLFNLVIDRLLRSLPKEIGVKVGNAMTNAAAFADDIVLFAETPMGLQKLLDMTVNFLGAVGLALNADKCFTVGIKAQPKQKCTVVTQQSFRIGLRECPALKRTDEWKYLGICFTAEGRVRYDPAEDLGPKLLRLTRAPLKPQQKLFALRTVLIPQLFHKLTLGSVTIGVLRKFDRLVRFYIRRWLDLPGDVSVGYFHAPHTCGGLGIPSLRWLAPMLRLKRLSNIKWPNLEQSEVVSSFLDTEMQRARVRLRAGNVELLSRLEIESYWANRLHMSVDGSGLREAGKFHPQHGWVSQPTRLLTGKEYLNGIKLRINALPSKSRTTRGRHELERRCRAGCDASETTNHILQKCYRTYGRRIARHNSVVNSIKLGLERKGCVVHVEPSLHCETGLNKPDLVALRQNHIYVIDAQVVTDGRSIDDAHQRKVERYDRPDIRTELRRRFGETSGIEFHSATLNWRGVWSSQSVKRLIATDLLTTGDSNIISVRVVKGGIYCFRHFMYWTGYNRRMRHGMR

SEQ ID NO: 3650 - protein, 980 aa, Drosophila sp.; identical to SEQ ID NO: 3645

SEQ ID NO: 3651 - protein, 980 aa, Drosophila sp.
MSHQHKDELDEQRQRVDVKLRWSEEEAWMMARKEVELEASGNLRFPNKKLAEVFTHRSSEAIKSFRKRGEYRAKLEQIRGQSAPTPEAADSITTQRRPSSIELDHQVSRSEAPPINLSEQSNCEIMRILQGYHPVECNPRWRAEVLQSIIDRAVTLGKEPTLQCLSNYLLDIFPPPNEPHTITRPPRRPRNRRQCRSQEYARVQRNWDKHNGRCIKSLLEEVDESVMPNQEIMEPYWREVMTTPSTCSCDNAMFHMEHSLEPVWSAITASDLRVNKIKLSGSPGPDGITPRTARSIPTGIMLRIMNLILWCGKLPQPIRLARTIFIPKLATANQPQDYRPITVPSVLVRQLNAILASRLTAAVNWDPRQRGFLPTDGCADNATLVDLILREHHQRWKSCYLATVDVSKAFDSVSHQAVYRILKSYGAPSNFVNYIKQMYEGGGTTLNGEGWRSGVFIPARGVKQGDPLSPIIFNLVIDRLLRSFPKEIGAKVGNTMTNAAAFADDLVLFAETPMGLQKLLDTTVEFLSTVGLTLNADKCFTVSVKGQAKQKCTVVERRSFRVGQRECPSLKRTEEWKYLGIRFTADGRARYSPADDLGPKLLRLTRAPLKPQQKLFALRTILIPQLYHKLTLGSVTIGVLRKCDKLVRTFVRRWLDLPLDVVVAFFHAPHKCGGLGIPSFRWISPMLRLNRLSNIKWPHLEQSEVASSFLDSELRRARDRLKAESGQLQSRLEIDSYFANRLHMSVDGCGLREAGHFGQQHGWVSQPTRLLTGKEYLNGIKLRINALPSKSRTTRGRHELERRCRAGCDAPETTNHILQKCYRTHGRRIARHNSAVNAIKRGLERKGCVVHVEPSLHCESGLNKPDLVAIRQNHIYVIDAQVVTDGHSLDQAHQRKVERYDNEEIRSELRRFFRVTGDIEFHSATLNWRGIWSGQSIKRLVAKDLLTTGDSNIISVRVVTGGVTSFKYFMHCCGYSRARA

SEQ ID NO: 3652 - protein, 752 aa, Drosophila paulistorum
MPNQEIMEPYWKQIMTNPSTCSCDNTRFRMEHSLETVWSAITLRDLRENKLKLPSSPGPDGVTPKTARSVPSGIMLRIMNLILWCGKIPYSTRLARTIFIPKTVMANRPQDFRPITVPSVLVRQLNAVLASRLASKVSWDPRQRGFLPTDGCADNATLVDLILREHHKRWKSCYLATVDVSKAFDSVSHQAIIKTLQAYGAPANFVSFIAEQYKGGGTSLNGAGWSSEVFIPASGVKQGDPLSPILFNLIIDRLLRSYPKEIGAKVGNTITSAAAFADDLVLFAETPMGLQKLLDTTVGFLASVGLTLNSDKCFTISIKGQAKQKCTVVERRSFCVGERECPSLKRTEEWKYLGIRFTADGRARYSPADGLGPKLLRLTRAPLKPQQKLFALRTVLIPQLYHQLTLGSVRIGVLRKCDRLVRQFVRRWLDLPLDVPTAFYHAPHIYGGLGIPSIRWIAPMLRLKRLSNIKWPHLEQSEVASSFIDDELQRARDRLKAEDMELGSRPEIDSYFANRLYMSVDGCGLREAGHYGPQHGWVSQPTRLLTGKEYLHGVKLRINALPSKSRTTRGRHELERRCRAGCDAPETTNHILQKCYRTHGRRVARHNSVVNAVKRGLEGRGCVVHVEPSLQCDSGLHKPDLVGIRQNHMYVIDVQVVTDGHSLDQAHQRKVERYDRADIRSQMRRSFGATGDIEFHSVTLNWRGIWSGQSVKRLIAKDLLIASDTNIISVRAVTGGVTSFKYFMYCAGYTRS

SEQ ID NO: 3653 - protein, 1026 aa, Drosophila rufa
MTTLSNTSAVNNPEAQYETGAGINHPARVTCTICERHFSSKIGLGVHMSRLHKNEFDELRRREDVNLRWSEEEKWMMARKEFELAASGILRHANKQLAEVFTNRSVEAIKKIRQRGDYKAKMEQIRGQSVPTPEVAETRTTQRRPSRSEREHQVSTSEASPITLSEQSGEIMRKLRGYRPVVCNPQWRAEVLQSIIDRAEGLGKETTLQCLSNYLLEIFPARNEPHILTRPPRRPRNRRQSRRQQYARVQRNWDKHKGRCIKSLLDGADESVMPNRERMEPYWREVMTQPSPCSCDNVVFQMEHLHERVWSAITERDLRANKVPLSSSPGPDGISPKTARSIPTGIMLRIMNLILWCGNLPQPSRLARTIFIPKTVTANRPQDFRPITVPSVLVRQLNAILASRLTSSVNWDPRQRGFLPTDGCADNATMVDLILRESHKSWKSCYIATLDVSKAFDSISHAAVINTLTAYGLPKDFVDYVQKTYEVGGTTLNGNGWSSEAFTPARGVRQGDPLSPILFNLVMDRLLRSLPKEIGVKVGNAMTNAAAFADDLVLFAETPMGLQKLLDSATNCMSSVGLTFNADKCFTVSIKGQPKQKCTVVTQQSFRVGSRECPSLKRTDEWKYLGIRFTAEGRARYNPADDLGPKLLRLTRAPLKPQQKLFALRTVLIPQLIHKLTLGSVTIGVLRKFDKLVRYYIRKWLDLPGDVSVGYFHAPHNCGGLGIPSLRWLAPMLRLKRLSNIKWPNLEQSRVVSSFMDNEMQRARVRLQAGNVELLSRLDIDTYWANRLHMSVDGSGLRDAGKFRPQHGWVSQPTRLLTGKEYLNGIKLRINALPSKSRTTRGRHELDRRCRAGCDASETTNHILQKCYRTYGRRIARHNSVVNSIKRGLERKGCVVHVEPSLQCESGLNKPDLVALRQNRIYVIDAQVVTDGHSIDDAHTRKVERYDRQDVRTELRRRFGEASGIEFHSATLNWRGIWSSQSVKRLIAKDLLTTGDSNIISVRVVKGGINCFRHFMYWNGYNRRVH

SEQ ID NO: 3654 - protein, 980 aa, Drosophila paulistorum
MSHQHKDELDTQRQREDVKLRWSEEEAWMMARKEVELEASGNLRFPNKKLAEVFTHRSSEAIKCFRKRGEYKAKLEQIRGQSTPTPEALDSNTSQRRPSLIERHHQVSSSEARPINPSEEQSNWEILRILQGYRPVECSPRWRAQVLQSIVDSAQTAGKETTLQCLSNYLLDIFPSPNEPHTIRPRNSRGHQTRRQLRQQEYAQVQRRWDKNTGRCIRSLLDGTDESVMPNQEIMEPYWKQIMTNPSTCSCDNTRFRMEHSLETVWSAITLRDLRENKLKLSSSPGPDGVTPKTARSVPSGIMLRIMNLILWCGKLPYSTRLARTIFIPKTVMANRPQDFRPITVPSVLVRQLNAVLASRLASKVSWDPRQRGFLPTDGCADNATLVDLILREHHKRWKSCYLATVDVSKAFDSVSHQAIIKTLQAYGAPANFVSFIAEQYKGGGTSLNGAGWSSEVFIPASGVKQGDPLSPILFNLIIDRLLRSYPKEIGAKVGNTITSAAAFADDLVLFAETPMGLQKLLDTTVGFLASVGLTLNSDKCFTISIKGQAKQKCTVVERRSFCVGERECPSLKRTEEWKYLGIRFTADGRARYSPADDLGPKLLRLTRAPLKPQQKLFALRTVLIPQLYHQLTLGSVRIGVLRKCDRLVRQFVRRWLDLPLDVPTAFYHAPHIYGGLGIPSIRWIAPMLRLKRLSNIKWPHLEQSEVASSFIDDELQRARDRLKAEDMELGSRPEIDSYFANRLYMSVDGCGLREAGHYGPQHGWVSQPTRLLTGKEYLHGVKLRINALPSKSRTTRGRHELERRCRAGCDAPETTNHILQKCYRTHGRRVARHNSVVNAVKRGLEGRGCVVHVEPSLQCDSGLHKPDLVGIRQNHMYVIDVQVVTDGHSLDQAHQRKVERYDRADIRSQMRRSFGATGDIEFHSVTLNWRGIWSGQSVKRLIAKDLLIASDTNIISVRAVTGGVTSFKYFMYCAGYTRS

SEQ ID NO: 3655 - protein, 983 aa, Drosophila aff.
MSRLHKNEFDVLRRREDVNLRWSEEEKWMMARKEFELAASGVLRHANKQLAEVFTNRSVEAIKKIRQRSDYKAKMEQIRGQSVPTPEVAETRTTQRRPSNSEREHLEPTSEASPITLSEQSGEIMRKLRGYRPVVCNPQWRAEVLQSIIDGAEGLGKETTLRCLSNYLLEIFPAQNAPHILTRPPRRPRNRRQSRRQQYARVQRNWDKHKGRCIKSLLDGADESVMPNRELMEPYWREVMSQPSPCSCDNTVFHMEHLHERVWSAITERDLRANKVPLSSSPGPDGISPKTARSIPTGIMLRIMNLILWCGNLPQPSRLARTVFIPKTVTANRPQDFRPITVPSVLVRQLNAILASRLTSSINWDTRQRGFQPTDGCADNATMVDLILRESHKCKKSCFIATLDVSKAFDSVSHAAVINTLTAYGLPKDFVDYVQKTYEVGGTTLNGEGWSSEVIYPARGVRQGDPLSPVLFNLVIDRLLRSLPKEIGVKVGNAMTNAAAFADDIVLFAETPMGLQKLLDMTVNFLGAVGLALNADKCFTVGIKAQPKQKCTVVTQQSFRIGLRECPALKRTDEWKYLGICFTAEGRVRYDPAEDLGPKLLRLTRAPLKPQQKLFALRTVLIPQLFHKLTLGSVTIGVLRKFDRLVRFYIRRWLDLPGDASVGYFHAPHTCGGLGIPSLRWLAPMLRLKRLSNIKWPNLEQSEVVSSFLDTEMQRARVRLRAGNVELLSRLEIESYWANRLHMSVDGSGLREAGKFHPQHGWVSQPTRLLTGKEYLNGIKLRINALPSKSRTTRGRHELERRCRAGCDASETTNHILQKCYRTYGRRIARHNSVVNSIKLGLERKGCVVHVEPSLHCETGLNKPDLVALRQNHIYVIDAQVVTDGRSIDDAHQRKVERYDRPDIRTELRRRFGETSGIEFHSATLNWRGVWSSQSVKRLIATDLLTTGDSNIISVRVVKGGIYCFRHFMYWTGYNRRMRHGMR

SEQ ID NO: 3656 - protein, 991 aa, Drosophila malerkotliana
MSFNSKRGLGVHMSHRHKDELDTQRLRVDKKARWSEEETLMMARKEVELAASGIRHLNKKLAEIFTHRSSDAISSYRKRGEYKAKLEQIRGQSVPTPEALESNTSQRRPSNSEQNRRVSTSSSGPIRPHEQTNSEILRVLQGYAPVVCDSRWRAEVLQTIVDNAQVSGQETTLQSLSCYLMEIFPPRNEPHILTRPRTEPRNMRQRRRQQYARVQRNWDKHPGRCIKSLLEGTDESVQPPQEIMEPYWRQIMTTPSSSSIEHASFHMEHSLERVWSAVNQRDLRAHKVKLSGSPGPDGITPRTARSIPDGIMLRIMNLILWCGRLPYSIRLARTIFIPKMATASRPQDYRPISVPSVLVRQLNAILAARLISAVNWDSRQRGFLPTDGCADNTTIVDLVLREHHKRFKSCYIGTLDVSKAFDAVAHKAVYNTLASYGAPQGLINYIRNSYEGGGTMLTGNGWVSREFIPARGVKQGDPLSPILFNLVIDRLLRSLPSEIGAKVGNAMTNAAAFADDIVLFAETPMGLQKLLDTTVGFLSSVGLTLNTDKCFTVSIKGQAKQKCTVVERRSFLIGEREVPSLKRTDEWKYLGIKFTADGRVRYNPAEELQPKLLRLTRAPLKPQQKLFALRTVLIPQLYHKLTLGSVTIGVLKKFDTLVRYTARKWLRLPVDVPTSFFHAPHRSGGLGLPSLRWIAPMLRLKRLSSIKWPHLEQSEVASSFVEDEMRRARDRLQAGSQELLTRLQVDSYLANRLHMSVDGGGLREAERFAPQHGWVVQPTRLLTGREYTEGIKLRINALPSRSRTTRGRHELGRRCRAGCDAPETTNHILQQCYRTHGRRIARHDGVVNLIKRGLERKGCVVHVEPSLQGETGLNKPDLVAIRQNHIYVIDAQVVTDGHSLDQAHQRKVEKYETPDIRTNLRRLFGSQHVVEFHSATVNWRGIWSGQSVKRLIASDLLSTSDSHIISVRVISGGLWSWRQFMYLSGYTRDWT

SEQ ID NO: 3657 - protein, 980 aa, Drosophila paulistorum
MSHQHKDELDTQRQREDVKLRWSEEEAWMMARKEVELEASGNLRFPNKKLAEVFTHRSSEAIKCFRKRGEYKAKLEQIRGQSTPTPEALDSNTSQRRPSLIERHHQVSSSEARPINPSEEQSNWEILRILQGYRPVECSPRWRAQVLQSIVDSAQTAGKETTLQCLSNYLLDIFPSPNEPHTIRPRNSRGRQTRRQLRQQEYAQVQRRWDKNTGRCIRSLLDGTDESVMPNQEIMEPYWKQIMTNPSTCSCDNTRFRMEHSLETVWSAITLRDLRENKLKLSSSPGPDGVTPRTARSVPSGIMLRIMNLILWCGKLPYSTRLARTIFIPKTVMANRPQDFRPITVPSVLVRQLNAVLASRLASKVSWDPRQRGFLPTDGCADNATLVDLILREHHKRWKSCYLATVDVSKAFDSVSHQAIIKTLQAYGAPANFVSFIAEQYKGGGTSLNGAGWSSEVFIPASGVKQGDPLSPILFNLIIDRLLRSYPKEIGAKVGNTITSAAAFADDLVLFAETPMGLQKLLDTTVGFLASVGLTLNSDKCFTISIKGQAKQKCTVVERRSFCVGERECPSLKRTEEWKYLGIRFTADGRARYSPADDLGPKLLRLTRAPLKPQQKLFALRTVLIPQLYHQLTLGSVRIGVLRKCDRLVRQFVRRWLDLPLDVPTAFYHAPHIYGGLGIPSIRWIAPMLRLKRLSNIKWPHLEQSEVASSFIDDELQRARDRLKAEDMELGSRPEIDSYFANRLYMSVDGCGLREAGHYGPQHGWVSQPTRLLTGKEYLHGVKLRINALPSKSRTTRGRHELERRCRAGCDAPETTNHILQKCYRTHGRRVARHNSVVNAVKRGLEGRGCVVHVEPSLQCDSGLHKPDLVGIRQNHMYVIDVQVVTDGHSLDQAHQRKVERYDRADIRSQMRRSFGATGDIEFHSVTLNWRGIWSGQSVKRLIAKDLLIASDTNIISVRAVTGGVTSFKYFMYCAGYTRS

SEQ ID NO: 3658 - protein, 974 aa, Drosophila paulistorum
MSHQHKDELDTQRQREDVKLRWSEEEAWMMARKEVELEASGNLRFPNKKLAEVFTHRSSEAIKCFRKRGEYKAKLEQIRGQSTPTPEALDSNTSQRRPSLIERHHQVSSSEARPINPSEEQSNWEILRILQGYRPVECSPRWRAQVLQSIVDSAQTAGKETTLQCLSNYLLDIFPSPNEPHTIRPRNSRGHQTRRQLRQQEYAQVQRRWDKNTGRCIRSLLDGTDESVMPNQEIMEPYWKQIMTNPSTCSCDNTRFRMEHSLETVWSAITLRDLRENKLKLSSSPGPDGVTPRTARSVRIMNLILWCGKIPYSTRLARTIFIPKTVMANRPQDFRPITVPSVLVRQLNAVLASRLASKVSWDPRQRGFLPTDGCADNATLVDLILREHHKRWKSCYLATVDVSKAFDSVSHQAIIKTLQAYGAPANFVSFIAEQYKGGGTSLNGAGWSSEVFIPASGVKQGDPLSPILFNLIIDRLLRSYPKEIGAKVGNTITSAAAFADDLVLFAETPMGLQKLLDTTVGFLASVGLTLNSDKCFTISIKGQAKQKCTVVERRSFCVGERECPSLKRTEEWKYLGIRFTADGRARYSPADDLGPKLLRLTRAPLKPQQKLFALRTVLIPQLYHQLTLGSVRIGVLRKCDRLVRQFVRRWLDLPLDVPTAFYHAPHIYGGLGIPSIRWIAPMLRLKRLSNIKWPHLEQSEVASSFIDDELQRARDRLKAEDMELGSRPEIDSYFANRLYMSVDGCGLREAGHYGPQHGWVSQPTRLLTGKEYLHGVKLRINALPSKSRTTRGRHELERRCRAGCDAPETTNHILQKCYRTHGRRVARHNSVVNAVKRGLEGRGCVVHVEPSLQCDSGLHKPDLVGIRQNHMYVIDVQVVTDGHSLDQAHQRKVERYDRADIRSQMRRSFGATGDIEFHSVTLNWRGIWSGQSVKRLIAKDLLIASDTNIISVRAVTGGVTSFKYFMYCAGYTRS

SEQ ID NO: 3659 - protein, 894 aa, Drosophila malerkotliana
MAKLINIRGLSFPPERIKGKTPTPPPVDSEQNRRVSTSSSGPIRPHEQTNSEILQVLRVPGDIVDNAQVSGQETTLQSLSCYLMEIFPPRNEPHILTRPRTEPRNMRQRRRQQYARVQRNWDKHPGRCIKSLLEGTDESVQPPQEIMEPYWRQIMTTPSSSSIEHASFHMEHSLERVWSAVNQRDLRAHKVKLSGSPGPDGITPRTARSIPDGIMLRIMNLILWCGRLPYSIRLARTIFIPKMATASRPQDYRPISVPSVLVRQLNAILAARLISAVNWDSRQRGFLPTDGCADNTTIVDLVLREHHKRFKSCYIGTLDVSKAFDAVAHKAVYNTLASYGAPQGLINYIRNSYEGGGTMLTGNGWVSREFIPARGVKQGDPLSPILFNLVIDRLLRSLPSEIGAKVGNAMTNAAAFADDIVLFAETPMGLQKLLDTTVGFLSSVGLTLNTDKCFTVSIKGQAKQKCTVVERRSFLIGEREVPSLKRTDEWKYLGIKFTADGRVRYNPAEELQPKLLRLTRAPLKPQQKLFALRTVLIPQLYHKLTLGSVTIGVLKKFDTLVRYTARKWLRLPVDVPTSFFHAPHRSGGLGLPSLRWIAPMLRLKRLSSIKWPHLEQSEVASSFVEDEMRRARDRLQAGSQELLTRLQVDSYLANRLHMSVDGGGLREAERFAPQHGWVVQPTRLLTGREYTEGIKLRINALPSRSRTTRGRHELGRRCRAGCDAPETTNHILQQCYRTHGRRVARHDGVVNLIKRGLERKGCVVHVEPSLQGETGLNKPDLVAIRQNHIYVIDAQVVTDGHSLDQAHQRKVEKYETPDIRTNLRRLFGSQHVVEFHSATVNWRGIWSGQSVKRLIASDLLSTSDSHIISVRVISGGLWSWRQFMYLSGYTRDWT

SEQ ID NO: 3660 - protein, 919 aa, Drosophila paulistorum
MSHQHKDELDTQRQREDVKLRWSEEEAWMMARKEVELEASGNLRFPNKKLAEVFTHRSSEAIKCFRKRGEYKAKLEQIRGQSTPTPEALDSNTSQRRPSLIERHHQVSSSEARPINPSEEQSNWEILRILQGYRPVECSPRWRAQVLQSIVDSAQTAGKETTLQCLSNYLLDIFPSPNEPHTIRPRNSRGHQTRRQLRQQEYAQVQRRWDKNTGRCIRSLLDGTDESVMPNQEIMEPYWKQIMTNPSTCSCDNTRFRMEHSLETVWSAITLRDLRENKLKLSSSPGPDGVTPRTARSVPSGIMLRIMNLILWCGKIPYSTRLARTIFIPKTVMANRPQDFRPITVPSVLVRQLNAVLASRLASKVSWDPRQRGFLPTDGCADNATLVDLILREHHKRWKSCYLATVDVSKAFDSVSHQAIIKTLQAYGAPANFVSFIAEQYKGGGTSLNGAGWSSEVFIPASGVKQGDPLSPILFNLIIDRLLRSYPKEIGAKVGNTITSAAAFADDLVLFAETPMGLQKLLDTTVGFLASVGLTLNSDKCFTISIKGQAKQKCTVVERRSFCVGERECPSLKRTEEWKYLGIRFTADGRARYSPADDLGPKLLRLTRAPLKPQQKLFALRTVLIPQLYHQLTLGSVRIGVLRKCDRLVRQFVRRWLDLPLDVPTAFYHAPHIYGGLGIPSIRWIAPMLRLKRLSNIKWPHLEQSEVASSFIDDELQRARDRLKAEDMELGSRPEIDSYFANRLYMSVDGCGLREAGHYGPQHGWVSQPTRLLTGKEYLHGVKLRINALPSKSRTTRGRHELERRCRAGCDAPETTNHILQKCYRTHGRRVARHNSVVNAVKRGLEGRGCVVHVEPSLQCDSGLHKPDLVGIRQNHMYVIDVQVVTDGHSLDQAHQRKVERYDRADIRSQMRRSFGSDR

SEQ ID NO: 3661 - protein, 935 aa, Drosophila aff.
MSRLHKNEFDVLRRREDVNLRWSEEEKWMMARKEFELAASGVLRHANKQLAEVFTNRSVEAIKKIRQRSDYKAKMEQIRGQSVPTPEVAETRTTQRRPSNSEREHLEPTSEASPITLSEQSGEIMRKLRGYRPVVCNPQWRAEVLQSIIDGAEGLGKETTLRCLSNYLLEIFPAQNAPHILTRPPRRPRNRRQSRRQQYARVQRNWDKHKGRCIKSLLDGADESVMPNRELMEPYWREVMSQPSPCSCDNTVFHMEHLHERVWSAITERDLRANKVPLSSSPGPDGISPKTARSIPTGIMLRIMNLILWCGNLPQPSRLARTVFIPKTVTANRPQDFRPITVPSVLVRQLNAILASRLTSSINWDTRQRGFQPTDGCADNATMVDLILRESHKCKKSCFIATLDVSKAFDSVSHAAVINTLTAYGLPKDFVDYVQKTYEVGGTTLNGEGWSSEVIYPARGVRQGDPLSPVLFNLVIDRLLRSLPKEIGVKVGNAMTNAAAFADDIVLFAETPMGLQKLLDMTVNFLGAVGLALNADKCFTVGIKAQPKQKCTVVTQQSFRIGLRECPALKRTDEWKYLGICFTAEGRVRYDPAEDLGPKLLRLTRAPLKPQQKLFALRTVLIPQLFHKLTLGSVTIGVLRKFDRLVRFYIRRWLDLPGDVSVGYFHAPHTCGGLGIPSLRWLAPMLRLKRLSNIKWPNLEQSEVVSSFLDTEMQRARVRLRAGNVELLSRLEIESYWANRLHMSVDGSGLREAGKFHPQHGWVSQPTRLLTGKEYLNGIKLRINALPSKSRTTRGRHELERRCRAGCDASETTNHILQKCYRTYGRRIARHNSVVNSIKLGLERKGCVVHVEPSLHCETGLNKPDLVALRQNHIYVIDAQVVTDGRSIDDAHQRKVERYDRPDIRTELRRRFGETSGIEFHSATLNWRGSGVVSR

SEQ ID NO: 3662 - protein, 951 aa, Drosophila bipectinata
MKARKEVELAASGIRHLNKKLAEIFTHRSSDAISSYRKRGEYKAKLEQIRGQSVPTPEALESNTSQRRPSNSEQNRRVSTSSSGPIRPHEQTNSEILRVLQGYAPVVCDSRWRAEVLQTIVDNAQVSGQETTLQSLSCYLMEIFPPRNEPHILTRPRTEPRNMRQRRRQQYARVQRNWDKHPGRCIKSLLEGADESVQPPQEIMEPYWKQIMTTPSSSSIEHASFHMEHSLERVWSAVNQRDLRAHKVKLSGSPGPDGITPRTARSIPDGIMLRIMNLILWCGRLPYSIRLARTIFIPKMATASRPQDYRPISVPSVLVRQLNAILAARLISAVNWDSRQRGFLPTDGCADNTTIVDLVLREHHKRFKSCYIGTLDVSKAFDAVAHKAVYNTLASYGAPQGLINYIRNSYEGGGTMLTGNGWVSREFIPARGVKQGDPLSPILFNLVIDRLLRSLPSEIGAKVGNAMTNAAAFADDIVLFAETPMGLQKLLDTTVGFLSSVGLTLNTDKCFTVSIKGQAKQKCTVVERRSFLIGEREVPSLKRTDEWKYLGIKFTADGRVRYNPAEELQPKLLRLTRAPLKPQQKLFALRTVLIPQLYHKLTLGSVTIGVLKKFDTLVRYTARKWLRLPVDVPTSFFHAPHRSGGLGLPSLRWIAPMLRLKRLSSIKWPHLEQSEVASSFVEDEMRRARDRLQAGSQELLTRLQVDSYLANRLHMSVDGGGLREAERFAPQHGWVVQPTRLLTGREYTEGIKLRINALPSRSRTTRGRHELGRRCRAGCDAPETTNHILQQCYRTHGRRIARHDGVVNLIKRGLERKGCVVHVEPSLQGETGLNKPDLVAIRQNHIYVIDAQVVTDGHSLDQAHQRKVEKYETPDIRTNLRRLFGSQHVVEFHSATVNWRGIWSGQSVKRLIASDLLSTSDSHIISVRVISGGLWSWRQFMYLSGYTRDWT

SEQ ID NO: 3663 - protein, 993 aa, Drosophila parabipectinata
MSFNSKRGLGVHMSHRHKDELDTQRLRVDKKARWSEEETLMMARKEVELAASGIRHLNKKLAEIFTHRSSDAISSYRKRGEYKAKLEQIRGQSVPTPEALESNTSQRRPSISEQNRRVSTSSSGPIRPHEQTNSEILRVLQGYAPVVCDSRWRAEVLQTIVDSAQVSGQETTLQSLSCYLMEIFPPRNEPHILTRPRMEPRNMRQRRRQQYARVQRNWDKHPGRCIKSLLEGADESVQPPQEIMEPYWRQIMTTPSSSSIEHASFHMEHSLERVWSAVNQRDLRAHKVKLSGSPGPDGITPRTARSIPDGIMLRIMNLILWCGRLPYSIRLARTIFIPKMATASRPQDYRPISVPSVLVRQLNAILAARLISAVNWDSRQRGFLPTDGCADNTTIADLVLREHHKRFKSCYIGTLDVSKAFDAVAHKAVYNTLASYGGPQGLINYIRNSYEGGGTMLTGNGWVSREFIPARGVKQGDPLSPILFNLVIDRLLRSLPSEIGAKVGNAMTNAAAFADDIVLFAETPMGLQKLLDTTVGFLSSVGLTLNTDKCFTVSIKGQAKQKCTVVERRSFLIGEREVPSLKRTDEWKYLGIKFTADGRVRYNPAEELQPKLLRLTRAPLKPQQKLFALRTVLIPQLYHKLTLGSVTIGVLKKFDALVRYTARKWLRLPVDVPTSFFHAPHRSGGLGLPSLRWIAPMLRLKRLSSIKWPHLEQSEVASSFVEDEMRRARDRLQAGSQELLTRLQVDSYLANRLHMSVDGGGLREAERFAPQHGWVVQPTRLLTGREYTEGIKLRINALPSRSRTTRGRHELGRRCRAGCDAPETTNHILQQCYRTHGRRVARHDGVVNLIKRGLERKGCVVHVEPSLQGETGLNKPDLVAIRQNHIYVIDAQVVTDGHSLDQAHQRKVEKYETPDIRTNLRRLFGSQHVVEFHSATVNWRGIWSGQSVKRLIASDLLSTSDSHIISVRVISGGLWSWRQFMYLIGLNHASRSY

SEQ ID NO: 3664 - protein, 1030 aa, Drosophila elegans
MNDLLTTRPSMVGYLEDQHEPNVAATPSHGVLCGICGRSFKNLRGLGVHKSYQHKDELDEERRRVDIKLRWSEEEKWMMARKEVELAANGLTKHINKQLAESFTHRSVEAIKKLRQRGDYKEKIEQIRGQSALTPEVAELTIQRRPSNSEQDHPVSTSTTDHLTHLEQSNREIMRTLQGYRQIVGCNSKWRAQQLQHIIDVAQFEGKETTLQSLSGYLQDIFPIQNERHILSRPPRRPRNRRETRRQQFAQTQRNWDKHKGRCIKSLLNGTDESVMPNREYMEPYWREVMTRPSPCSCADEVIQDGHLHERVWSAVTVRDLRANKVSLSSAPGPDGISPKSVKEVPSCIMLRILNLILWCGKLPDFIRPARTIFIPKTATANRPQDFRPITVPSVLVRQLNAILATRLTSSINWDPRQRGFLPTDGCADNATIVDLILRNSHRKYKSCYIATLDVSKAFDAVSHAAVTNTMTAYGLPKDFVDYVQKTYEGGGTTLNGEGWMSEEFVPARGVKQGDPLSPILFNLIIDRLLRSLPNEIGAKLGNTMTNAAAFADDLVLFAETRMGLQTLLDHTVGFLASVGLNLNADKCFTISIKGQPKQKCTVVDRHVFRIGLNECPALKRTDEWKYLGIIFNANGRVRYNPAEDLGPKLMRLTRAPLKPQQKLFALRTILIPQLYHKLTLGSVTIGVLRKFDKLVRFYVRRWLSLPLDVPVAFIHAPHVCGGLGIPSIRWMAPMLRLRRLSSIKWPHLEQSEIASSFIEDEKRRARVRLLAEHTELLSRPAIEKYFANRLYMSVDGSGLREAEHYAPQHGWVSQPTRLLTGKEYLNGIRIRINALPSKSRTTRGRHELDRQCRAGCDASETTNHIMQKCYRTHGRRVARHNCVVNSIKVGLERRGCVVIVEPSLHCESGLNKPDLVVIRDNRIHVIDAQVVTDGQSIDEAHQRKIKRYDRPDIRTELRRRFGAICEIEFHSATLNWRGIWSGQSVKRLIATDLLSRHESHMISIRVIRGSHNCFTQFMCLSGYIRGGRS

SEQ ID NO: 3665 - protein, 991 aa, Drosophila parabipectinata; identical to SEQ ID NO: 3656

SEQ ID NO: 3666 - protein, 1013 aa, Drosophila insularis
MAVINLASEITCTVCGRLFNNKRGLGVHMSHQHRDELDTQRQREDVKLRWTEEEAWMMARKEVELEASGNLRFPNKKLAEVFTHRSSEAIKCFRKRGEYKAKLEEIRRQSTPTPEALDSITSPLRPSLHERNHQVSPSEAQPIDPSEEQSNWEIMRILRGYRPVECSPRWRAQVLQSIVDRAQAVGKETTLQCLSNYLLDIFPPPNEPHTIRTRPLRRPRTRRQLRQQEYAQVQRRWDKNTGRCIKSLLDGTDESVMPNQEIMEPYWKQIMTSPSTCSCDNTRFRMEHTLETVWSAITPRDLRENKLKLSSSPGPDGVTPRTARSVPSGIMLRIMNLILWCGKIPYSTRLARTIFIPKTVTADRPQDYRPITVPSVLVRQLNAVLASRLASKVNWDPRQRGFLPTDGCADNATLVDLILREHHKRWKSCYLATVDVSKAFDSVSHQAIINTLKAYGAPANFVSYIEEQYKGGGTSLNGPGWSSEVFIPARGVKQGDPLSPLLFNLIIDRLLRSYPKEIGAKVGNTMTSAAAFADDLVLFAETPMGLQKLLDSTVGFLASVGLTLNSDKCFTISIKGQAKQKCTVVERRSFRVGERECPSLKRTEEWKYLGIRFTADGRARFSPADDLGPKLLRLSRAPLKPQQKLFALRTVLIPQLYHQLTLGSVRIGVLRKCDKLVRQFVRRWLDLPLDVPVAFFHAPHISGGLGIPSIRWIAPMLRLKRLSNIKWPHLEQSEVASSFIDDEMQRARDRLKAENVQLVSRPEIDSYFANRLHMSVDGSGLREAGHYGPQHGWVSQPTRLLTGKEYLHGVKLRINALPSKSRTTRGRHELERRCRAGCDAPETTNHILQKCYRTHGRRVARHNSVVNAVKRGLERKGCVVHVEPSLQCDSGLNKPDLVGIRQNHMYVIDVQIVTDGHSLDQAHQRKVERYDRADIRSQMRRSFGATGEIEFHSVTLNWRGIWSGQSVKRLVAKDLLTAGDSNIISARVVSSGVTSFKYFMYCAGYTQARRIIL

SEQ ID NO: 3667 - protein, 983 aa, Drosophila bocqueti
MSRLHKNEFDVLRRREDVNLRWSEEEKWMMARKEFELAASGVLRHANKQLAEVFTNRSVEAIKKIRQRSDYKAKMEQIRGQSVPTPEVAETRTTQRRPSNSEREHLEPTSEASPITLSEQSGEIMRKLRGYRPVVCNPQWRAEVLQSIIDGAEGLGKETTLRCLSNYLLEIFPAQDAPHILTRPPRRPRNRRQSRRQQYARVQRNWDKHKGRCIKSLLDGADESVMPNRELMEPYWREVMSQPSPCSCDNTVFHMEHLHERVWSAITERDLKANKVPLSSSPGPDGISPKTARSIPTGIMLRIMNLILWCGNLPQPSRLARTVFIPKTVTANRPQDFRPITVPSVLVRQLNAILASRLTSSINWDTRQRGFQPTDGCADNATMVDLILRESHKCKKSCFIATLDVSKAFDSVSHAAVINTLTAYGLPKDFVDYVQKTYEVGGTTLNGEGWSSEVIYPARGVRQGDPLSPVLFNLVIDRLLRSLPKEIGVKVGNAMTNAAAFADDIVLFAETPMGLQKLLDMTVNFLGAVGLALNADKCFTVGIKAQPKQKCTVVTQQSFRIGLRECPALKRTDEWKYLGICFTAEGRVRYNPAEDLGPKLLRLTRAPLKPQQKLFALRTVLIPQLFHKLTLGSVTIGVLRKFDRLVRFYIRRWLDLPGDVSVGYFHAPHNCGGLGIPSLRWLAPMLRLKRLSNIKWPNLEQSEVVSSFLDTEMQRARVRLRAGNVELLSRLEIESYWANRLHMSVDGSGLREAGKFHPQHGWVSQPTRLLTGKEYLNGIKLRINALPSKSRTTRGRHELERRCRAGCDASETTNHILQKCYRTYGRRIARHNSVVNSIKLGLERKGCVVHVEPSLHCETGLNKPDLVALRQNHIYVIDAQVVTDGRSIDDAHQRKVERYDRPDIRTELRRRFGETSGIEFHSATLNWRGVWSSQSVKRLIAKDLLTTGDSNIISVRVVKGGIYCFRHFMYWTGYNRRMRHGMR

SEQ ID NO: 3668 - protein, 909 aa, Drosophila bocqueti
MEQIRGQSVPTPEVAETRTTQRRPSNSEREHLEPTSEASPITLSEQSGEIMRKLRGYRPVVCNPQWRAEVLQSIIDGAEGLGKETTLRCLSNYLLEIFPAQDAPHILTRPPRRPRNRRQSRRQQYARVQRNWDKHKGRCIKSLLDGADESVMPNRELMEPYWREVMSQPSPCSCDNTVFHMEHLHERVWSAITERDLKANKVPLSSSPGPDGISPKTARSIPTGIMLRIMNLILWCGNLPQPSRLARTVFIPKTVTANRPQDFRPITVPSVLVRQLNAILASRLTSSINWDTRQRGFQPTDGCADNATMVDLILRESHKCKKSCFIATLDVSKAFDSVSHAAVINTLTAYGLPKDFVDYVQKTYEVGGTTLNGEGWSSEVIYPARGVRQGDPLSPVLFNLVIDRLLRSLPKEIGVKVGNAMTNAAAFADDIVLFAETPMGLQKLLDMTVNFLGAVGLALNADKCFTVGIKAQPKQKCTVVTQQSFRIGLRECPALKRTDEWKYLGICFTAEGRVRYNPAEDLGPKLLRLTRAPLKPQQKLFALRTVLIPQLFHKLTLGSVTIGVLRKFDRLVRFYIRRWLDLPGDVSVGYFHAPHNCGGLGIPSLRWLAPMLRLKRLSNIKWPNLEQSEVVSSFLDTEMQRARVRLRAGNVELLSRLEIESYWANRLHMSVDGSGLREAGKFHPQHGWVSQPTRLLTGKEYLNGIKLRINALPSKSRTTRGRHELERRCRAGCDASETTNHILQKCYRTYGRRIARHNSVVNSIKLGLERKGCVVHVEPSLHCETGLNKPDLVALRQNHIYVIDAQVVTDGRSIDDAHQRKVERYDRPDIRTELRRRFGETSGIEFHSATLNWRGVWSSQSVKRLIAKDLLTTGDSNIISVRVVKGGIYCFRHFMYWTGYNRRMRHGMR

SEQ ID NO: 3669 - protein, 886 aa, Scaptomyza hsui
MRRPSLCELDPPVSTSEASPIIPFEQPNMEILQVLRSYRRVECNPRWRAQTLQSIIDSAQEEGKETTLHRLSLYLLEVFPAVTRPVNARPPRRPRNRRESRRQQFASTQRNWDKHKGRCIKTLLNGNDESVMPNQEYMVPYWREVMTQPSPSYVVNNAVLQPEHSLARVWSAISVQDLRATKVSLSSSPGPDGISPRTARSIPTGIILRIYNLILWCGNLPQSIRLARTIFIPKTVTANRPQDYRPITVSSVLVRQLNAILASRLTSSINWDARQRGFLPTDGCADNATMVDLILRNSHKSSLSTYIATLDVSKAFDSVSHAAVYNTLTAYGAPKEMVDYIQKTYEGGGTTLNGEGWRSEVFVPARGVKQGDPLSPVLFNMIIDQLLRALPNEIGVKIGNAMTNAAAFADDLVLFAETPMGLQKLLDLTVSFLGTVGLKLNADKCFTVSIKGQPKQKKTVVIQQSFRIGQIACPALKRTDEWKYLGIRFNADGRVRYNPAEDLGPKLLRLTRAPLKPQQKLFALRNVLIPQFFHKLTLGSVTIGVLRKFDKLVRFYVRRWLGLPLDVCVAFFHAPPKSGGLGIPSVRWIAPLQRLRRLSNLKWPHLEQSEVASSFVEEELRRVRVRLLAGNTQLHTRTEVETYWANRLHMSVDGSGLREAGQFGPQHGWVSQPTRLLTGKEYRSGIQLRINALPSKSRTTRGRHELDRQCRAGCRASETTNHILQQCYRTHGRRVARHNSVVNFLKRGLEEKGCVVIAEPSLQCESGLSKPDLVALRNNIIHVIDAQVVTDGHSIDEAHQRKIDRYDRLDIRTELRRRFGAACGIEFHSATLNWRGIWSGQSVKGLIAKNLLSKGDSNIISVRVLSGGTYCFRQFMYLCGYTRDWT

SEQ ID NO: 3670 - protein, 1037 aa, Scaptomyza montana
MNNTNLPRIMNDTLMTDQSPMDIILGGQYEPDAAATSDQSGCCTICGRSFRSARGLGVHMSRQHKDAFDEMRLRVDVKLRWSEEEKWMMARKEVELAANGEKNLNKKLAEVFTHRSVEAIKKARQRGDYKQKLEQIRGQSAPTPEVDENTIMRRPSLSEPNPRVSSSEATPITPLEQSNMEILQVIQGYSRVECDPRWNAQTLQSIVDSAQGEGKETTLHRLSNYLLDIFPCPSARTVRSRPPRRPRNNREGRRQQYATVQRNWDKHKGRCIKNLLNGNDESTMPSQEIMVPYWREVMSQPSPSSCSNAVIQMDHSLERVWSAISVQDLRAHKVALSSSPGPDGISPRTARSIPLGIMLRIMNLILWCGKLPYSIRLAKTIFIPKTVTANRPQDFRPITVSSVLVRQLNAILASRLTSSINWDARQRGFMPTDGCADNATMVDLILRNSHKSSLSTYIATLDVSKAFDSVSHAAVYNTMTAYGIPKEMVDYVQKSYEGGGTTLNGEGWRSEVFTPARGVKQGDPLSPTLFNLIIDRLLRTLPKEIGVKIGNAIVNAAAFADDLVLFAETPMGLQKLLDLTVSFLDSVGLKLNADKCFTVSIKGQPKQKKTVVTQQSFRIGSTECPALKRTDEWKYLGIRFNADGRVRYSPAEDLGPKLLRLTRAPLKPQQKLFALRNVLIPQFFHQLTLGSVTIGVLRKFDKMVRFYVRGWLGLPPDVCTAFFHAPPKCGGLGIPSVRWIAPLHRLRRLSNLKWPYLEQSEVASSFVEEEIRRVRVRLLAGITQMSTRLEIENYWANRLHLSVDGSGLREAGHFGPQHGWVSQPTRLLTGKEYRNGIQLRINALPSKSRTTRGRHELDRQCRAGCQASETTNHILQKCRRTHGKRVARHNSVVNSLKRGLEAKGCVVIVEPSLQCESGLCKPDLVALRDNIIHVIDTQIVTDGHSIDEAHQRKVDRYNRPDILTELRRGFGATCGVEFHSATLNWRGIWSGQSVKRLIAKNLLSKYDSNIISVKVLRGGTYCFRQFMYLCGYYRDWT

SEQ ID NO: 3671 - protein, 980 aa, Drosophila equinoxialis
MSHQHKDELDTQRQREDVKLRWSEEEAWMMARKEVELEASGNLRFPNKKLAEVFTHRSSEAIKSFRKRGEYKAKLEQIRGQSTPTPEAVDSNTSQRRPSSIERHHQVSSSEAQPINPSEEQSNWEILRILQGYRPVECDPRWRAQVLQSIVDSAQTAGKQNTLQCLSNYLLDIFPPPNEPHTIRPSISRGRQTRRQLRQREYAQVQRRWDKNTGRCIKSLLDGTDESVMPNQDIMEPYWKQIMTNPSTCSCDNTRFRMEHSLETVWSAITLRDLRENKLKLSSSPGPDGITPRTARSVPSGIMLRIMNLILWCGKLPYSTRLARTIFIPKTVKADRPQDFRPITVPSVLVRQLNAVLASRLASKVNWDPRQRGFLPTDGCADNATLVDLILREHHKRWKSCYLATVDVSKAFDSVSHQAIIKTLQAYGAPENFVSFIAEQYKGGGTSLNGAGWSSEVFIPASGVKQGDPLSPILFNLIIDRLLRSYPKEIGAKVGNTITSAAAFADDLVLFAETPMGLQKLLDTTVGFLASVGLTLNSDKCFTISIKGQAKQKCTVVERRSFCVGERECPSLKRTEEWKYLGIRFTADGRARYSPADDLGPKLLRLTRAPLKPQQKLFALRTVLIPQLYHQLTLGSVRIGVLRKCDRLVRQFVRRWLDLPLDVPTAFYHAPHIYGGLGIPSIRWIAPMLRLKRLSNIKWPHLEQSEVASSFIDDELQRARDRLKAEDMELGSRPEIDSYFANRLYMSVDGCGLREAGHYGPQHGWVSQPTRLLTGKEYLHGIKLRINALPSKSRTTRGRHELERRCRAGCDAPETTNHILQKCYRTHGRRVARHNSVVNAVKRGLEGRGCVVHVEPSLQCDSGLHKPDLVGIRQNHMYVIDVQVVTDGHSLDQAHQRKVERYDRADIRSQMRRSFGATGDIEFHSVTLNWRGIWSNQSVKRLIAKGLLIASDTNIISVRAVTGGVTSFKYFMYCAGYTRS

SEQ ID NO: 3672 - protein, 1114 aa, Drosophila tropicalis
MTLLREAGSDKRRRGVLNTVIHKSLVRSSRLETSSWCFLGADKFLDSRFLSVANSSGGATLGVTSPLSQEQVGESRNTVPRINYNTTTSVTTSPGDQPREAIAVVNLASEIPCTVCGRLFSSRRGLGVHMSHQHRDELDTQRQREDVKLRWSEEEAWMMARKEVELEASGNLRFPNKKLAEVFTHRSSEAIKCFRKRGEYKEKLEQIRGQSTHTPEALDSNTSQRRPSLIERHHQVSSSEAQPINPSEEQSNWEIMRILRGYSPVECNPRWRAQVLQSIVDSAQTVGKETTLQCLSNYLLDIFPPPNEPHTISARPPRRPRNRRQLRQQEYAQVQRRWDKNTGRCIRSLLDGTDESVMPNQEIMEPYWRQIMTNPSTCSCDNTRFHMEHSLETVWSAITPRDLRENKLKLSSAPGPDGITPRTFRSVPSGIMLRIMNLILWCGKIPYSTRLARTIFIPKTVTANRPQDYRPITVPSVLVRQLNAVLASRLASKVNWDPRQRGFLPTDGCADNATMVDLILREHHLRWKSCYLAAVDVSKAFDSVSHRAIINTLQAYGAPANFVSFIEEQYKGGGTSLNGAGWRSEVFIPARGVKQGDPLSPLLFNLVIDRLLRSYPKEIGAKVGNTMTSAAAFADDLVLFAETPMGLQKLLDTTVGFLASVGLTLNSDKCFTISIKGQAKQKCTVVERRSFRVGERECPSLKRTEEWKYLGIRFTADGRARYSPADDLGPKLLRLSRAPLKPQQKLFALKTVLIPQLYHQLTLGSVMIGVLRKCDRLVRQFVRRWLDLPLDVPVAFFHAPHTCGGLGIPSVRWIAPMLRLKRLSNIKWPHLEQSEVASSFIDGEMQRARDRLKAENVQLVSRPEIDSYFANRLYMSVDGCGLREAGHYGPQHGWVSQPTRLLTGKEYLHGVKLRINALPSKSRTTRGRHELERRCRAGCDAPETTNHILQKCYRTHGRRVARHNSVVNAVKRGLEGRGCVVHVEPSLHCDSGLNKPDLVGIRQNHIYVIDIQVVTDGHSLDQAHQRKVERYDRADIRSQLRRSFGATGDIEFHSVTLNWRGVWSGQSVKRLIAKDLLTANDSKIISVRAVNGGVTSFKYFMYCAGYTRARRIIL

SEQ ID NO: 3673 - protein, 983 aa, Drosophila kikkawai
MSRLHKNEFDQLRQREDVNLRWSEEEKWMMARKEFELAASGILRHANKQLAEVFTHRSVEAIKKIRQRGDYKAKMEQIRGQSVPTPEVANTRTTQRRPSNSEREHLVPPSEAPPITLSEQSGEIMRKLRGYRPVVCNPLWRAEVLQSIIDRAEGLGKETTLQCLSNYLLEIFPARNAPHILTRPPRRPRNRRESRRQQYARVQRNWDKHKGRCIKSLLDGADESVMPNRELMEPYWREVMTQPSPCSIANTVFPMEHLYDRVWSAITERDLRANKVPLSSSPGPDGISPKSARSIPTGIMLRIMNLILWCGNLPQPSRLARTVFIPKTVTANRPQDFRPITVPSVLVRQLNAILASRLTSSINWDTRQRGFQPTDGCADNATMVDLILRESHKSNKSCYIATLDVSKAFDSISHAAVINTLTAYGLPKDFVDYVQKTYEVGGTTLNGDGWCSEAFSPARGVRQGDPLSPILFNLVVDRLLRSLPKEIGAKVGNAITNAAAFADDIVLFAETPMGLQKLLDTTVNFLRSVGLTLNADKCFTVGIKGQPKQKCTVVTQHSFRIGQRECPALKRTDEWKYLGIYFTAEGRVRYNPAEDLGPKLLRLTRAPLKPQQKLFALRTVLIPQLYHKLTLGSVTIGVLRKFDKLVRFYIRKWLDLPGDVSVAYFHAPYKCGGLGIPSLRWLAPMLRLKRLSNIKWPNLEQSEVVSSFLDTEMQRARVRLRAGNVELLSRLEIDSYWANRLHMSVDGSGLREAGKFHPQHGWVSQPTRLITGKEYLNGIKLRINALPSKSRTTRGRHELDRRCRAGCDASETTNHILQKCYRTYGRRIARHNSVVNSIKLGLERKGCVVHVEPSLQCESGLNKPDLVAIRQNHIYVIDAQVVTDGHSLDDAHQRKVERYDRQDVRTELRRRFGETCGTEFHSATLNWRGIWSSQSVKRLIARDLLTTGDSNIISVRVVKGGIYCFRHFMYWNGYNGMMRYGRR

SEQ ID NO: 3674 - protein, 886 aa, Scaptomyza montana
MRRPSSGELNPQVSSSEATPIIPLEQSNMEILQVIQGFSRVECDPRWNAQTLQSIVDSAQGEGKETTLHRLSNYLLDIFPCPSARTVRSRPPRRPRNNREGRRQQYATVQRNWDKHKGRCIKTLLNGNDESTMPSQDIMVPYWREVMSQPSPSSCSNTVIQLDHSMEQVLSAISLQDLRAHKVALSSSPGPDGISPKTIRSVPPGIMLRIMNLILWCGKLPYSIRLAKTIFIPKTATANRPQDFRPITVGSVLVRQLNAILASRLTSSVNWDARQCGFMPTDGCADNATMVDLILRNSHKSSLSTYIATLDVSKAFDSVSHAAVFNTMTAYGIPKEMVNYVQKSYEGGGTTLNGEGWRSDVFTPGRGVKQGDPLSPVLFNLIIDRLLRALPKEIGVKIGNAIVNAAAFADDLVLFAKTPMGLQKLLDLTVSFLDSVGLKLNADKCFTVSIKGQPKQKKTVVTQQFFRIGSTECPALKRTDEWKYLGIRFNADGRVWYSPAEDLGPKLLRLTRAPLKPQQKLFALRNVLIPQFFHQLTLGSVTIGVLRKFDRMVRFYVRGWLGLPPDVCIAFFHAPPKCGGLGIPSVRWIAPLHRQRRLSNLKWPYLEQSEVASSFVEEEIRRVRVRLLAGTTHMNTRGEIENYWANRLHMSVDGSGLREAGHFGPQHGWVSQPTRLLTGKEYRNGIQLRINALPSKSRTTRGRHELDRQCRAGCQASETTNHILQKCHRTHGKRVARHNSVANSLKRGLEAKGCVVIAEPSLQCESGLCKPDLVALRDNIIHVIDTQIVTDGHSIDEAHQRKVDRYNRPDILTELRRRFGATCGVEFHSATLNWRGIWSGQSVKRLIAKNLLSKYDSNIISVKVLRGGTYCFRQFMYLSGYSRDWT

SEQ ID NO: 3675 - protein, 891 aa, Drosophila equinoxialis
MIVIMKTSYHMKLNLFYIAHLSYGNTHIIWNISYHMKRNLFNIAHLSYGNIHIKWNISYHMKRNLFINIPFILSIWLFNYLLDIFPPPNEPHTIRPSISRGRQTRRQLRQREYAQVQRRWDKNTGRCIKSLLDGTDESVMPNQDIMEPYWKQIMTNPSTCSCDNTRFRMEHSLETVWSAITLRDLRENKLKLSSSPGPDGITPRTARSVPSGIMLRIMNLILWCGKLPYSTRLARTIFIPKTVKADRPQDFRPITVPSVLVRQLNAVLASRLASKVNWDPRQRGFLPTDGCADNATLVDLILREHHKRWKSCYLATVDVSKAFDSVSHQAIIKTLQAYGAPENFVSFIAEQYKGGGTSLNGAGWSSEVFIPASGVKQGDPLSPILFNLIIDRLLRSYPKEIGAKVGNTITSAAAFADDLVLFAETPMGLQKLLDTTVGFLASVGLTLNSDKCFTISIKGQAKQKCTVVERRSFCVGERECPSLKRTEEWKYLGIRFTADGRARYSPADDLGPKLLRLTRAPLKPQQKLFALRTVLIPQLYHQLTLGSVRIGVLRKCDRLVRQFVRRWLDLPLDVPTAFYHAPHIYGGLGIPSIRWIAPMLRLKRLSNIKWPHLEQSEVASSFIDDELQRARDRLKAEDMELGSRPEIDSYFANRLYMSVDGCGLREAGHYGPQHGWVSQPTRLLTGKEYLHGIKLRINALPSKSRTTRGRHELERRCRAGCDAPETTNHILQKCYRTHGRRVARHNSVVNAVKRGLEGRGCVVHVEPSLQCDSGLHKPDLVGIRQNHMYVIDVQVVTDGHSLDQAHQRKVERYDRADIRSQMRRSFGATGDIEFHSVTLNWRGIWSNQSVKRLIAKGLLIASDTNIISVRAVTGGVTSFKYFMYCAGYTRS

SEQ ID NO: 3676 - protein, 859 aa, Drosophila jambulina
MRKLRGYRPVVCNPHWRAEVLQSIIDRAEGLGKETTLRCLSNYLLEIFPARNAPHILTRPPRRPRNRRQSRRQQYARVQRNWDKHKGRCIKSLLDGADESVMPSRERMEPYWREVMTQPSPCSCDNIVFHMEHLHERVWSAITERDLRANKVPLSSSPGPDGISPKTARSIPTGIMLRIMNLILWCGNLPQPSRLARTIFIPKTVTANRPQDFRPITVPSVLVRQLNAILASRLTSSVNWDTRQRGFQPTDGCADNATMVDLILRESHKSRKSCYIATLDVSKAFDSISHAAVINTLTAYGLPKDFVDYVQKTYEVGGTTLNGDGWSSEVFNPARGVRQGDPLSPVIFNLVIDRLLRSLPKEIGVKVGNAMTNAAAFADDIVLFAETPMGLQKLLDKTVNFLGTVGLTLNADKCFTIGIKAQPKQKCTVVTQHSFRIGLRECPSLKRTDEWKYLGIYFTAEGRVRYNPAEDLGPKLLRLTRAPLKPQQKLFALRTVLIPQLYHKLTLGSVTIGVLRKFDRLVRFYIRKWLDLPGDVSVGYFHAPHNCGGLGIPSLRWLAPMLRLKRLSNIKWPNLEQSEVVSSFLDTEMQRARVRLRAGNVELLSRLEIDSYWANRLHMSVDGSGLRDAGKFHPQHGWVSQPTRLLTGKEYLNGIKLRINALPSKSRTTRGRHELDRRCRAGCDASETTNHILQKCYRTYGRRIARHNSVVNSIKLGLERKGCVVHVEPSLHCETGLNKPDLVALRLNHIYVIDAQVVTDGRSIDDAHQRKVERYDRQDIRTELRRRFGEACDIEFHSATLNWRGIWSSQSVKRLIAKDLLTTGDSNIISVRVVRGGINCFRHFMYWNGYNRRMRNGRH

SEQ ID NO: 3677 - protein, 752 aa, Drosophila equinoxialis
MPNQDIMEPYWKQIMTNPSTCSCDNTRFRMEHSLETVWSAITLRDLRENKLKLSSSPGPDGITPRTARSVPSGIMLRIMNLILWCGKLPYSTRLARTIFIPKTVKADRPQDFRPITVPSVLVRQLNAVLASRLASKVNWDPRQRGFLPTDGCADNATLVDLILREHHKRWKSCYLATVDVSKAFDSVSHQAIIKTLQAYGAPENFVSFIAEQYKGGGTSLNGAGWSSEVFIPASGVKQGDPLSPILFNLIIDRLLRSYPKEIGAKVGNTITSAAAFADDLVLFAETPMGLQKLLDTTVGFLASVGLTLNSDKCFTISIKGQAKQKCTVVDRRSFCVGERECPSLKRTEEWKYLGIRFTADGRARYSPADDLGPKLLRLTRAPLKPQQKLFALRTVLIPQLYHQLTLGSVRIGVLRKCDRLVRQFVRRWLDLPLDVPTAFYHAPHIYGGLGIPSIRWIAPMLRLKRLSNIKWPHLEQSEVASSFIDDELQRARDRLKAEDMELGSRPEIDSYFANRLYMSVDGCGLREAGHYGPQHGWVSQPTRLLTGKEYLHGIKLRINALPSKSRTTRGRHELERRCRAGCDAPETTNHILQKCYRTHGRRVARHNSVVNAVKRGLEGRGCVVHVEPSLQCDSGLHKPDLVGIRQNHMYVIDVQVVTDGHSLDQAHQRKVERYDRADIRSQMRRSFGATGDIEFHSVTLNWRGIWSNQSVKRLIAKGLLIASDTNIISVRAVTGGVTSFKYFMYCAGYTRS

SEQ ID NO: 3678 - protein, 1018 aa, Drosophila tani
MTTLSNTSAVNNPEGQYETGAGINHPARVTCTICERHFSSKIGLGVHMSRLHKNEFDELRRREDVNLRWSEEEKWMMARKEFELAASGILRHANKQLAEVFTNRSVEAIKKIRQRGDYKAKMEQIRGQSVPTPEVAETRTTQRRPSRSEREHQVSTSEASPITLSEQSGEIMRKLRGYRPVVCNPQWRAEVLQSIIDRAEGLGKETTLQCLSNYLLEIFPARNEPHILTRPPRRPRNRRQSRRQQYARVQRNWDKHKGRCIKSLLDGADESVMPNRERMEPYWREVMTQPSPCSCDNVVFQMEHLHERVWSAITERDLRANKVPLSSSPGPDGISPKTARSIPTGIMLRIMNLILWCGNLPQPSRLARTIFIPKTVTANRPQDFRPITVPSVLVRQLNAILASRLTSSVNWDPRQRGFLPTDGCADNATMVDLILRESHKSWKSCYIATLDVSKAFDSISHAAVINTLTAYGLPKDFVDYVQKTYEVGGTTLNGNGWSSEAFTPARGVRQGDPLSPILFNLVMDRLLRSLPKEIGVKVGNAMTNAAAFADDLVLFAETPMGLQKLLDSATNCMSSVGLTFNADKCFTVSIKGQPKQKCTVVTQQSFRVGSRECPSLKRTDEWKYLGIRFTAEGRARYNPADDLGPKLLRLTRAPLKPQQKLFALRTVLIPQLIHKLTLGSVTIGVLRKFDKLVRYYIRKWLDLPGDVSVGYFHAPHNCGGLGIPSLRWLAPMLRLKRLSNIKWPNLEQSRVVSSFMDNEMQRARVRLQAGNVELLSRLDIDTYWANRLHMSVDGSGLRDAGKFRPQHGWVSQPTRLLTGKEYLNGIKLRINALPSKSRTTRGRHELDRRCRAGCDASETTNHILQKCYRTYGRRIARHNSVVNSIKRGLERKGCVVHVEPSLQCESGLNKPDLVALRQNRIYVIDAQVVTDGHSIDDAHTRKVERYDRQDVRTELRRRFGEASGIEFHSATLNWRGIWSSQSVKRLIAKDLLTTGDSNIISVRVVKGGINCFRHFMYW

SEQ ID NO: 3679 - protein, 979 aa, Drosophila ficusphila
MSRMHKDEFDQLRRRVDVNLRWSEEEKWMMARKEFELAASGILRHPNKQLADFFTHRSVEGIKKIRQRGDYKAKMEQIRGQSAPTPEVAELSTTQRRPSYSEQEHRVSPSEASRIIPSVQSGEIMRKLRGYRPVVCNPLWRAEVLQSIIDRAEDLGPETTLQCLSNYLLEIFPAQNAPHILTRPPRRPRNRRESRRQQYAMVQRNWDKHKGRCIKSLLDGADESVMPNREIMEPYWREVMTQPSPSSCENTRFHMEHALERVWSPINERDLRVNKVPLSSSPGPDGISPKTARSIPTGIMLRIMNLILWCGNLPQPSRLARTIFIPKMATATRPQDFRPISVPSVLVRQLNAILATRLTSSINWDPRQRGFLPTDGCADNATIVDLILRESHKRWKSCYIATLDVSKAFDSVSHAAIKNTLIAYGLPKDFVDYVQRSYEVGGTTLNGEGWISDVIRPARGVKQGDPLSPVLFNLIMDRLLRSLPKEIGAKVGNAMINAAAFADDLVLFAETPMGLQKLLDKTVDFLSSVGLDLNANKCFTVSIKGQPKQKCSVVTQHSFRVGSRECPSMKRTDEWKYLGIRFTAEGRARYNPAEDFGPKLLRLTRAPLKPQQKLFALRTVLIPQLYHKLTLGSVTIGVLRKSDKLVRFYIRKWLDLPADVPVSFFHAPHNSGGLGIPSLRWIAPMLRLKRLSSIKWPHLEQSEAASCFMDDEMRRARVRLLAGGTELLSRSDIESYWANRLYMSVDGSGLREAGKFHQQHGWVSQPTRLLTGKEYLNGIKLRINALPSKSRTTRGRHELDRLCRAGCDASETTNHILQKCYRTHGRRVARHNSVVNSIKLGLERKGCVVHVEPSLQCESGLNKPDLVAIRQNHIYVIDAQVVTDGHSIDDAHKRKVERYDRPDIRTELRRQYGGTCDIEFHSATLNWRGIWSSQSVKRLIAKDLLATGDSNIISIRAVKGGIYCFRHFMYWSGYSGGAG

SEQ ID NO: 3680 - protein, 752 aa, Drosophila equinoxialis
MPNQDIMEPYWKQIMTNPSTCSCDNTRFRMEHSLETVWSAITLRDLRENKLKLSSSPGPDGITPRTARSVPSGIMLRIMNLILWCGKLPYSTRLARTIFIPKTVKADRPQDFRPITVPSVLVRQLNAVLASRLASKVNWDPRQRGFLPTDGCADNATLVDLILREHHKRWKSCYLATVDVSKAFDSVSHQAIIKTLQAYGAPENFVSFIAEQYKGGGTSLNGAGWSSEVFIPASGVKQGDPLSPILFNLIIDRLLRSYPKEIGAKVGNTITSAAAFADDLVLFAETPMGLQKLLDTTVGFLASVGLTLNSDKCFTISIKGQAKQKCTVVERRSFCVGERECPSLKRTEEWKYLGIRFTADGRARYSPADDLGPKLLRLTRAPLKPQQKLFALRTVLIPQLYHQLTLGSVRIGVLRKCDRLVRQFVRRWLDLPLDVPTAFYHAPHIYGGLGIPSIRWIAPMLRLKRLSNIKWPHLEQSEVASSFIDDELQRARDRLKAEDMELGSRPEIDSYFANRLYMSVDGCGLREAGHYGPQHGWVSQPTRLLTGKEYLHGIKLRINALPSKSRTTRGRHELERRCRAGCDAPETTNHILQKCYRTHGRRVARHNSVVNAVKRGLEGRGCVVHVEPSLQCDSGLHKPDLVGIRQNHMYVIDVQVVTDGHSLDQAHQRKVERYDRADIRSQMRRSFGATGDIEFHSVTLNWRGIWSNQSVKRLIAKGLLIASDTNIISVRAVTGGVTSFKYFMYCAGYTRS

SEQ ID NO: 3681 - protein, 979 aa, Drosophila ficusphila
MSRMHKDEFDQLRRRVDVNLRWSEEEKWMMARKEFELAASGILRHPNKQLADFFTHRSVEGIKKIRQRGDYKAKMEQIRGQSAPTPEVAELRTTQRRPSYSEQEHRVSPSEASRIIPSVQSGEIMRKLRGYRPVVCNPLWRAEVLQSIIDRAEDLGPETTLQCLSNYLLEIFPAQNAPHILTRPPRRPRNRRESRRQQYAMVQRNWDKHKGRCIKSLLDGADESVMPNREIMEPYWREVMTQPSPSSCENTRFHMEHALERVWSPINERDLRVNKVPLSSSPGPDGISPKTARSIPTGIMLRIMNLILWCGNLPQPSRLARTIFIPKMATATRPQDFRPISVPSVLVRQLNAILATRLTSSINWDPRQRGFLPTDGCADNATIVDLILRESHKRWKSCYIATLDVSKAFDSVSHAAIKNTLIAYGLPKDFVDYVQRSYEVGGTTLNGEGWISDVIRPARGVKQGDPLSPVLFNLIMDRLLRSLPKEIGAKVGNAMINAAAFADDLVLFAETPMGLQKLLDKTVDFLSSVGLDLNANKCFTVSIKGQPKQKCSVVTQHSFRVGSRECPSMKRTDEWKYLGIRFTAEGRARYNPAEDFGPKLLRLTRAPLKPQQKLFALRTVLIPQLYHKLTLGSVTIGVLRKSDKLVRFYIRKWLDLPADVPVSFFHTPHNSGGLGIPSLRWIAPMLRLKRLSSIKWPHLEQSEAASCFMDDEMRRARVRLLAGGTELLSRSDIESYWANRLYMSVDGSGLREAGKFHQQHGWVSQPTRLLTGKEYLNGIKLRINALPSKSRTTRGRHELDRLCRAGCDASETTNHILQKCYRTHGRRVARHNSVVNSIKLGLERKGCVVHVEPSLQCESGLNKPDLVAIRQNHIYVIDAQVVTDGHSIDDAHKRKVERYDRPDIRTELRRQYGGTCDIEFHSATLNWRGIWSSQSVKRLIAKDLLATGDSNIISIRAVKGGIYCFRHFMYWSGYSGGAG

SEQ ID NO: 3682 - protein, 980 aa, Drosophila equinoxialis
MSHQHKDELDTQRQREDVKLRWSEEEAWMMARKEVELEASGNLRFPNKKLAEVFTHRSSEAIKSFRKRGEYKAKLEQIRGQSTPTPEAVDSNTSQRRPSSIERHHQVSSSEAQPINPSEEQSNWEILRILQGYRPVECDPRWRAQVLQSIVDSAQTAGKQNTLQCLSNYLLDIFPPPNEPHTIRPSISRGRQTRRQLRQREYAQVQRRWDKNTGRCIKSLLDGTDESVMPNQDIMEPYWKQIMTNPSTCSCDNTRFRMEHSLETVWSAITLRDLRENKLKLSSSPGPDGITPRTARSVPSGIMLRIMNLILWCGKLPYSTRLARTIFIPKTVKADRPQDFRPITVPSVLVRQLNAVLASRLASKVNWDPRQRGFLPTDGCADNATLVDLILREHHKRWKSCYLATVDVSKAFDSVSHQAIIKTLQAYGAPENFVSFIAEQYKGGGTSLNGAGWSSEVFIPASGVKQGDPLSPILFNLIIDRLLRSYPKEIGAKVGNTITSAAAFADDLVLFAETPMGLQKLLDTTVGFLASVGLTLNSDKCFTISIKGQAKQKCTVVDRRSFCVGERECPSLKRTEEWKYLGIRFTADGRARYSPADDLGPKLLRLTRAPLKPQQKLFALRTVLIPQLYHQLTLGSVRIGVLRKCDRLVRQFVRRWLDLPLDVPTAFYHAPHIYGGLGIPSIRWIAPMLRLKRLSNIKWPHLEQSEVASSFIDDELQRARDRLKAEDMELGSRPEIDSYFANRLYMSVDGCGLREAGHYGPQHGWVSQPTRLLTGKEYLHGIKLRINALPSKSRTTRGRHELERRCRAGCDAPETTNHILQKCYRTHGRRVARHNSVVNAVKRGLEGRGCVVHVEPSLQCDSGLHKPDLVGIRQNHMYVIDVQVVTDGHSLDQAHQRKVERYDRADIRSQMRRSFGATGDIEFHSVTLNWRGIWSNQSVKRLIAKGLLIASDTNIISVRAVTGGVTSFKYFMYCAGYTRS

SEQ ID NO: 3683 - protein, 979 aa, Drosophila ficusphila
MSRMHKDEFDQLRRRVDVNLRWSEEEKWMMARKEFELAASGILRHPNKQLADFFTHRSVEGIKKIRQRGDYKAKMEQIRGQSAPTPEVAELRTTQRRPSYSEQEHRVSPSEASRIIPSVQSGEIMRKLRGYRPVVCNPLWRAEVLQSIIDRAEDLGPETTLQCLSNYLLEIFPAQNAPHILTRPPRRPRNRRESRRQQYAMVQRNWDKHKGRCIKSLLDGADESVMPNREIMEPYWREVMTQPSPSSCENTRFHMEHALERVWSPINERDLRVNKVPLSSSPGPDGISPKTARSIPTGIMLRIMNLILWCGNLPQPSRLARTIFIPKMATATRPQDFRPISVPSVLVRQLNAILATRLTSSINWDPRQRGFLPTDGCADNATIVDLILRESHKRWKSCYIATLDVSKAFDSVSHAAIKNTLIAYGLPKDFVDYVQRSYEVGGTTLNGEGWISDVIRPARGVKQGDPLSPVLFNLIMDRLLRSLPKEIGAKVGNAMINAAAFADDLVLFAETPMGLQKLLDKTVDFLSSVGLDLNANKCFTVSIKGQPKQKCSVVTQHSFRVGSRECPSMKRTDEWKYLGIRFTAEGRARYNPAEDFGPKLLRLTRAPLKPQQKLFALRTVLIPQLYHKLTLGSVTIGVLRKSDKLVRFYIRKWLDLPADVPVSFFHAPHNSGGLGIPSLRWIAPMLRLKRLSSIKWPHLEQSEAASCFMDDEMRRARVRLLAGGTELLSRSDIESYWANRLYMSVDGSGLREAGKFHQQHGWVSQPTRLLTGKEYLNGIKLRINALPSKSRTTRGRHELDRLCRAGCDASETTNHILQKCYRTHGRRVARHNSVVNSIKLGLERKGCVVHVEPSLQCESGLNKPDLVAIRQNHIYVIDAQVVTDGHSIDDAHKRKVERYDRPDIRTELRRQYGGTCDIEFHSATLNWRGIWSSQSVKRLIAKDLLATGDSNIISIRAVKGGIYCFRHFMYWSGYSGGAG

SEQ ID NO: 3684 - protein, 1047 aa, Drosophila ficusphila
MVLWGYQPLRTFSMLVQLIETSLGDLTLLWYLTWKPNMTIVQESTHWLGSPVRYVKESLALKRGLGVHMSRMHKDEFDQLRRRVDVNLRWSEEEKWMMARKEFELAASGILRHPNKQLADFFTHRSVEGIKKIRQRGDYKAKMEQIRGQSAPTPEVAELRTTQRRPSYSEQEHRVSPSEASRIIPSVQSGEIMRKLRGYRPVVCNPLWRAEVLQSIIDRAEDLGPETTLQCLSNYLLEIFPAQNAPHILTRPPRRPRNRRESRRQQYAMVQRNWDKHKGRCIKSLLDGADESVMPNREIMEPYWREVMTQPSPSSCENTRFHMEHALERVWSPINERDLRVNKVPLSSSPGPDGISPKTARSIPTGIMLRIMNLILWCGNLPQPSRLARTIFIPKMATATRPQDFRPISVPSVLVRQLNAILATRLTSSINWDPRQRGFLPTDGCADNATIVDLILRESHKRWKSCYIATLDVSKAFDSVSHAAIKNTLIAYGLPKDFVDYVQRSYEVGGTTLNGEGWISDVIRPARGVKQGDPLSPVLFNLIMDRLLRSLPKEIGAKVGNAMINAAAFADDLVLFAETPMGLQKLLDKTVDFLSSVGLDLNANKCFTVSIKGQPKQKCSVVTQHSFRVGSRECPSMKRTDEWKYLGIRFTAEGRARYNPAEDFGPKLLRLTRAPLKPQQKLFALRTVLIPQLYHKLTLGSVTIGVLRKSDKLVRFYIRKWLDLPADVPVSFFHAPHNSGGLGIPSLRWIAPMLRLKRLSSIKWPHLEQSEAASCFMDDEMRRARVRLLAGGTELLSRSDIESYWANRLYMSVDGSGLREAGKFHQQHGWVSQPTRLLTGKEYLNGIKLRINALPSKSRTTRGRHELDRLCRAGCDASETTNHILQKCYRTHGRRVARHNSVVNSIKLGLERKGCVVHVEPSLQCESGLNKPDLVAIRQNHIYVIDAQVVTDGHSIDDAHKRKVERYDRPDIRTELRRQYGGTCDIEFHSATLNWRGIWSSQSVKRLIAKDLLATGDSNIISIRAVKGGIYCFRHFMYWSGYSGGAG

SEQ ID NO: 3685 - protein, 961 aa, Drosophila equinoxialis
MSALPIIVKQNSPSVGLFTHARRERGARFRASRETFEISLIIKQAEVFTHRSSEAIKSFRKRGEYKAKLEQIRGQSTPTPEAVDSNTSQRRPSSIERHHQVSSSEAQPINPSEEQSNWEILRILQGYRPVECDPRWRAQVLQSIVDSAQTAGKQNTLQCLSNYLLDIFPPPNEPHTIRPSISRGRQTRRQLRQREYAQVQRRWDKNTGRCIKSLLDGTDESVMPNQDIMEPYWKQIMTNPSTCSCDNTRFRMEHSLETVWSAITLRDLRENKLKLSSSPGPDGITPRTARSVPSGIMLRIMNLILWCGKLPYSTRLARTIFIPKTVKADRPQDFRPITVPSVLVRQLNAVLASRLASKVNWDPRQRGFLPTDGCADNATLVDLILREHHKRWKSCYLATVDVSKAFDSVSHQAIIKTLQAYGAPENFVSFIAEQYKGGGTSLNGAGWSSEVFIPASGVKQGDPLSPILFNLIIDRLLRSYPKEIGAKVGNTITSAAAFADDLVLFAETPMGLQKLLDTTVGFLASVGLTLNSDKCFTISIKGQAKQKCTVVERRSFCVGERECPSLKRTEEWKYLGIRFTADGRARYSPADDLGPKLLRLTRAPLKPQQKLFALRTVLIPQLYHQLTLGSVRIGVLRKCDRLVRQFVRRWLDLPLDVPTAFYHAPHIYGGLGIPSIRWIAPMLRLKRLSNIKWPHLEQSEVASSFIDDELQRARDRLKAEDMELGSRPEIDSYFANRLYMSVDGCGLREAGHYGPQHGWVSQPTRLLTGKEYLHGIKLRINALPSKSRTTRGRHELERRCRAGCDAPETTNHILQKCYRTHGRRVARHNSVVNAVKRGLEGRGCVVHVEPSLQCDSGLHKPDLVGIRQNHMYVIDVQVVTDGHSLDQAHQRKVERYDRADIRSQMRRSFGATGDIEFHSVTLNWRGIWSNQSVKRLIAKGLLIASDTNIISVRAVTGGVRF

SEQ ID NO: 3686 - protein, 856 aa, Zaprionus kolodkinae
MVLLRILQDLPPVRCHQSWRVEVLQSIVDRAQVSGKVATLQCLSNYLLDIFPNRNPTPVPARARVRPQPRNRRQDRRQQYASVQRNWDKHKGRCIKSILEGPDESVMPNKEVMEPYWRQVMTQPSTSSYSPETLPWGHLLEDVWSPITIGDQKAHKVSLTTSPGPDGISAKTARSIPNGIMLRIMNLILRCGELPKLFRMARTVFISKTGKASRPQDFRPITVPSIVVRQLNAILASRLSSSVSWDPRQRGFLPTDGCADNTTIIDLVLRYHHKRFASCYIGTLDVSKAFDAISHQAVITCLNTCGAPKGFVNYIQNMYKGGGKGLKGRGWSSEEFIPARGVKQGDPLSPILFNLVIDRLLRSLPDEIGVKVGNATTNAAAFADDLVLFASTPKGLQKLLDTTVDFLSSVGLTLNADKCFTVSIKGQPKQKCTVVEHRSFSVGSRMCPALKRSEEWKYLGVHFTAEGRARYDPAADLGPKLDRLTKSPLKPQQKMFALRTVLIPQLYHKLTLGSVALGVLRKCDKLVRSTIRKWLDLPMDVSVGFFHAPHISGGLGIPSSRWIAPMLRMKRLENIKWPHLEQSVEANSFLSAELQRARDRCQAGIELLISRTTVDTYWANRLFSSVDGSGLREANRFGAQHGWVSQPTRLLTGKAYLNGIKLRINALPTRSRTTRGRQELARQCRAGCDAPESLNHVLQQCHRTHGRRVARHNNVVTKIKQGLVRRGYVVIAEPSLQGENRIYKPDLVALRHDRTLVLDAQVVTDGLELDRAHQSKIDKYSGQDVQTALRRDHPVHGDIEVVSATLNWSYRSYTRLRALDVITASDSNIISARVVTDGICGFKMFMHHPGYHRGVT

SEQ ID NO: 3687 - protein, 1028 aa, Zaprionus ornatus
MINSSNTPAVLRRPGAQQGDVEVLSQNGSSMCDVCGRSFSTKTGLGVHMSRMHKDRLDELRLRVDVKARWNEEEIAMMARKELELIAKGERFINKKLAEVYTHRSVESIKKTRQRDTYKAKIEQLRSEAARIPEANNEPSPTPRPSNIEPGPSTRSRLSPIDPLVHSDMVLLRILQDLPPVRCHLSWRVEVLQSIVDRAQASGKVATLQCLSNYLLDIFPNRNPTSVPARARVRPQPRNRRQNRRQQYASVQRNWDKHKSRCIKSILEGPDESVMPSKEVMEPYWRQVMTQTSTSSYSPETLPWGHLLENVWSPITIGDLKAHKVSLTTSPGPDGVSAKTARSIPNGIMLRIMNLILWCGELPKLFRMARTVFIPKTGKASRPQDFRPITVPSIVVRQLNAILASRLSSSVSWDPRQRGFLPTDGCADNTTIVDLVLRYHHKRFASCYIGTLDVSKAFDAISHQAVINCLNTCGAPKGFVNYIQNIYKGGGTSLKGRGWSSEEFIPARGVKQGDPLSPILFNLVIDRLLRSLPDEIGVRVGNATTNAAAFADDLVLFASTPKGLQKLLDTTVDFLSSVGLTLNADKCFTVSIKGQPKQKCTVVEHRTFSVGSRTCPALKRSEEWKYLGVHFTAEGRARYDPAADLGPKLVRLTKSPLKPQQKMFALRTVLIPQLYHQLTLGSVALGVLRKCDKLVRSTIRKWLDLPMDVSVGFFHAPHISGGLGIPSLRWIAPMLRMKRLDNIKWPHLEQSVEANSFLSAELQRARDRCQAGIELLLSRTMVDTYWANRLFSSVDGGGLREANRFGAQHGWVSQPTRLLTGKAYLNGIKLRINALPTRSRTTRGRHELARQCRAGCDAPESLNHVLQQCHRTHGRRVARHNNVVTRIKQGLVRRGYVVIAEPSLQGENRIYKPDLVALRHDRTLVLDAQIVTDGLELDRAHQSKIDKYSGQDLLTTLRRDHPVHGDIEVVSVTLNWRGIWSYRSYTRLRALDVITASDSNIISARVVTDGVCGFKMFMHHAGYHRGVT

SEQ ID NO: 3688 - protein, 981 aa, Zaprionus indianus
MSRMHKDRLDELRLRVDVKARWSEEEIAMMARKELELTANGERFINKKLAEVYTHRSVESIKKTRQRDTYKAKIEQLRSEAARIPETLNEPPTTTPRPSNSEQGSSSSRSRLPPIDPLVHSDMVLLRILQGLPPVECSQSWRVEVLQSIVDRAQVSGKEATLQCLSNYLLELFPNRNIRPVPASGRVQPLRNRRQNRRQQYARVQRNWDKHKGRCIGSLLEGPDESVMPSQEVMVPFWRQVMTQPSISTCTSAPVPMGHLLADIWSPITLRDLRAHKVSLTTSPGPDGISAKIARSIPNGIMLRIMNLILWCGNLPKLFRMARTVFIPKTGKASRPQDFRPITVPSIVVRQLNAILASRLSSSVSWDPRQRGFLPTDGCADNTTIVDLVLRSHHKRFASCYIATLDVSKAFDSISHDAIIYCLNTCGASKGFVNYIQNVYRGGSTFFKGRDWSSEAFIPARGVKQGDPLSPVLFNLVIDRLLRSLPGEIGVKVGNATTNAAAFADDLVLFASTPKGLQRLLDITVDFLSSVGLTLNADKCFTVSIKGQPKQKCTVVEHRTFCVGSRECPALKRSEEWKYLGINFTAEGRARFDPAEDLGPKLQRLTKSPLKPQQKMFAIRTVLIPQLYHKLTLGSVALGVLRKCDKLIRSTIRKWLDLPLDVSIAFFHAPHLSGGLGIPSLRWIAPMLRMKRLESIYWPHLEQSVEAISFLNIEQQRARDRCQAGLELLSSRAKVDTYWANRLFSSVDGSGLREANRFGAQHGWVCQPTRLLSGKAFLNGIKLRINALPTRSRTTRGRHELARQCRAGCSAPETLNHILQKCHRTHGRRVARHNGVVTKIKQGLVTRGYSVIAEPSLQGETGTYKPDLVAFRHDRTLVIDAQIVTDGLELDRAHQSKIDKYSGPDLLTALRREHPVHENFEVVSATLNWRGIWSYQSVTRLRALDVITASDSNIISARVVTDGVCGFKTFMHHIGYHRGVT

SEQ ID NO: 3689 - protein, 904 aa, Ephestia elutella
MYLKTNSNQATVSQSNASTSLDLVQCSECSQPRFFRGQRGLKIHQGKCHKATNASSATSTSIIAINPTQHNTDANNHIPLWQKLHKFKKTIPLLKRIPRGARRCVAASLSSCIKDLIAKNDFIVWESFLCFTYRTLNVSSNRDGSSLTQKIKNNCSANLIRPIPENSKKYPAFKISKKIESKLNEGDIKGAAELLFSNDVVAPNTPETYASLLSKHPQPSATYHLPDAPDPVQDTPVVTPNDVRAAIMSFKRGSAGGLDGLTPQHLKDLITGVTGDVGNTLLEDLTRLINLMLSGKVCESVLDVLYGANLCALRKKDGGIRPIAVGNTIRRIASKICCRFILPDLEQVFQPTQLGFGSRGGCEAAVHAARTFLKHGEGEVLLKVDVKNAFNSVDRGALLSQAKTFVPATYAYLWQCYSKPTSLIFENQRIDFAVGCQQGDPLGPAIFSLAIHPYIKDLASKFNLWYLDDGTLGGDAECVLSDLEKIKNSFGNIGLELNFSKCELYFQRDLPSQSRDEILQKFNVLAPNIKIIDDTSLHLLGAPLLEDAFPLFVNNQISVFESSSNRLRDINPHFAYTIIKFCLFVPKTTYVLRCTPLWAHNDLLIRLDDCVKEALSNILNCPLNNRCWTQATLPIRHGGLGIRKIPSVALPAFLSSVYSTQYLIGKILGPSFCDVEVACLAEARNAWSSAVGPDVVLPLNLASQRQWDEPLCKHVRSFLLETANCTAERSRLLASCEPESGYWLNAIPSTSVGTLLDRTGFSLAVSLRLGARTNEPHRCRCGEDVDSLGHHGLACRRSAGRISRHAALNDVIRRALTSVGVPAMLEPAGISRDDGKRPDGMTLIPWKNGRSLVWDATCVDTVAPSHLQATAGRAGAAAMTAEANKRRKYAALGEPYRETLGCGC

SEQ ID NO: 3690 - protein, 971 aa, Ephestia elutella
MYLKINSNQATVSQSNASTSLDLVQCSECSQPRFFRGQRGLKIHQGKCHKATNASSATSTPIIAINPTQHNTDANNHIPLWQKLHKFKKTIPLLKRIPRGARRCVAASLSSCIKDLIAKNDFIVWESFLCFTYRTLNVSSNRDGSSLTQKIKNNCSANLIRPIPENSKKYPAFKISKKIESKLNEGDIKGAAELLFSNDVVAPNTPETYASLLSKHPQPSATYHLPDAPDPVQDTPVVTPNDVRAAIMSFKRGSAGGLDGLTPQHLKDLITGVTGDVGNTLLEDLTRLINLMLSGKVCESVLDVLYGANLCALRKKDGGIRPIAVGNTIRRIASKICCRFILPDLEQVFQPTQLGFGSRGGCEAAVHAARTFLKHGEGEVLLKVDVKNAFNSVDRGALLSQAKTFVPATYAYLWQCYSKPTSLIFENQRIDSAVGCQQGDPLGPAIFSLAIHPYIKDLVSKFNLWYLDDGTLGGDAECVLSDLEKIKNSFGNIGLELNFSKCELYFQRDLPSQSRDEILQKFNVLAPNIKIIDDTSLHLLGAPLLEDAFPLFVNNQISVFESSSNRLRDINPHFAYTIIKFCLFVPKTTYVLQCTPLWAHNDLLIRLDDCVKEALSNILNCPLNNRCWTQATLPIRHGGLGIRKIPSVALPAFLSSVYSTQYLIGKILGPSFCDVEIACLAEARNAWSSAVGPDVVLPLNLASQRQWDEPLCKHVRSFLLETANCTAERSRLLASCEPESGYWLNAIPSTSVGTLLDRTGFSLAVSLRLGARTNEPHRCRCGEDVDSLGHHGLACRRSAGRISRHAALNDVIRRALTSVGVPAMLEPAGISRDDGKRPDGMTLIPWKNGRSLVWDATCVDTVAPSHLQATAGRAGAAAMTAEANKRRKYAALGEPYIFAPFAVETLGPWGADAKNLYKEISARLVDVSGDTRAGEYFGQRLSLAIQKGNVASLLGTLPHDGNDLGSIFYLI

SEQ ID NO: 3691 - protein, 968 aa, Lycaena phlaeas
MLTSTLPTPDQATSASQSGATTSQEPVQCEECSQPRFFKGQRGLHIHKSRCHKGRQPHVSSNENFHNLTANETPTEGPLWQKLNNLRRSLPLVKRIPRGARRCVATSLSSCIRDVIDKNDKHSWENFLTFAYKTLHASQDRHGSSLAQKIKNNCSPNFRPNLDNIQEKQISYKITKRIESKFDEGDIKGAADLLFSSDVVAPNSPDTYAALLAKHPQPLATTQLPDAPEPSERTLQATPEDIRGAIMSFRKGSAGGLDGMSPQHLKDLICGVVGDVGTALLEDLTRLVNLMLSGKVCSDIIDVLYGANLCALRKMDGGIRPIAVGNTIRRVASKICCRHILLVLQQEFQPTQLGFGTKGGCEAAVHAARTFLKQGVGEVLLKVDVKNAFNSVDRGVLLTQAKNRIPLTFAYLWQCYSRSTCLAYNGKVIPSAVGCQQGDPLGPAIFSLAIHPHIKNLTSKFNVWYLDDGTLGGDAASVLSDLEKITKSFSDIGLQLNYSKCELYFSEKVPAQSRYELNSKFNVLAPNIKIIEDKSLRLLGAPVLEAAFTKIVEDQILKFQESSSRLKDINPHMAYSIIKFCLFVPKTTYMLRCTPLWAHNDLLSTLDETIRISLNNIFNCPLSDRCWAQATLPIRHGGLGIRKISSVALPAFLSSVYSSVNLVGSILGPSLCGVEVASLTEARDTWLSASGPDLPLNLASQRQWDEPLCIKTRNHLIESSENEAERSRLLASCEPESGYWLNAIPSLSVGTLLERTTFSLAISLRLGARTNEPHRCRCGVDVDPLGHHGLACRRSAGRIPRHAALNDVIRRALASSGVPAALEPNGIARDDGKRPDGMTLIPWKNGRSLVWDATCVDTVAPSHVSATARKAGAAAATAENNKRRKYAALGEPYIFTPFAVETLGPWGAEARQLFKEISARLIDVSGDPRAGAHFGQRLSLAIQRGNAASLLGTLPCERNDLGSIFYII

SEQ ID NO: 3692 - protein, 968 aa, Lycaena phlaeas
MLTSTLPTPDQATSASQSGATTSQEPVQCEECSQPRFFKGQRGLHIHKSRCHKGRQPHVSSNENFHNLTANETPTEGPLWQKLNNLRRSLPLVKRIPRGARRCVATSLSSCIRDVIDKNDKHSWENFLTFAYKTLHVSQDRHGSSLAQKIKNNCSPNFRPNLDNIQEKQISYKITKRIESKFDEGDIKGAADLLFSSDVVAPNSPDTYAALLAKHPQPLATTQLPDAPEPSERTLQATPEDIRGAIMSFRKGSAGGLDGMSPQHLKDLICGVVGDVGTALLEDLTRLVNLMLSGKVCSDIIDVLYGANLCALRKMDGGIRPIAVGNTIRRVASKICCRHILLVLQQEFQPTQLGFGTKGGCEAAVHAARTFLKQGVGEVLLKVDVKNAFNSVDRGVLLTQAKNQIPLTFAYLWQCYSRSTCLAYNGKVIPSAVGCQQGDPLGPAIFSLAIHPHIKNLTSKFNVWYLDDGTLGGDAASVLSDLEKITKSFSDIGLQLNYSKCELYFSEKIPALSRYELNSKFNVLAPNIKIIEDKSLRLLGAPVLEAAFTKIVEDQILKFQESSSRLKDINPHMAYSIIKFCLFVPKTTYMLRCTPLWAHNDLLSSLDETIRISLNNIFNCPLSDRCWAQATLPIRHGGLGIRKISSVALPAFLSSVYSSVNLVGSILGPSLCGVEVASLTEARDTWLSASGPDLPLNLASQRQWDEPLCIKTRNHLLESSENEAERSRLLASCEPESGYWLNAIPSLSVGTLLERTTFSLAVSLRLGARTNEPHRCRCGVDVDPLGHHGLACRRSAGRIPRHAALNDVIRRALASSGVPAALEPNGIARDDGKRPDGMTLIPWKNGRSLVWDATCVDTVAPSHVRATARKAGAAAATAENNKRRKYAALGEPYIFTPFAVETLGPWGAEARQLFKEISARLIDVSGDPRAGAHFGQRLSLAIQRGNAASLLGTLPCERSDLGSIFYII

SEQ ID NO: 3693 - protein, 968 aa, Papilio xuthus
MLTLNLPPPEQATSASQSGATASQELVQCNECSQPRFFKGQRGLHIHQSRCHKGRQPYVSSNENLHNINGNEPTTEGPLWQKLNNLRRSLPLVKRIPRGARRCVATSLSSCVRDVIDKNDKHSWENFLTFAYKTLHVSQDKHGSSLAQKIKNNCSPNFRPTLDNIQEKQISYKITKRIESKFDEGDIKGAADLLFTSDVVAPNSPETYAALLSKHPQPLATTHLPDAPEPSERTLEATPGDVRTAIMTFRRGSAGGLDGMSPQHLKDLICGVVGDVGTALLEDLTSLVNLMFSGKVCNDIIDVLYGANLCALRKMDGGIRPIAVGNAIRRVASKICCRHILLDLQRDFQPTQLGFGTKGGCEVAVHAARTFLKHGLSEVLLKVDVKNAFNSLDRGVLLTQAKNHIPHTFAYLWQCYSGSTSLAYNGQVIQSAVGCQQGDPLGPAIFSLAIHPHIKNLSSKFNIWYLDDGTLGGDATSVLSDLEKITKSFSDIGLQLNFSKCELYFSERLPAESRHELNSKFNVLAPNIKIINDQSLRLLGASVLEAAFPKIVEDQILKFQESSSRLKDINPHMAYFIIKFCLFVPKTTYTLRCTPLWAHNDLLSRLDDTVRIALNSTFNCPLNDRCWAQATLPIRHGGLGIRKISSVALPAFLSSVHSSVNLVGSILGPSLCGVEVACLAEARDTWLSAIGPDLPLNLASQRQWDEPLCLQIRNHLVESSESEAERSRLLASCEPESGYWLNAIPSFSVGTLLERTTFSLAVSLRLGARTNEPHRCRCGVDVDPLGHHGLACRRSAGRIPRHAALNDVIRRALASSGVPAVLEPNGIARDDGKRPDGMTLIPWKNGRSLVWDATCVDTVAPSHVRATARKAGAAAATAEINKRRKYAALADPYIFAPFAVETLGPWGAEARRLFKEISARLIDASGDPRAGAHFGQRLSLAIQRGNAASLLGTLPCDRSDLGSIFYII

SEQ ID NO: 3694 - protein, 968 aa, Lycaena phlaeas
MLTSTLPTPDQATSASQSGATTSQEPVQCEECSQPRFFKGQRGLHIHKSRCHKGRQPHVSCNENFHNLTANETPTEGPLWQKLNILRRSLPLVKRIPRGARRCVATSLSSCIRDVIDKNDKHSWENFLTFAYKTLHVSQDRHGSSLAQKIKNNCSPNFRPNLDNIQEKQISYKITKRIESKFDEGDIKGAADLLFSSDVVAPNSPDTYAALLAKHPQPLATTQLPDTPEPSERTLQATPEDIRGAIMSFRKGSAGGLDGMSPQHLKDLICGVVGDVGTALLEDLTRLVNLMLSGKVCSDIIDVLYGANLCALRKMDGGIRPIAVGNTIRRVASKICCRHILLVLQQEFQPTQLGFGTKGGCEAAVHAARTFLKQGVGEVLLKVDVKNAFNSVDRGVLLTQAKNQIPLTFPYLWQCYSRSTCLAYNGKVIPSAVGCQQGDPLGPAIFSLAIHPHIKNLTSKFNVWYLDDGTLGGDAASVLSDLEKITKSFSDIGLQLNYSKCELYFSEKVPAQSRYELNSKFNVLAPNIKIIEDKSLRLLGAPVLEAAFTKIVEDQILKFQESSSRLKDINPHMAYSIIKFCLFVPKTTYMLRCTPLWAHNDLLASLDETIRISLNNIFNCPLSDRCWAQATLPIRHGGLGIRKISSVALPAFLSSVYSSVNLVGSILGPSLCGVEVASLTEARDTWLSAFGPDLPLNLASQRQWDEPLCIKTRNHLLESSENEAERSRLLASCEPESGYWLNAIPSLSVGTLLERTTFSLAVSLRLGARTNEPHRCRCGVDVDPLGHHGLACRRSAGRIPRHAALNDVIRRALASSGIPAALEPNGIARDDGKRPDGMTLIPWKNGRSLVWDATCVDTVAPSHVRATARKAGAAAATAENNKRRKYAALGEPYIFTPFAVETLGPWGAEARQLFKEISARLIDVSGDPRAGAHFGQRLSLAIQRGNAASLLGTLPCERSDLGSIFYII

SEQ ID NO: 3695 - protein, 722 aa, Chilo suppressalis
MSFRRGSASGLDGMSPQHLKDLICGVVGDVGTALLENLTRLLNLMFSGKVCNDIIDLLYGANLCALRKMDDGIRPIAVGNAIRRVASKICCRHILLDLQQEFQPTQLGFGTKGGCEAAVHAARTFLKQGLSEVLLKVDVKNAFNSLDRGVLLTQAKEKIPLTFAYLWQCYSGSTSLAYNGQVILSAVGCQQGDPLGPAIFSLALHPHIKNLNSKFNVWYLDDGTLGGDAASVLSDLEKITKSFSDIGLQLNFSKCELYFSERLPAQSRYELNSKFNVLAPNIKIIDDQSLRLLGAPVLEAAFTKIVEDQILKFQESSSRLKDINPHMAYFIIKFCLFVPKTTYTLRCTPLWAHNDLLSRLDETVRVALISTFNCPLNDRCWAQATLPIRHGGLGIRKISSVALPAFLSSVYSTVNLVGSILGPSFCGVEVACLAEARDTWLSATGPDLPLNLASQRQWDEPLCMKTRNRLLESSENEAEWSRLLASCEPESGYWLNAIPSLSVGTLLERTTFSLAVSLRLGARTNEPHRCRCGVDVDPLGHHGLACRRSAGRIPRHAALNDVIRHALASSGVPAVLEPNGIARDDGKRPDGMTLIPWKNGRSLVWDATCVDTVAPSHVRATARKAGAAAATAEINKRRKYGALGEPYIFTPFAVETLGPWGAEARQLFKEISTRLIDASGDPRAGAHFGQRLSLAIQRGNAASLLGTLPCERSDLGSIFYIM

SEQ ID NO: 3696 - protein, 968 aa, Lycaena phlaeas
MLTSTLPTPDQATSASQSGATTSQEPVQCEECSQPRFFKGQRGLHIHKSRCHKGRQPHVSSNENFHNLTANETPTEGPLWQKLNNLRRSLPLVKRIPRGARRCVATSLSSCIRDVIDKNDKHSWENFLTFAYKTLHVSQDRHGSSLAQKIKNNCSPNFRPNLDNIQEKQISYKITKRIESKFDEGDIKGAADLLFSSDVVAPNSPDTYAALLAKHPQPLATTQLPDAPEPSERTLQATPEDIRGAIMSFRKGSAGGLDGMSPQHLKDLICGVVGDVGTALLEDLTRLVNLMLSGKVCSDIIDVLYGANLCALRKMDGGIRPIAVGNTIRRVASKICCRHILLVLQQEFQPTQLGFGTKGGCEAAVHAARTFLKQGVGEVLLKVDVKNAFNSVDRGVLLTQAKNRIPLTFAYLWQCYSRSTCLAYNGKVIPSAVGCQQGDPLGPAIFSLAIHPHIKNLTSKFNVWYLDDGTLGGDAASVLSDLEKITKSFSDIGLQLNYSKCELYFSEKVPAQSRYELNSKFNVLAPNIKIIEDKSLRLLGAPVLEAAFTKIVEDQILKFQESSSRLKDINPHMAYSIIKFCLFVPKTTYMLRCTPLWAHNDLLSSLDETIRISLNNIFNCPLSDRCWAQATLPIRHGGLGIRKISSVALPAFLSSVYSSVNLVGSILGPSLCGVEVASLTEARDTWLSASGPDLPLNLASQRQWDEPLCIKTRNHLIESSENEAERSRLLASCEPESGYWLNAIPSLSVGTLLERTTFSLAVSLRLGARTNEPHRCRCGVDVDPLGHHGLACRRSAGRIPRHAALNDVIRRALASSGVPAALEPNGIARDDGKRPDGMTLIPWKNGRSLVWDATCVDTVAPSHVSATARKAGAAAATAENNKRRKYAALGEPYIFTPFAVETLGPWGAEARQLFKEISARLIDVSGDPRAGAHFGQRLSLAIQRGNAASLLGTLPCERNDLGSIFYII

SEQ ID NO: 3697 - protein, 968 aa, Lycaena phlaeas
MLTSTLPTPDQATSASQSGATTSQEPVQCEECSQPRFFKGQRGLHIHKSRCHKGRQPHVSSNENFHNLTANETPTEGPLWQKLNILRRSLPLVKRIPRGARRCVATSLSSCIRDVIDKNDKHSWENFLTFAYKTLHVSQDRHGSSLAQKIKNNCSPNFRPNLDNIQEKQISYKITKRIESKFDEGDIKGAADLLFSSDVVAPNSPDTYAALLAKHPQPLATTQLPDTPEPSERTLQATPEDIRGAIMSFRKGSAGGLDGMSPQHLKDLICGVVGDVGTALLEDLTRLVNLMLSGKVCSDIIDVLYGANLCALRKMDGGIRPIAVGNTIRRVASKICCRHILLVLQQEFQPTQLGFGTKGGCEAAVHAARTFLKQGVGEVLLKVDVKNAFNSVDRGVLLTQAKNQIPLTFPYLWQCYSRSTCLAYNGKVIPSAVGCQQGDPLGPAIFSLAIHPHIKNLTSKFNVWYLDDGTLGGDAASVLSDLEKITKSFSDIGLQLNYSKCELYFSEKVPAQSRYELNSKFNVLAPNIKIIEDKSLRLLGAPVLEAAFTKIVEDQILKFQESSSRLKDINPHMAYSIIKFCLFVPKTTYMLRCTPLWAHNDLLASLDETIRISLNNIFNCPLSDRCWAQATLPIRHGGLGIRKISSVALPAFLSSVYSSVNLVGSILGPSLCGVEVASLTEARDTWLSAFGPDLPLNLASQRQWDEPLCIKTRNHLLESSENEAERSRLLASCEPESGYWLNAIPSLSVGTLLERTTFSLAVSLRLGARTNEPHRCRCGVDVDPLGHHGLACRRSAGRIPRHAALNDVIRRALASSGIPAALEPNGIARDDGKRPDGMTLIPWKNGRSLVWDATCVDTVAPSHVRATARKAGAAAATAENNKRRKYAALGEPYIFTPFADETLGPWGAEARQLFKEISARLIDVSGDPRAGAHFGQRLSLAIQRGNAASLLGTLPCERSDLGSIFYII

SEQ ID NO: 3698 - protein, 722 aa, Papilio alexanor
MSFRRGSAGGLDGMSPQHLKDLICGVVGDVGTALLEDLTSLVNLMFSGKVCKDIIDVLYGANLCALRKMDGGIRPIAVGNTIRRVASKICCRHILQDLQQEFQPTQLGFGTKGGCEAAVHAARTFLKQGSSEVLLKVDVKNAFNSLDRGVLLTQAKDQIPLTFAYLWQCYSGSTSLAYNGQLIQSAVGCQQGDPLGPAIFSLAIHPHIKNLTSKFNVWYLDDGTLGGDAASVLSDLEKITKSFSDIGLQLNFSKCELYFSERLPEQCRYELNSKFNVLAPNIKVIDDQSLRLLGAPVLEAAFTKIVEDQILKFQESSSRLKDINPHMAYFIIKFCLFVPKTTYTLRCTPLWAHNDLLSLLDDTVRVVLNSTFNCPLNDRCWAQATLPIRHGGLGIRKISCVALPAFLSSVYSSVNLVGNILGPSFCGVEVACLAEARDAWLSATGPDLPLNLASQRQWDEPLCIKTRNQLLESSENEAERSRLLASCEPESGYWLNAIPSFSVGTLLERTTFSLAVSLRLGARTNEAHRCRCGVDVDPLGHHGLACRRSAGRIPRHAALNDVIRRALASSGVPAVLEPNGITRDDGKRPDGMTLIPWKNGRSLVWDATCVDTVAPSHVRATARKAGAAAATAETNKRRKYAALGEPYIFVPFAVETLGPWGAEARQLFKEISVRLIDVSGDPRAGAHFGQRLSLAIQRGNAASLLGTLPCERSDLGSIFYII

SEQ ID NO: 3699 - protein, 971 aa, Chilo suppressalis
MLTLPAPEQATSASQSGATTSQEPVQCRECSQPRFFKGQRGLNIHKSRCHKGRQPHVSSNDNFLNITANEAPTEGPFWQKLNNLKRSLPLVKRIPRGARRCVATSLSSCVRDVVEKNDKHSWENFLTFAYKTLHVSQDKNSSSLAQKIKNNCSPNFRLTLDNIQEKQISYKITKRIESKFDEGDIKGAADLLFSSDVVAPNSPETYVALLSKHPQPLATAHLPDAPDPSERTLKATPEDIRTAIMSFRRGSASLDGMSPQHLKDLISGVVGDVGTALLEDLTRLVNLMFSGKVCNDIIDVLYGANICALRKMDGGIRPIAVGNTIRRVASKICCRHILLDLQQEFQPTQLGFGTKGGCEAAVHAARTFLKQGLSEVLLKVDVKNAFNSLDRGVLLTQAKEKIPLTFAYLWQCYSGSTSLAYNGQVIQSAVGCQQGDPLGPAIFSLAIHPHIKNLTSKFNVWYLDDGTLGGDAASVLSDLEKITKSFSDIGLQLNFSKCELYFSERLPAQSRYELNSKFNVLAPNIKIIDAQSLRLLGAPVLEAAFTKIVEDQILKFQESSSHLKDINPHMAYFIIKFCLFVPKTTYTLRCTPLWAHNDLLSRLDETVRVALNSTFNCPLNDRCWAQATLPIRHGGLGIRKISSVALPAFLSSVYSTVNLVGSILGPSFCGVEVACLAEARDTWLSTTGPDLLMNLASQRQWDEPLCMKTRNQLLESSENKAERSRLLASCEPESGYWLNAIPSLSVGTLLERTTFSLAVSLRLGARTNEPHRCRCGVDVDPLGHHGLACRRSAGRIPRHAALNDVIRRALASSGVPAVLEPNGIARDDGKRPDGMTLIPWKNGRSLVWDATYVDTVAPSHVRATARKAGAAAATAEINKRRKYGALGEPYIFTPFAVETLGPWGAEARQLFKEISTRLIDASGDPRAGAHFGQRLSLAIQRGNAASLLGTLPCERSDLGSIFLYYFIFSFI

SEQ ID NO: 3700 - protein, 950 aa, Junonia evarete
MSSFSHGDNTSLDAPIQCEQCSQPRFFKNQRGLNIHIGKSHKSGTQAQYSSCSSNATDVRDPLWKQLSFFKSNFPIIKRIPRGSRTQVALALKEAIDSVVSTNNVTSWEHLLTFAYRVMNVNQNEPGSLTVKIKRNCNRAHNDFDYSTKETFKKRKFNAPKYIENKISDGDFKGAARLLFSSDVLAPETAETVQALKDKHPQNNVSIIPDSSNNISPLQAETDDVFGAVMSFRSGSAGGLDGLTPQHLKDLLCGTNGDAGRSLLKSITDLVNLMLSGGVPTEITDILYGANLCALVKKDGGIRPIAVGSTIRRVVSKICCRKISPYLADMFQPVQLGFGSKGGCEAAVHAARTFLVNSGGDVLLKVDLKNAFNSICRSALLSEVKNKIPKIYPYLWQCYGGNTKLLYHDNVISSAVGCQQGDPLGPAIFSLAIHPLIKTLNSKFNIWYLDDGTLGGELTTVSNDFSKLIEQFSKIGLDFNFSKCELFIPNHVSSMKKEVIIKQFNTLAPGIKILCEDSLHLLGAPVLEASIPNFIFDQTIKFNQVSDRLHLINSHMALFLVRYCLFGPKFGYFLRCSPFWKFSNLLTNLDNIIREVLTKILNCDLSDTAWEQASLPIRYGGLGIRKISSVSLPAFLASAYSSAKLYGNIISPSLGSTELSYLAEARDAFKILCPSKEPVSLSSQRQWDDLLSADRFKSLIDTAPTAKDQARLLAVSTRESGYWLQSLPSPHVGTLLDHLTLTVSVGLRLGAKIYQPHRCHCGEAVDEYGHHGLSCTKSVGRFSRHASLNGVIHRSLVTARIPSVLEPNGLVRSDGKRPDGLTLVPWSLGKSLVWDATCVDTLAASHIQGTSLTVGAAAKSAECIKRRKYENIGKNFVFVPFAVETMGSWGEEAKKFYKELSSRLVESTGDRKAGDYFGQHISLAIQRGNVASVLGTLPHCSDIDTYLGFI

SEQ ID NO: 3701 - protein, 951 aa, Hypolimnas misippus
MSSSYSGVNISLDELVKCEQCSQPRYFKNQRGLNIHIGKSHKSTSQTQHDLSPSSSTCALDPLWKQLSTCKSNFPILKRIPRGSRTQVAFTLKEVIDNVVSSNNETSWEHLLTFAYKILNVENNDPGSLTQKIKRNCNKASKNIDFSNKQPIQKRKFNSIKFIENKISDGDLKGAARLLFSSDVIAPDTAETVRALRDKHPQCNTLPIIPDILPDNNSPLQAETEDVLGAVMSFRSGSAGGLDGLTPQHLKDLLCGTNGDAGRALLKSLTDLVNLMLSGGVPKEITEILYGANLCALIKKDGGIRPIAVGSTIRRIVSKICCRKISPYLATMFQPVQLGFGSKGGCEAAVHAARTFLLNSGGEVLLKVDIKNAFNSICRNALLSEVKNKIPKIYPYLWQCYGGNSKLLYRDNVLNSAVGCQQGDPLGPAIFSLAIQPLITALSSKLNIWYLDDGTLGGEVTTVLDDFSKLLEQFSNIGLEFNFSKCELFISDHISSTRRDMIIKQFNNLAPGIKILSEDSLHLLGAPVLDASIPNFIFDQSTKFNEVSDRLYQINSHMALFIVRYCLFGPKFSYFLRCSPLWKFSNLLLNLDNIIKEVLTKILNCDLSDTAWEQASLPIRYGGLGIRKISSVSLPAFLASAFSSTKLFRDIISPSLGSIELSYLVEARDAFKLLCLSKEPVILSSQRQWDDLICADRLKALIDAAPSAIDQARLLAVSTRESGYWLHALPSPHVGTLLDHLTLTVSVGLRLGAKIYQPHRCHCGEAADEYGHHGLSCIKSAGRFSRHASLNSVIRRSLVTAKIPAVLEPNGLVRSDGKRPDGMTLVPWRLGRSLVWDATCVDTLAASHIRGTSLTVGAAASNAENVKRRKYENIERSFIFVPFAVETMGSWGEEAKKFFKELSSRLVETTGDRRAGGYLGQHISLAIQRGNAASVLGTLPHCDIDSYLGLI

SEQ ID NO: 3702 - protein, 950 aa, Junonia vestina
MSSFSHGDNTSLDVPIQCEQCSQPRYFKTKRGLSIHIGKTHKSGSQSQHLPSPPSATGVLDPFWKQLSFLKSNFPIIKRIPRGSRTQVALALKDVVDGVVSANNAISWEHLLTFPYRVLNVNLDDPGSLTSKIKRNCNKAKNDFDLTIKENVKKKEFKLTKYVENKITDGDFKGAARLLFSSDVLAPETTETVQALKMKHPQNNISIIPDNLNNNSPLQAETDDVFGAVMSFRSGSAGGLDGLTPQHLKDLLCGTNGDAGRSLLKSITDLVNLMLSGGVPTEITDILYGANLCALVKKDGGIRPIAVGSTIRRVVSKICCRKISPYLADMFQPVQLGFGSKGGCEAAVHATRTFLTNSGGEVLLKVDLKNAFNSICRSALLSEVKNKIPKIYSYLWQCYGGNTKLLYHDNVISSAVGCQQGDPLGPAIFSLAIQPIIANLNSKFNIWYLDDGTLGGEVTTVLGDFSKLIKQFSYIGLNFNFSKCELFISNNVSSSKKNEIVKQFSNLAPGIKILSEDSLHLLGAPVLDAAIPKFISDQITKFNQVSDRLHLINSHMALFLVRYCLFGPKFGYFLRCSPLWKFNNLLLNLDNIIREVLTNILNCDLIDSAWEQASLPIRYGGLGIRKISSVSLPAFLASAYSSSKLFGDIINPSLGPVELSHLAEARDAFKTLCPSKIPVSLSSQRQWDDLLCADRLKSLLDAASTVKDKARLLAVSTRESGYWLHALPSPHVGTLLDHLTLTVSVGLRLGAKIYQPHRCHCGEVVDEYGLHGLSCIKSAGRFSRHATLNSVIHRSLVNARIPAILEPNGLFRSDGKRPDGMTLVPWKLGRSLVWDATCVDTLAASHIQGSSLMAGAAARNAEITKRRKYENIEKSFVFVPFAVETMGSWGEEAREFYKELACRLTKSTGDPRAGSYLGQHISLAIQRGNAASVLGTLPHCNVVDGYLDFI

SEQ ID NO: 3703 - protein, 950 aa, Junonia evarete
MSSLSHGDNISLDVPIQCEQCSQPRYFKTKRGLSIHIGKTHKSGSQTQHLPSSPSATGVLDPLWKQLSFLKSNIPIIKRIPRGSRTQVALALKDVIDGVVTANNVTNWEHLLTFPYRVLNVHLDDPGSLTSKIKRNCSKTQNDFDFTIKENLKKKKFKLTKYVENKITDGDFKGAARLLFSSDVLAPETTETVQALKDKHPQNNISIIPDNLNNNSPLQAETDDVFGAVMSFRSGSAGGLDGLTPQHLKDLLCGTNGDAGRSLLKSITDLVNLMLSGGVPAEITDILYGANLCALVKKDGGIRPIAVGSTIRRVVSKICCRKISPYLADMFQPVQLGFGSKGGCEAAVHATRTFLINSGGEVLLKVDLKNAFNSICRSALLSEVKNKIPKIYPYLWQCYGGNTKLLYHDNVISSAVGCQQGDPLGPAIFSLAIHPLISNLNSKFNIWYLDDGTLGGEVTTVLDDFSKLIKQFSNIGLNFNFSKCELFISKNVSSIKKDEIVKQFNTLAPGIKILSEDSLHLLGAPVLDAAIPKFISDQITKFNQVSDRLHLINSHMALFLARYCLFGPKFGYFLRSSPLWKFNDLLLNLDNIIREVLTNILNCDLIDSAWEQASLPIRYGGLGIRKISSVSLPAFLASAYSSAKLFGDIVNPSLGPVELSYLAEARDAFKTLCPSKEPVSLSSQRQWDDLLCADRLKSLLDAAPTAKDKARLLAVSTRESGYWLHALPSPHVGTLLDHLTLTVSVGLRLGAKIYQPHRCHCGEAVDEYGLHGLSCTKSAGRFSRHATLNSVIHRSLVNARIPAILEPNGLVRSDGKRPDGMTLVPWKLGRSLVWDATCVDTLAASHIQGSSLMAGAAAKNAEFTKRRKYENIEKSFVFVPFAVETMGSWGREAREFYKELSSRLTESTGDPRAGSYLGQHISLAIQRGNAASVLGTLPHCNVIDGYLDFI

SEQ ID NO: 3704 - protein, 926 aa, Junonia genoveva
MSSLSHGDNISLDVPIQCEQCSQPRYFKTKRGLSIHIGKTHKSGSQTQHLPSSPSATGVLDPLWKQLSFLKSNIPIIKRIPRGSRTQVALALKDVIDGVVTANNVTNWEHLLTFPYRVLNVHLDDPGSLTSKIKRNCNKTQNDFDFTIKENLKKKKFKLTKYVENKITDGDFKGAARLLFSSDVLAPETTETVQALKDKHPQNNISIIPDNLNNNSPLQAETDDVFGAVMSFRSGSAGGLDGLTPQHLKDLLCGTNGDAGRSLLKSITDLVNLMLSGGVPAEITDILYGANLCALVKKDGGIRPIAVGSTIRRVVSKICCRKISPYLADMFQPVQLGFGSKGGCEAAVHATRTFLINSGGEVLLKVDLKNAFNSICRSALLSEVKNKIPKIYPYLWQCYGGNTKLLYHDNVISSAVGCQQGDPLGPAIFSLAIHPLISNLNSKFNIWYLDDGTLGGEVTTVLDDFSKLIKQFSNIGLNFNFSKCELFISKNVSSIKKDEIVKQFNTLAPGIKILSEDSLHLLGAPVLDAAIPKFISDQITKFNQVSDRLHLINSHMALFLARYCLFGPKFGYFLRSSPLWKFNDLLLNLDNIIREVLTNILNCDLIDSAWEQASLPIRYGGLGIRKISSVSLPAFLASAYSSAKLFGDIVNPSLGPVELSYLAEARDAFKTLCPSKEPVSLSSQRQWDDLLCADRLKSLLDAAPTAKDKARLLAVSTRESGYWLHALPSPHVGTLLDHLTLTVSVGLRLGAKIYQPHRCHCGEAVDEYGLHGLSCTKSAGRFSRHATLNSVIHRSLVNARIPAILEPNGLFRSDGKRPDGMTLVPWKLGRSLVWDATCVDTLAASHIQGSSLMAGAAARNAEITKRRKYENIEKSFVFVPFAVETMGSRSEKARKFYQDFFPLKAVTLLYLLYRYIFLVLLYIYII

SEQ ID NO: 3705 - protein, 916 aa, Junonia evarete
MSSFSHGDNTSLDAPIQCEQCSQPRFFKNQRGLNIHIGKSHKSGTQAQYSSCSSNATDARDPLWKKLSFFKSNFPIIKRIPRGSRTQVALALKEAIDSVVSTNNVTSWEHLLTFAYRVMNVNQNEPGSLTVKIKRNCNRAHNDFDYSTKETFKKRKFNAPKYIENKISDGDFKGAARLLFSSDVLAPETAETVQALKDKHPQNNVTIIPDSSNNISPLQAETDDVFGAVMSFRSGSAGGLDGLTPQHLKDLLCGTNGDAGRSLLKSITDLVNLMLSGGVPTEITDILYGANLCALVKKDGGIRPIAVGSTIRRVVSKICCRKISPYLADMFQPVQLGFGSKGGCEAAVHAARTFLVNSGGDVLLKVDLKNAFNSICRSALLSEVKNKIPKIYPYLWQCYGGNTKLLYHDNVISSAVGCQQGDPLGPAIFSLAIHPLIKTLNSKFNIWYLDDGTLGGEMTTVSNDFSKLIEQFSKIGLDFNFSKCELFIPNHVSSMKKEVIIKQFNTLAPGIKILCEDSLHLLGAPVLEASIPNFIFDQTIKFNQVSDRLHLINSHMALFLVRYCLFGPKFGYFLRCSPFWKFSNLLTNLDNIIREVLTKILNCDLSDTAWEQASLPIRYGGLGIRKISSVSLPAFLASAYSSAKLYGNIISPSLGSTELSYLAEARDAFKILCPSKEPVSLSSQRQWDDLLSADRFKSLIDTAPTAKDQARLLAVSTRESGYWLQSLPSPHVGTLLDHLTLTVSVGLRLGAKIYQPHRCHCGEAVDEYGHHGLSCTKSVGRFSRHASLNGVIHRSLVTARIPSVLEPNGLVRSDGKRPDGLTLVPWSLGKSLVWDATCVDTLAASHIQGTSLTVGAAAKSAECIKRRKYENIGKNFVFVPFAVETMGSWGEEAKKFYKELSSRLVESTGDRKAGDY

SEQ ID NO: 3706 - protein, 951 aa, Hypolimnas misippus
MSSSYSGVNISLDELVKCEQCSQPRYFKNQRGLNIHIGKSHKSTSQTQHDLSPSSSTCALDPLWKQLSTCKSNFPILKRIPRGSRTQVAFTLKEVIDNVVSSNNETSWEHLLTFAYKILNVENNDPGSLTQKIKRNCNKASNNIDFSNKQPIQKRKFNSIKFIENKISDGDLKGAARLLFSSDVIAPDTAETVRALRDKHPQCNTLPIIPDILPDNNSPLQAETEDVLGAVMSFRSGSAGGLDGLTPQHLKDLLCGTNGDAGRALLKSLTDLVNLMLSGGVPKEITEILYGANLCALIKKDGGIRPIAVGSTIRRIVSKICCRKISPYLATMFQPVQLGFGSKGGCEAAVHAARTFLLNSGGEVLLKVDIKNAFNSICRNALLSEVKNKIPKIYPYLWQCYGGNSKLLYRDNVLNSAVGCQQGDPLGPAIFSLAIQPLITALSSKLNIWYLDDGTLGGEVTTVLDDFSKLLEQFSNIGLEFNFSKCELFISDHISSTRRDMIIKQFNNLAPGIKILSEDSLHLLGAPVLDASIPNFIFDQSTKFNEVSDRLYQINSHMALFIVRYCLFGPKFSYFLRCSPLWKFSNLLLNLDNIIKEVLTKILNCDLSDTAWEQASLPIRYGGLGIRKISSVSLPAFLASAFSSTKLFRDIISPSLGSIELSYLVEARDAFKLLCLSKEPVILSSQRQWDDLICADRLKALIDAAPSAIDQARLLAVSTRESGYWLHALPSPHVGTLLDHLTLTVSVGLRLGAKIYQPHRCHCGEAADEYGHHGLSCIKSAGRFSRHASLNSVIRRSLVTAKIPAVLEPNGLVRSDGKRPDGMTLVPWRLGRSLVWDATCVDTLAASHIRGTSLTVGAAASNAENVKRRKYENIERSFIFVPFAVETMGSWGEEAKKFFKELSSRLVETTGDRRAGGYLGQHISLAIQRGNAASVLGTLPHCDIDSYLGLI

SEQ ID NO: 3707 - protein, 950 aa, Junonia evarete
MSSFSHGDNTSLDAPIQCEQCSQPRFFKNQRGLNIHIGKSHKSGTQAQYSSCSSNATDARDPLWKKLSFFKSNFPIIKRIPRGSRTQVALALKEAIDSVVSTNNVTSWEHLLTFAYRVMNVNQNEPGSLTVKIKRNCNRAHNDFDYSNKETFKKRKFNAPKYIENKISDGDFKGAARLLFSSDVLAPETAETVQALKDKHPQNNVTIIADSSNNISPLQAETDDVFGAVMSFRSGSAGGLDGLTPQHLKDLLCGTNGDAGRSLLKSITDLVNLMLSGGVPTEITDILYGANLCALVKKDGGIRPIAVGSTIRRVVSKICCRKISPYLADMFQPVQLGFGSKGGCEAAVHAARTFLVNSGGDVLLKVDLKNAFNSICRSALLSEVKNKIPKIYPYLWQCYGGNTKLLYHDNVISSAVGCQQGDPLGPAIFSLAIHPLIKTLNSKFNIWYLDDGTLGGEMTTVSNDFSKLIEQFSKIGLDFNFSKCELFIPNHVSSIKKEAIVKQFNTLAPGIKILGEDSLHLLGAPVLEASIPNFIFDQTIKFNQVSDRLHLINSHMALFLVRYCLFGPKFGYFLRCSPFWKFSNLLTNLDNIIREVLTKILNCDLSDTAWEQASLPIRYGGLGIRKISSVSLPAFLASAYSSAKLYGNIISPSLGSTELSYLAEARDAFKILCPSKEPVSLSSQRQWDDLLSADRFKSLIDTAPTAKDQARLLAVSTRESGYWLQSLPSPHVGTLLDHLTLTVSVGLRLGAKIYQPHRCHCGEAVDEYGHHGLSCTKSVGRFSRHASLNGVIHRSLVTARIPSVLEPNGLVRSDGKRPDGLTLVPWSLGKSLVWDATCVDTLAASHIQGTSLTVGAAAKSAECIKRRKYENIVKNFVFVPFAVETMGSWGEEAKKFYKELSSRLVESTGDRKAGDYFGQHISLAIQRGNVASVLGTLPHCSDIDTYLGFI

SEQ ID NO: 3708 - protein, 950 aa, Hypolimnas misippus
MTSPLCGDNISLDELFKCEQCSQPRYFKNKRGLNIHLGKTHKSNSQTHFNPCPSTSITDLDPLWNRLSVFKANFPVIKRIPRGSRTQVAVALTKVINDVINSNNVTCWEHLLTFAYKVLNVVQNDPGSLTQKIKNNCNKIANNLIFPMTQSIRRKKFNSIKHIENKISDGDFKGAARLLFSSDIIAPNTSETVKALSDKHPQHNTSIISSCFTDSNTPLQAETDDVFGAVMSFRSGSAGGLDGLTPQHFKDLICGSNGDAGRTLLKSITDLVNLMLSGGVPKAIVGVLYGANLCALIKKDGGIRPIAVGSTIRRVVSKICCRNITPVLANMFQPVQLGFGSKGGCEAAVHAARTFLLKSGGEVILKVDIKNAFNSICRSALLSEVKNKIPKIYPYIWQCYGQNSKLMYHNNVLNSAVGCQQGDPLGPAIFSLAIHPLITSLNSKFNIWYLDDGTLGGEVTTVLDDFSKLIKNFSNIGLEFNTSKCELFIPNHISSSRKDLIINQFNTLAPGIKILNEESLHLLGAPVLDAAIPKFIFDQTIKFNEVSDRLHLINSHMALFIVRYCLFGPKFAYFLRCSPLWKFKDLLLHLDDIIREVLTKILNCDLLDTAWEQASLPIRYGGLGIRKISSVSLPAFLASAHSSAKLFGNIISPSLGSTELSYLDEAREAFHLLCPSKEPVTVSSQRQWDELLCADGLKSLIENAPSAKDRARLLAVSTRESGYWLHALPSPHVGTLLDHLTLTVSVGLRLGAKIYHPHRCHCGEAVDEYGHHGLSCAKSAGRFSRHASLNGIIHRSLVTAKIPSALEPNGLVRSDGKRPDGMTLVPWKLGKSLVWDATCVDTLAASHMQGTSATAGAAATTAENVKRRKYENIQRSFIFVPFAVETMGSWGEEAKRFYQELSSRLVESTSDRRAGAYLGQHISLAIQRGNAASVLGTLPHCSDIDRFLCT

SEQ ID NO: 3709 - protein, 905 aa, Junonia evarete
MSSFSHGDNTSLDVPIQCEQCSQPRYFKTKRGLSIHIGKTHKSGSQSQHLPSPPSATGVLDPFWKQLSFLKSNFPIIKRIPRGSRTQVALALKDVVDGVVSANNAISWEHLLTFPYRVLNVNLDDPGSLTSKIKRNCNKAQNDFDFTIKENVKKKEFKLTKYVENKITDGDFKGAARLLFSSDVLAPETTETVQALKIKHPQNNIPIIPDNLNNNSPLQAETDDVFGAVMSFRSGSAGGLDGLTPQHLKDLLCGTNGDAGRSLLKSITDLVNLMLSGGVPTEITDILYGANLCALVKKDGGIRPIAVGSTIRRVVSKICCRKISPYLADMFQPVQLGFGSKGGCEAAVHATRTFLTNSGGEVLLKVDLKNAFNSICRSALLSEVKNKIPKIYSYLWQCYGGNTKLLYHDNVISSAVGCQQGDPLGPAIFSLAIQPIIANLNSKFNIWYLDDGTLGGEVTTVLGDFSKLIKQFSYIGLNFNFSKCELFISNNVSSSKKNEIVKQFSNLAPGIKILSEDSLHLLGAPVLDAAIPKFISDQITKFNQVSDRLHLINSHMALFLVRYCLFGPKFGYFLRCSPLWKFNNLLLNLDNIIREVLTNILNCDLIDSAWEQASLPIRYGGLGIRKISSVSLPAFLASAYSSSKLFGDIINPSLGPVELSHLAEARDAFKTLCPSKIPVSLSSQRQWDDLLCADRLKSLLDAASTVKDKARLLAVSTRESGYWLHALPSPHVGTLLDHLTLTVSVGLRLGAKIYQPHRCHCGEVVDEYGLHGLSCIKSAGRFSRHATLNSVIHRSLVNARIPAILEPNGLFRSDGKRPDGMTLVPWKLGRSLVWDATCVDTLAASHIQGSSLMAGAAARNAEITKRRKYENIEKSFVFVPFAVETMGSWGEEAREFYKELACRLT

SEQ ID NO: 3710 - protein, 950 aa, Junonia villida
MSSFSHGDNTSLDAPIQCEQCSQPRFFKNQRGLNIHIGKSHKSGTQAQYLPCSSNATNVRDPLWKQLSFLKSNFPIIKRIPRGSRTQVAIALKEAIDSVVSTNNVTSWEHLLTFAYRVMNVNHNEPGSLTVKIKKNCNKAHNDFDYSTKETLKKRKFNAPKYIENKISDGDFKGAARLLFSSDVLAPETAETVQALKDKHPQNNVSTIPDSSNNFSPLQAETDDVFGAVMSFRSGSAGGLDGLTPQHLKDLLCGTNGDAGRSLLKSITDLVNLMLSGGVPTEITDILYGANLCALVKKDGGIRPIAVGSTIRRVVSKICCRKISPFLADMFQPVQLGFGSKGGCEAAVHAARTFLVNSGGDVLLKVDLKNAFNSICRSALLSEVKNKIPKIYPYLWQCYGGNTKLLYHDNVISSAVGCQQGDPLGPAIFSLAIHPLIKTLNSKFNIWYLDDGTLGGELTTVFNDFSKLIEQFSKIGLDFNFSKCELFIPNHVSSIKKEIIVKQFNTLAPGIKILCEDSLHLLGAPVLEASIPNFIFDQTIKFNQVSDRLHLINSHMALFLVRYCLFGPKFGYFLRCSPLWKFNNLLTNLDSIIREVLTKILNCDLSDTAWEQASLPIRYGGLGIRKISSVSLPAFLASAYSSAKLYGNIISPSLGSTELSYLAEARDAFKILCPSKEPVSLSSQRQWDDLLSADHFKSLIDTAPTAKDHARLLAVSTRESGYWLQSLPSPHVGTLLDHLTLTVSVGLRLGAKIYQPHRCHCGEAVDEYGHHGLSCTKSAGRFSRHASLNSVIHRSLVTARIPSILEPNGLVRSDGKRPDGMTLVPWSLGKSLVWDATCVDTLAASHIQGTSLTVGAAAKSAECIKRRKYENIGKNFVFVPFAVETMGSWGEEAKKFYKELSSRLVDSTGDRKAGDYFGQHISLAIQRGNVASVLGTLPHCSDIDTYLDSM

SEQ ID NO: 3711 - protein, 950 aa, Junonia neildi
MSSFSHGDNTSLDVPIQCEQCSQPRYFKTKRGLSIHIGKTHKSGSQSQHLPSPPSATGVLDPFWKQLSFLKSNFPIIKRIPRGSRTQVALALKDVVDGVVSANNAISWEHLLTFPYRVLNVNLDDPGSLTSKIKRNCNKAQNDFDFTIKENVKKKEFKLTKYVENKITDGDFKGAARLLFSSDVLAPETTETVQALKIKHPQNNIPIIPDNLNDNSPLQVETDDVFGAVMSFRSGSAGGLDGLTPQHLKDLLCGTNGDAGRSLLKSITDLVNLMLSGGVPTEITDILYGANLCALVKKDGGIRPIAVGSTIRRVVSKICCRKISPYLADMFQPVQLGFGSKGGCEAAVHATRTFLTNSGGEVLLKVDLKNAFNSICRSALLSEVKNKIPKIYSYLWQCYGGNTKLLYHDNVISSAVGCQQGDPLGPAIFSLAIQPIIANLNSKFNIWYLDDGTLGGEVTTVLGDFSKLIKQFSYIGLNFNFSKCELFISNNVSSSKKNEIVKQFSNLAPGIKILSEDSLHLLGAPVLDAAIPKFISDQITKFNQVSDRLHLINSHMALFLVRYCLFGPKFGYFLRCSPLWKFNNLLLNLDNIIREVLTNILNCDLIDSAWEQASLPIRYGGLGIRKISSVSLPAFLASAYSSSKLFGDIINPSLGPVELSHLAEARDAFKTLCPSKIPVSLSSQRQWDDLLCADRLKSLLDAASTVKDKARLLAVSTRESGYWLHALPSPHVGTLLDHLTLTVSVGLRLGAKIYQPHRCHCGEVVDEYGLHGLSCIKSAGRFSRHATLNSVIHRSLVNARIPAILEPNGLFRSDGKRPDGMTLVPWKLGRSLVWDATCVDTLAASHIQGSSLMAGAAARNAEITKRRKYENIEKSFVFVPFAVETMGSWGEEAREFYKELACRLTKSTGDPRAGSYLGQHISLAIQRGNAASVLGTLPHCNVVDGYLDFI

SEQ ID NO: 3712 - protein, 954 aa, Ophraella communa
MNLVILPEYLREHTSFENLNLGVYCAAVSITRMLGLKEHSSDKKSKSKSDPPWLRRLKNKIDKLRVNIGRLQQYQQGSRSPKLCKKVEHLLATVKHHASYNPENSSVNDVLDTQTQKLKALSQRIRRYMESNLRKNQNNQFYRNEKQFYREIQKKIPDDGNISLPSTDELVQFWSRIWAAPAVHNVNSQWIQREEQRMQQLNQMSYKTSEIVTETIRNTMNWKLPGVDQIHNFWYKRLTCTHSLLAQYLTEFLNNPLLIPRFMVQGVTYLLPKGNYTTDPSKYRPITCLPTVYKIFTACISSAIYQHCGLNDILSEEQKGCIRGSQGCKEQLIIDSVILGQARKKRRSLYMAYNDYRKAFDSVPHSWLIKILQIYKVEPLVINLLENLMSLWSTRLHVSAHGHNIRTNCISIKRGIFQGDSLSPLLFCIALNPLSQMLNDTGMGYSIKAPNLQIKVSHLLYMDDLKIYAASEAELKNLLSVTETFTRDISMEFGLDKCKTVSVKSGVQKSVGFELQDRATIDPLNEDATYKYLGIQQALNIEHKKMKEETKEKYISRLETILKTKLSGKNIVKAINTWAVPVLTYTFGIIHWTKTDIEDLERKTRVALTKHRLHHPKAAFERVMLSRKCGGRGFTNIQELLSTQIIRLREYFHNQINRLHQVIVKADDKYTPLDLLHNDPSTNLATEQQLENSWKTKTLHGRHPADLSLDHVDKEASNYWLTHEDLFPETEGFVIAIQDQIIATKSYLKYIIKDGSVQDDKCRQCAAAPETIQHITSGCRTLSGTDYTHRHNQMAKIIYLQLAKKYQLVSDVVPYYKYTPENIVENESCKMYWDRSIITDRTISANRPDIVLTLKNGKTTYIIDITIPNTHNLQQANMEKLQKYSELAQEIKKIWHQDKVVIVPIVLSMTGVVPRSLLKSLQSLELEHQIIIQMQKAVLINTCSLVIKFLNIPQ

SEQ ID NO: 3713 - protein, 1208 aa, Clytia hemisphaerica
MNESFLESHERNVILQQNELRNNQQHLQQLQNNRDDEPAVISEENNTQNHQREVRMKWTKNLNSDVIRCFFNTILRYPDAPYRKEFHRRWEALHPEIRCTEQKICDRKQVITKKVNTRENTRGSWLTELEIQQIRNEIQDEIDNERNQPRNQLTEQPEAETGPEHEQPPENEPPRQPEEEPENIEILDENQPEEDELLQLKERLLENYAYSIVTPFEERYNFKKPNKKTLKTLEKSLGKVNKVLEDATVLTDISDVNQLNNLTYAAAITAINEISAQKCCIYRKTNKKQRKGDNWVFNMKMRIDNIRGDVSRVSQMRDPNPSTKMKKNNNAMRQKYNITDEYEREVILETLKQRMLALNNRLSRYQKRQTQFRQNNDFIEKPSKLFDELRGNKTEVKDPPSKESIEQFWKPMYETRKCYNKESVWLQQYEESIDAAQSEYSDITPDEVMSATNKFANWKSPGIDKIQNFWWCNLPNIHAKFAELSNNTIVDPTTCPKWLTTGRTTLISKKPPTQNPSNYRPITCLPIMYKIISSIITTRMNHHITANNLIPEEQKGNASNTFGTIDQLIINKMIMESAKVKKRNISTAWIDYRKAYDSVPHDWIINVLKMHKFDSTTISFIETTMKEWKTSITLPFHESTITTNEFSINTGIFQGDSPSGMLFIMSLLPLSWLLKRSNLGYRFANNTISHLLFMDDLKLYASNDQQLRQMIAIVKTFSDDICMQFGIDKCNKTTIIRGKIKPSEDITLNNGELLTSLQPNQQYRYLGFKEHFTTDKETKSSLKKEYFSRLKMILKSELSSKHLINAINMWAVPALSYGFPILDWSITELEIIDRETRKMLQSFHAMHSQSDITRLYIPRKEGGRGLINLTEHFKNSIINFSTYLLSTNEALLNLVSDWQTSRNAKSIHERAQIYCQELEFEIEQMSTLNKQQRKNKIKNKRTDMKVETLKSKNLHGQYAKLLDEPHIDKQASMHWLTAASLKCATESAICAIQEQAITTNYIKKHIFHTEESDICRVCRKEKETIHHIISSCESLAPTKYLERHDNVCKYIHMLLLNEYGILDKVIPWYQHQPKIVEQNDHVRILWNFPIQTDHRIQYNKPDIVVIDKINKTANIIDVAIPIDYRVAQKRLEKLRKYSDLSTEIKTLWRLSKVNITPVIIGAMGCMFKCFDKDIEKLNLEVHKFDKFEAQKIALLGTAHIVRNFSHLV

SEQ ID NO: 3714 - protein, 1208 aa, Clytia hemisphaerica
MNESFLESHERNVILQQNELRNNQQHLQQLQNNRDDEPAVISEENNTQNHQREVRMKWTKNLNSDVIRCFFNTILRYPDAPYRKEFHRRWEALHPEIRCTEQKICDRKQVITKKVNTRENTRGSWLTELEIQQIRNEIQDEIDNERNQPRNQLTEQPEAETGPEHEQPPENEPPRQPEEEPENIEILDENQPEEDELLQLKERLLENYAYSIVTPFEERYNFKKPNKKTLKTLEKSLGKVNKVLEDATVLTDISDVNQLNNLTYAAAITAINEISAQKCCIYRKTNKKQRKGDNWVFNMKMRIDNIRGDVSRVSQMRDPNPSTKMKKNNNAMRQKYNITDEYEREVILETLKQRMLALNNRLSRYQKRQTQFRQNNDFIEKPSKLFDELRGNKTEVKDPPSKESIEQFWKPMYETRKCYNKESVWLQQYEESIDVAQSEYSDITLDEVMYATNKFANWKSPGIDKIQNFWWCNLPNIHAKFAELSNNTIVDPTTCPKWLTTGRTTLISKKPPTQNPSNYRPITCLPIMYKIISSIITTRMNHHITANNLIPEEQKGNASNTFGTIDQLIINKMIMESAKVKKRNISTAWIDYRKAYDSVPHDWIINVLKMHKFDSTTISFIETTMKEWKTSITLPSYESTTTTNEFSINTGIFQGDSPSGMLFIMSLLPLSWLLKRSNLGYRFANNTISHLLFMDDLKLYASNDQQLRQMIAIVKTFSDDICMQFGIDKCNKTTIIRGKIKPSEDITLNNGELLTSLQPNQQYRYLGFKEHFTTDKETKSSLKKEYFSRLKMILKSELSSKHLINAINMWAVPALSYGFPILDWSITELEIIDRETRKMLQSFHAMHSQSDITRLYIPRKEGGRGLINLTEHFKNSIINFSTYLLSTNEALLNLVSDWQTSRNAKSIHERAQIYCQELEFEIEQMSTLNKQQRKNKIKNKRTDMKVETLKSKNLHGQYAKLLDEPHIDKQASMHWLTAASLKCATESAICAIQEQAITTNYIKKHIFHTEESDICRVCRKEKETIHHIINSCESLAPTKYLERHDNVCKYIHMLLLNEYGILDKVIPWYQHQPKIVEQNDHVRILWNFPIQTDHRIQYNKPDIVVIDKINKTANIIDVAIPIDYRVAQKRLEKLRKYSDLSTEIKTLWRLSKVNITPVIIGAMGCMFKCFDKDIEKLNLEVHKFDKFEAQKIALLGTAHIVRNFSHLV

SEQ ID NO: 3715 - protein, 1208 aa, Clytia hemisphaerica
MNESFLESHERNVILQQNELRNNQQHLQQLQNNRDDEPAVISEENNTQNHQREVRMKWTKNLNSDVIRCFFNTILRYPDAPYRKEFHRRWEALHPEIRCTEQKICDRKQVITKKVNTRENTRGSWLTELEIQQIRNEIQDEIDNERNQPRNQLTEQPEAETGPEHEQPPENEPPRQPEEEPENIEILDENQPEEDEHLQLKERLLENYAYSIVTPFEERYNFKKPNKKTLKTLEKSLGKVNKVLEDATVLTDISDVNQLNNLTYAAAITAINEISAQKCCIYRKTNKKQRKGDNWVFNMKMRIDNIRGDVSRVSQMRDPNPSTKMKKNNNAMRQKYNITDEYEREVILETLKQRMLALNNRLSRYQKRQTQFRQNNDFIEKPSKLFDELRGNKTEVKDPPSKESIEQFWKPMYETRKCYNKESVWLQQYEESIDAAQSEYSDITSDEVMSATNKFANWKSPGIDKIQNFWWCNLPNIHAKFAELSNNTIVDPTTCPKWLTTGRTTLISKKPPTQNPSNYRPITCLPIMYKIISSIITTRMNHHITANNLIPEEQKGNASNTFGTIDQLIINKMIMESAKVKKRNISTAWIDYRKAYDSVPHDWIINVLKIHKFDSTTISFIETTMKEWKTSITLPFHENAITTNEFSINTGIFQGDSPSGMLFIMSLLPLSWLLKRSNLGYRFANNTISHLLFMDDLKLYASNDQQLRQMIAIVKTFSDDICMQFGIDKCNKTTIIRGKIKPSEDITLNNGELLTSLQPNQQYRYLGFKEHFTTDKETKSSLKKEYFSRLKMILKSELSSKHLINAINMWAVPALSYGFPILDWSITELEIIDRETRKMLQSFHAMHSQSDITRLYIARKEGGRGLINLTEHFKNSIINFSTYLLSTNEALLNLVSDWQASRNAKSIHERAQIYCQELEFEIEQMSTLNKQQRKNKIKNKRTDMKVETLKSKNLHGQYAKLLDEPHIDKQASMHWLTAASLKCATESAICAIQEQAITTNYIKKHIFHTEESDICRVCRKEKETIHHIISSCESLAPTKYLERHDNVCKYIHMLLLNEYGILDKVIPWYQHQPKIVEQNDHVRILWNFPIQTDHRIQYNKPDIVVIDKINKTANIIDVAIPIDYRVAQKRLEKLRKYSDLSTEIKTLWRLSKVNITPVIIGAMGCMFKCFDKDIEKLNLEVHKFDKFEAQKIALLGTAHIVRNFSHLV

SEQ ID NO: 3716 - protein, 1169 aa, Venturia canescens
MESQRNISLGMGCHGDLTRTDSSGSEGANGDETGAPTANDSQNNELNVTLEVQVPLDDAITYCDKCGRLGRRRGFANLKDLNDHLKKDHPRTRAVFICRFCGRRCPTKHSWDCHKPKCNGPPPAVAPGRFQCAHCERSFNTQNGLSQHERHEHPRVRNQQREAQANRPRGAGGRPATVWTEEETNLLIQLDRRFRNARYPNVEIQAYLPNKTYKQIGEKRRRIPRDAQEPESEPESDSESGEISSSDSSDDEAEFVDAEDTHDPQEINLFLTMQEEDQTHEAWLTRVDEIILSTDVAENNKYRTSIVKLKEIWQAHKETPQVLSEHIDKFVQELSQRLVGSTNNSASTHRERDREEAPQNRRRRDGDRRRVTANQRRKYRFSRCQELYNKCPKRLAEIALTGDFSFTEARKDPPPSRAIRELYEQLWGRDGPDEVGFMLEEGRDNRRLINEVFPPITVEEVRARICRTKSRTAAGLDGVKKSHLTRKGVAELLTVLFNILVRHTIFPSGWNKNRTTLIPKDGKDHSDIKNWRPITVGSLLGRTYSGLIDQKLRGFVKQSLRQKGFTAEDGCRTNTLILEKAIESMKGLHGGVVMVADVSKAFDTVPHSAIGAALKRKGVPFHIIDLVKNMYSNCQTSIKGPRQERVEIVLKRGVKQGDPLSPLLFNLIMDPVIDSIDKEGQGVKLGDERLAILAFADDVVLLGENQESAQRQVSKLNGYLEKLGMSLSAPKCLAFQITSGRRTWFTSNPRLNISHEEIPGVEADDMFKYLGTRFGPWTGLQRGKEIPKILEAIRNVRCLSLKPYQKLDVITTYILPHFMYELTASPPAAGILKVLDDDIRVQVKEILKLPLSTARGFFYTPKRDGGLGLVKIARAVQLLTVKSGITAAASEDPILREIERNAKFRNRVDQGARALRVVKPTNKPDYERVKILTRERERDAWRSLRSQGQGVEDFKGDKYGNAWLKNPRLLRSSRYLDAIRMRTNTFGTKVVLGRTTANADTICRRCHLQPETLGHIIGQCVFTKPARIRRHDKIKELIADRVSRHHTVMLEPTIDDGGTLKKPDMVVKMNDEALVVDVTVRYEKGVYLAEAVKEKMTKYQGTADLMARRLNVSKGIVLPIVIGSRGALPKRTVKALDKLGINNKDKRSIAMKALRSSVEIANAFIDYGN

SEQ ID NO: 3717 - protein, 1161 aa, Venturia canescens
MAQANNLSLGLVRSRSNRTRAGTPVSEGTVVDDPGENSDNERGETLEIVVPIDQANTRCSKCARRGSRRIFNNLKDLNEHMAKDHPLLRVVFICHFCGRKCPSKHSWDCHRPKCPGAPVANDRQHKCDHCARSFNTRVGLSQHERHEHPRARNEQREAQANRQRGQGGRPAHVWSQEETALLIELDERFRNARFPNKEIQRFLPNKTFKQIGEKRRRIPRDVPEAIEIVSDSDSDNDEEEEVFHDAEETQEPLDLTFNNLTTQEEEDDQSIDEWQTAMDEFILAIEPNENNKFRESTNRLKQIWQEHKNAQESLEHQINAFVNELNVVLIGVDKAQPNGEQRNRRNAQERRRRREEPRRRRDGRATANQVRKFRYARCQEMYKQCPKRLAEIALSGDFSFAEKRKDPPAIEAINELYGQLWGVTGPNATDFIVEEGMDEKRQINEVFPPIKIDEVKARICRVKNRSAAGLDGIKKGHINRKGVAELLTVLFNILIRHAIFPKAWSKNRTTLIPKDGKDHNDIKNWRPITVGSLVGRTFAGLIDQRLRGFVKQSRRQKGFTAEDGCRANTLILEKAIETMKGLHGGVVMIADVSKAFDTVPHSAIKNALQRKGVPEHVVGLIVKMYNDCSTSIKGPEEERVEITLRRGVKQGDPLSPLLFNLIMDPIIDSLDREGGGIAMGEEDLSVLAFADDIVLLGGNTETAQAKVNKLDDYLERLGMSLSAPKCSSFEIVSGRDTWYTRNPNLNVRQEEIPAVEADEMFKYLGTRFGPWTGLQRGKEIPKIMEAIRNLQSLSLKPYQKIDILATYIIPHFMYELTASPPAATILNVLDDNIRVQVKRILKLPLSTARGFFYTPKRDGGLGIIRIARAVQLLTVKSGITIAESDDPILREIERNAKFQKRVDRGIAGLRVTRPRTKAAYEQIKNLTREREREAWRDLRSQGQGVDDFKGDKYGNCWLKRPSILKSSRYLDALRMRTNTFGTRVVLSRTTANAPTLCRRCNLQPETLGHIIGQCVFTKPARIMRHDKIKNLIADRVSRTYDVMIEPTVNEGNELKKPDMVIKKEEEAIVVDVTVRYEKGAFLAEAEKEKKNKYARTAILMATRMGVPKGKVLPIVVGSRGTLPRKTIKALEELGINKKDRQTIAMIALRSSIEIANAFIDY

SEQ ID NO: 3718 - protein, 1158 aa, Dusona sp.
MAETINESLGLERSGSNLSRADSSACEGTTNDDNGEDLANERRTRVRRVEIRVPLDPVNTRCEECSRHGRRRVCNNLKDLDGHMKKDHPLIKVVFICKTCNRTCQTKHSWDCHKPKCPGVPVVVAGPHQCEHCERAFSTRIGLSQHERHEHPRARNGQREAHANRQRGQSGRPCTIWSEEETALLIELDRRFRDARFPNVEIQAYLPNKTYRQIGHKRRGIPREAPEPETIDTSSSDSEIEEFFDAEEIQVPVDRATNTPTTQEEEEDGTHDDWLRAMEEYILSTEPERNNKFHESTVRLKHIWQTHQDMPEDLERHINTFVNGLNTVLIGVAVNPQQGGAGNRSSGRRGKGNQRQRRAGGASANQRRRFRYARCQEMYKKCPKRLAEIALSGDFSFAEIRKDPPRINDIEELYGRLWGVAGPQETDFILAEGKNDKRLINEVFPPIKLDEVRSRICRIKSRSAAGLDGVKKGHIARKGVAELLTVLYNILIRHAIFPEAWNKNRTTLIPKDGKDHSDVKNWRPITVGSLVGRTYTGLIDQRLRSFVKQSLRQKGFTAEDGCRANTLILDKAVESMKGHRGGVVMVADVSKAFDTVPHSAIKTALQRKGVPDHIVGLVVRMYANCSTSIKGSAEERVEIKLRRGVKQGDPLSPLLFNLIMDPIINSIDQEGGGIGIGEEDLAILAFADDIVLLGGDKDAAQAKTNKLDNYLERLGMSLSAPKCSAFEIVSGNKTWYTCNPKLSIRQEEIPAVEAEDMFKYLGTRFGPWTGLQRGKEIPKIMEAIRNVRNLSLKPHQKIEVLTTYILPHFMYELTASPPAASILNVLDDDIRVQVKEILKLPLSTARGFFYTPKRDGGLGLIRIARAVQLLTVKSGINIAESNDPILQEIGRNSKFQRKIERGVAGLRITRPRTKAAYEQAKRETRERDRDAWKSLRSQGHGVDDFRGDKYGNHWLKNPSILKSSRFLDALRLRTNTFGTRVVLGRTTANAPTDCRRCNLQPETLGHIIGQCVFTKPARINRHDKIKNLIADRVSRHHDVMLEPTINEGPALKKPDMVIKKGDEAIVVDVTVRYEKGAFLAEADKEKRSKYQRTAQLMATRLGVSKGKVLPIVVGSRGTLPKLTVKALEELGISKKDRRDIALTALRSSLEMANAFIDY

SEQ ID NO: 3719 - protein, 879 aa, Diadegma semiclausum
MDEHILSIDLAENNKHRAALAKLKEFWLAHKATPQLLEQHVDAFVEDLGSILMGDKRQPADNGHRANRKNGQGRAGRQNRREATANQRRKFRYARCQELYRKCPKRLAEIALSGDFSFADVRKDPPPAEVIRELYQQLWGAGGPAQVELTPNENHDAKRLISEVFPPIKVEEVKARICRIKSKSAAGLDGIKKGHITPKGVAELLTALYNILIRHAILPKEWNKNRTTLIPKDGKDHKDIKNWRPITVGSLLGRTYTGLIDQRLRGFVKQSIRQKGFTAEDGCRSNTLILEEAIRSMKGISGGVIMVADVSKAFDTVPHCAIKPALERRGVPSHIIGLICRMYTNCATSIKGPEGSNIEIELQRGVKQGDPLSPLLFNLIMDPIIDRIDREGNGVSIGSSDLAILAFADDVIIIGRDQEAAQAKVNKLDNYLDMLGMSLSTPKCSAFEIISGNRTWFARNPKLTIRGEQIPEVQVDEMFKYLGTRFGPWTGLQRGKEIPRIAEAIRNVRSLSLKPHQKVDIITTYVLPHFMYELTASPPAAGILEILDSDIRVQIKEILKLPLSTAKGFFYTPRRDGGLGLVRIARAVQLLTIKSGITTADSEDHILREIHGNSKFQRRVDRSAEALRIAKPTNKADYERTKAQTKEREREAWKSLRSQGQGVDDFRGDKYGNCWLGNPKLLKSSRFLDALRMRTNTFGTRVVLGRTTANAQITCRRCNLQPETLGHIIGQCVYTKPARMRRHDQIKELIADRVSRNHSVLLEPTIDEDGALKKPDMVIKMNDEALVVDVTVRYEKGAYLAEAEKEKKSKYKRVAEIMAQRLGVTKSQVIPIVVGSRGALPKKTVRALDKLGISKKDKLTIALMTFRSSIEIANAFIDY

SEQ ID NO: 3720 - protein, 1158 aa, Diadegma semiclausum
MAQYNESLGPGSPGSDLPGADSSANERTNGNEIGENMDNEMRGALKIQVPIDPANTQCSKCARHGRQRGFTNLRDLDNHMKRDHPRVVVIYVCQSCKRNCPSKHSWDCHRPKCSGPPPPTAAGQYQCTHCDRSFNTQIGLSQHERHEHPRARNEQREAQANRPRRINVRPNSLWSEEETALLITLDRRFRNSRYPNVEIQAYLPNKTYRQIGEKRRRIPRDAPEPEPEPESDTESGEVSSSTSSEEGEYHDAEGVEEHQDPAHDESIRDREDPSQATWETAMDEHIFAIELSPNNKYRSSLDKLKEIWLAHKEDPQLGEYIDAFVRELSSTLMGDKRQPDRTRRANNERATRRVGRQNRRQPTANQRRKFRYARCQELYKKCPKRLAEIALSGDFTFADKRKDPPPVGAIRGLYEQLWGEAGPEMNELVQGESCEVARQINEVFSPIKVEEVNARICRIKSKSAAGLDGIKKGHLTPKGVAELLTALFNILVRHTIFPKEWNNNRTTLIPKDGKDHNDIKNWRPITVGSLLGRTYTGLVDQRLRGFVRQSIRQKGFTAEDGCRSNTLILEKAIEAMKGYQGGVVMVADVSKAFDTVPHSAIKLALERKGVPRHIIKLIEEMYTECVTSIKGPEGQSVVIKLERGVKQGDPLSPLIFNLIMDPIINKIDQEGNGVTMGESDLAILAFADDIVILGKDKAAAQAKVGELDDYMRKLGMSLSVPKCSAFEIISGNKTWFARNPNLHIRDEEIPGVQADEVFKYLGTRFGPWTGLQRGKEIPKIAEAIRNVRSLSLKPYQKVDIIATYIIPHFMYELTASPPAAGTLEVLDNNIRVQIKEILRLPLSTAKGFFYTPKKDGGLGLVRIARAVQLLTIKSGITTAESEDQILREINRNTKFQKRIERSSEALRTTQPTNKAEYQRIKSVTKEREREAWKSLRSQGQGVEDFRGDKYGNCWLKNPRLLKSSRYTDAIRMRTNTFGTRVVLSRTTANAPTICRRCNLQPETLGHVIGQCVFTKPARIRRHDQIKELIADRVSRNHTVMLEPTVNEGGQLKKPDMIIKMNDEVLVVDVTVRYEKGAYLAEAEKEKKQKYQGVAKLMAERLGTTKSQVIPIVIGSRGAITRRTVNALDKLGINRKDKLTIALMTLRSSIEIANAFIDY

SEQ ID NO: 3721 - protein, 1168 aa, Diadegma semiclausum
MQTQAEKPKKETKMADKENESLGPEGSSPNHSGADSSVSEGTNNDDSGNNPGNDSRVLEIMVPISPTNTRCQKCQSQGRNRGFTNLRDLNNHLKKDHPRLKVIFTCRGCARKCPSKHSWDCHRPKCGGMQIAQALQHQCEHCDKSFATRVGLSQHERHEHPRQRNEKREALATRPRGAGGRPATVWTEEEVTLLKELDRRFRNARFPNVEIQAYLPGKTFRQIGEKRRRLPRETEEPESGEITDSSDSAEEEYHDAEDTVEEVPLEPSIMNELAEEEDEDPSHEEWLRKMEEGICSIEVEENNRLYSKITELKTIWQTHKSTPDTLQREINAYVNGLNVALIGAHERPEANNRTNARRPNNNNRNNRRPRKMCANQRRKYKYARCQELYNKCPKRLAEIALSGDFSFVEERKDPPPVADIEELYGQLWGVEGPSNTNFILDGEREQKSAILEVFPPITVEEVKARVTRTKAKSAAGLDGIRRSDLARKGAAELLALLFNILIRHSIFPEEWSKNRTTLIPKDGKDHKDVKNWRPITVGSIAGRTYTGLIDKRLRGFVKQSIRQKGFTAEDGCRSNTLILEKAIEAMKGWQGGVVMVADVSKAFDTVPHSAIRNALKRKGTPEHIITLIEGMYKNCHTSIKGPGEEKVEITLKRGVEQGDPLSPLLFNLIMDPLIDEIDKEGGGVDLGNENLAVLAFADDIVLIGNGKEEAQSKVDKMDNFLQKLGMSLSVPKCSAFQITTGNRTWYTNNPRLEIRQQDIPAINADEMFDYLGTKFGPWTGLQRGREIPKILETIRNVRSLSLKPYQKVDIITTFILPHFTYELTASPPAMGILNVLDCNIRTEIKEILKLPLSTARGFLYTPKRDGGLGITRIARAVQLLIVKSNITTAESRDPILNEIHGNTKFQKRVDKGVMALRIQKPANKADYEKVKRTTKEKERNSWRELRLQGQGVDDYKGDKYGNCWLKEPTLLKSSRYLDAIRLRTNTFGTRVVLSRTKPDAPKICRRCGLLPETLGHILGQCVFTKAARIRRHDNIKNLIADRVSRRHMVLLEPTIDEGPTLKKPDIVIKMNDETIVVDVTVRYEKGAYLAEADKEKRAKYKETAELMARRLGTAKASVLPIVVGSRGVLPKKTVKALDQLGISNKDKRTIALSTFRSSVEMANAFIDY

SEQ ID NO: 3722 - protein, 1175 aa, Campoletis sonorensis
MAANVTSLGPEESSSNSSGSDMSDREGTDDDDNGNNRINERNTLEVRVPIDPTDTHCVICLGRHRRLGFDNLKDLDNHYKQYHPRMRVIFICKNCDRSFPSKRSWDGHKGKCKGRPALVVALPFQCEQCDRTFETQIGKSQHERHEHPALRNQRRQVEANPEQNQGQRIRPTALWSEEEVALLTELNRTYKNAQYPNKEIQAFMPHKTVKQISDKRRRLPQEQLEEHQRPQGRGEESDEEEAGEQQGLEEEEEDEEEEGEEEFHDAEDSVAQNETQENRDMTDATHGAWLNKMDEHIMSIEVRGSKKFQDCGVALKDLWASNKERPDELEERLNAFLEEKIKALLIGITENHMPETENRQVTSRRNRGARRRANTRPTANQRRKHRYARCQDLYKNCPKRLAEIALSGDFSFVEERKEPPPVESIAALYGQLWGTKGPQSVDFMLEQNQNNTRAINEVFAPIKTEDTKSRIARVKSKSAAGLDGIQKSHMAKKGAAELLTIFYNILIRHNIFPEEWTKNRTTLIPKDGKDLQDIKNWRPITVSSMLARTFAGLIDQRLRGFVQQSIRQKGFTAEDGCRANTLILDKAIETMKGISGGVIMVADVSKAFDTVPHSAIPVALKRQGVPQHITELVMKMYNNCTTSIKGPGQQRVEIGLERGVKQGDPLSPLLFNLVMDPIIDRIDREGGGIRMGESNLAIEAFADDVILIAKDRNEAQNQANSLDDYLQNLGMSLSVSKCSAFEIKAGNKTWYTKDPKLVVRGENIPPIEADNICKYLGTRFSPWTGLQRGKEIPKVMEAIRNVRALSLKPYQKVDIISTYIMPHFLYELTTSPPAAGTLTTLDTDIRCQVKEILKLPLSTARGFFYTPKKDGGLGLIRITRAVQLLTMKSGITASHSDDPILNEIRHNNKFQKRLNRSAEVMRVQRPATKEAYGRIKEETRQRERLSWKELRSQGDGVNDYHQDKYGNCWLKNPRLLRSSRYLDALRIRTNTFGKRVVLSRTKANAPTICRRCNMVPETLGHILGQCVFTKPARIHRHDEIKKLIADRVSQRHTVLLEPTINEGENLKKPDMVIKTEDEAIVVDITVRYERGSYLADADKEKKTKYQNTAQVMARRWGVPTGTVLPIVVGSRGALPRRTVKALDKLKISKKDRKTIVLIALRSSIEIANAFIDYGD

SEQ ID NO: 3723 - protein, 978 aa, Campoletis sonorensis
MALLIALDRRFRNSRYPNVEIQAYLPNKTYRQIGEKRRRIPRDETETEPESEAESGEISSSSESEEGEFHDAEEVQEHEIPAHNEEIPEEEDPSQSAWERTMDEYILSIELNPGNKYRSSLEKLREIWLAHKAGPQLQEQMDAFVRGMGSILMGEKRQPDHTRRANNDRGTRRGGRQNRTEPTANQRRRFRYARCQELYQKCPKRLAEIALSGDFSFAEVRKDPPPVGAIRGLYEQLWGGAGPEINELIQGERHDGTRNINEIFPPIKVEEVKSRIGRIKSKSAAGLDGIKKGHISPRGVAELLTVLFNILIRHAIFPKEWNNNRTTLIPKDGKDHGDIKNWRPITVGSLLGRTYTGMIDQRLRGFIKQSIRQKGFTAEDGCRSNTLILEKAVESMKGHYGGVVMIADVSKAFDTVPHGAIKPALKRKGVPGHVVQLIEGMYTDCVTSIKGPGGQSVAIKLERGVKQGDPLSPLLFNLIMDPIINQIDQGGNGVRMGESNLTILAFADDIIIMGKDKEAAQAKVEKLVNYLQKLGMSLSAPKCSAFEIISGNKTWFARNPKLQVGNDEIPGVEADEMFKYLGTRFGPWTGLQRGKEIPKIAATIRNVRNLSLKPYQKVDLITTYIIPHFMYELTASPPAAGILEVLDNNIRVQIKEILKLPLSTAKGFLYTPKRDGGLGLIRIARAVQLLTIKSGITTAESEDQVLREISRNSKFRKRIERSSEVLRTATPTNKADYERVKASTKEREREAWKSLRSQGQGVDDFRGDKYGNCWLKNPKLLKASRFMDAIRMRTNTFGTRVVLRRTAADAPTICRRCNLQPETLGHVIGQCVFTKPARMRRHDQIKELIANRVSRNHRVMLEPTINENGELKKPDMIIKMNDEVLVVDVTVRYEKGAYLAEAEKEKKAKYQGVAKLMAQRLGTSKSEVIPIVVGSRGAIPRRTVHALDKLGINKKDKLTIALMTFRSSIEIANAFIDY

SEQ ID NO: 3724 - protein, 1169 aa, Venturia canescens
MESQRNTSLGLGNHGNLTNTDTSGSEGAHDDESGASTDNDLLANELNATLEVQVPFDTAVTLCERCVRQGSRRGFGNLKDLNDHMKKDHPRTRVIFICRPCGRRCPSKHSWDCHRPKCNGPQPAVAPGQYQCENCDRSFNTRIGLSQHERHEHPRARNEQREAQANRPRGAGGRPAAIWTEEEVELLIELDRRFRNARYPNVEIQAYLPNKTYRQIGEKRRRIPRDANVPEPEPDSETEPGEITSSSDSSDDEEEFLDAEDSQEPHRINLLNMTMQEEDLTHEAWLTTVDDNILATEVAENNKYWASIQRLKEIWQAHKDSTLALEEHINAFVQEFSTMLVGQTNNPATTRRRREENETPQNRRRRDGERRAVTANQRRRYRFARCQEMYQKCPKRLAEIALSGDFSFAEERKEPPPVGAIKALYDELWGRDGPEDVRFMLEHGRNDRRLINEVFPPFKVEEVKARISRTKNRSAAGLDGVKKSHLTRKGVAELLTMLFNILVRHAIFPNVWNNNRTTLVPKDKKDHSDIKNWRPITVGSLLGRTYSGLVDQRLRGFVKQSLRQKGFTAEDGCRSNTLILEKAIESMKGLQGGVVMVADVSKAFDTVPHSAIEAALNRKGVPIHIVDLVKKMYSDCRTSIKGPRQEKVEIRLKRGVKQGDPLSPLLFNLIMDPFIDNIDREGGGVKLGEESLAVLAFADDIVLMGENVEEAQAKANKLEGYLGKLGMSLSAPKCSAFQIVSGRRTWYTRNPSLTIRHEEIPGVEAEDIFKYLGTSFGPWTGLQRGKEIPKILEAIRNVRALSLKPYQKVDVIATYILPHFMYELTASPPAAGILKVLDDDIRVQIKEILKLPLSTARGFFYTPKRDGGLGLIKIARAVQLLTIKSGITTAESEDPILREINRNAKFQSRVDRGSEALRIDRPRNKATYEKAKIDTKERERDAWRNLRSQGQGVDDFRGDKFGNSWLKNPKLLRSSRYLDALRIRTNTFGTRVVLSRTSANVEKTCRRCHLQPETLGHIIGQCVFTKPARIKRHDKIKNLIADRVSRHHDVMLEPTVDDGVALKKPDMVIKMHDEAIIVDVTVRYEKGVYLAEAVKEKMTKYQGTADLMARRLNVSKGTVLPIVIGSRGALPKRTVKALDKLGIGNKDKRSIAMKALRSSVEIANAFIDY

SEQ ID NO: 3725 - protein, 1164 aa, Venturia canescens
MESQRNINLGMGCHGDLTRTDSSGSEGANGDETGAPTANDSQNNELNVTLEVQVPLDDAITYCDKCGRLGRRRGFANIKDLNDHLKKDHPRTRAVFICRFCGRRCPTKHSWDCHKPKCNGPPPAVAPGRFQCAHCERSFNTQNGLSQHERHEHPRVRNQQREAQANRPRGASGRPATVWTEEETNLLIQLDRRFRNARYPNVEIQAYLPNKTYKQIGEKRRRIPRDAQEPESDSESGEISSSDSSDDEAEFVDAEDTHDPQEINLFLTMQEEDQTHEAWLARVDEIILSTDVAENNKYRTSIVKLKEIWQAHKETPQVLSEHIDKFVQELSQMLVGSTNNSASTHRERDREEAPQNRRRRDGDRRRVTANQRRKYRFSRCQELYNKCPKRLAEIALTGDFSFTEARKDPPPSRAIRELYEQLWGRDGPDEVGFMLEEGRDNRRLINEVFPPITVEEVRARICRTKSRTAAGLDGVKKSHLTRKGVAELLTVLFNILVRHTIFPSGWNKNRTTLIPKDGKDHSDIKNWRPITVGSLLGRTYSGLIDQKLRGFVKQSLRQKGFTAEDGCRTNTLILEKAIESMKGLHGVVMVADVSKAFDTVPHSAIGAALKRKGVPFHIIDLVKNMYSNCQTSIKGPRQERVEIVLKRGVKQGDPLSPLLFNLIMDPVIDSIDKERQGVKLGDERLAILAFADDVVLLGENQESAQRQVSKLNGYLEKLGMSLSAPKCLAFQITPGRRTWFTSNPRLNISHEEIPGVEADDMFKYLGTRFGPWTGLQRGKEIPKILEAIRNVRCLSLKPYQKLDVITTYILPHFMYELTASPPAAGILKVLDDDIRVQVKEILKLPLSTARGFFYTPKRDGGLGLVKIARAVQLLTVKSGITAAASEDPILREIERNAKFRNRVDQGARALRVVKPTNKPDYERVKILTRERERDAWRSLRSQGQGVEDFKGDKYGNAWLKNPRLLRSSRYLDAIRMRTNTFGTKVVLGRTTANADTICRRCHLQPETLGHIIGQCVFTKPARIRRHDKIKELIADRVSRHHTVMLEPTIDDGGTLKKPDMVVKMNDEALVVDVTVRYEKGVYLAEAVKEKMTKYQGTADLMARRLNVSKGIVLPIVIGSRGALPKRTVKALDKLGINNKDKRSIAMKALRSSVEIANAFIHYGN

SEQ ID NO: 3726 - protein, 1170 aa, Venturia canescens
MESQRNISLGMGIHGDLTRTDSSGSEGANGDETGTSTANDSRNDELNVTLEIQVPLDAAITFCDKCVRHGRRRGFANLKDLNDHIKKDHPRMRAIFICRLCGRRCPTKHSWDCHRPKCNGPPPAVAPGQFQCAHCERSFNTQNGLSQHERHEHPRVRNQQRVAQANRPRGVGGRPAAVWTEAETALLRQLDRRFRHARYPNVEIQAYLPYKTYKQIGEKRRRIPRDAQEPESESESETEPGEVTSSDSSGDEADFVDAEDTQDPQEINLLNMTMQEEDQTHEEWLARVGEVILSTDVAENNKYRASIAKLKEIWQTHRQTPQVLEEHVNAFILELSSMLVGSTANPATTRRERESEETPQNRRRRDGDRRRVTANQRRKYRYSRCQELYKKCPKRLAEIALTGDFSFTEARKDPPPSRAIRELYEQLWGRDGPDEVGFMLEEGRDDIRLINEVFPPITVEEVKARICRTKSRTAAGLDGVKKSHLTRKGVAELLAVLFNILVLHTIFPSGWNKNRTTLIPKNGKDHSDIKNWRPITVGSLLGRTYAGLVDQKLRGFVKQSLRQKGFTAEDGCRSNTLILEKAIESMKGLHGGVVMVADVSKAFDTVPHSAIGAALKRKGVPSHIIDLVKNMYSNCQTSIKGPRHERVEISLRRGVKQGDPLSPLLFNLIMDPVIDSIDKDGGGIRLGEERLAILAFADDVVLLGESKEAAQRQVGKLNNYLEKLGMSLSAPKCLAFQITSGSRTWFTSNPRLDLGREEIPGVEADDMFKYLGTRFGPWTGLQRGKEIPKILEAIRNVRCLSLKPYQKIDVITTYILPHFMYELTASPPAAGILKVLDDDIRVQVKEILKLPLSTARGFFYTPKRDGGLGFVKIARAVQLLTVKSGITAAGSEDPILREIGRNTKFQNRVDRGAKALRVDKPTNKPDYERVKILTKERERDAWRNLRSQGQGVEDFRGDKYGNAWLKNPRLLKSSRYLDAIRMRTNTFGTKVVLGRTTANADTICRRCHLQPETLGHIIGQCVFTKPARIRRHDKIKELIADRVSRHHTVMLEPTIDDAGTLKKPDMVIKMNDEALVVDVTVRYEKGVYLAEAVKEKMTKYQRTADLMARRFNVSKGIVLPIVIGSRGALPKRTVKALDKLGINSKDKRSIAMKALRSSVEIANAFIDYGN

SEQ ID NO: 3727 - protein, 974 aa, Riptortus pedestris
MPDEQSVIVEDAILCEICNKYYTRRGINRHKARSHVTDLNINTSDKCQICGKLSKCQKIHLSKAHPEEYRKTLAGISESNSNVNIDKVNLNGSHDNNPNDIIRNWEIKFNNLILSERNDNLFQNSLIEFVNWLRTSQMNGKGPIHPATKYYQARQRRKDNPDSYTYSRTNNPEKKSKRDAERRRNRYKFELAQYLYYYRRKEIVNNILNNSNDQVKCNIDSEIINKHFENIFGTENMNTLNKYYNLPDTPENIILASEDIEAACKGMSLDSAPGTDGIYVRTIRDTKCYNVLTSIADYMLKWSFVPECLKVGRTVLIHKSGDKDNISNYRPITIFSVIRRIIERALDKKLRRYLELSTHQRGFTSCPGTFINSSIINGCIQDAKRRKNDCCVVFLDVTKAFDTIGHDHIRKCLSTHPIPQNLKDLILQLLIGNKLSIKGSSKQNKITIDVKKGVAQGAPLSPVIFNAAIDFILQELSENEIATAYGYPLVNGLPNLTVCGFADDIAIIAKSEESAEHLLGLAVDCLHKIGLEINNNKCKAIKIEKGILKKDIISTIDGIKINSIGNKEKIKYLGINFEEEIRLDESNIIDTLVKKLNLLCSSPLMKADQKLNIINQYIWPTIIYPLQCAPLKDLKPSFLVKIDKVIRSCIKEILSLPSDTPDTMIYAPRNLRGLGLFRAEWEAFLQHLNICLTLINNNNDYVMASRNIEEEIAQCFNGLHVEKKTKIDVRKIRQELRENSFIEWSSLPSKGKGVINFKEWKPSNQWVSTKKGLSCSEWSTAIKMNVNLIPVHSIPGRNLGSTRCRHCSEIETLPHVLGSCKWGELMRNSRHHKVRSDIAQLIKRYHRDWEVYEEVACKSSDGSPKRADIIIIKRIENEGVILDPTVRFETNINQSTEVDEEKRKIYEPCCGYFKEKYAIERWSVKGLLIGARGAISQRTAETLKELGLSTNDLQNLSTVVIKHSARIINYHLYK

SEQ ID NO: 3728 - protein, 837 aa, Riptortus pedestris
MNGKGPIHPATKYYQARQRRKDNPDSYTYSRTNNPEKKSKRDAERRRNRYKFELAQYLYYYRRKEIVNNILNNSNDQVKCNIDSEIINKHFENIFGTENMNTLNKYYNLPDTPENIILASEDIEAACKGMSLDSAPGTDGIYVRTIRDTKCYNVLTSIADYMLKWSFVPECLKVGRTVLIHKSGDKDNISNYRPITIFSVIRRIIERALDKKLRRYLELSTHQRGFTSCPGTFINSSIINGCIQDAKRRKNDCCVVFLDVTKAFDTIGHDHIRKCLSTHPIPQNLKDLILQLLIGNKLSIKGPSKQNKITIDVKKGVAQGAPLSPVIFNAAIDFILQELSENEIATAYGYPLVNGLPNLTVCGFADDIAIIAKNEESAEHLLGLAVDCLHKIGLEINNNKCKAIKIEKGILKKDIISTIDGIKINSIGNKEKIKYLGINFEEEIRLDESNIIDTLVKKLNLLCSSPLMKADQKLNIINQYIWPTIIYPVQCAPLKDLKPSFLVKIDKVIRSCIKEILSLPSDTPDTMIYAPRNLRGLGLFRAEWEAFLQHLNICLTLINNNNDYVMASRNIEEEIAQCFNGLHVEKKAKIDVRKIRQELRENSFIEWSSLPSKGKGVINFKEWKPSNQWVSTKKGLSCSEWSTAIKMNVNLIPVHSIPGRNLGSTRCRHCSEIETLPHVLGSCKWGELMRNSRHHKVRSDIAQLIKRYHRDWEVYEEVACKSSDGSPKRADIIIIKRIENEGVILDPTVRFETNINQSTEVDEEKRKIYEPCCGYFKEKYAIERWSVKGLLIGARGAISQRTAETLKELGLSTNDLQNLSTVVIKHSARIINYHLYK

SEQ ID NO: 3729 - protein, 837 aa, Riptortus pedestris
MNGKGPIHPATKYYQARQRRKDNPDSYTYSRTNNPEKKSKRDAERRRHRYKFELAQYLYYYRRKEIVNNILNNSNDQVKCNIDSEIINKHFENIFGTENMNTLNKYYNLPDTPENIILASEDIEAACKGMSLDSAPGTDGIYVRTIRDTKCYNVLTSIADYMLKWSFVPECLKVGRTVLIHKSGDKDNISNYRPITIFSVIRRIIERALDKKLRRYLELSTHQRGFTSCPGTFINSSIINGCIQDAKRRKNDCCVVFLDVTKAFDTIGHDHIRKCLSTHPIPQNLKDLILQLLIGNKLSIKGPSKQNKITIDVKKGVAQGAPLSPVIFNAAIDFILQELSENEIATAYGYPLVNGLSNLTVCGFADDIAIIAKDEESAEHLLGLAVDCLHKIGLEINNNKCKAIKIEKGILKKYIISTIDGIKINSIGNKEKIKYLGINFEEEIRLDESNIIDTLVKKLNLLCSSPLMKADQKLNIINQYIWPTIIYPLQCAPLKDLKPSFLVKIDKVIRSCIKEILSLPSETPDTMIYAPRNLRGLGLFRAEWEAFLQHLNICLTLINNNNDYVMASRNIEEEIAQCFNGLHVEKKAKIDVRKIRQELRENSFIEWSSLPSKGKGVINFKEWKPSNQWVSTKKGLSCSEWSTAIKMNVNLIPVHSIPGRNLGSTRCRHCSEIETLPHVLGSCKWGELMRNSRHHKVRSDIAQLIKRYHRDWEVYEEVACKSSDGSPKRADIIIIKRIENEGVILDPTVRFETNINQSTEVDEEKRKIYEPCCGYFKEKYAIERWSVKGLLIGARGAISQRTAETLKELGLSTNDLQNLSTVVIKHSARIVNYHLYK

SEQ ID NO: 3730 - protein, 1906 aa, Trichonephila clavata
MSDRKTIQIDTSPSPIAMRTRGIARNIARATTSCCCPICGSYVPNIHMLMSHVLKHPNSARRRRVENELSKALEAANRDDQNPSEPSAEETFARPTPPLHRPPEEIDSPSHSPKSGNTGPPDVTPPPSASPRHLFAPPIHWVEDFTPTRFVRETVTQMVELVALEASPPGEVRMLTNSETDELKEQTDSDTGDENYKQEAVVAGFTTKETIVTIVHDTTEADKKLEVALTTPSTTDAIPAAVETMPTTATSSPHEQGNDDTASQRSNSPSVLDIIFAGELSQQSEADINDLLSTWQESLTGSPPHRAFGPPTYAATAKLGKSKRATVSKLWLCSNCPKKFYTEKGRDDHEAACQVVVEETPVRDAVLTAVSGRRSSTTKANTAGPKNPAVLKKDRMPTALTKKPRTGSDAAPRKTGAKKEIKPQPERTRLVFCRHCDRRIHLATTLEQHYLKKHFRKLSPGTKNASSSAALIPCVTPLIEEHAGKISARRLDGPFRCEFCERQFGSERTLAYHTWNFHKIAPPPKPRRPAEDISRVNAHPRSPPTRSGDHFSCAACSVRNPLIFLTQAALDEHTIQCHTVAMPGAPKGKEKPSLHLSSAVWCPDCASFISQKFSLAEHIKREHNGTIKVPNRGPKHTEVVMVEKSQSTENTQFHVTCPDNPTQIHGLSDQITGKKPHEGTFVCSTCKVKCKTRKGLTYHRLRDHGVSVGRANPRSTDHQDPIVNQDEDATPTAVHAAPTRTGGGSPKRGGAAILGETLRLQFPLPQVLACPVANCTHSFHTAKWYTTNTSVKKHLTSYHRLSNLRVEYWCAICDCRIQSKPALHPCLEGVLSVVTTDSPGCNWPCVECGVIFTTKNGLLNHEKFHKRRKLQEKMPKLRVLEGPKARRIKKMKKLAPILTGEPGTRSLAPATDSPTAPATNVGSDNSEPAANDDSNPRGRIDLARPCTLSSFIEPLDALLEVEEIDNRMSIFNDIAQGVVSAVQEHFRLSAPPKIDSSTGIRSSGLDLANPQKVQQCYRWNRRKCVRAITQPSSARCPVKLEETFNYFRGIWETVGSPAERPLPEPPTRPPVVEILSRDFVTDCLRSCENSSPGEDLISYRHWREIDPSCSVLTRLFNICLQVADIPASWKSSRTILIHKKDELDRLDNWRPISLSNTIYKLFTKCMARKLSDWCEMNEVLSSAQKGFSPFDGVLEHNFLLAQHLESARRVKTDKFTAWLDISNAFGSVPKQVILDSLVACGVDVDFVTLISNIYEGSTTRVLTEEGPTPPIKILSGVKQGCPLSGILFNLAIDKVLHTIQENREHRAVLAFADDIVLMSDSAADLQELISTTSDELRALCLHLNPRKCATLHLSGRVPTGSRNSTFLLDGVPVSALEDGEEYKYLGKPAGFFLQKNFRTANEALSLIEKLCGSQLSQWQKLDALKTFMFPTMSFAMRTAQLGKTDWAEVDLAARREIKNILSLPSNASNHYIYGNRKLGCCGLPSAAQDSDYYLVDSAFKLLTSKDEEVAIQALGQLTRTVRHRLGRSPSDGDLGSFLSGCMEDEFAGSTNQLANTWTLARKASDRQQVTWSFSNGQPSIAFGDENITSTQRRKVMRGFHDHFQVRETQCLLEQPSQGKAMDCVSMAPASSHFIMDGKFTRFADWRFVHKARLNLVPLNANKNGPLPAERNCRRCGRWVETLPHVLNHCTSYSAAWQMRHNAVLARVETAIAYRGTILSENQAIGPNHLRPDLVAEIDGTIYIVDVTVPFENRRDAFRLARERKVAKYLELIPHYKNLGYQDVHIVPIVVGSLGAWDPENDLFLKKVATRSYLAVLRKLCVSECIRWSRDIYVQHLTGAQQYSRTSNNAIPLELPSTTEVPAIQDNSQVITASNSNDNRDACETQTQVSQRHNEPSPTMEANIVDL

SEQ ID NO: 3731 - protein, 1150 aa, Trichonephila clavata
MVGETLRLRFPLPQVLPCPVANCAHSFHTAKWYTTNTSVKRHLTSFHRLPNHRVEYWCAFCNRRIQSKPALHPCLDGVLSFTTTDSSGCNWPCVECGVIFTTKNGLLNHEKYHRRKKIQEKLPKLRVIEGPKARRDKKKKKLAPILTGEPGTRPLAPVPDSPTAPVMDVATTDGDDQASLRGRIDLARPCTLSSFIEPLDALLEVEEIDNRMSIFNDIAQGVVSAVQEHFRLSAPPKIGSSTGIRSSGLDLANPQKVQQCYRWNRRKCVRAITQPSSARCPVKLEETFNYFRGIWETVGSPAERPLPEPPTRPPVVEILSRDFVTGCLRSCENSSPGEDLISYRHWREIDPSCTVLTRLFNICLQVADIPASWKSSRTILIHKKDELDRLDNWRPISLSNTIYKLFTKCMARKLSDWCEMNEVLSSAQKGFSPFDGVLEHNFLLAQHLESARRVKTDKFTAWLDISNAFGSVPKQVILDSLVACGVDVDFVTLISNIYEGSTTRVLTEEGPTPPIKILSGVKQGCPLSGILFNLAIDKVLHTIQENREHRAVLAFADDIVLMSDSAADLQELITTTSDELRALCLHLNPRKCATLHLSGRVPTGSRNSTFLLDGVPVSALEDGEEYKYLGKPAGFFLQKNFHTANEALSLIEKLCGSQLSQWQKLDALKTFMFPTMSFAMRTAQLGKTDWAEVDLAARREIKNILSLPSNASNHYIYGNRKLGCCGLPSAAQDSDYYLVDSAFKLLTSKDEEVAIQALGQLTRTVRHRLGRSPSDGDLGSFLSGCMEDEFAGSTNQLANTWTLARKASDRQQVTWSFSNGQPSIAFGDEIITSTQRRKVMRGFHDHFQVRETQCLLEQPSQGKAMDCVSMAPASSHFIMNGKFTRFADWRFVHKARLNLVPLNANKNGPLPAERNCRRCGRWVETLPHVLNHCTSYSAAWQMRHNAVLARVETAIAYRGTILSENQAIGPNHLRPDLVAEIDGTIYIVDVTVPFENRRDAFRLARERKVAKYLELIPHYKNLGYQDVHIVPIVVGSLGAWDPENDLFLKKVATRSYLAVLRKLCVSECIRWSRDIYVQHLTGAQQYSRTSNNAIPLELPSTTEVPAIQDNSQVITASNSNDNRDACETQTQVSQRYNEPSPTMEANIVDL

SEQ ID NO: 3732 - protein, 1411 aa, Trichonephila clavata
MKPQPERTRLVFCRHCDRRIHLATTLEQHYLKKHFRKLSPGTKNASSSAALIPCVTPLIEEHAGKISARRLDGPFRCEVCERQFGSERTLAYHTWNFHKIVPPPKPRRSAEDISRVNAHPRSPPTRSGDHFSCAACSVRNPLIFLTQAALDEHIIQCHTVAMPGAPKGKEKPSLHSSSAVWCPDCASFISQKFSLAEHIKRKHNGTIKVPNRGPKHTEVIMVEKSQITEQTQFHVTCPDNPAQIHGLSDQITGKKPHEGTFVCSTCKTRKGLTYHRLRDHGASVGRANPRSTDHQDPIVNQDEDATPTAVHTAPTRTGGGSPKRGGAAILGETLRLQFPLPQVLTCPVANCTHSFHTAKWYTTNTSVKKHLTSYHRLSNLRVEYWCAICDCRIQSKPALHPCLEGVLSVVTTDSPGCNWPCVECGVIFTTKNCLLNHEKFHKRRKLQEKMPKLRVLEGPKARRIKKMKKLTPILTGEPGTRSLAPVTDSPTAPATNEGSDNSEPTTNDDSNPRGRIDLARPCTLSSFIEPLDALLEVEEIDNRMSIFNDIAQGVVSAVQEHFRLSAPPKIDSSTGIRSSGLDLANPQKVQQCYRWNRRKCVRAITQPSSARCPVKLEETFNYFRGIWETVGSPAERPLPEPPTRPPVVEILSRDFVTDCLRSCENSSPGEDLISYRHWREIDPSCTVLTRLFNICLQVADIPASWKSSRTILIHKKDELDRLDNWRPISLSNTIYKLFTKCMARKLSDWCEMNEVLSSAQKGFSPFDGVLEHNFLLAQHLESARRVKTDKFTAWLDISNAFGSVPKQVILDSLVACGVDVDFVTLISNIYEGSTTRVLTEEGPTPPIKILSCVKQGCPLSGILFNLAIDKVLHTIQENREHRAVLAFADDIVLMSDSAADLQELITTTSDELRALCLHLNPRKCATLHLSGRVPTGSRNSTFLLDGVPVSALEDGEEYKYLGKPAGFFLQKNFRTANEALSLIEKLCGSQLSQWQKLDALKTFMFPTMSFAMRTAQLGKTDWAEVDLAARREIKNILSLPSNASNHYIYGNRKLGCCGLPSAAQDSDYYLVDSAFKLLTSKDEEVAIQALGQLTRTVRHRLGRSPSDGDLGSFLSGCMEDEFAGSTNQLANTWTLARKASDRQQVTWSFSNGQPSIAFGDENITSTQRRKVMRGFHDHFQVRETQCLLEQPSQGKAMDCVSMAPASSHFIMDGKYTRFADWRFVHKARLNLVPLNANKNGPLPAERNCRRCGRWVETLPHVLNHCTSYSAAWQMRHNAVLARVETAIAYRGTILSENQAIGPNHLRPDLVAEIDGTIYIVDVTVPFENRRDAFRLARERKVAKYLELIPHYKNLGYQDVHIVPIVVGSLGAWDPENDLFLKKVATRSYLAVLGNFVCPSAYGGVGTSTYSI

SEQ ID NO: 3733 - protein, 1803 aa, Trichonephila clavata
MDWRKKIRHSNDNSFAPPLCESSANSLTPTPPNSMNSSIPSAEVPVATDPTPPLHQTPEEIYSPISSPNSGNEASKSEARTPRVSPKHPFAPAKHWVEDFSPTRHVTEALTQLVDLVAYDADPPSIHSLLPVSDHMAPLLEHSPKKEIGAQSETLLIYERGTSAQKGPAPVGDVEIQTIPSSPTHAVTISKRSADGHSPGLNKSLGEVRTGSSPITPPMADVIPARIDGVLRTTPESPRAPVDDDTTSQRSNSPSVLDIILAGDLSQQSEADLNDLLSSWQEKLTGSPPGRAFGPPTYAATAKLGKEKRASVSKLWHCSTCPKKFYTERGRDDHEATCQVEVKETPAKDVVTKSAKLVKIQGHSSGNEPTGTKNCTVKETDTKKTKANLQKRGDTAQKRTWARKREIKEKPAKTQLVYCRHCDRRIHLATTLEQHYLKKHFRKLSPGTKNASSLTTSTPGVTPSIEEHAGRISARKLDGPFRCGFCEQLFGSERTLTYHTWNFHRVGPPPKPRRPADDISRVNAHPGSPPKRSGDHFSCVACSVKNPLVFLTQAALDEHLIQCHTVLTTNAPVVIVEPTAHTSSAIWCPDCALFISQKSSLAEHIRSKHNQRIVIRNAGPTHTKLVKSQKNETVDSPNRTESTQFHVTCPDSPTELLGAAVTTKGKKQHGNENVCETCNLNCKTRKGLTYHRLRDHGVSVGRANPRSTDRHDPIEDQDVDTAPIAAHTAPTRTGGGSPIRGGVAMVGETLRLRFALPQVLPCPVANCAHSFHTAKWYTTNTSVKRHLTSFHRLPNHRVEYWCAFCNRRIQSKPALHPCLDGVLSFTTTDSSGCNWPCVECGVIFTTKNGLLNHEKYHRRKKIQEKLPKLRVIEGPKARRDKKKKKLAPILTGEPGTRPLAPVPDSPTAPVMDVATTDGDDQASLRGRIDLARPCTLNSFIEPLDALLEVEEINNRMLIFNDIAQGVVQTVQDHFRLSVPPNSSNSTGNRSGGLDLANPQKVQSCYRWNRRKCVRALTQPSSARCPVKLEETFNYFKGIWETVGSPAERPFPEPPTRPPVVEILSKDFVADCLRSCENSSPGEDLISYRHWREIDPSCTILTKIFNICLQVADIPTSWKSSRTILIHKKGELDRLDNWRPISLSNTIYKLFTKCMARKLSDWCEMNEVLSSAQKGFSPFDGVLEHNFLLSQHLESARRAKTDKFTAWLDISNAFGSVPKQVILDSLMACGVDVDFITLISNIYEGSTTCVLTEERPTPPIKILSGVKQGCPLSGILFNLAIDKVLQKIQENREHRAVLAFADDIVLMSDSAAELQELLLTTSDELRALCLHLNPRKCATLHLSGRVPTGSRNSTFLLDGVPVSALEDGDEYQYLGKPAGFFLQKNFRTANEALSLLEKISGSQLSQWQKLDALKTFMFPTMSFAMRTAQLGKTGWAEVDLAARREIKNILSLPSNASNHYIHGNRKLGCCGLPSAAQDSDFYLVDSAFKLLTSKDEEVALQALGQLTRTVSHRLGRSPSDGDLGSFLSGCMEGEFAGSTNQLSNTWTLARKASDRQQVTWSFTNSQPSIAFGDENITSTQRRKVMRGFHDNFQVRETQCLLAQPSQGKAMDCVAMAPASSHFLFDGKYTRFADWRFVHKARLNLVPLNANKNGPLPADRNCRRCGKWVETLPHVLNHCTSYSAAWQMRHNAVLARIETAIAYRGTILSENQAIGPNHLRPDLVAEIDGTIYIVDVTVPFENRRDAFRLARERKTTKYQELIPIYKTKGIKTCRSCQSLLDPSAHGTQRTISSSKRWPQEATWPS

SEQ ID NO: 3734 - protein, 1151 aa, Trichonephila clavipes
MALCGLRRILPKQNGTPQPPKDAQEECTAGETAGPKETRGPGESESENEGAIGPVVNRRTRGNATGPPPAHLPETPISQSQSTRDRDAEDDMTGGRIDVRVPSVLESFIEPLDTLLQVDEISNARAHFEDIVGDVTRAVHEHFHLQRPQRNQGSNGPGRAGLDLKNPQKVQQAYKWNRRKCVRAITQDRAQRCPVDMEETYEYFKSVWETSSSPENRRHGETPTRPPVVESLSQAFVAECLRAAENSAPGQDMIAYRHWREIDPDCAVLTRIYNVCLKMANIPEVWKSSRTILIHKKGEVSKLDNWRPISLSDTSYKLFTKCLAKKLSEWCETHEVLSPAQKGFSPYDGVLEHNFLLTQHLEAARRCKKNKFVAWLDISNAFGSVPRQVILDSLVACGVDQEFINLVVCMYHGSNTSVLTEEGPTPPIQLKNGVKQGCPLSGILFNLSIDKVLHTIQENREGRAVLAFADDLVLFADEAEELQEMIDTTAHELDALCLSLNPRKCATLHLSGVSPTGTRPTRFKLNDIELQALDDGTPYAYLGNPVGFFVQKHFKTANEALSILEKLSASNLAQWQKLDALKTFFFPTLSFSMRTGQLGKDDWDEVDVAARREIKYILSLPPNASNHYIYGNRKLGGCGIPSAAEDSDFYLVDSAFKLLTSKDATVRLEALGQLTRTVAFRIKRDPTDGDLAGFLSGSMVGEYSDTTNQYSNHWTLARKASSRQSVSWSFVDGSPSVTIGADVLSPTKKRSVMRTFHENFQLVETQNLLAAPSQGKVMDCVAMSPASSHFLTDGKYTRFADWRFVHKARLNVVPLNACRKGPQPALRACRKCGEWDETLPQVNYCKSYSAAWQLRHNAVLARIRAAVAFKGTILSENQVAGPNRLRPDLVANVDNKIYIIDVTIPFENRRGAFSQARERKISKYLELFPYFTSLGYRHVQIVPIIVGALGAWDPENDAFLRKVATKRYLAVLRKLCVSDCIRWSWDIYTQHLTGAQQYSTDTSLHPPPQCTQERRQPSRKPPNVVNSTVPSEPPQGMSPPDTEPQPRRTNGNRSNSPLPPITPLASHSNVIESPHAGIENNIALLAEASVPMVSPMATDNVDGPTNVIEALDSSPPVNSLANELEGQVDMDDRDIASPGLTMNDGEQSPNL

SEQ ID NO: 3735 - protein, 980 aa, Tomocerus maximus
MMIILFILDPNKCYLCDEIFSKDDSSSFVQCDNCDGWYHTKCTELKNLNTNEIELLDWICYYCCHQDIIESNIEDKPENKCIHCGKACNGSRGLKIHQSKAHKEIHLENIVSKYSQNLNVNTPTIVTENTLSKSPSPLDDINTALQTQNSSLIYLFDNFDPLTFDETVDLTITTLKQARFHLPGPKHPTTKYYQARKNKSQFRHREVGYKKSSNPVRTSNRARIKRLEKFNSELMQHLYYNQRKKCVNKILRDGNNNCKIPIDTLHASFAERWSHSNDMTRNSYKSVPSDLQLDIDSDFNLEVTKEEIHSSISKIKSDSSAGPDDIYPRCLKLTKCDEILATIATLMLKHNYVPSGLKEAKTILVYKEKGDKDLPQNWRPISVCSVIRRVIEKVFESKLRKWITFNPRQKGFIREPGCHINTSILEGCLNKAKKDKLTLVLMFLDILQAYDNIGHIHTKLCLDEIPMPSLLRKIIFSLQTSNFTRIKCNNSVSPPIFFNRGLLQGSPLSPVIFNLAIDYVLNELSEPEISQEYGFTLDKSLPNLSVLSFVDDTVPVAKSRQAARELYNIAHNAFAVTGLQISPTKSTAIIIENGFLASEDLTINEDTNIISIKDNEEVKYLGVNYNQEQIFNEHKVLSKIQSSLSKLISSQCLHPDQKLNIINQYLWPIMVYPLQTCPISKLKKSFLQDVDRIIRSTVKSILGVPDDLPSSMLYSPKKWKGLEIPNGSWEAYIQKFNICETLITQNDPYVQISRQLIKEKETCLLKLNIKPEEIESARKNMKSANSIKNSKILRNILREKEFEKWCQLKSKGKGVLLFKETPYSNFWISNRKGLTSSEWTSMIKMTGHVAAVNSVPGRNQNTNRCRYSSCNEIETLGHVLGFCPKTELLRNNRHHSIRTIIADALREKNYEVYEEVHCNSSSDSNRRVDILAIKGNKGYIIDPTIRIESHLGQPDEVNLEKKAIYEPCIGYFMEKYKLKN

SEQ ID NO: 3736 - protein, 980 aa, Tomocerus minor
MDMTISMDTSEIPIPSNHIQCSHCGKLCKGNRGLRIHHAKTHKEIHFEEILSKYKDNSNVTNNDDKDSVTDECSTKRKKSNELQEINDSLIKLNEQLTNLIDNFDPCTFDELVDQTIKTLQNARFSLPGPKHPATKFYQARKNSSQFRNREVGYSKSTNPIRSSKRARNKRIENYNYDLMQHLYYNQRKKCVNKILDDQTNNCPIPIEILHASFCERWSHPNNHTRSNYTSIPCDIQEEIDEEFSFIITEQEIRRGISKLKTDSSAGPDNIYPRCLKLTKCDGILSTIASIMLQKNYVPAALREAKTILIYKKKGDKSQPQNWRPISICSVIRRAIEKSFDYRMRKWISFNPRQKGFINQPGCHINTSILEGCLKKAKKDRLSLMLMFLDIYQAYDNVGYEHAKLSLNEVPMPSKLRNIALSLQINNYTRLKIGNMTSAPIIFKRGFLQGSPLSPALFNLAINYVINELSEPEISEEYGFNLDRSLPNLSVLSFVDDTAPIAKSRSDAKELFYIAESAFATTGMTISHSKSMAIIIENGILSEEDLVISDDIQLHSLKENQEVKYLGVTYKQELIFDERKTLSKIQSSLSKLISSQMLHPDQKLNIINQYLWPVMVYPLQTCPISKLKKSFLHDIDLTIRSTVKTILGVPDDIPSSMLYSPKKWKGLEIPNAEWESFVQKYNICETLLKCDDLYIPVSRNLNKEKETCLEKLKITLEDISSAQNKSKSSKPVKTSKIMRNILREREFDKWTTLKSKGKGITLFKQVPYANSWITNRKGLSSSEWTSSLKMHGCVAAVNSVPGRNPNTNRCRYNNCNEIETLGHVLGFCQKTELLRNNRHHLVRSLIAEAFREKNYQVYEEIKCNSDTGSNRRVDILAINGNQGYIIDPTVRIETSEEQPTDVDSEKKAIYEPCINYFLQNYNLQNVEVIGLLIGSRGTIPTFFENFRKRFSLPKELVKNIVLSVLRSSTLILHNHLFSPN

SEQ ID NO: 3737 - protein, 797 aa, Tomocerus qinae
MQHLYYNQRKRCVHKLINEDDSQCYIPIDVLHDSFTKRWSYPNNCKRVFYNHVDSDIQTSIDEEFFPIISKEEIKTSISKIKSDSSPGPDLIYPRCLKLTDCSEVIAKIATIMLKHNFVPSCLREAKTILTYKKGDKNLPENWRPISVCSVIRRVIEKTFDTRIRNWITFNPRQKGFIHQPGCHINTTILEGCLKKAIKEKSDLVVLLLDVEQAYDNIGHEHTKYSLEEIPMPSALRKIVLSLQTNNFTRLRVNNNISQPIFFKRGVFQGSPLSPTLFNVAINYVINLLSEPEISSHYGFSLDKSLPNLSVLSFVDDTAPIAKSRLAAKELYCIAENAFNESGMKISSKKSTAIIITDGMLSETDLEVYDGIFINSLKENESVKYLGVNYKQQIMFDESKIICKIKSSLSKLISSNMLLPDQKVNIINQYLWPVMVYPLQTCPLSKLKLTFLRDVDKIIRSSFKTILNVPDDIPSSMLYSPRKWKGLELPKCEWEAYVQLFNICETLLNQKDPYIFYSRNLLKESKVCLEKLNITVEDMDLARLQKPKVKSSKLLRGILREREFDNWSALKSKGKGVCLFKETPYSNFWINDRKGLTSSEWTSAIKMIGCVAAVNSVPGRNFNTNRCRYSMCNEIETLGHVLGSCPKSELLRNNRHHSVRSIIADAFRKKKYEVYEEVHCNSDSGSHRRVDILAIDGKQGYIIDPTIRLESQEDQPLNVNVEKKDIYEPCIKYFMQKYSLKNIEVIGLLIGSRGTIPSFFEQFRKRFSLPKELTEDIVLSVIRNSVAILHFHLFTTI

SEQ ID NO: 3738 - protein, 981 aa, Tomocerus qinae
MDTTTLTNTLSQCVTGSTCLKCGKSCKGTKGLKIHESKAHKDVHLDNIQSKYDDEENLTTNTSICSQNWFNENDEQASDVNLFQDVNDKLQELSNEAEYFKENFDPALCDELVNQTINILKTANSLLPGPKHPATKFYEARKRSSQFRQREAGYDKSSNPIRSSARARKRRQETYNHQLMQHLYYNQRKKCVRKLLNDNTNSCKIPMDLLYQSFVERWSTKNDNVRDYYHTVPTELQIEIYDDFSCIITKEELEKGISGMKTDSSPGPDGIYPRCLKLTKCADILSKIATFMLIHNYVPAALKEAKTVLTYKLKGDKNLPENWRRISICSVIRRVIEKVLDAKIRKWIKFNPRQKGFIHEPGCHINTSILEGCLRKGMKMKSSLVVLFLDIKQAYDNIGHLHAKFCLDEILMPSALRNLALSLQTNNFTRLNVNNSASAPIFFKRGFFQGSPLSPVLFNAAIDYVINELSEPEISLQYGFSLDRSLPNLSVLSFVDDTAPIAGSRSAARELFTIAQNAFSRTGMTISESKSSAIHIENGELSDVDLIVSDNITIHAINSNEVVKYLGVNYQQRQIFNESLVLGKIKLSLDKLLSSQMLFPDQKLNIINQYLWPVMVYPLQTCPLLKLKKSFLCDLNTMIRSTIKSILALPDDLPSSMLYSPKKWKGLQIPNAEWEAYIQHYNICETLLSQKDPYVLVSRQLDIEQKKCLEKLDIKNEDILLTKMNMKKSSNTKTSKILRTILREREFVKWSELKSKGRGVSLFKQTPYANEWIISRKGLTSSEWTSALKLTGGVAAVNSVPGRNFNTNRCRFPTCNEIETIGHVLGFCPKTELMRNNRHHTVRALIAEALRKKEFQVYEEVHCQSDADSNRRVDIFAKMGSKGYIIDPTIRIESHENQPEEVHIEKKSIYEPCINYFKLQYGVKNVEVIGLMIGSRSTIPSFFENLGSEKEFSLPKELTVNIVLSVIRNSTQILHYHLFSP

SEQ ID NO: 3739 - protein, 978 aa, Tomocerus qinae
MDMLSSQNITLTDTEHESTCSHCGKICKGSRGLKIHQSKAHKEIHLENIASKYTKSSLINTLSQDDDFEESKNKPSQLGEINNQLAEHYESLDPLMKNFDVFAFEEIVEDLINTLKSARFHLPGPKHPALKFYQARKNTSQFRNRELGYSKTTNPIRSSNRARKRRNEKYNHDLMQHLYYNQRKKCVNKILRDSKNSSCKIPMDDLVASFNERWGISNDNIRSFYRTIPRKVQEKIDNDFECDITGDELRRSISKIPSDSSAGPDNIYPRCLKLTKCEGVLAKVANIMTKYNYVPSGLREAKTILIYKDKGDRNLPQNWRPISICSVIRRVIEKTLESRMRKWITFNPRQKGFIHEPGYHINTSILEGCLDKADKDKSNLVILFLDIHQAYDNIGHKHAKLSLDEVPMPSLLRNIAMSLQTNNYTRIISNNNASIPIVFKRGLLQGSPLLPLLFNLAINYVIDELSEPEISSEYGFTLDRSVPNLSVLSFVDDTAIIAKSRYAATELFSIAENGFTSSGLKISPSKSTAIVIENDSLSEDNLIITNDIQIRGLKKGQEVKYLGVTYNQKQVFDENKTLSKIQSSLNLLISSQMLHPDQKLNIINQYLWPVIVYPLQTCPISKLRKSFLTDVDLMIRSTIKTILSVPDDIPSSMLYSPKKYKGLEIPNAEWEGYIQKYNICETLLAQNDPYVMISRKLEKEKERCLSKLKIEVNEINEFRAKMTPMKENKTKTSKILGKILRERQFDKWCGLQSKGKGVALFKETPYSNFWIANRKGLTSSEWTTAIKMNGSVVAVNAVPGRNFNTNRCRYPTCSEIETLGHVLGFCRKTELLRNNRHHKVRTLIADALRRRNYTVYEEIHCNSESGSNRRIDILAIEGTNGYIIDPTIRIESKEGQPEEVDIEKKAIYDPCIKYFRDNYNLRNVEVIGLMIGSRGTIPSFFENFRKRFSLSKELTKDIVLSVIRSSSMILHNHLFSPY

SEQ ID NO: 3740 - protein, 883 aa, Tomocerus qinae
MKNFDVFAFEEIVEDLINTLKSARFHLPGPKHPALKFYQARKNASQFRNRELGYSKTTNPIRSSNRARKRRKEKYNHDLMQHLYYNQRKKCVNKILRDSKNSSCKIPMDDLVASFNERWGIPNDNIRSFYRTIPRKVQEKIDDDFECDITGDEIRRSISKIPSDSSAGPDNIYPRCLKLTKCEGVLAKVANIMTKYNYVPSGLREAKTILIYKDKGDRNLPQNWRPISICSVIRRVIEKTLESRMRKWITFNPRQKGFIHEPGCHINTSILEGCLNKADKDKSNLVILFLDIHQAYDNIGHKHAKSSLDEVPMPSLLRNIAMSLQTNNYTRIISNNNASIPIVFKRGLLQGSPLSPLLFNLAINYVIDELSEPEISSEYGFTLDRSVPNLSVLSFVDDTAIIAKSRYAATELFSIAENGFTSSGLKISPSKSTAIIIENGSLSEDNLIITNDIQIRGLKKDEEVKYLGVTYNQKQVFDENKTLTKIQSSLNLLISSQMLHPDQKLNIINQYLWPVIVYPLQTCPISKLRKSFLTDVDLMIRSTIKTILGVPDDIPSSMLYSPKKYKGLEIPNAEWEGYIQKYNICETLLAQSDPYVMISRQLEKEKERCLSKLKIEVNEINESRAKMTPMKENKTKTSKILRKILRERQFDKWCGLQSKGKGVALFKETPYSNFWIANRKGLTSSEWTTAIKMNGSVVAVNAVPGRNFNTNRCRYPTCSEIETLGHVLGFCRKTELLRNNRHRKVRTLIADALRQRNYTVYEEIHCNSESGSNRRIDILAIEGTNGYIIDPTIRIESKEGQPEEVDIEKKAIYDPCIKYFRDNYNLRNVEVIGLMIGSRGTIPSFFENFRKRFSLSKELTKDIVLSVIRSSSMILHNHLFSPY

SEQ ID NO: 3741 - protein, 1064 aa, Amphibalanus amphitrite
MEEQVCASCPSRSTQRTTITCCSCKRRWHALCVRVPAKKARELQAEGGVWHCRDCLGHGFHTQPSSSPASPAAGNFPEALAKMRRKGRIVSRLPKAIRPLVADALAEAMDGALQSDSADRWWELLTFAHCKLQAPAPGSKCTAASSIRRQISGETPATATDKATDTTNHRGRMPRAGSATEATRDDALARRIAGKLADGDIRAALQTLTTDEKLASADDEIVTSLRAKHPPAPDDQLLPPPPSNTDPAPIIVSETDVEAAITSMRPGSTAGLDGIRALHLQQLISKEAAESGRRLIRCLVRLTNLLLQGAVPDCARQALFGASLCAIRKSDGGLRPIAVGSIYRRLAGRIAARQVAAAVGEELRPVQLGVGTPQGCEAAVHATREFLAAAAEAHAPYLLVKVDVRNAFNTVRRDTFLEQVKTRVPMAYPLLWCAYSEPTPLCIGDQTISSCSGVQQGDPLGPAAFALALDPIIRRMQSPLNVWYLDDGTIGGPADLVAADLAVLATALPTIGLQLNANKCEVAFAGQTPPPSLLESLRGTLPGLKETLASDLSLLGSPLTDAALPVATTRAAAVIDRMCARISNLDAHSGLFLLAHYTAAPRLTYLLRSAPLYREPGPLLNVDKTVRETLATVTNVTINDEAWEQASLPLRFGGLGVRSVMALALPCHMASLHACLPLTQEILHATEPRQPTQALQRARADIVAKLGEAARQVPQSEECKQRAWDETFCKMSQTRLLDGANQVARARLLAAAEPHTAAWVQALPVTSVGLHLDDETVRVAVALRLGASVCEPHNCQLCHRPVDRLGHHGLSCTKSAGRHARHANLNDVLRRALSSTGLESVLEPTGLDRGDGRRPDGITLFPFSRGMSLIWDATCCDTFSATAVISSALSPGSAARCAEERKRARYAALRERYVFIPFAVETSGVLGPAATGLMKELGRRLTCRTGDKRETVWLAQRVSIAVARGNAASVLATAKPAAANRPGPSPTPSSRLTPSMSTPSIEAPDDESAAGPPLDSVADPPGHPPPLTPADGCREELRMTRSRSSSLCCPGACACPTLNSRSRI

SEQ ID NO: 3742 - protein, 1063 aa, Amphibalanus amphitrite
MEEKVCEGCPSRSTQRTTITCGSCKRRWHALCVRVPAKKARELQAEGGVWHCRDCLGHGPLTQPSSSPANPAAGNFPETLAKMRRKGRIVSRLPKAIRPLVADALAETMDGAIQSDSGDRWWELLSFAHRKLQAPAPSGNCTAATSIRRQISGETPATVTDKATDTTNHRGRMPRAGSATEATRDDALARRIAGKLADGDIRAALQTLTTDEKLVSLDQEIVTSLRAKHPPAPDDLIPPPPPSNTDPAPIIVSEADVEAAITSMRPGSTAGLDGIRALHLQQLISKEAAESGRRLIRCLVRLTNLLQGAVPDCARQALFGASLCAIRKSDGGLRPIAVGSIYRRLAGRIAARQVAAAVGEELRPVQLGVGTPQGCEAAVHATREFLTAAAEAHAPYVLVKVDVRNAFNTVRRDTFLEQVKTRVPMAYPLLWCAYSEPTPLCIGDQTISSCSGVQQGDPLGPAAFALALDPIIRRMRSPLNVWYLDDGTIGGPADLVTADLAVLATALPTIGLQLNASKCEVTFAGPAPPSSLSESLRATLPGLKETPARDLSLLGSPLTEAALPTATTKTAAVIDRMCARISHLDAHTGLFLLTHYTAAPRLTYLLRSAPLYREPGPLLAVDETVRVTLATVTNVTIDDGAWEQATLPLRFGGLGVRSVTALALPCHVASLHACLPLAQEILHATEPRQPTRALQRVKADAVAKLGEAAHLVPISEEKKQRAWDDAFSKMAQKRLLDGANQVVRARLLAAAEPHTAAWEQALPVTSLGLHLDNETLRVAVALRLGGSVCEPHNCQLCHRPVDQLGHHGLSFAKSDGRHARHANLNDVLRRALSSAGLESVLEPTGLDRGDGRRPDGITLFPFSRGMSLVWDATCCDTYSSTAIISSALNPGSAARCAEERKRTRYAALCERYVFVPFAVETSGVLGPATAGLLKELGRRLTARTGDKRETVWLSQRVSIAVARGNAASVLATARPAVGTRPGPSPPPSSGLTPTRIPQSLQAPEEEPVAGPPLDSEADPPTHPPPPTPADGFREERRVTRSRSSSLCCPGACACPTFTSGSRA

SEQ ID NO: 3743 - protein, 1064 aa, Amphibalanus amphitrite
MEEKVCEGCPSRSTQRTTITCGSCKRRWHALCVRVPAKKARELQAEGGVWHCRDCLGQGPLTQPSSSPANPAAGNFPETLAKMRRKGRIVSRLPKAIRPLVADALTETMDGAIQSDSGDRWWELLSFAHRKLQAPAPGGNCTAATSIRRQISGETPATVTDKATDTTNHRGRMPRAGSATEATRDDALTRRIAGKLADGDIRAALQTLTTDEKLVSLDQEIVTSLRAKHPPAPDDLIPPPPPSNTDPAPIIVSEADVEAAITSMRPGSTAGLDGIRALHLQQLISKEAAESGRRLIRCLVRLTNLFLQGAVPDCARQALFGASLCAIRKSDGGLRPIAVGSIYRRLAGRIAARQVAAAVGEELRPVQLGVGTPQGCEAAVHATREFLTAAAEAHAPYVLVKVDVRNAFNTVRRDTFLEQVKTRVPMAYPLLWCAYSEPTPLCIGDQTISSCSGVQQGDPLGPAAFALALDPIIRRMRSPLNVWYLDDGTIGGPADLVTADLAVLATALPTIGLQLNASKCEVTFAGPAPPSSLSESLRATLPGLKETPARDLSLLGSPLTEAALPTATTKTAAVIDRMCARISHLDAHTGLFLLTHYTAAPRLTYLLRSAPLYREPGPLLAVDETVRVTLATVTNVTIDDGAWEQATLLLRFGGLGVRSVTALALPCHVASLHACLPLAQEILHATEPRQPTRALQRVKADAVAKLGEAAHLVPISEEKKQRAWDDAFSKMAQKRLLDGANQVVRARLLAAAEPHTAAWAQALPVTSLGLHLDNETVRVAVALRLGGSVCEPHNCQLCHRPVDQLGHHGLSCAKSAGRHARHANLNDVLRRALSSAGLESVLEPTGLDRGDGRRPDGITLFPFSRGMSLVWDATCCDTYSSTAIISSALNPGSAARCAEERKRTRYAALCERYVFVPFAVETSGVLGPAAAGLLKELGRRLTARTGDKRETVWLSQRVSIAVARGNAASVLATARPAVGTRPGPSPPPSSGLTPTRIPQSLQAPEEEPVAGPPLDSEADPPTHPPPPTPADGFREERRVTRSRSSSLCCPGACACPTFTSGSRA

SEQ ID NO: 3744 - protein, 1064 aa, Amphibalanus amphitrite
MEEQVCASCPSRSTQRTTITCGSCKRRWHALCVRVPAKKARELQAEGGVWHCRDCLGYGFHTQPSSSPASPAAGNFPEALAKMRRKGRIVSRLPKAIRPLVADALAEAMDGALQSDSADRWWELLTFAHCKLQAPAPGSKCTAASSIRRQISGETPATATDKATDTTNHRGRMPRARSATEATRDDALARRIAGKLADGDIRAALQTLTTDEKLATANDEIVTSLRAKHPPAPDDQLLPPPPSNTDPAPIIVSEADVEAAITSMRPGSTAGLDGIRALHLQQLISKEAAESGRRLIRCLVRLTNLLLQGAVPDCARRALFGASLCAIRKSDGGLRPIAVGSIYRRLAGRIAARQVAAAVGEELRPVQLGVGTPQGCEAAVHATREFLAAAAEAHAPYLLVKVDVRNAFNTVRRDTFLEQVKTRVPMAYPLLWCAYSEPTPLCIGDQTISSCSGVQQGDPLGPAAFALALDPIIRRMQSPLNVWYLDDGTIGGPADLVAADLAVLATALPTIGLQLNANKCEVAFAGPTPPPSLLESLRGTLPGLKETLASDLSLLGSPLTDAALPVATTRAAAVIDRMCARISNLDAHSGLFLLAHYTAAPRLTYLLRSAPLYREPGPLLNVDKTVRETLATVTNVTINDEAWEQASLPLRFGGLGVRSVMALALPCHMASLHACLPLTQEILHATEPRQPTQALQRARADIVAKLGEAARQVPQSEECKQRAWDETFCKMSQKRLLDGANQVARARLLAAAEPHTAAWVQALPVTSVGLHLDDETVRVAVALRLGASVCEPHNCQLCHRPVDRLGHHGLSCTKSAGRHARHANLNDVLRRALSSTGLESVLEPTGLDRGDGRRPDGITLFPFSRGMSLIWDATCCDTFSATAVISSALNPGSAARCAEERKRARYAALRERYVFIPFAVETSGVLGPAATGLMKELGRRLTCRTGDKRETVWLAQRVSIAVARGNAASVLATAKPAAANRTGPSPTPSSRLTPSMSIPSIEAPDDESAAGPPLDSVADPPDHPPPLTPADGCREELRMTRSRSSSLCCPGACACPTLNSRSRI

SEQ ID NO: 3745 - protein, 1064 aa, Amphibalanus amphitrite
MEEKVCEGCPSRSTQRTTITCGSCKRRWHALCVRVPAKKARELQAEGGVWHCRDCLGHGPLTQPSSSPANPAAGNFPETLAKMRRKGRIVSRLPKAIRPLVADALAETMDGAIQSDSGDRWWELLSFAHRKLQAPAPGSNCTAATSIRRQISGETPATATDKATDTTNHRGRMPRAGSATEATRDEALARRIAGKLADGDIRAALQTLTTDEKLVSLDQEIVTSLRAKHPPAPDDLIPPPPPSNTDPAPIIVSEADVEAAITSMRPGSTAGLDGIRALHLQQLISKEAAESGRRLIRCLVRLTNLFLQGAVPDCARQALFGASLCAIRKSDGGLRPIAVGSIYRRLAGRIAARQVAAAVGEELRPVQLGVGTPQGCEAAVHATREFLTAAAEAHAPYVLVKVDVRNAFNTVRRDTFLEQVKTRVPMAYPLLWCAYSEPTPLCIGDQTISSCSGVQQGDPLGPAAFALALDPIIRRMRSPLNVWYLDDGTIGGPADLVTADLAVLATALPTIGLQLNASKCEVTFAGPAPPSSLSESLRATLPGLKETPARDLSLLGSPLTDAALPTATTKTAAVIDRMCARISHLDAHTGLFLLTHYTAAPRLTYLLRSAPLYREPGPLLAVDETVRVTLATVTNVTIDDGAWEQATLPLRFGGLGVRSVTALALPCHVASLHACLPLAQEILHATEPRQPTRALQRVKADAVAKLGEAAHLVPISEEKKQRAWDDAFSKMAQKRLLDGANQVVRARLLAAAEPHTAAWAQALPVTSLGLHLDNETVRVAVALRLGGSVCEPHNCQLCHRPVDQLGHHGLSCAKSAGRHARHANLNDVLRRALSSAGLESVLEPTGLDRGDGRRPDGITLFPFSRGMSLVWDATCCDTYSSTAIISSALNPGSAARCAEERKRTRYAALCERYVFVPFAVETSGVLGPAAAGLLKELGRRLTARTGDKRETVWLSQRVSIAVARGNAASVLATARPAVGTRPGPSPPPSSGLTPTRIPQSLQAPEEEPVAGPPLDSEADPPTHPPPPTPADGFREERRVTRSRSSSLCCPGACACPTFTSGSRA

SEQ ID NO: 3746 - protein, 1194 aa, Penaeus chinensis
MENNQRKSSRIARRAVKQGARPSVIAEQAEVEKLDIASANPDTHVSSSNENTQRSQTEDTAPTAAGPAETRTRSKRHAWSREEYKEVIWAYHEAKRIGKPIVGGTFEVWRQRNPNLLPTLTASNLADVRRNIEKRKWLTEVEMDEIRKDVENNNQVDSLEGEVHPSSFVEENSAPNDDQAEPVQQVEPRSAEGSNDDMEHKIRLKVVELQSIEVMQRKGLNKLKHSKQNSELLLAANSALARICEKEHLNLTEINQLIYAAAAVISGEIKQKPPRKPMSSEGPKWKMRIKSKISLLRKDISVLAELNKGVACRSLHQKANKIKSRHGISELAELIRTLKMKLQAKAQRLRRYAERSDQFHQNRLFRENTKKFYRDLNQKQKPVIEPPSQSDVEDFWRSILEDGRHHNTEAAWIQREVDANAKIKPEKWKDFSAVEIKKIVKNLQNWKAPGPDKVHNFWVKHFDAVHEQLARALSEVTRDPSILPDWFTTGVTFLLTKGKNTKDPKNYRPITCLPTMYKVLTALISERMYAHLLGNDVLPTEQKGGRKATRGCKDQLLVDKAVIEDAKRGKRNLSMAWIDYKKAYDSVPHSWIIAAMKIYGTCPTIVKFLEAAMKEWNTEMQLYHSGGCIKTGRIAIKRGIFQGDSLSPLLFCLSLVPLTNILTSDNLGYVMHKEHRVSHLLYMDDLKLFAKDDGQLDQELGIVKTFSDDIQMEFGLEKCAKATIRKGKLVSGPNAKLKGETEIRNLDQEEVYKYLGVDQSNGIQHSLMKEKIRKEYYRRVRLILDTELNAKNKMHAINSLAVPVPQYSFGIIDWREIEIQEMDRKTRKLLTKYGVLHPKADKDRIYIPRSSGGRGLIELESAYKSAIVGLSEYIKRGDDKYTRLVKRHESEKRKYSLVNKGDEFKKKYIPPQPGAQSTQPSLQTIKRQMKEALADEKINTYSSKPLHGQFYSQTFENYVDRKLTFGWLRSSGLKGQTESLLTAAQDQALNTRYHQRKILKMEVDSKCRLCQQQEEHVSHIVAGCSVLALNEYTHRHNRIASYLHWSILREIGLPASDQWYEHQPEKVVETETITVMYDMPVNTDRTIGANRPDIIFHDKVKKRCLLIDVAVPNDVNVSSKEAEKISKYKDLEIEISRMWHTKTHVIPVVVGALGTARLGLQKYLDEIPGKERAEQVQKIALLGTAHILRKFLST

SEQ ID NO: 3747 - protein, 1194 aa, Penaeus chinensis
MENNQRKSSRIARRAVKQGARPSVIAEQAEVEKLDIASANPDTHVSSSNENTQRSQTEDTAPTAAGPAETRTRSKRHAWSREEYKEVIWAYHEAKRIGKPIVGGTFEVWRQRNPNLLPTLTASNLADVRRNIEKRKWLTEVEMDEIRKDVENNNQVDSLEGEVHPSSFVEENSAPNDDQAEPVQQVEPRSAEGSNDDMEHKIRLKVVELQSIEVMQRKGLNKLKHSKQNSELLLAANSALARICEKEHLNLTEINQLIYAAAAVISGEIKQKPPRKPMSSEGPKWKMRIKSKISLLRKDISVLAELNKGVACRSLHQKANKIKSRHGISELAELIRTLKMKLQAKAQRLRRYAERSDQFHQNRLFRENTKKFYRDLNQKQKPVIEPPSQSDVEDFWRSILEDGRHHNTEAAWIQREVDANAKIKPEKWKDFSAVEIKKIVKNLQNWKAPGPDKVHNFWVKHFDAVHEQLARALSEVTRDPSILPDWFTTGVTFLLTKGKNTKDPKNYRPITCLPTMYKVLTALISERMYAHLLGNDVLPTEQKGGRKATRGCKDQLLVDKAVIEDAKRGKRNLSMAWIDYKKAYDSVPHSWIIAAMKIYGTCPTIVKFLEAAMKEWNTEMQLYHSGGCIKTGRIAIKRGIFQGDSLSPLLFCLSLVPLTNILTSDNLGYVMHKEHRVSHLLYMDDLKLFAKDDGQLDQELGIVKTFSDDIQMEFGLEKCAKATIRKGKLVSGPNAKLKGETEIRNLDQEEVYKYLGVDQSDGIQHRLMKEKIRKEYYRRVRLILDTELNAKNKMHAINSLAVPVPQYSFGIIDWREIEIQEMDRKTRKLLTKYGVLHPKADKDRIYIPRSSGGRGLIELESAYKSAIVGLSEYIKRGDDKYTRLVKRHESEKRKYSLVNKGDEFKKKYIPPQPGAQSTQPSLQTIKRQMKEALADEKINTYSSKPLHGQFYSQTFENYVDRKLTFGWLRSSGLKGQTESLLTAAQDQALNTRYHQRKILKMEVESKCRLCQQQEEHVSHIVAGCSVLALNEYTHRHNRIASYLHWSILREIGLPASDQWYEHQPEKVVETETITVMYDMPVNTDRTIGANRPDIIFHDKVKKRCLLIDVAVPNDANVSSKEAEKISKYKDLEIEISRMWHTKTHVIPVVVGALGTARLGLQKYLDEIPGKERAEQVQKIALLGTAHILRKFLST

SEQ ID NO: 3748 - protein, 1052 aa, Penaeus chinensis
MDEIRKDVENNNQVDSLEGEVHPSSFVEENSAPNDDQAEPVQQVKPRSAEGSNDDMERKIRLKVVELQSIEVMQRKGLNKLKHSKQNSELLPAANSALARICEKEHLNLTEINQLIYAAAAVISGEIKQKPPRKPMSSEGPKWKMRIKSKISLLRKDISVLAELNKGVACRSLHQKANKIKSRHGISELAELIRTLKMKLQAKAQRLRRYAERSDQFHQNRLFRENTKKFYRDLNQNQKPVIEPPSQSDVEDFWRSILEDGRHHNTEAAWIQREVDANAKIKPEKWKDFSAVEIKKIVKNLQNWKAPGPDKVHNFWVKHFDAVHEQLARALSEVTRDPSILPDWFTTGVTFLLTIGKNTKDPKNYRPITCLPTMYKVVTALISERMYAHLLGNDVLPTEQKGGRKATRGCKDQLLVDKAVIEDAKRGKRNLSMAWIDYKKAYDSVPHSWIIAAMKIYGTCPTIVKFLEAAMKEWNTEMQLYHSGGCIKTGRIAIKRGIFQGDSLSPLLFCLSLVPLTNILTSDNLGYVMHKEHRVSHLLYMDDLKLFAKDDGQLDQELGIVKTFSDDIQMEFGLEKCAKATIRKGKLVSGPNAKLKGETEIRNLDQEEVYKYLGVDQSDGIQHRLMKEKIRKEYYRRVRLILDTELNAKNKMHAINSLAVPVPQYSFGIIDWREIEIQEMDRKTRKLLTKYGVLHPKADKDRIYIPRSSGGRGLIELESAYKSAIVGLSEYIKRGDDKYTRLVKRHESEKRKYSLVNKGDEFKKKYIPPQPGAQSTQPSLQTIKRQMKEALADEKINTYSSKPLHGQFYSQTFENYVDRKFTFGWLRSSGLKGQTESLLTAAQDQALNTRYHQRKILKMEVDSKCRLCQQQEEHVSHIVAGCSLLALNEYTHRHNRIASYLHWSILREIGLPASDQWYKHQPEKVVETETITVMYDMPVNTDRTIGANRPDIIFHDKVKKRCLLIDVAVPNDANVSSKEAEKISKYKDLEIEISRMWHTKTHVIPVVVGALGTARLGLQKYLDEIPGKERAEQVQKIALLGTAHILRKFLST

SEQ ID NO: 3749 - protein, 1059 aa, Cardiocondyla obscurior
MYQIEWAFKGTPNIVQEIVKRLGNKTDKQINDKRREPAYCRRRDQYIKGIAGSLSSVKKNIRTSLSRTSISSTGTPDSDPGCSTKANKRVRLTQVTRKLRSSSQPDASEPESPERKKRKIPINDKSSEKSSQQEETPELKQELKETSNSRAAIDFVNQKECRIVLQRCDYLVPRIIPAEEIVGNTTSEESQWKADLMDTLMEDLSDDVPHKVKEIYKVLKITAENADEKAVQQAYDAVTDYIGGGREDTREKVPRKRHKTKRSFLRYQFARTQDIYKREPGLLARHVRLGTDHTAKNNIEIARDEVKDLYKALWGTKAPIRLTEYEEVTSIGFKNFGPIKEEEIKQRLTRIKRTTAAGPDGVNKASLTGYYKNLILSKMFNLILATGVLPSSWKSNRTTLIPKEGKDRTKATNYRPITIGSLISRLFWGILDERIRSTIRFNPRQKGFVPEAGCFANIQILNELTNYMKRDRGGVGLQLDVSKAFDTIPHEAIPIALKRKGIPEAIIRLISNSYNSASTKISHPKEDIEITLQRGVKQGDPLSPLLFNLILEPILEKLEQMPGYQLPGGKNISCLAFADDLFLFASEPTEAQCLLDCVVEELGALGMTVAANKSFAYQIKPTKDTWFMTDPGLERMGDKIPVCAPESKLTYLGCNYSIWSGFDLGEIKEHLSKVINRTKTLKLKPMQKIRLLKTYLVPHYLYQLTMADPSKTLLISMDQELKTAIKQILHLPQSICNGILYCGEKDGGLGFPKLIELVPRTALLAGLKFTESEDPAIATIFSDSRIATRLRRIANSVRINFPYTKADVYRHKDQCKKTELKRWKDMLSQGRAVETFMGDKIGNAFLRDPALLKPCRFTTALQLRTNTAGNRTSLNRAVPQKDIRCRKCGTSKETLAHILGQCLHTKAARIRRHNEIRDLIENIVMDNDKAAILSKEPVIPLAEGGNLKPDLIIRNQAGVFVVDITVRHEDEDSLKNAITEKEQKYAKLLPQMQQQFKSNKAEVLAIVVGTRGAVPKTTREALDKLEVKKLKDLKTISLIALRSSIEIYHSFIDYDGPLK

SEQ ID NO: 3750 - protein, 1012 aa, Apteronemobius asahinai
MEDNDPSYKCPDCELSFRTKTGLGVHRRRRHVDIVNSEIVVSTSKVRWTPEEKCILAEAEARIKLDDPVGARRGINDLLLPVLPDRTKEAIKKVRQRKSYVDKVAEFFESLAAGTSASSGEPNVEVVNVVQCPENLSEGGIIGSMGGSLGSSCVVECASGGVMGDGVDDFSQNIASAGGGGASDGGVAAGRTCTTTSGVPHIEAAPCTIGGRGGTVKAPRLLGNLSNTDAAEECVFVRWWSTFEALTPEWARSPGWPSLERAWDEWLKGGDPAPYLVEWSGLSTNSRPLVIRPKTPGPEEVFKSRKAARRAQYRRFQQLYTRDRKRAAQWAITREPPADNMTDTQQINDYWSRILSRQSCGSLKREECTQPLGGWDPLTAEEVLRLRPRGSSSPGLDGVTPAAWGRVPLPEKLAAMNLCMGWGSVPSRWLEGRVVLVPKVAGATRPGDFRPITITSVILRHLNRVLAHRLRAFNLVNPHQVAQVDGCLDGVATVATVLGEARTRRRPLYMALCDVSKAYDSVSHDALWTAMGNKGIDDKFINFVQKQYQGAVSRIQTRAGLSEPIQIGAGVRQGNPLCTYLFFMTFDYVLASVHGEIGFSVGSDGGESFRHLAYADDLVLFASSRVGLQKALDCVVNKLRGIGLNLNRDKSSALAVLPDGKHKKVKLLTAPFVSINGVPVDPIGPSREWSYLGVSFRGAVPLGRSPGVKGVLENIKRAPLKPHQRLEVIRNFYLPSTYHSLVLGTVKTGDLRRLDRTIRGSIKGFLKLPLDTCNGFFHAPLRDGGLGIPALAVTIPSLTVRRLNNLESPGFPALGSVASGVWATSRRKWASSALKGAGLGPLADGSECKAMWVKDLYASVDGREFKWLKNSPTSSRWIRHPPPKWNGRDYLQAIHVWIKSLPSRVRTSRGRRAERTTTCRAGCFAAETAAHIIQNYPRSHKGRLGRHDHLVKVLASELSVRGFGVSLEPRVDSSVGVLKPDIVATRDDKAIVLDVQIVSGSGMSTRLTDVKI

SEQ ID NO: 3751 - protein, 773 aa, Apteronemobius asahinai
MYMKDRKRAARWAITGEPPVDKMTDSQEITDYWSRILSRQSGGSLKREECTQPLGGWGPLTAEEVLRLCPRGSSSPGLDGVTPAAWGRVPLPEKLAAFNLCMGWGRVPSRWLEGRVVLVPKVAEAARPGDFRPITITSVILRHLNRVLAHRLRALNLVNPHQVAQDDGCLDGVVTVATVLGEARARRRPLYMAFCDVSKAYDSISHDALWTAMGNKGINGRFIDFVQKQYQGAVSRIQTRAGLSEPIQIGAGVRQGDPLSSYLFFITFDYVLAAVPSEIGFSVGSDCGERIRHLAYADDLVLFASSRIGLQKALDCVTHQLRGIGLDLNRAKSSALAVVPDGKHKKSKLLTTPFVMINGVPVDPIGPSKEWSYLGVGFRGAVPLGRSPRVRKVLENIKRAPLKPHQRLEVIRNFYLPATYHSLVLGASKTGDLRKLDKAIRGGVRSFLKLPPDTNNGFFHAPLRDGGLGIPALAVTIPSLTVRRLQNLETPGFPALASVASGVWATSRRKWASSALKGAGLGPLADGSECKAAWVKDLYASVDGRELKWMKNSPTSSRWIRHPPPKWNGRDYIQAIHVWINSLPSRVRTSRGRRAERTTTCRAGCFAAETAAHAIQNCPRSHKGRLGRHDHLVKVLASELSVRGFGVSLEPRVDTSVGVLKPDIVATRDDKAIVLDVQVVSGSGCVDEIDRCKCQKYSRPDFLATIRTRHDVSSASVLAVTLTWRGILARASAKGLKELGLPAWVLMGLTTRVIYGSHMIWGVWNRSTQRALP

SEQ ID NO: 3752 - protein, 1925 aa, Nephila pilipes
MENSTCLNSPANSKELNSSHTSENASPTPVALRTRSQMEISYLDAVKAGKCKLCTASFNQTNLLKAHIEQHRPTKKRSKALQAIIDLSSDGPEITETPQAARAPSASQSRLFSQLSSDSPSIPLAPSTTMDFPESPPLPAGIPELVEDLVKTACVLNQEPLTPPLRTNTPSSPLSVSVIRNSPMSSPDAYRISPISQDGSLSSLGSPQDSLLLSTGLTLNWLPKILSPIPSPAKPTSPDILELILTQPPVLSDSSPETISSDPPTAPKLPATSLLRQFDSPLKSTSTHAKNSNSLTATAIIPSQRRKISVQPPFISYAEAASSGFCKMCSTTVSPLHLMDHLSSHRPCTKRFKCIKACQIALKSRPPTIGHSRSLSSNKSVPSQLELTFREKFPELPVFQQSSESSSSPASSPDKMELLNKMDSPPSGPPTASAFSKPLFSTVVRKGLFRCRFCEVPFVSKTGLESHILKVHKIPSIKKETKLFPLPSALPTCRTCFHEVEPGLSLADHCKIYHNLEISSNRTVPSTSIVKLASTVSPPPSTRTVKTSSLSQSNSLKISVKPASLPQPPDFCPSRTFLNSNLLLQSRSFKPKVATEDFVPSAPAPHNIKNSIPSSKMIISNASSAPAISIFPKKCPHCSFVAIKKIGLRLHLFQMHNIKMNASTEKEVQSTDSSSPSSSPGNSPTGPIQAEVHQERSNPTSLVPSHCSLCSFSSTRQGVLRSHFIRVHQRPFSSVTSTSHDDKICALPSSNPAPGITTSPINIKASSKPPPRTLDSALGPSEPNHHQALHSPSSISSQDDFTTARSLPAIQQVTSPNTASIPNPVTYHNSSLKYSFPLHPRLNCPILGCNASFGTKHWFHTNASIKKHLTVFHNNKPAKVIFWCSICSSTISKNPANHKCLIGNLISSSTPIDDSLWNCHLCTFSANNPIAKRNHLAAHKRDSFKQKASSLKIPVPSRLNKTKRMKRITDLSEGPPGDLPLAPPLQSNAINLDTNDHIAEMPSIDIQRPIIIDSFLEPLNTILDVDDLEEAAGQFQNLMISLTKAMQDHFHLSPPSGIAKKGQVKPFDGQNAQKVQRLYRWNRRRCIRNLINSNSSRCPASQENIHSYFQNCWSAPNRNFSLPIASPPDLPSIVDVLSPEAVSSCLHGCENSAPGPDLLTYQHWREADPKGIILSRIFNICLKLKDIPQVWKLSNCILLPKKGDPSALENWRPISLSNTVYKLFSKCLTRKLQDWCEMNNIISRCQKGFTPYDGVVEHNFIIGQHLENARRSHTNAFLIWLDISNAFGSISHEVLFASLENAGADTDFIHLIRNIYHNSSTRIITEEGLTEAIPLSCGVKQGCPLSGPLFNLAINHILTSLQENEDQHSVLAFADDLVLLGNDHLRMQMLLDKTVLLLDNIGLKLNISKCASLHLSGAAPTGARETKFTILDSPIKFLTEAEAYLYLGKPVGFNINPDFKDVNEALEMAVKISKSKLAPWQKLDALKSFFHSSLCFAMRTAQLPKSDWKKIDSCLTKELKDILYLPSNASNLYLHGESKLGGCGVPSAAVDSDFYLVDTAFKLLTSKDDEVSALALGQLSRSIYPRIRRKPSDGDFAAFLSGSMADTYSVTTNATSNTWTKARAASRRIGLTWSFSNGCPSLVFKETTITASDRRRVMKILHQHERLRNIEKLIATPNQGKAIDCVSLHPASTHFLAEGKYTRFADWRFVHKARLNLVPLNATKMWKGPQFDKRCRRCGVHDETLPHVINHCFAYAEALQKRHNAILERVHKVVAHKGKVLSYNQAVANTRLRPDIVASIGDKLYIIDVTIPFENRQGSFARARLHKINKYRPLVPFFKDQGYSSVHIAPILVGSLGAWDPDNDQFLKLVASPSYLKLMRKLCVSDSIKWSRDIFIQHLTGKKQYNGNSANTEEAALDSDHEELV

SEQ ID NO: 3753 - protein, 1804 aa, Nephila pilipes
MENSTCLNSPANSKELNSSHTSENASPTPVALRTRSQMEISYLDAAKAGKCKLCTASFNHTNLLKAHIEQHRPTKKRSKALQAIIDLSSDGPEITDTPQAARAPSASQSRLFSQLSSDSPSLPLAPSTTMDFPKSPPLPAGIPELVEDLVKTACVLNQEPLTPPLRTNTPSSPLSVSVIRNSPMSSPDAYRISPISQDGSLSSLGSPQDSLLLSTGLTFNWLPEILSPIPSPAKPTSPDILELILTQPPVLSDSSPETISSDPPTAPKLPATSLLRQFDSPLKSTSTHAKNSNSLTAIAIIPSQRSKISVQPPFISYAEAASSGFCKMCSTTVSPLHLMDHLSSHRPCTKRFKCIKACQIALKSRPPTIGHSRSLSSNKSVPSQLELTFREKFPELPVFQQSSESSSSPASSPDKMELLNKMDSPPSGPPTASAFSKPLFSTVVRKGLFRCRFCEVPFVSKTGLESHILKVHKIPPIKKETKLFPLPSALPTCRTCFHEVEPGLSLADHCKIYHNLEISSNRTVPSTSIVKLASTVSPPPSTRTVKTSSLSQSNSLKISVKPASLPQPPDFCPSRTFLNSNLLLQSRSFKPKVATKDFVPSAPAPHNIKNSIPSSKMIISNASSAPAISIFPKKCPHCSFVAIKKIGLRLHLFQMHNIKMNASTEKEVQSTDSSSPSSSPGNSPIGPIQAEVHQERSNPTSLVPSHCSLCSFSSTRQGVLRSHFIRVHQRPFSSVTTTSHDDKICALPSSNPAPGITTSPINIKASSKPPPRTLDSALGPSEPNHHQALHSPSSIPSQDDFTTARSPPAIQQVTSPITASIPNPVTYHNSSLKYSFPLHPRLNCPILGCNASFGTKHWFHTNASIKKHLTVFHNNKPAKVIFWCSICSSTISKNPANHKCLIGNLISSSTPIDDSLWNCQLCTFSANNPIAKRNHLAAHKRDSFKKKASSLKIPVPSRLNKTKRMKRITDLSEGPPGDLPLAPPLQSNAINLDTNDHIAEMPSIDIQRPIIIDSFLEPLNTILDVDDLEEAAGQFQNLMISLTKAMQDHFHLSPPSGIAKKGQVKPFDGQNAQKVQRLYRWNRRRCIRNLINSNTSRCPASQESIHSYFQNCWSAPNRNFSLPIASPPDLPSIVDVLSPEAVSSCLHGCENSAPGPDLLTYQHWREADPKGIILSRIFNICLKLKDIPQVWKLSNCILLPKKGDPSALENWRPISLSNTVYKLFSKCLTRKLQDWCEMNNIISRCQKGFTPYDGVVEHNFIIGQHLENARRSHTNSFLIWLDISNAFGSISHEVLFASLENAGADTDFIHLIRNIYHNSSTRIITEEGLTEAIPLSCGVKQGCPLSGPLFNLAINHILTSLQENEDQHSVLAFADDLVLLGNDHLRMQMLLDKTVLLLDNIGLKLNISKCASLHLSGAAPTGARETRFTILDSPIKFLTEAEAYLYLGKPVGFNINPDFKDVNEALEMAVKISKSKLAPWQKLDALKSFFHSSLCFAMRTAQLPKSDWKKIDSCLTKELKDILYLPSNASNLYLHGESKLGGCGVPSAAVDSDFYLVDTAFKLLTSKDDEVSALALGQLSRSIYPRIRRKPSDGDFAACLSGSMADTYSVTTNATSNTWTKARAASRRIGLTWSFSNGCPSLVFKETTITASDRRRVMKILHQHERLRNIEKLIATPNQGKAIDCVSLHPASTHFLAEGKYTRFADWRFVHKARLNLVPLNATKMWKGPQFDKRCRRCGVHDETLPHVINHCFAYAEALQKRHNAILERVHKVVAHKGKVLSYNQAVANTRLRPDIVASIGDKL

SEQ ID NO: 3754 - protein, 1309 aa, Nephila pilipes
MISSNASSAPAISSFPKKCPHCSFVAIKKIGLRLHLFQMHNIKMNASTEKEVQSTDSSSPSSSPGNSPTGPIQAEVHQERSNPTSLVPSHCSLCSFSSTRQGVLRSHFIRVHQRPFSSVTTTSHDDKICALPSSNPAPSITTSHINIKASSKPPPRTLDSALGPSEPNHHQALHSPSSIPSQDDFTTARSLPAIQQVTSPITASIPNPVTYHNSSLKYSFPLHPRLNCPILGCNASFGTKHWFHTNASIKKHLTVFHNNKPAKVIFWCSICSSTISKNPANHKCLIGNLISSSTPIDDSLWNCQLCTFSANNPIAKRNHLAAHKRDSFKQKASSLKIPVPSRLNKTKRMKRITDLSEGPPGDLPLAPPLQSNAINLDTNDHIAEMPSIDIQRPIIIDSFLEPLNTILDVDDLEEAAGQFQNLMISLTKAMQDHFHLSPPSGIAKKGQVKPFDGQNAQKVQRLYRWNRRRCIRNLINSNTSRCPASQESIHSYFQNCWSAPNRNFSLPIASPPDLPSIVDVLSPEAVSSCLHGCENSAPGPDLLTYQHWREADPKGIILSRIFNICLKLKDIPQVWKLSNCILLPKKGDPSALENWRPISLSNTVYKLFSKCLTRKLQDWCEMNNIISRCQKGFTPYDGVVEHNFIIGQHLENARRSHTNAFLIWLDISNAFGSISHEVLFASLENAGADTDFIHLIRNIYHNSSTRIITEEGLTEAIPLSCGVKQGCPLSGPLFNLAINHILTSLQENEDQHSVLAFADDLVLLGNDHLRMQTLLDKTVLLLDNIGLKLNISKCASLHLSGAAPTGARETKFTILDSPIKFLTEAEAYLYLGKPVGFNINPDFKDVNEALEMAVKISKSKLAPWQKLDALKSFFHSSLCFAMRTAQLPKSDWKKIDSCLTKELKDILYLPSNASNLYLHGESKLGGCGVPSAAVDSDFYLVDTAFKLLTSKDDEVSALALGQLSRSIYPRIRRKPSDGDFAAFLSGSMADTYSVTTNATSNTWTKARAASRRIGLTWSFSNGCPSLVFKETTITASDRRRVMKILHQHERLRNIEKLIATPNQGKAIDCVSLHPASTHFLAEGKYTRFADWRFVHKARLNLVPLNATKMWKGPQFDKRCRRCGVHDETLPHVINHCFAYAEALQKRHNAILERVHKVVAHKGKVLSYNQAVANTRLRPDIVASIGDKLYIIDVTIPFENRQGSFARARLHKINKYRPLVPFFKDQGYSSVHIAPILVGSLGAWDPDNDQFLKLVASPSYLKLMRKLCVSDSIKWSRDIFIQHLTGKKQYNGNSANTEEAALDSDHEELV

SEQ ID NO: 3755 - protein, 1925 aa, Nephila pilipes
MENSTCLNSPANSKELNSSHTSENASPTPVALRTRSQMEISYLDAVKAGKCKLCTASFNQTNLLKAHIEQHRPTKKRSKALQAIIDLSSDGPEITETPQAARAPSASQSRLFSQLSSDSPSIPLAPSTTMDFPESPPLPAGIPELVEDLVKTACVLNQEPLTPPLRTNTPSSPLSVSVIRNSPMSSPDAYRISPISQDGSLSSLGSPQDSLLLSTGLTLNWLPEILSPIPSPAKPTSPDILELILTQPPVLSDSSPETISSDPPTAPKLPATSLLRQFDSPLKSTSTHAKNSNSLTAIAIIPSQRSKISVQPPFISYAEAASSGFCKMCSTTVSPLHLMDHLSSHRPCTKRFKCIKACQIALKSRPPTIGHSRSLSSNKSVPSQLELTFREKFPELPVFQQSSESSSSPASSPDKMELLNKMDSPPSGPPTASAFSKPLFSTVVRKGLFRCRFCEVPFVSKTGLESHILKVHKIPSIKKETKLFPLPSALPTCRTCFHEVEPGLSLADHCKIYHNLEISSNRTVPSTSIVKLASTVSPPPSTRTVKTSSLSQSNSLKISVKPASLPQPPDFCPSRTFLNSNLLLQSRSFKPKVATEDFVPSAPAPHNIKNSIPSSKMIISNASSAPAISIFPKKCPHCSFVAIKKIGLRLHLFQMHNIKMNASTEKEVQSTDSSSPSSSPGNSPTGPIQAEVHQERSNPTSLVPSHCSLCSFSSTRQGVLRSHFIRVHQRPFSSVTTTSHDDKICALPSSNPAPGITTSPINIKASSKPPPRTLDSALGPSEPNHHQALHSPSSISSQDDFTTARSLPAIQQVTSPNTASIPNPVTYHNSSLKYSFPLHPRLNCPILGCNASFGTKHWFHTNASIKKHLTVFHNNKPAKVIFWCSICSSTISKNPANHKCLIGNLISSSTPIDDSLWNCQLCTFSANNPIAKRNHLAAHKRDSFKQKASSLKIPVPSRLNKTKRMKRITDLSEGPPGDLPLAPPLQSNAINLDTNDHIAEMPSIDIQRPIIIDSFLEPLNTILDVDDLEEAAGQFQNLMISLTKAMQDHFHLSPPSGIAKKGQVKPFDGQNAQKVQRLYRWNRRRCIRNLINSNSSRCPASQENIHSYFQNCWSAPNRNFSLPIASPPDLPSIVDVLSPEAVSSCLHGCENSAPGPDLLTYQHWREADPKGIILSRIFNICLKLKDIPQVWKLSNCILLPKKGDPSALENWRPISLSNTVYKLFSKCLTRKLQDWCEMNNIISRCQKGFTPYDGVVEHNFIIGQHLENARRSHTNAFLIWLDISNAFGSISHEVLFASLENAGADTDFIHLIRNIYHNSSTRIITEEGLTEAIPLSCGVKQGCPLSGPLFNLAINHILTSLQENEDQHSVLAFADDLVLLGNDHLRMQMLLDKTVLLLDNIGLKLNISKCASLHLSGAAPTGARETRFTILDSPIKFLTEAEAYLYLGKPVGFNINPDFKDVNEALEMAVKISKSKLAPWQKLDALKSFFHSSLCFAMRTAQLPKSDWKKIDSCLTKELKDILYLPSNASNLYLHGESKLGGCGVPSAAVDSDFYLVDTAFKLLTSKDDEVSALALGQLSRSIYPRIRRKPSDGDFAAFLSGSMADTYSVTTNATSNTWTKARAASRRIGLTWSFSNGCPSLVFKETTITASDRRRVMKILHQHERLRNIEKLIATPNQGKAIDCVSLHPASTHFLAEGKYTRFADWRFVHKARLNLVPLNATKMWKGPQFDKRCRRCGVHDETLPHVINHCFAYAEALQKRHNAILERVHKVVAHKGKVLSYNQAVANTRLRPDIVASIGDKLYIIDVTIPFENRQGSFARARLHKINKYRPLVPFFKDQGYSSVHIAPILVGSLGAWDPDNDQFLKLVASPSYLKLMRKLCVSDSIKWSRDIFIQHLTGKKQYNGNSANTEEAALDSDHEELV

SEQ ID NO: 3756 - protein, 1925 aa, Nephila pilipes
MENSTCLNSPANSKELNSSHTSENASPTPVALRTRSQMEISYLDAVKAGKCKLCTASFNQTNLLKAHIEQHRPTKKRSKALQAIIDLSSDGPEITETPQAARAPSASQSRLFSQLSSDSPSIPLAPSTTMDFPESPPLPAGIPELVEDLVKTACVLNQEPLTPPLRTNTPSSPLSVSVIRNSPMSSPDAYRISPISQDGSLSSLGSPQDSLLLSTGLTLNWLPEILSPIPSPAKPTSPDILELILTQPPVLSDSSPETISSDPPTAPKLPATSLLRQFDSPLKSTSTHAKNSNSLTAIAIIPSQRSKISVQPPFISYAEAASSGFCKMCSTTVSPLHLMDHLSSHRPCTKRFKCIKACQIALKSRPPTIGHSRSLSSNKSVPSQLELTFREKFPELPVFQQSSESSSSPASSPDKMELLNKMDSPPSGPPTASAFSKPLFSTVVRKGLFRCRFCEVPFVSKTGLESHILKVHKIPSIKKETKLFPLPSALPTCRTCFHEVEPGLSLADHCKIYHNLEISSNRTVPSTSIVKLASTVSPPPSTRTVKTSSLSQSNSLKISVKPASLPQPPDFCPSRTFLNSNLLLQSRSFKPKVATEDFVPSAPAPHNIKNSIPSSKMIISNASSAPAISIFPKKCPHCSFVAIKKIGLRLHLFQMHNIKMNASTEKEVQSTDSSSPSSSPGNSPTGPIQAEVHQERSNPTSLVPSHCSLCSFSSTRQGVLRSHFIRVHQRPFSSVTSTSHDDKICALPSSNPAPGITTSPINIKASSKPPPRTLDSALGPSEPNHHQALHSPSSISSQDDFTTARSLPAIQQVTSPNTASIPNPVTYHNSSLKYSFPLHPRLNCPILGCNASFGTKHWFHTNASIKKHLTVFHNNKPAKVIFWCSICSSTISKNPANHKCLIGNLISSSTPIDDSLWNCHLCTFSANNPIAKRNHLAAHKRDSFKQKASSLKIPVPSRLNKTKRMKRITDLSEGPPGDLPLAPPLQSNAINLDTNDHIAEMPSIDIQRPIIIDSFLEPLNTILDVDDLEEAAGQFQNLMISLTKAMQDHFHLSPPSGIAKKGQVKPFDGQNAQKVQRLYRWNRRRCIRNLINSNSSRCPASQENIHSYFQNCWSAPNRNFSLPIASPPDLPSIVDVLSPEAVSSCLHGCENSAPGPDLLTYQHWREADPKGIILSRIFNICLKLKDIPQVWKLSNCILLPKKGDPSALENWRPISLSNTVYKLFSKCLTRKLQDWCEMNNIISRCQKGFTPYDGVVEHNFIIGQHLENARRSHTNAFLIWLDISNAFGSISHEVLFASLENAGADTDFIHLIRNIYHNSSTRIITEEGLTEAIPLSCGVKQGCPLSGPLFNLAINHILTSLQENEDQHSVLAFADDLVLLGNDHLRMQMLLDKTVLLLDNIGLKLNISKCASLHLSGAAPTGARETRFTILDSPIKFLTEAEAYLYLGKPVGFNINPDFKDVNEALEMAVKISKSKLAPWQKLDALKSFFHSSLCFAMRTAQLPKSDWKKIDSCLTKELKDILYLPSNASNLYLHGESKLGGCGVPSAAVDSDFYLVDTAFKLLTSKDDEVSALALGQLSRSIYPRIRRKPSDGDFAAFLSGSMADTYSVTTNATSNTWTKARAASRRIGLTWSFSNGCPSLVFKETTITASDRRRVMKILHQHERLRNIEKLIATPNQGKAIDCVSLHPASTHFLAEGKYTRFADWRFVHKARLNLVPLNATKMWKGPQFDKRCRRCGVHDETLPHVINHCFAYAEALQKRHNAILERVHKVVAHKGKVLSYNQAVANTRLRPDIVASIGDKLYIIDVTIPFENRQGSFARARLHKINKYRPLVPFFKDQGYSSVHIAPILVGSLGAWDPDNDQFLKLVASPSYLKLMRKLCVSDSIKWSRDIFIQHLTGKKQYNGNSANTEEAALDSDHEELV

SEQ ID NO: 3757 - protein, 965 aa, Nephila pilipes
MKTTWDSELPPEISKKFKRGRSQLSLLKEIAIPRCLIKDSDNPGSLCIHVFCDVSQTAYDTCIYLRSESKNFISCAAHKRDSFKQKASTLKIPAPSRLNKTKRNKRINDLSEGLPGDLPLAPPLQSNANNPGTKDHVAEMPSIDIQRPIIINSFLEPLNTILDVDDLEEASGQFQNLMESLTKAMQDHFHLSPPSGNAKKGPAKPFDSQNAQKVQRLYRWNRRRCIRNLINSNSSRCPASKENIQSYFQNCWSTPNRSFSLPIASPPDLPPIVDVLSPEAVSSCLHGCENSAPGPDLLTYQHWREADPKGIILSRVFNICLKLKDIPQVWKLSNCILLPKKGDPSALENWRPISLSNTVYKLFSKCLTRKLQDWCEMNNIISRCQKGFTPYDGVVEHNFIIGQHLENARRSHTNAFLIWLDISNAFGSISHEVLFASLKNAGADTDFIHLIKNIYQNSSTRIISEEGLTDAIPLSCGVKQGCPLSGPLFNLAINHILTSLQENDDQHSVLAFVDDLVLLGNDHLQIQMLLDRTVLLLDNIGLKLNISKCASLHLSGAAPTGARDTRFTILDSPIKFLTEAEAYLYLGKPVGFNINPDFKDINEALEMAVKISKSKLAPWQKLDALKSFFHSSLCFAMRTAQLPKSDWKKVDSCLTKELKDILYLPSNASNLYLHGESKLGGCGVPSAAVDSDFYLVDTAFKLLTSKDDEVSALALGQLSRSIYPRIRRKPSDGDFAAFLSGSMADTYSVTTNATSNTWTKARAASRRIGLTWSFSNGCPSLVFKETTITASDRRRVMKILHQHERLRNIEKLIATPNQGKAIDCVSLHPASTHFLAEGKYTRFADWRFVHKARLNLVPLNATKMWKGPQFDKRCRRCGAHDETLPHVINHCFAYAEALQNRRNAVLERVHKVVAHKGKVLSYNQAVANTRLRPDIVASIGDKLYIIDVTIPFENRQGSFARARLY

SEQ ID NO: 3758 - protein, 1919 aa, Nephila pilipes
MQDTTRTISPGADNAIFSSGNSENNTPTPVALRTRSQLGTTYSDAARLHKCKLCLLSFNNSNELKSHVLEHKPNQKRKKALQAISEISSKTEGIFDTPHAASNASIGQSRLFSLTDTPCQATSSNEESPEIIFISQKGPLQPEVVELVEDLLQVTCNPTDDTDDPLIKSPSPASPRPACTTSPMAFPEAYRMSIPNAEDGSPVCSSLSDSQDSLLLSAHLQMKILPKILSPIPSPARTASPDILDLLLTQPPTLSDSSPESIQDPCLSKVQDTKVERKTVSSLVPVACPEPLRTATTSSPPQKNQNPFISYAQAASTGHCKICSIQVAPSMLFDHLTSHRPCTKRFKCIKACQLLRKQLQIPPPPPRHTPNKIIAPSQIEMTFREKFPELPVFNQNTDSSSSSASSPDKLELLDKLSSPPSGPPSAPAFSRPLFSTIVRKGLYRCRFCEMPFVSKAGMEAHILKIHKVPPKQVIPKLFPPPSNQPTCRTCFQEVEKGLSLADHCKLLHNLEVSTDRAFAATSLIQIEPPPSAPPTSRFVKSSSKAHDNNLQVSLQPSKIPDSQESLQSRTFINSKFKSRNRSFIPNSPNSSSRLPLIQIKTNTSQPVRANKNQSSTKPPAPTLLSSPRKCNYCPFIAKKKIGLRLHLFQTHNIRMNASSNKELLSEDSSSSPPLLPVASTINIQAEIHQENNQPRPLVPSKCSLCNYSTKINGLLKLHYQTRHKPPPSTGVCHKASDSTSITTVVPSKASHQAKSKKVSFQSRPKAPELPPPTIAQAPPQSVPAPARSSQEDFASRPASRALPSASSNNSSSRSGQVSFLNKSLQYSFPLCSRLDCPVKGCSASFGTKHWYHTNASIKKHLTVFHQSKPSAVKYWCSICSSTIIKHPANHPCLSGNLVINSSSIDDSLWNCSLCNFTANNNTAKRNHLAAHKRNSFKLNASSLQIPTHTRFSKAKRHNRITELSEGMPGDTPLAPPLISNPEDSTENSLVPEIPKLDLQRPIIIDSFFDPLKAILEIDDLEEASNIFQNLMVNLTSVMQEFFHLSPRPTDNSKKKPTSKPFDPNNAQRIQRLYRWNRRRCIRNLTSPDSSRCPVSKDNITDHFMKCWSAPTQSFAITNSDPPDLPPVLDVLTPEFVSSCLQGCENSAPGPDLLTYKHWREADPKGSVLSTIFNICLKLKDIPADWKSSNCILLPKKGDLKAIENWRPISLSNTIYKLFSKCLTRRLQDWCEMHNILSKCQKGFTPYDGVVEHNFIIGQHLENARRSHTNAFLVWLDISNAFGSIPHEVLFASLKNAGVDSDFIHLISNIYHHSSTRIITEEGLSEPVPLRCGVKQGCPLSGPLFNLAINHILASLQNSEEKHSVLAFADDIVLLGSDHLVVQQLLDKTVESLDAIGLRLNSSKCASLHLSGAAPTGARDTCFSILDSPIKCLSEAEAYCYLGKPVGFNINPDFHNINEALEMALKIAKSKLAPWQKLDALKSFFYSSLCFAMRTAQLPKSDWKKVDSCLSKEIKDILYLPSNASNHYLYGESKMGGCGVPSAAVDSDFYLVDTAFKLLTSKDEEVIALALGQLSRSIQVRIRRKPSDGDFASFLSGSMEDTYGITTNSHSNTWTKARAASRRIGLTWSFSNGCPSLTFHETTISSSDRRRVMKILHQHARLRNVEDLMAMPNQGKAIDCVSLHPASSHFLTEGNYTRFADWRFVHKARLNMVPLNAAKMWKGPQDDKRCRKCGARDETLPHVLNHCFAYAEAIQNRHNAILERVRKVVAHKGKILSVNKAVGDSRLRPDIVASIGDKLFIIDVTIPFENRKSSFTRARLSKINKYRQLVPFFQEQGYSSIHIAPILVGSLGAWDPENDQFLKMVASASYLKLMRKLCVSDSIKWSRDIYIQHLTGKKQYGNDSPVENEAIPGSETEDLD

SEQ ID NO: 3759 - protein, 1059 aa, Ctenoplectra terminalis
MEEQHSGVKVEWRCAACHKSFIKLHGCRCHLPKCKGYVEDRSAEQFKCDSCEMSFKTQRGLSTHERHRHPQIRNDKRTQANTSQGRNRPGNRASAWSKEEVDLLTTLNERFKHLRQPNVAIREFLPGKTLKQISDKRRLLPTLREETAADSEDSEESDEAAYESAVEEIEEDPRMVQENASWEEAIRGAITAQHLNSTHEFRGVEEKIEVLADKENINELDVSGIVEAFVEQLRRGVPESPNCGKRAKRRQNGRHGANNKRKNKRTKRKEYEYARYQELYKKCPRKLLDLAIMGKSIKEKEAVEPPAKDLVSPLYRDLWGKAGPQIKLPKYQATSSNFDIKEVWSPVTVEEIIIKFKKIKSNTAAGIDGIRKAHLRKNGALNVMAKLCNLLMLSRVYPAQWKLNRTTLIPKPGKSVEKVENWRPITIGSLLGRLFSAMIDQRLRRKVKQNLRQKGFTKEDGCKYNISILDNAITTMKEKGGGIITIIDISKAFDTVPHSVLGDGLEYKGIPAVIARYIQRMYDSCKTVIACKGKETLAVNLLRGVKQGDPLSPLLFNVILDQIIGHIDETTEGIDTGSGKVSILAFADDLVLLAKDKDTAQSQYKKLLDFLSKLNMKISADKCSTFQVVSKHKTWYLSNPQLEMDRQVIPYADPESVIKYLGVTPDPWRGLRRASVREIEDAANCVSKMGLKPHQKINLIRTYLLPRYIHKLVANPPSLGALEEIDHAIKQIIKRILHLHPSATDGIIYTDKSHGGLGVQRVASIVKLAKLRNALKMKESEDYIVKQAFLGQEDIVKKYAASVGLNWPTTLQNIEDARKDLKKRDANKWRQLISQGQGVKEFFGDKIGNSWLYNPELLKPSRYLDALKLRTNTFGTRVAMRRANKDLDVMCRRCGVQAETLGHILGNCTQTKPMRIKRHNEICQLVMKSLPKDFAVFEEPTVNVQGELRKPDMVIKDHEKVYVVDVTVRYEDKENLHEAHREKVRKYKDTAEYMRAKLKGTRAEVLPMVVGSRGAMPKRTIDNMKLLGLRRNEIMTASLIALRSSIEIANAFIDYDHIR

SEQ ID NO: 3760 - protein, 1038 aa, Chrysina resplendens
MRQHMRMAHPKEYNATLEATSEGRREAWSVAEMHRMARLEANFNGKFINQYLAEHIERSIDAIKGRRKHVDYKNMLAQYKHDIDEAAADVIPEPTTSASPVSPVSNLPGTSVALDNITLLNTSIYPQGDTLAGVDTVITKDKGRGDSGSRLAAPTSRPVSRRRVASRSDTIPEGETDPILQFLLAQYGAHEGCDQADRTFLGRLSQEHSSSAALDVYASGLCVASTTLVPPRPGHRPPVAPRKEGGGASRNQCRAAAFRQAQQLYHTNRAKLANCILDDIPLDGMGVGGYPSKEEATEHYRNTFGLESPLDSEPYTVKTESSPLQLYAPITEAEVVAAVGASRSESAGPDGIKLKQGKKIPPRKLALLFNGMLFTGHIPKSLKECRTVLIPKGGDLRDINNWRPITIGSIFLRICNKILGGRLGQIPINPAQRGFRSIDGCFANNLILQNILKSCRGRSLPHHVVSLDLRKAFDTLSQHSIERALLRFGIDKRFIKYIRANYRGVDTRVFLGKVATNKIAMSRGVKQGDPLSPFLFNLVMDELLDSFPAGEGIAVGGQKVCCLAYADDLVLLGPSQSSVRELLKICSRFFEKRGLSLNVEKCASLSMNVVPRKKKLYAVTKPLHYLGGRPIKQISPGSMFKYLGHHYGFDGVSIPNYSAVESMLGRVERSPLKPAQKITLIKQYLLPRISHALQNPRINRKILNCVDRWVRISVRRILHLNKTSPSAFVHADIRGGGLGILPYSHLIPRVVYSRIERLRLGDDPVISATLQEGPVVALQTRMLRLLENLAPTKTAVANHWRQELQNSYSGNGLNQGSNSTVSGAWISNPPRYWTGREYCQAIQLRANLLPTVGIPSNPPEARKCRAGCQKVESLSHVLQHCPASHWPRIWRHDRVVNAVAKMAHKRGWTVSGEPHIRLEDGTLRKPDLVLAKNNEVVVCDVGVSWEGPRALSATHDIKRAYYDQPSFIQALTRGYPGKSIMISPIIIGARGIWCNENSAVVGKLGLTSRDVEELVTLTILGSLKTYRHFNTSVWRRRA

SEQ ID NO: 3761 - protein, 1162 aa, Megachile rotundata
MTERQQHDQASDAELPCPGSSVAEFSALEGTNDDGLATNTGQCNNDNVITIVLPIQEEGILCPANSPDCTNLLFLRPQNLKDHLSKHHLERETSWNCRNCEKPFRSLQGWFSHYGKCKGPAVANTEPRPYQCEGCTVSFMTQRGLSTHERVMHPAIRNEKRQMTNTRTDTERIDGRSLQAVWTQEEITILKQLDRRFRACKFINMEISKILVNKTNKQISDKRKELRLKGELEEITINKDNENENGSNNNDNENNTNEINNDNNSNDSGDNMGNIDNNNDNNDKNDSESNNNENNDENVNTSSSSDTEFQDASDIVIIDQNNISTSINNNLEDEELRLSEENNEWNEVFKNYIDNLISNPNETNDIYDKLKTIWNSYKENIEELTKEIDKFILNDLTPSLIKNDEQIPESQQNTKVNTDKNKNKNNRKPKSRNQNRNNNNSKPKRNHMKRYQYARCQDLYKNCPKKLMEIIISGDKSLINPPIQPPPANDIKSLYTNLWEQSKEIDVSSINTSAHNIPIRFFHPTSIEELKKKISKINNKTSAGVDGIKKFHLQSPGTLELLVILFNILFYTNYYPESWRKNRTTLIPKPNQDLSKVENWRPITIGSLISRIFASLVDTRIRNAIQQNKRQKGFTAENGCRQNIMLLNAALTNCKSNKGGVFTVLDISKAFDTVPHRMITAGLERKGIPIKIINMIKKMYEKCVTEIKTRNDEVVKINIKRGVKQGDPLSPLLFNLSIEQLLDCIEDESEGLQINNNKISILVFADDIVLIAKDRTEAQKQINIVYKYLENLGMQLSVKKCLTFAIKTKKDTWYITEPNLSIENTIIPNADPDTVFKYLGAKIGPWKGIHQNIIVPDIIKTIKILRKFHLKPQQKIDLIINYLFPRFTYGLLVHPPCDSVLKLLDSELRQQIKEILHLAPSTATGFFYTPAVKGGLGLPRYEHLIKLSTLRNAIKMKQSADPATKDLINTKVEEKLKQIANSLRINWPASLDDIEKAKRRLKNNHLLEWSSFKCQGQGVIDFSNDKIGNSWLREYNLLKPSRFIDAIKLRTNTFGNKVTLARANKNIDIKCRKCHLQPETLGHILGLCIHTKPQRIKRHDDIKYLIAKKIATRQNHQVLIEPQVKVGDNLFKPDIVIKNDKGVFIVDVSVRYENRDYLQQAC

SEQ ID NO: 3762 - protein, 1198 aa, Cephus cinctus
MELKMSETKNEASDTELPGPGSSVAVATARQGTTDDGPALPTDNELGNPIKIKMPCPENGLSCPICSLNHINLMFTRPRSLKDHISHHHPEKEILWCCQDCNKPFNKLQGWFCHQNKCKGPEAINTTAKAFQCEVCASSFDKQRGLSTHEKQMHPRLRNTKRQMGNMQQNAERIDGRSLRAVWTQEEIELLKQLDRQLSNCRFINKEIEKIIKSKSNKQISDKRRELRLKGELGTTSENETEIDTNNENDNDEVRNEDNDTNMSIENENDSNTGNSSENEYHDASDIATTAPNNLDTNTNNNALRLEDNESEWQSLFKTHIDLTCNIPDAKKDIYKNLKDIWDNNKDNREALAKDIDKYIKDILTPSLLKSEKQTHKKQGPKPRGEHENNNIKQKKRHKKLKRNHIKRFNYARCQDIYKNCPKKLIDIAINGDQSFINPPIQPPIADDIKRLYTNLWEQTERINLPPTKDLPSIAPTRFFHPITAQEIKKKIQKINNKTSAGLDGVKKSHLQNSGILEVLATLYNIICYANYFPEPWKKNRTTLIPKSNQNLEKVENWRPITIGSLLSRIFSSLIDIRIRDAIQQNIRQKGFTAENGCRQNVMLLNTALSNCKIKDGGVFTVIDISKAFDTIPHEMIAKALKRKGITEKIITIIEKLYKNCTTEIKAKNNEIVKINIKRGVKQGDPLSPLLFNLSIEQLLNQIEENSAGIPINNDNKISILAFADDIILIAKDKSEAQLQIKTVYEYLKDLGMQLSIKKCLSFEIKTIRDSWYVTEPNIYLGNTAIPNADPDTVFKYLGAKIGPWKGLHQNIIVPDVIKAVKHIRKLYLKPQQKIDLISNFLLPKFTHGLLIHPPSDCILKLLDSELRQQAKEILHLAASTATGFFYTPTSKGGLGLPRYEHLVKLATLRNALKMKESDDLAVREIIDPKMEEKLKQTANSLRINWPTTFDEINRAKKRLKNEQVDQWNNLKCQGQGVTYFRSDKIGNSWLKERSLLKASRFIDAIKLRTNTFGNRVTLARTNKDIDIKCRKCHIQPETLGHILGLCIHTKPQRIKRHDDIKHLIAERLASKGNYQVFIEPQIKAGNNLYKPDIVIKNEKRLIVVDVSVRYENRDYLQQAYDEKIEKYNNCLEVLKEIHKCNMGAIYPVVIGSRGAIPTFTQKNLHDLNIKNNDIKTMSLIALRSSIEIANAFIDYNE

SEQ ID NO: 3763 - protein, 1719 aa, Caenorhabditis remanei
MTVFIERGIGERGQMAVCSLHRYFSFSPFSPIPPYVNNGSFGKNGCGTDKSLLPVIEVVVREVKINWSENILVVECLIMVKSGERVVVKRQNLEKVIQNLARINSTLFSNLGNQIFCVVPRIKDSTNKEQGYRKEKQMKFHVSFRSIKSQVPPCLRGGGDVMEDTEIRGIRKLEPEAQLDSSKPLICRVLYPTQGYMYKCFYPKCKGHSNGSTDLRSLKKHMVDKHFTNIEFAYKCATCMFLTTGKSTTALKSIKAHMASHHKVMMEPGKKSLVQKLNARLEEAAPSLPMPRNRSKVIQLTPEKSISELEKKKQTRSVAKQLSTLKESAQKKEEEVKIAEVKKKEPRLSIIPESNVRRSLAAGLEQCINPEQSVAQRIREKREEYAKASREAAAKRRSSLAMKPARLPDKENEITLQETKKIDDPIVIDLEKECTLTTILQVPRNQFNSWCLEHETTIDAWLTDEVIHMYMCTITENRKYFMAIDPVLWPVYVRNGAEDLLRRTSCPGTFFFPICESNHWVLLVIEHDVYWYLDPKGEEPKGNLEILLESMKRKRQYYEFPPPSQRDNVNCGVHVCLMAKSIVDECGYNWYSEEDVRSFRTNMKDILKSKGYELCPEPYNRQNLLKTEKQKEVILEEMIDPFVVEDDMTFTVHRDSDRGDDEIEHLKTIEQEPENEISEIENVEGSVDSVIPKLMEMRVQTPSVINEKRSKKRVSAKEKPRKQKEKEQKVPTGKPDELVKRVRVWFEKEFKSYVEDGKSFLRLEWLTDVLTAAIQKASAGDEKAVELIEKRCPPLECEEGEMCTQTEKKKKPKSGKGNGGQESMKSLMASYSENRAKTYNRIIGKHSKQCEIPIAKVQKFFEGTTAETNVPKEILKEMCSRLPKVEVGTWIEGEFSESEVTEALKKTKDTAPGVDGLRYHHLKWFDPELKMLSQIYNECREHRKIPKHWKEAETILLYKGGDESKTDNWRPISLMPTIYKLYSSLWNRRIRAVKGVMSKCQRGFQEREGCNESIGILRTAIDVAKGKKRNIAVAWLDLTNAFGSVPHELIKETLESYGFPEIVVDVVEDMYRDASIRVTTRTEKSDQIMIKSGVKQGDPISPTLFNMCLESVIRRHLDRSVGHRCLKTKIKVLAFADDMAVLAESSEQLQKELTAMDADCSALNLLFKPAKCASLILEKGIVNRLNEVVLRGKPIRNLMENETYKYLGVQTGTETRVSIMDHITEVSREIDLVNMSQLAMHQKLDILKAFILPKMTYMYQNTTPKLSELKVFANLVMRSVKEFHNIPLKGSPLEYVQLPVGKGGLGVACPKNTALLTFLVTIMKKLWSSDSYIRKLYTDYLEEVAKVEIGKFEVNLNDLAEFLSDERAVDSKLFGFNAFTRVREVVRSLCKNKDSPLHSLKIIEREGKLAISVQATEESIEKIFTEDQEKKLMYLLKGELNTALQHRFFTQKVFKSEVMRVVQQHPQSNSFVRNGGKMSFSAQRFVHPGRLNQLPCNYNTWAKGRTKLCRRCRKNKNETQSHILQECDYSIGNIIKERHDAVLYKFRELIKRGSKGHWLERTDRTVPNTGSQLKPDLYLESPDGKHVILADVTVPYERGIEGMQKAWNEKINKYTDGYKEIFRRQGKSLVVLPLVVGSLGTWWKPTEESLIKLGVEKTTVRRIIPETCGMVAEYSKNCYWRHIYGEKYVQTPMINGGDKPEGNDWKKCKKGIEVPKVTN

SEQ ID NO: 3764 - protein, 1719 aa, Caenorhabditis remanei
MTVFIDRGIGERGQMAVCSLHRYFSFSPFSPIPPYVNNGSFNENGCGTDKSLLPVIEVVVRDVKINWSENILVVECLIMVKSGERVVVKRQNLEKVIQNLARINSTLFSNLGNQIFCVVPRIKDSTNKEQGYRKEKQLKFLVSFRSIKSQVPPYLRGGGDVMEDTEIRGIRKLEPEAQLDSSKPLICRVLYPTQGYMYKCFYPKCKGHSNGSTDLRSLKKHMVDKHFTNIEFAYKCATCMFLTTGKSATALKSIKAHMASHHKITMEPGKKSLVQKLNARLEEAAPSLPMPRNRSKVIQLTPEKSISELEKKKQTRSVAKQLSTLKESAQKKEEEVKIAEVKKREPRLSIIPESNVRRSLAAGLEQCINPEQSVAQRIREKREEYAKASREAAAKRRSSLAMKPARLPDKENEITLQETKKIDDPIVIDLEKECILTAVLQVPRNQFNSWCLEHETTIDAWLTDEVIHMYMCTITENRKYFMAIDPVLWPVYVRNGADDLLRRTSCPGTFFFPICESNHWVLLVIEHDMYWYLDPKGEEPKGNVEILLESMKRKRQYYEFPPPSQRDNVNCGVHVCLMAKSIVDECGYNWYSEEDVRSFRTNMKDILKSKGYELCPEPYNRQNLLKTEKQKEVILEEMIDSFVVEDDMTFTVHRDSDHGDDEVEHLKTIEQEPENEISEIENVEGSVDSVIPKLMEMRVQTPPVINEKRDKKRVSAKEKPRKQKEKEQKVPTGKPDELVKRVRVWFEKEFKSYVEDGKSFPRLEWLTDVLTAAIQKASAGDEKAVELIEKRCPPLEIEEGEMFTQTEKKKKPKSGKGNGGQESMKSLMASYNENRAKTYNRIIGKHSKQCEIPIAKVQKFFEGTTAETNVPKETLKEMCSRLPKVEVGTWIEGEFSESEVTEALKKTKDTAPGVDGLRYHHLKWFDPELKMLSQIYNECREHRKIPKHWKEAETILLYKGGDESKPDNWRPISLMPTIYKLYSSLWNRRIRAVKGVMSKCQRGFQEREGCNESIGILRTAIDVAKGKKRNIAVAWLDLTNAFGSVPHELIKETLESYGFPEIVVDVVEDMYRDASIRVTTRTEKSDQIMIKSGVKQGDPISPTLFNMCLESVIRRHLDRSVGHRCLKTKIKVLAFADDMAVLAESSEQLQKELTAMDADCSALNLLFKPAKCASLILEKGIVNRLNEVVLRGKPIRNLMENETYKYLGVQTGTETRVSIMDHITEVSREIDLVNMSQLAMHQKLDILKAFILPKMTYMYQNTTPKLSELKVFANLVMRSVKEFHNIPLKGSPLEYVQLPVGKGGLGVACPKNTALLTFLVTIMKKLWSSDNYIRKLYTDYLEEVAKVEIGKFEVNLNDLAEFLSDERAVDSKLFGFNAFTRVREVVRSLCKNKDSPLHSLKIIEREGKLAISVQATEECIEKIFTEDQEKKLMYLLKGELNTALQHRFFTQKVFKSEVMRVVQQHPQSNSFVRNGGKMSFSAQRFVHPGRLNQLPCNYNTWAKGRTKLCRRCRKNKNETQSHILQECDYSIGNIIKERHDAVLYKFRELIKRGSKGHWLERTDRTVPNTGSQLKPDLYLESPDGKHVILADVTVPYERGIEGMQKAWNEKINKYTDGYKEIFRRQGKSLVVLPLVVGSLGTWWKPTEESLIKLGVEKTTVRRIIPETCGMVAEYSKNCYWRHIYGEKYIQTPMINGGNKPEGNDWKKCEKGIEVPKAAN

SEQ ID NO: 3765 - protein, 1584 aa, Caenorhabditis latens
MKMNIYVSFQKVKSQVPPYLIGGGEEMEDTEIIGIRKLEPEAQLDSSKPLICRVLYPTQGYMYKCFYPKCKGHSNGSTDLRSLKKHMVDKHFTNIEFAYKCATCMFLTTGKSATALKSIKAHMASHHKVTMEPGKKSLVQKLNARLEEAAPSLPMPRNRSKVIQMTPEKSISELEKRKQTRSVAKQLSTLKESAQKKEEDVKIAEVKKREPRLSIIPESNVRRSLAAGLEQCIGPEQSVAQRIRAKREEYAKASREAAAKRRSSLAMKPARLPDKESEGTFQEAGKLDEPIVIDLEKECIPTTVLQVPRNQFNSWCLEHETTIDAWLTDEVIHMYLCTLTENRKYFMAIDPVLWPVYVRNGAEDLLRRTSGPETCFFPICESNHWVLLVIEQDMYWYLDPKGEEPKGNVEILLESLQRKRQYYEFPPPSQRDNVNCGVHVCLMAKSIVDECGFNWYSEEDVRSFRTNMKAILKSKGYELCPEPYNRQNVKKPEKQREFILEEVMDSFVEEGDMTFTVHRDSDNVDVEVEHLTSIDQEPENEKSECEIVEGSVDSVIPELMEMRVQTPPAIKEKRGKKRVSVKEKPRKQKEKEQKVPKGKPDELVKRVRVWFEKEFKSYLENGKSFLRLEWITDVLTAAIQKASAGDEKAVELIEKRCPPFETEEGEMSTQTEKKKKVKSGKGNGGQESMKSLMASYYENRAKTYNRIIGKHSKQCEIPIAKVQKFFEGTTAETNVPKEILKEMCSRLPKVEVGTWIEGEFSESEVTEALKKTKDTAPGVDGLRYHHLKWFDPELKMLSQIYNECREHRKIPKHWKEAETILLYKGGDESKADNWRPISLMPTIYKLYSSLWNRRIRAVKGVMSKCQRGFQEREGCNESIGILRTAIDVAKGKKRNIAVAWLDLTNAFGSVPHELIKETLESYGFPEIVVDVVADMYREASIRVTTRREKSDQIMIKSGVKQGDPISPTLFNMCLESVIRRHLDRSVGHRCLKTKVKVLAFADDMAVLAESREQLQKELTAMDADCSALNLLFKPAKCASLILEKGEVNRLNEVVLRGKPIRNLMEDETYKYLGVQTGTATRVSIMDHITEVSREIDLVNMSRLAMHQKLDLLKAFILPKMTYMYQNTTPKLSELKVFANLVMRSVKEFHFIPLKGSPLEYVQLPVGKGGLGVACPKNTALLTFLVTIMKKLWSSDSYIRNLYTDYLEEVAKVEIGKFEVNLNDLAEFLSDERAVDSKLFGFNAFTRVREVVRNLCKNKDSPLHSLKIIERDGKLAISVQATEESIEKIFTEDQEKKLMYLLKGELNTALQHRFFTQKVFKSEVMRVVQQHPQSNSFVRNGGKMSFAAQKFVHPGRLNQLPCNYNTWAKGHTKLCRRCRKNENETQSHILQSCDYSIGNIIKERHDAVLYKFRELIKRGPKGHWLRKTDKIVPYTGSQLRPDLYLESPDGKHVILADVTVPYERGIEGMQRAWNEKINKYTDGYKEIFRRQGKSLVVLPLVVGSLGTWWKPTEESLIKLGVEKTTIRRIIPETCGMVAEYSKNCFWRHIYGEKYVRTPMINGGDKPEGNDWTKCENGIEGDKIAN

SEQ ID NO: 3766 - protein, 1723 aa, Caenorhabditis latens
MTVFCFSQSGIGERGQMAVCSLHRHFSFSPFSLIPTYVNNGSFSENGCGTDKSLLPVIEVVREVKVNWSENILVVEYLIQVKSGERVVVKGLNLERVIQNLARINSTLLSNLGNQIFCGVPRISESTNKSDNEEGCRKGMKMSFYVSFQKVKSQVPPYLIGGGEGMEDAEIIGIRKLEPEAQLDSSKPLICRVLYPTQGYMYKCFYPKCKGHSNGSTDLRSLKKHMVDKHFTNIEFAYKCATCMFLTTGKSATALKSIKAHMASHHKVTMEPGKKSLVQKLNARLEEAAPSLPMPRNRSKVIQMTPEKSISELEKRKQTRSVAKQLSTLKESAQKKEEDVKIAEVKKREPRLSIIPESNVRRSLAAGLEQCIGPEQSVAQRIREKREEYAKASREAAAKRRSSLAMKPARLPDKESEGTFQEAGKLDEPIVIDLEKECILTTVLQVPRNQFNSWCLEHETTIDAWLTDEVIHMYLSTLTENRKYFKAIDPVLWPVYVRNGAEDLLRRTSGPGTCFFPICESNHWVLLVIEQDMYWYLDPKGEEPKGNVEILLESLQRKRQYYEFPPPSQRDNVNCGVHVCLMAKSIVDECGFNWYSEEDVRSFRTNMKDILKSKGYELCPEPYNRQNVMKPDKQREFILEEVMDSFVEEGDMTFTVQRDSDSVDVEVEHLTSTEQEPENEKSECEIVEGSVDSVIPELMEMRVQTPPAINEKRGKKRVSVKEKPRKQKEKEQKVPKGKPDELVKRVRVWFEKEFKSYLENGKSFLRLEWITDVLTAAIQKASAGDEKAVELIEKRCPPFETEEGEMSTQTEKKKKVKSGKGNGGQESMKSLMASYYENRAKTYNRIIGKHSKQCEIPIAKVQKFFEGTTAETNVPKEILKEMCSRLPKVEVGTWIEGEFSESEVTEALKKTKDTAPGVDGLRYHHLKWFDPELKMLSQIYNECREHRKIPKHWKEAETILLYKGGDESKTDNWRPISLMPTIYKLYSSLWNRRIRAVKGVMSKCQRGFQEREGCNESIGILRTAIDVAKGKKRNIAVAWLDLTNAFGSVPHELIKETLESYGFPEIVVDVVADMYREASIRVTTRREKSDQIMIKSGVKQGDPISPTLFNMCLESVIRRHLDRSVGHRCLKTKVKVLAFADDMAVLAESREQLQKELTAMDADCSALNLLFKPAKCASLILEKGEVNRLNEVVLRGKPIRNLMEDETYKYLGVQTGTETRVSIMDHITEVSREIDLVNMSRLAMHQKLDLLKAFILPKMTYMYQNTTPKLSELKVFANLVMRSVKEFHFIPLKGSPLEYVQLPVGKGGLGVACPKNTALLTFLVTIMKKLWSSDSYIRNLYTDYLEEVAKVEIGKFEVNLNDLAEFLSDERAVDSKLFGFNAFTRVREVVRNLCKNKDSPLHSLKIIERNGKLAISVQATEESIEKIFTEDQEKKLMYLLKGELNTALQHRFFTQKVFKSEVMRVVQQHPQSNSFVRNGGKMSFAALKFVHPGRLNQLPCNYNTWAKCHTKLCRRCRKNENETQSHILQSCDYSIGNIIKERHDAVLYKFRELIKRGPKGHWLRKTDKIVPYTGSQLRPDLYLESPDGKHVILADVTVPYERGIEGMQRAWNEKINKYTDGYKEIFRRQGKSLVVLPLVVGSLGTWWKPTEESLIKLGVEKTTIRRIIPETCGMVAEYSKNCFWRHIYGEKYVRTPMINGSDKPEGNDWTKCENGIEGDKIAN

SEQ ID NO: 3767 - protein, 1723 aa, Caenorhabditis latens
MTVFCFSQSGIGERGQMAVCSLHRHFSFSPFSLIPTYVNNGSFSENGCGTDKSLLPVIEVVREVKVNWSENIMVVEYLIKVKSGERVVVKGLNLERVIQNLARINSTLLSNLGNQIFCGVPRINESTNKSDNEEGCRKGMKMSFYVSFQKVKSQVPPYLIGGGEEMEDTEIIGIRKLEPEAQLDSSKPLICRVLYPTQGYMYKCFYPKCKGHSNGSTDLRSLKKHMVDKHFTNIEFAYKCATCMFLTTGKSATALKSIKAHMASHHKVTMEPGKKSLVQKLNARLEEAAPSLPMPRNRSKVIQMTPEKSISELEKRKQTRSVAKQLSTLKESAQKKEEDVKIAEVKKREPRLSIIPESNVRRSLAAGLEQCIGPEQSVAQRIRAKREEYAKASREAAAKRRSSLAMKPARLPDKESEGTFQEAGKLDEPIVIDLEKECIPTTVLQVPRNQFNSWCLEHETTIDAWLTDEVIHMYLCTLTENRKYFMAIDPVLWPVYVRNGAEDLLRRTSGPETCFFPICESNHWVLLVIEQDMYWYLDPKGEEPKGNVEILLESLQRKRQYYEFPPPSQRDNVNCGVHVCLMAKSIVDECGFNWYSEEDVRSFRTNMKAILKSKGYELCPEPYNRQNVKKPEKQREFILEEVMDSFVEEGDMTFTVHRDSDSVDVEVEHLTSIDQEPENEKSECEIVEGSVDSVIPELMEMRVQTPPAIIEKRDKKRVSVKEKPRKQKEKEQKVPKGKPDELVKRVRVWFEKEFKSYLENGKSFLRLEWITDVLTAAIQKASAGDEKAVELIEKRCPPFETEEGEMSTQTEKKKKVKSGKGNGGQESMKSLMASYYENRAKTYNRIIGKHSKQCEIPIAKVQKFFEGTTAETNVPKEVLKEMCSRLPKVEVGTWIESEFSESEVTEALKKTKDTAPGVDGLRYHHLKWFDPELKMLSQIYNECREHRKIPKHWKEAETILLYKGGDESKTDNWRPISLMPTIYKLYSSLWNRRIRAVKGVMSKCQRGFQEREGCNESIGILRTAIDVAKGKKRNIAVAWLDLTNAFGSVPHELIKETLESYGFPEIVVDVVADMYRDASIRVTTRREKSDQIMIKSGVKQGDPISPTLFNMCLESVIRRHLDRSVGHRCLKTKVKVLAFADDMAVLAESREQLQKELTAMDADCSALNLLFKPAKCASLILEKGEVNRLNEVVLRGKPIRNLMEDETYKYLGVQTGTATRVSIMDHITEVSREIDLVNMSRLAMHQKLDLLKAFILPKMTYMYQNTTPKLSELKVFANLVMRSVKEFHFIPLKGSPLEYVQLPVGKGGLGVACPKITALLTFLVTIMKKLWSSHSYIRNLYTDYLEEVAKVEIGKFEVNLNDLAEFLSDERAVDSKLFGFNAFTRVREVVRNLCKNKDSPLHSLKIIERDGKLAISVQATEESTEKIFTEDQEKKLMYLLKGELNTALQHRFFTQKVFKSEVMRVVQQHPQSNSFVRNGGKMSFAAQKFVHPGRLNQLPCNYNTWAKGHTKLCRRCRKNENETQSHILQSCDYSIGNIIKERHDAVLYKFRELIKRGPKGHWLRKTDKIVPYTGSQLRPDLYLESPDGKHVILADVTVPYERGIEGMQRAWNEKINKYTDGYKEIFRRQGKSLVVLPLVVGSLGTWWKPTEESLIKLGVEKTTIRRIIPETCGMVAEYSKNCFWRHIYGEKYVRTPMINGGDKPEGNDWTKCENGIEGDKIAN

SEQ ID NO: 3768 - protein, 1723 aa, Caenorhabditis latens
MTVFCFSQSGIGERGQMAVCSLHRHFSFSPFSLIPPYVNNGSFSENGCGTDKSLLPVIEVVREVKVNWSENIMVVEYLIKVKSGERVVVKGLNLERVIQNLARINSTLLSNLGNQIFCGVPRISESTNKSDNEDGCRKEMKMNIYVSFQKVKSQVPPYLIGGGEGMEDAEIIGIRKLEPEAQLDSSKPLICRVLYPTQGYMYKCFYPKCKGHSNGSTDLRSLKKHMVDKHFTNIEFAYKCATCMFLTTGKSATALKSIKAHMASHHKVMMEPGKKSLVQKLNARLEEAAPSLPMPRNRSKVIQMTPEKSISELEKRKQTRSVAKQLSTLKESAQKKEEDVKIAEVKKREPRLSIIPESNVRRSLAAGLEQCIGPEQSVAQRIRAKREEYAKASREAAAKRRSSLAMKPARLPDKESEGTFQEAGKLDEPIVIDLEKECIPTTVLQVPRNQFNSWCLEHETTIDAWLTDEVIHMYLCTLTENRKYFMAIDPVLWPVYVRNGAEDLLRRTSGPETCFFPICESNHWVLLVIEQDMYWYLDPKGEEPKGNVEILLESLQRKRQYYEFPPPSQRDNVNCGVHVCLMAKSIVDECGFNWYSEEDVRSFRTNMKDILKSKGYELCPEPYNRQNVIKPDKQREFILEEVMDSFVEEGDMTFTVHRDSDSVDVEVEHLTSIDQEPENEKSECEIVEGSVDSVIPELMEMRVQTPPAIKEKRGKKRVSVKEKPRKQKEKEQKVPKGKPDELVKRVRVWFEKEFKSYLENGKSFLRLEWITDVLTAAIQKASAGDEKAVELIEKRCPPFETEEGEMSTQTEKKKKVKSGKGNGGQESMKSLMASYYENRAKTYNRIIGKHSKQCEIPIAKVQKFFEGTTAETNVPKEILKEMCSRLPKVEVGTWIEGEFSESEVTEALKKTKDTAPGVDGLRYHHLKWFDPELKMLSQIYNECREHRKIPKHWKEAETILLYKGGDESKADNWRPISLMPTIYKLYSSLWNRRIRAVKGVMSKCQRGFQEREGCNESIGILRTAIDVAKGKKRNIAVAWLDLTNAFGSVPHELIKETLESYGFPEIVVDVVADMYREASIRVTTRREKSDQIMIKSGVKQGDPISPTLFNMCLESVIRRHLDRSVGHRCLKTKVKVLAFADDMAVLAESREQLQKELTAMDADCSALNLLFKPAKCASLILEKGEVNRLNEVVLRGKPIRNLMEDETYKYLGVQTGTATRVSIMDHITEVSREIDLVNMSRLAMHQKLDLLKAFILPKMTYMYQNTTPKLSELKVFANLVMRSVKEFHFIPLKGSPLEYVQLPVGKGGLGVACPKNTALLTFLVTIMKKLWSSDSYIRNLYTDYLEEVAKVEIGKFEVNLNDLAEFLSDERAVDSKLFGFNAFTRVREVVRNLCKNKDSPLHSLKIIERDGKLAISVQATEESIEKIFTEDQEKKLMYLLKGELNTALQHRFFTQKVFKSEVMRVVQQHPQSNSFVRNGGKMSFAAQKFVHPGRLNQLPCNYNTWAKGHTKLCRRCRKNENETQSHILQSCDYSIGNIIKERHDAVLYKFRELIKRGPKGHWLRKTDKIVPYTGSQLRPDLYLESPDGKHVILADVTVPYERGIEGMQRAWNEKINKYTDGYKEIFRRQGKSLVVLPLVVGSLGTWWKPTEESLIKLGVEKTTIRRIIPETCGMVAEYSKNCFWRHIYGEKYVRTPMINGGDKPEGNDWTKCENGIEGDKIAN

SEQ ID NO: 3769 - protein, 1025 aa, Caenorhabditis remanei
MEMRVQTPPVINEKRGKKRVSVKEKPRKQKEKEQKVPTGKPDELVKKVRVWFEKEFRSYVEDGKSFQRLEWITDVLTAAIQKASAGDEKAVELIEKRCPPLECEEGEMCTQTEKKKKPKSGKGNGGQESMKSLMASYSENRAKTYNRIIGKHSKQCEIPIAKVQKFFEGTTAETNVPKEILKEMCSRLPKVEVGTWIEGEFSESEVTEALKKTKDTAPGVDGLRYHHLKWFDPELKMLSQIYNECREHRKIPKHWKEAETILLYKGGDESKTDNWRPISLMPTIYKLYSSLWNRRIRAVKGVMSKCQRGFQEREGCNESIGILRTAIDVAKGKKRNIAVAWLDLTNAFGSVPHELIKETLESYGFPEIVVDVVEDMYRDASIRVTTRTEKSDQIMIKSGVKQGDPISPTLFNMCLESVIRRHLDRSVGHRCLKTKIKVLAFADDMAVLAESSEQLQKELTAMDADCSALNLLFKPAKCASLILEKGIVNRLNEVVLRGKPIRNLMENETYKYLGVQTGTETRVSIMDHITEVSREIDLVNMSQLAMHQKLDILKAFILPKMTYMYQNTTPKLSELKVFANLVMRSVKEFHNIPLKGSPLEYVQLPVGKGGLGVACPKNTALLTFLVTIMKKLWSSDNYIRKLYTDYLEEVAKVEIGKFEVNLNDLAEFLSDERAVDSKLFGFNAFTRVREVVRSLCKNKDSPLHSLKIIEREGKLAISVQATEESIEKIFTEDQEKKLMYLLKGELNTALQHRFFTQKVSKSEVMRVVQQHPQSNSFVRNGGKMSFSAQRFVHPGRLNQLPCNYNTWTKGHTKLCRRCGKNENETQSHILQVCNYSIGNIIKERHDAVLYKFRELIKRGPKGHWLKKTDRTVPNTGSQLRPDLYLESPDGKHVILADVTVPYERGIEGMQKAWNEKIIKYTDGYKEIFRRQGKSLVVLPLVVGSLGTWWKPTEESLIKLGVGKTTIRRIIPETCGMVAEYSKNCYWRHIYGEKYVKTPMINGGKKPEGNDWTKCEKGIEVPKVAN

SEQ ID NO: 3770 - protein, 953 aa, Stegodyphus mimosarum
MTPDTSNDDHGTPDDLTAATSASPPGVSRQTDVNASVPQASVGPNDDETPPEEPPPPQEIDTGTPLAAFRPRFIEFVSRDPARNWRQFEEALDEMVAEAQRIVKIPPRPAARHTQTTNGTDHKAIQRLYRRNRRRAVRLITEGEAPRCQLDSHAIVDFFSPADTPPVVDTTVYCPTDVQRPEVDMAPFSAAEVASRLHSCESTAPGPDRLTYQHWRSLDPECNVLTPIFNVCLKAGRVPDSWKRSTSILLPKTGDPADLHNWRPISLGSTIAKLFIGCLARRLTNWILDNDVLCPSQKGFLPYDGVFEHNFLLEQRLRSARKCKKDLCIASLDCSNAFGSIPHDAIFSALSNYGAGNCLLRIVKSIYTDATTQFLCLDGVTVPIPISRGVRQGCPLSGLLFNIAIDPVLRQVQASYADHRVLAYADDILLLAPSPLELQSHIDQLTSIARRLALTFNSGKCYSLHLSGLRPIGARPTIFYVDGHPIRHLEDGDTGRFLGRPIGFQPPPDNDSLAGHISMCNKILQSNLAPWQRVDALKAFFYPSLSFDMRMAHHKKGEWAKIDDFAKPLLKRTLNVPPEAANEYLYGATDAACFGIPLASEDSDIARIDGAFKLLTSRDARVKEMAWTDLEDCISRWIHEAPTPDLIAKYLSASDEEPFRGHNSNMSSTWSSARAASRRLGATWTIGPDKNISLEIGDASLGPGKRHLVFRTCRQHMRSNRGDKLLSYPNQGKAVECAAADRASSHFFHSGEFTRFADWRFIHRARLNLVPLNANSRTTASSRGCRRCPYVLETLPHVLGHCMRYSRLYQRRHNAVVERIKKAAQGRWSIERENQLIPGIQMRPDLVLTKDDTAIILDVTIPFDNRLLSFEEARRTKEEKYAAAADLLRASFSDVRVEAIVVGALGAWDPKNDKIMRRLCSKKYAKLMKKLIVSDTIRASRDIYVEHITGERQ

SEQ ID NO: 3771 - protein, 1304 aa, Ladona fulva
MPRRRNISPPPTRRSCRPGEGRVSLSSSSLSSVPEEEEALASFEPGSGTLPSPLSPGPSDAFDSPPARAGPSRGGRGVRRCRGRGGSSSSPTPEVADRPPTRPRKRGRGRGVPTVAEGVGGSISPSSPSATSADPPFSYLSFPEESLSEAAAPTDVHPDVDDDPEVLPVAAVRPTTVRRDGDCLVVEFPIPDSLGCTEAGCSAHFKSRTWTATKQSLDRHLTSVHGLGKLRTVNWCAVCESELGRRPSNHPCLRAQTTRAAPGAGGEFHCGDCPFVARTKRGLSSHRLVHRQKAPFPTPNPDPYPSHSPPPTPVCSPLPSDGDIPATEPQEPPIGTLAATEPVDQPTQDRDASLNEFQRQWLGKIRATEGGSWEDFVGVVDGFTEAMAAATRSAGPADQTGRTCDVGRPRTRRDRPPTAHPRVDYDAKEAARIQRLFRSNPRKAVQQILEARSPYCEIPPDAVEAHFRRVYGGSQYEPPVTPFPGEEYPATTEQEREALLRPINAGEVFRRLARAKNTAPGPDGLRYQDLRRMDMGSRVTSVIFDRCLKEGRMPPSWKTSRTVLLHKKGDRREITNWRPVALGNCIAKLYSAVLADRLMRWSVRKGRVSTLQKGFREHEGCMEHNFLLQAAVDEARRRRGTICLAWLDLSNAFGSIPHRHISETMARMDVPPEFVRVVEDIQDSSTTIRTSAGETPAIAIKAGVKQGCPLSPTIFNLGIEPVVRAAEREAEALGVDVTTKKISILAYADDLVLMGRSEEALQRLLDRVGQRASAAGLAFNPGKCATLHLDFSTASPVRGTKFVVQGASPPGLREGEPYSYLGVPFGYNVCQTHREELERLAEDVRKIDTSLLTQWQKFTALSTFLLPRLNFILRAGAVKKEPLKRLDRLVKECGKRWLSLPRRGSPELLYLHQWQGGMGLLPMGDLVDILTVTHGFRLLHCKDPIVRSIAWSRLREVVRRRIRRYPTEKDCTTYLSGSLEDDFGQQSSDFSSLFTQVRVASRQLRRLTNLGWRWSAALGELQITVGAEEEVRVPPGAIPVLERTLKNTARKAYLKKLLRKPDQGKAFLASSSSPSSNHFTGGGRYTRFCDWRFVYRARLDVLPLNACRRWTKEGDRRCRRCGHGDETLPHVLNHCKVHARAWQLRHDGVLNRIATAIRGRRGQEQDVLRVNQTVPEYPQPIRPDLLLFTAGRDGVGNSAKIVDVTIAFENTREALEEARRRKEEKYAALAEHFKKEGLHSSVEAIVVGSLGSWDPKNDTVLRGLGISRRYSTTMKRLVVSDVIRWSRDIYVEHVSGHRQFEDGQ

SEQ ID NO: 3772 - protein, 1135 aa, Aplysia californica
MDNDLSVKRTMQKENQENSFMCEQCYRKFDTWRGLRVHQGKVCLKKRRQCRSSDCKTRSKSSQDENHSGAISASVDSPFTLSQQEMEQQTEPGLRKPRILWPAANEKAKYKTLEEEVQKKLKEVKKSSNRGDAKEILSAFATIIYDSAIKEFGICEGKKKTEKKSGLSRRQRVLAQLRKQKRDLQKQKKYAPPEEIEGLRILFEDLKKKSRDLQRHERRCTRRKERKREREQFLKNPYEAAKKLFTEARSGKLECTKEELDAYVKQTYSDSRREEPLPYMRGLKRPAAPVVKYYLGPIREKEVDEFVKKARAKSAPGGDGVSYKVFKYCDTLRHTLFEMLRGLWKDKEIVKDWCRAEGVYLPKEQNAKEIGQFRPISIINVTCKIFMGILAKRTVAYLQSNGYVDETVQKAGVPGIPGCIEHAFTIWDTIQEAKKNKKSLNVVWLDLANAYGSVPHKLLMKAMDFFYVPQEGQNIMREYYSNFQMRFSTANFTTEWHRLEIGIAAGCSISVIWFILVMEMLLRSAECCEEEAKVRSPKKAFMDDVTLLTRDGDTMQSVLNRLDKLITWARMKFKAKKSRSLTINKGKQKQLKFTIAGEQMPTVKEQPVKSLGRWYSGTLSDRSQGVEIMKQAENGLKAIDQTKLPGKHKIWCLQFALYPRLAWPLTMYEVALSRVEMIERKCNSYIRKWLGLPRTINTSSLYRHRGALQLPLTSIVEIYKAGKIRTVLMLRESRDKEISGKPPDVKTARKWKAEVAANEIISALEHGDIVGPAQPDRLGLGNGDFRPFRKMSQRDRRKAATRHMQKMEAERREIHLIQCSQQGQMTRWEEHVVERKVGWSDIWKWNTSRLSFLLRSTYDVLPSPVNLVRWKVQEDNKCRCGKLGTMKHILSNCNLALNRYTWRHNEVLKVLTKMATQQVEEGKYAPKIQKHGPTKIAFVPQGSKVAKRKKANEAMKDQSGGTWEVAADLKGFERFFPIPTTKKPDIVIWEEKDKEVHLVELTVPHEDNIYAAHERKENRYEALVEQCEEAGWKATHFPVEVGCRGFVATSARKWMRVAGLTAKKSNELTNSLQETAEKASHWIWLKREDSTWNESLSWQQRKTVELTWRPHIGEGARCVRKAVERKSPKQRRILS

SEQ ID NO: 3773 - protein, 1010 aa, Aplysia californica
MEQQTEPGLRKPRILWPAANEKAKYKTLEEEVQKKLKEVKKSSNRGDAKEILSAFATIIYDSAIKEFGICEGKKKTEKKSGLSRRQRVLAQLRKQKRDLQKQKKYAPPEEIEGLRILFEDLKKKSRDLQRHERRCTRRKERKREREQFLKNPYEAAKKLFTEARSGKLECTKEELDAYVKQTYSDSRREEPLPYMRGLKRPAAPVVKYYLGPIREKEVDEFVKKARAKSAPGGDGVSYKEFKYCDTLRHTLFEMLRGLWKDKEIVKDWCRAEGVYLPKEQNAKEIGQFRPISIINVTCKIFMGILAKRTVAYLQSNGYVDETVQKAGVPGIPGCIEHAFTIWDTIQEARKNKESLNVVWLDLANAYGSVPHKLLMKAMDFFYVPQEVQNIMREYYSNFQMRFSTANFTTEWHRLEIGIAAGCSISVIWFILVMEMLLRSAECCEEEAKVRSPKKAFMDDVTLLTRDGDTMQSVLNRLDKLITWARMKFKAKKSRSLTINKGKQKQLKFTIAGEQMPTVKEQPVKSLGRWYSGTLSDRSQGVEIMKQAENGLKAIDQTKLPGKHKIWCLQFALYPRLAWPLTMYEVALSRVEMIERKCNSYIRKWLGLPRTINTSSLYRHRGALQLPLTSIVEIYKAGKIRTVLMLRESRDKEISGKPPDVKTARKWKAEVAANEIISALEHGDIVGPAQPDRLGLGNGDFRPFRKMSQRDRRKAATRHMQKMEAERREIHLIQCSQQGQTTRWEEHVVERKIGWSDIWKWNTSRLSFLLRSTYDVLPSPVNLVRWKVQEDNKCRCGKLGTMKHILSNCNLALNRYTWRHNEVLKVLTKMATQQVEEGKYAPKIQKHGPTKIAFVPQGSKVAKRKKANEAMKDQSGGTWEVAADLKGFERFFPIPTTKKPDIVLWEEKDKEVHLVELTVPHEDNIYAAHERKENRYEALVEQCEEAGWKATHFPVEVGCRGFVATSARKWMRVAGLTAKKSNELTNSLQETAEKASHWIWLKREDSSWNES

SEQ ID NO: 3774 - protein, 1006 aa, Aplysia californica
MEQQTEPGLRKPRILWPAAKEKAKYKTLEEEVQKKLKEVKKSSNRGDAKEILSAFATIIYDSAIKEFGICEGKKKTEKKSGLSRRQRVLAQLRKQKRDLQKQKKYAPPEEIEGLKILFEDLKKKSRDLQRHERRCTRRKERKREREQFLKNPYEAAKKLFTEARSGKLECTKEELDAYVKQTYSDSRREEPLPYMRGLKRPAAPVVKYYLGPIREKEVDEFVKKARAKSAPGGDGVSYKVFKYCDTLRHTLFEMLRGLWKDKEIVKDWCRAEGVYLPKEQNAKEIGQFRPISIIKIFMGILAKRTVAYLQSNGYVDETVQKAGVPGIPGCIEHAFTIWDTIQEAKKNKESLNVVWLDLANAYGSVPHKLLMKAMDFFYVPQEVQNIMREYYSNFQMRFSTANFTTEWHRLEIGIAAGCSISVIWFILVMEMLLRSAECCEEEAKVRSPKKAFMDDVTLLTRDGDTMQSVLNRLDKLITWARMKFKAKKSRSLTINKGKQKQLKFTIAGEQMPTVKEQPVKSLGRWYSGTLSDRSQGVEIMKQAENGLKAIDQTKLPGKHKIWCLQFALYPRLAWPLTMYEVALSRVEMIERKCNSYIRKWLGLPRTINTSSLYRHRGALQLPLTSIVEIYKAGKIRTVLMLRESRDKEISGKPPDVKTARKWKAEVAANEIISALEHGDIVGPAQPDRLGLGNGDFRPFRKMSQRDRRKATTRHMQKMEAERREIHLIQCSQQGQMTRWEEHVVERKVGWSDIWKWNTSRLSFLLRSTYDVLPSPVNLVRWKVQEDNKCRCGKLGTMKHILSNCNLALNRYTWRHNEVLKVLTKMATQQVEEGKYAPKIQKHGPTKIAFVPQGSKVAKRKKANEAMKDQSGGTWEVAADLKGFERFFPIPTTKKPDIVLWEEKDKEVHLVELTVPHEDNIYAAHERKENIYEALVEQCEEAGWKATHFPVEVGCKGFVATSARKWMRVAGLTAKKSNELTNSLQETAEKASHWIWLKREDSSWNES

SEQ ID NO: 3775 - protein, 1095 aa, Aplysia californica
MDNDLSVKRTMQKENLENSFMCEQCYRKFDTWRGLRVHQGKVCLKKRRQCRSSDCKTRSKSSQDENHSGAISASVDSPFTLSQQEMEQQTEPGLRKPRILWPAANKKAKYKTLEEEVQKKLKEVKKSSNRGDAKEILSAFATIIYDSAIKEFGICEGKKKTEKKSGLSRRQRVLAQLRKQKRDLQKQKKYAPPEEIEGLRILFEDLKKKSRDLQRHERRCTRRKERKGEREQFLKNPYEAAKKLFTEARSGKLECTKEELDAYVKQTHSDSRREEPLPYMRGLKRPAAPVVKYYLGPIREKEVDEFVKKARAKSAPGGDGVSYKVFKYCDTLRHTLFELLRGLWKDKEIVKDWCRAEGVYLPKEQNAKEIGQFRPISIINVTCKIFMGILAKRTVAYLQSNGYVDETVQKAGVPGIPGCIEHAFTIWDTIQEAKKNKESLNVVWLDLANAYGSVPHKLLMKAMDFFYVPQEVQNIMREYYSNFQMRFSTANFTTEWHRLEIGIAAGCSISVIWFILVMEMLLRSAECCEEEAKVRSPKKAFMDDVTLLTRDGDTMRSVLNRLDKLITWARMKFKAKKSRSLTINKGKQKQLKFTIAGEQMPTVKEQPVKSLGRWYSGTLSDRSQGVEIMKQAENGLKAIDQTKLPGKHKIWCLQFALYPRLAWPLTMYEVALSRVEMIERKCNSYIRKWLGLPRTMNTSSLYRHRGALQLPLTSIVEIYKAGKIRTVLMLRESRGKEISGKPPDVKTARKWKVEVAANEIISALEHGDIVGPAQPDRLGLGNGDFRPFRKMSQRDRRKAATRHMQKMEAERREIHLIQCSQQGQMTRWEEHVVERKVGWSDIWKWNTSRLSFLLRSTYDVLPSPVNLVRWKVQEDNKCRCGKLGTMKHILSNCNLALNRYTWRHNEVLKVLTKMATQQVEEGKYAPKIQKHGPTKIAFIPQGSKVAKRKKANEAMKDQSGGTWEVAADLKGFKRFFPIPTTKKPDIVLWEEKDKEVHLVELTVPHEDNIYAAHERKENRYEALVEQCEEAGWKATHFPVEVGCRGFVATSARKWMRVAGLTAKKSNELTNSLQETAEKASHWIWLKREDSSWNES

SEQ ID NO: 3776 - protein, 1010 aa, Aplysia californica
MEQQTEPGLRKPRILWPAANEKAKYKTLEEEVQKRLKEVKKSSNRGDAKEILSAFATIIYDSAIKEFGICEGRKKTEKKSGLSRRQRVLAQLRKQKRDLQTQKKYAPPEEIEGLRILFEDLKKKSRDLQRHERRCTRRKERKREREQFLKNPYEAAKKLFTEARSGKLECTKEELDAYVKQTYSDSRREEPLPYMRGLKRPAAPVVKYYLGPIREKEVDEFVKKARAKSAPGGDGVSYKVFKYCDTLRHTLFEMLRGLWKDKEIVKDWCRAEGVYLSKEQNAKEIGQFRTISIINVTCKIFMGILAKRTVAYLQSNGYVDETVQKAGVPGIPGCIEHAFTIWDTIQEAKKNKESLNVVWLDLANAYGSVPHKLLMKAMDYFYVPQEVQNIMREYYSNFQTRFSTANFTTEWHRLEIGIAAGCSISVIWFILVMEMLLRSADCCEEEAKVRSPKKAFMDDVTLLTRDGDTMQSVLNRLDKLITWARMKFKTKKSRSLTINKGKQKQLKFTIAGEQMPTVKEQPVKSLGRWYSGTLSDRSQGVEIMKQAENGLKAIDQTKLPGKHKIWCLQFALYPRLAWPLTMYEVALSRVEMIERKCNSYIRKWLGLTLTINTSSLYRHRGALQLPPTSIVEIYKAGKIRTVLMLRESRDKEISGKPPDVKTARKWKAEVAANEIISALEHGDIVGPAQPDRLGLGNGDFRPFRKMSQRDRRKAATRHMQKMEAERREIHLIQCSQQGQMTRWEEHVVERKVGWSDIWKWNTSRLSFLLRSTYDVLPSPVNLVRWKVQEDNKCRCGKLGTMKHILSNCNLALNRYTWRHNEVLKVLTKMATQQVEEGKYAPKIQKHGPTKIAFVPQGSKVAKRKKANEAMKDQSGGTWEVAADLKGFERFFPIPTTKKPDIVVWEEKDKEVHLVELTVPHEDNIYAAHERKENRYEALVLQCEEAGWKATHFPVEVGCRGFVATSARKWMRVAGLTAKKSNELTNSLQETAEKASHWIWLKREDSSWNES

SEQ ID NO: 3777 - protein, 1002 aa, Aplysia californica
MEQQTEPGLRKPRILWPAANEKAKYKTLEEEVQKKLKEVKKSSNRGDAKEILNAFATIIYDSAIKEFGICEGKKKTEKKSGLSRRQRVLAQLRKQKRDLQKQKKYAPPEEIEGLRILFEDLKKKSRDLQRHERRCTRRKERKRERERFLKNPYEAAKKLFTEARSGKLECTKEELDAYVKQTYSDSRREEPLPYMRGLKRPAAPVVKYYLGPIREKEVDEFVKKARAKSAPGGDGVSYKVFKYCDTLRHTLFEMLRGLWKDKEIVKDWCRAEGVYLPKEQNAKVIGQFRPISIINVTCKIFMGILAKRTVAYLQSNGYVDETVQKAGVPGIPGCIEHAFTKKNKESLNVVWLDLANAYGSVPHKLLMKAMDFFYVPQEVQNIMREYYSNFQMRFSTANFTTEWHRLEIGIAAGCSISVIWFILVMEMLLRSAECCEEEAKVRSPKKAFMDDVTLLTRDGDTMQNVLNRLDKLITWARMKFKAKKSRSLTINKGKQKQLKFTIAGEQMPTVKEQPVKSLGRWYSGTLCDRSQGVEIMKQAENGLKAIDQTKLPGKHKIWCLQFALYPRLAWPLTMYEVALSRVEMIERKCNSYIRKWLGLPRTINTSSLYRHRGALQLPLTSIVEIYKAGKIRTVLMLRESRDQEISGKPPDVKTARKWKAEVAANEIISALEHGDIVGPAQPDRLGLGNGDFRPFRKMSQRDRRKAATRHMQKMEAERREIHLIQCSQQGQMTRWEEHVVERKVGWSDIWKWNTSRLSFLLRSTYDVLPSPVNLVRWKVQEDNKCRCGKLGTMKHILSNCNLALNRYTWRHNEVLKVLTKMATQQVEEGKYAPKIQKHGPTKIAFVPQGSKVAKRKKVNEAMKDQSGGTWEVAADLKGFERFFPIPTTKKPDIVLWEEKDKEVHLVELTVPHEDNIYAAHERKENRYEALVEQCEEAGWKATHFPVEVGCRGFVATSARKWMRVAGLTAKKSNELTNSLQETAEKASHWIWLKREDSSWNES

SEQ ID NO: 3778 - protein, 1085 aa, Aplysia californica
MQKENQENSFMCEQCYRKFDTWRGLRVHQGKVCLKKRRQCRSSDCKTRSKSSQDENHSGAISASVDSPFTLSQQEMEQQTEPGLRKPRILWPAANEKAKYKTLEEEVQKKLKEVKKSSNRGDAKEILSAFATIIYDSAIKEFGICEGKKKTEKKSGLSRRQRVLAQLRKQKRDLQKQKKYAPPEEIEGLRILFEDLKKKSRDLQRHERRCTRRKERKREREQFLKNPYEAAKKLFTEARSGKLECTKEELDAYVKQTYSDSRREEPLPYMRGLKRPAAPVVKYYLGPIREKEVDEFVKKARAKSAPGGDGVSYKVFKYCYTLGHTLFEMLRGLWKDKEIVKDWCRAEGVYLPKEQNAKEIGQFRPISIINVTCKIFMGILAKRTVAYLQSNGYVDETVQKAGVPGIPGCIEHAFTIWDTIQEAKKNKESLNVVWLDLANAYGSVPHKLLMKAMDFFYVPQEVQNIMRGYYSNFQMRFSTANFTTEWHRLEIGIAAGCSISVIWFILVMEMLLRSAECCEEEAKVRSPKKAFMDDVTLLTRDGDTMQSVLNRLDKLITWARMKFKAKKSRSLTINKGKQKQLKFTIAGEQMPTVKEQPVKSLGRWYSGTLSDRSQGVEIMKQAENGLKAIDQTKLPGKHKIWCLQFALYPRLAWPLTMYEVALSRVEMIERKCNSYIRKWLGLPRTINTSSLYRHRGALQLPLTSIVEIYKAGKIRTVLMLRESRDKEISGKPPDVKTARKWKAEVAANEIISALEHGDIVGPAQPDRLGLGNGDFRPFRKMSQRDRRKAATRHMQKMEAERREIHLIQCSQQGQMTRWEEHVVERKVGWSDIWKWNTSRLSFLLRSTYDVLPSPVNLVRWKVQEDNKCRCGKLGTMKHILSNCNLAVNRYTWRHNEVLKVLTKMATQQVEEGKYAPKIQKHGPTKIAFVLQGSKVAKRKKANEAMKDQSGGTWEVAADLKGFERFFPIPTTKKPDIVLWEEKDKEVHLVELTVPHEDNIYAAHERKENRYEALVEQCEEAGWKATHFPVEVGCRGFVATSARKWMRVAGLTAKKSNELTNSLQETAEKASHWIWLKREDSSWNES

SEQ ID NO: 3779 - protein, 1095 aa, Aplysia californica
MDNDLSVKRTIQKENQENSFMCEQCYRKFDTWRGLRVHQGKVCLKKRRQCRSSDCKTRSKSSQDENHSGAISASVDSPFTLSQQEMEQQTEPGLRKPRILWPAANEKAKYKTLEEEVQKKLKEVKKSSNRGDAKEILSAFATIIYDSAIKEFGICEGKKKTEKKSGLSRRQRVLAQLRKQKRDLQKQKKYAPPEEIEGLRILFEDLKKKSRDLQRHERRCTRRKERKREREQFLKNPYEAAKKLFTEARSGKLECTKEELDAYVKQTYSDSRREEPLPYMRGLKRPAAPVVKYYLGPIREKEVDEFVKKARAKSAPGGDGVSYKVFKYCDTLRHTLFEMLRGLWKDKEIVKDWCRAEGVYLPKEQNAKEIGQFRPISIINVTCKIFMGILAKRTVAYLQSNGYVDETVQKAGVPGIPGCIEHAFTIWDTIQEAKKNKESLNVVWLDLANAYGSVPHKLLMKEMDFFYVPQEVQNIMREHYSNFQMRFSTANFTTEWHRLEIGIAAGCSISVIWFILVMEMLLRSAECCEEEAKVRSPKKAFMDDVTLLTRDGDTMQSVLNRLDKLITWARMKFKAKKSRSLTINKGKQKQLKFTIAGEQMPTVKEQPVKSLGRWYSGTLSDRSQGVEIMMQAENGLKAIDQTKLPGKHKIWCLQFALYPRLAWPLTMYEVALSRVEMIERKCNSYIRKWLGLSRIINTSSLYRHRGALQLPLTSIVEIYKAGKIRTVLMLRESRGKEISGKPPDVKTARKWKAEVAANEIISALEHGDIVGPAQPDRLGLGNGDFRPFRKMSQRDRRKAATRHMQKMEAERREIHIIQCSQQGQMTRWEEHVVERKVGWSDIWKWNTSRLSFLLRSTYDVLPSPVNLVRWKVQEDNKCRCGKLGTMKHILSNCNLALNRYTWRHNEVLKVLTKMATQQVEEGKYAPKIQKHGPTKIAFVPQGSKVAKRKKANEAMKDQSGGTWEVAADLKGFERFFPIPTTKKPDIVLWEEKDKEVHLVELTVPHEDNIYAAHERKENRYEALVEQCEEAGWKATHFPVEVGCRGFVATSARKWMRVAGLTAKKSNELTNSLQETAEKASHWIWLKREDSSWNES

SEQ ID NO: 3780 - protein, 1095 aa, Aplysia californica
MDNDLSVKRTMQKENQENSFMCEQCYRKFDTWRGLRVHQGKVCLKKRRQCRSSDCKTRSKSSQDENHSGAISASVDSPFTLSQQEMEQQTEPGLRKPRILWPAANEKAKYKTLEEEVQKKLKEVKKSSNRGDAKEILSAFATIIYDSAIKEFGICEGKKKTEKKSGLSRRQRVLAQLRKQKRDLQKQKKYAPPEEIEGLRILFEDLKKKSRDLQRHERRCTRRKERKREREQFLKNPYEAAKKLFTEARSGKLECTKEELDAYVKQTYSDSRREEPLPYMRGLKRPAAPVVKYYLGPIREKEVDEFVKKARAKSAPGGDGVSYKVFKYCDTLRHTLFEMLRGLWKDKEIVKDWCRAEGVYLPKEQNAKEIGQFRPISIINVTCKIFMGILAKRTVAYLQSNGYVDETVQKAGVPGIPGCIEHAFTIWDTIQEAKKNKESLNVVWLDLANAYGSVPHKLLMKAMDFFYVPQEVQNIMREYYSNFQMRFSTANFTTEWHRLEIGIAAGCSISVIWFILVMEMLLRSAECCEEEAKVRSPKKAFMDDVTLLTRDGDTMQSVLNRLDKLITWARMKFKAKKSRSLTINKGKQKQLKFTIAGEQMPTVKEQPVKSLGRWYSGTLSDRSQGVEIMMQAENGLKAIDQTKLPGKHKIWCLQFALYPRLAWPLTMYEVALSRVEMIERKCNSYIRKWLGLPRTINTSSLYRHRGALQLPLTSIVEIYKAGKIRTVLMLRESRDKEISGKPPDVKTARKWKAEVAANEIISALEHGDIVGPAQPDRLGLGNGHFRPFRKMSQRDRRKAATRHMQKMEAERREIHLIQCSQQGQMTRWEEHVVERKVGWSDIWKWNTSRLSFLLRSTYDVLPSPVNLVRWKVQEDNKCRCGKLGTMKHILSNCNLALNRYTWRHNEVLKVLTKMATQQVEEGKYAPKIQKHGPTKIAFVPQGSKVAKRKKANEAMKDQSGGTWEVAADLKGFERFFPIPTTKKPDIVLWEEKDKEVHLVELTVPHEDNIYAAHERKENRYEALVEQCEEAGWKATHFPVEVGCRGFVATSARKWMRVAGLTAKKSNELTNSLQETAEKASHWIWLKREDSSWNES

SEQ ID NO: 3781 - protein, 1095 aa, Aplysia californica
MDNDLSVKRTMKKENQENSFMCEQCYRKFDTWRGLRVHQGKVCLKKRRQCRSSDCKTRSKSTQDENHSGAISASVDSPFTLSQQEMEQQTEPGLRKPKILWPAANEKAKYKTLEEEVQKKLKEVKKSSNRGDAKEILSAFATIIYDSAIKEFGICEGKKKTEKKSGLSRRQRVLAQLRKQKRDLQKQKKYAPPEEIEGLRILFEDLKKKSRDLQRHERRCTRRKERKREREQFLKNPYEAAKKLFTEARSGKLECTKEELDAYVKQTYSDSRREEPLPYMRGLKRPAAPVVKYYLGQIREKEVDEFVKKARAKSAPGGDGVSYKVFKYCDTLRHTLFEMLRGLWKDKEIVKDWCRAEGVYLPKEQNAKEIGQFRPISIINVTCKIFMGILAKRTVAYLQSNGYVDETVQKAGVPGIPGCIEHAFTIWDTIQEAKKNKESLNVVWLDLANAYGSVPHKLLMKAMDFFYVPQEVQNIMREYYSNFQMRFSTANFTTEWHRLEIGIAAGCSISVIWFILVMEMLLRSAECCEEEAKVRSPKKAFMDDVTLLTRDGDTMQSVLNRLDKLITWARMKFKAKKSRSLTINKGKQKQLKFTIAGEQMPTVKEQPVKSLGRWYSGTLSDRSQGVEIMKQAENGLKAIDQTKLPGKHKIWCLQFALYPRLAWPLTMYEVALSRVEMIERKCNSYIRKWLGLPRTINTSSLYRHRGALQLPLTSIVEIYKAGKIRTVLMLRESRDKEISGKPPDVKTARKWKADVAANEIISALEHGDIVGPAQPDRLGLGNGDFRPFRKMSQRDRRKAATRHMQKMEAERREIRLIQCSQQGQMTRWEEHVVERKVGWSDIWKWNTSRLSFLLRSTYDVLPSPVNLVRWKVREDNKCRCGKLGTMKHILSNCNLALNRYTWRHNEVLKVLTKMATQQVEEGKYAPKIQKHGPTKIAFVPQGSKVAKRKKANEAMKDQSGGTWEVAADLKGFERFFPIPTTKKPDIVLWEEKDKEVHLVELTVPHEDNIYAAHERKENRYEALVEQCEEAGWKATHFPVEVGCRGFVATSARKWMRVAGLTAKKSNELTNSLQETAEKASHWIWLKREDSSWNES

SEQ ID NO: 3782 - protein, 1281 aa, Leishmania braziliensis
MGPGETHGTGRHHRTRLRRHGAPRRLLFLVWCDGRGTARTTDSNCDLRGAGRRPPRHHGDRHQRGIRTRIGQPASPLPGLPHRRRHSIHTVDLSLRRCRGDHNHTASWKPESGWSAGMAAGGDAPDGALQPEPLQTPRRDLRHDVEARGRIRPVPGRWEGAMAPLRRHRSRHRRAAARPSHHRHPDLHTRSLQAGRRGRQRGGHRHPPSQANAANSTATATVTRPVGPHNLRHAPGHRGARGGRHRDRTQDGRATDGDTHTTHPATRHRREGEESDTTESVHTEPDQAAEDVSQTSDEARHRFRHGENTAAQQTGTIHCPVCPRTWTSRARRQQQTSHLNTTHAREVVRVDALKATGVDRCLSCGEFVIASGNARRAHGRKCGEFVTRAVRNQKRARTEQSTPRQDAGMEPTPETPPPPTRHRTRPTEADAEWVQEFPATIRTLRKQEWGHWAEAVGHTLLGYTAAAAAGRYQRQLALTELVRTRLAKPRAPAREEDESHQEEPSETPREGERDEPYTGHAGATRRPNTEEHLPTRDAHTAEERRARRILHQLSLGAVGKAARTLFQAQLPRARASEALDQLRALHPQEDPAGYPCPPQTPFPHGLKPEKVRNVVLKRLGRAAAPGLDGWTRELLVPVVENAALLAETTALMQDILAGNVSASFAFRLRACVVHPFLKEPGSPKVRPITPESVWLKIASHLALDAVEKPFRDIFQGWQFGVWGDAAEAVAQIRETYASESADTLVALDATNAYNRVSRAWVLRAAFRHHALRHTFGVVDLSLGEPGALGVYEGGRRVEQLWSTRGVRQGMVLSPLLFATAVAETLRPIMAAHPLAKVTAYLDDLTVVGPRAAVQAFLDEAGPALAATGFDINPAKSHHLSKSAAPEPVSVAGVAVPLASGVVRILGAGFRGSGAPVDEWVWEKTRPYEAYFTALGGDELPRHARMNLLRASALPRLTFLLRTHSADELRDSAAWFDDRVLHTLSVLAGGAPIEGAAALLARLPLAMGGCGLRSQLAISRFAAHSVGRKGAQKTHTHQLDQHNLEALKTLLPEPALEIVKANAAPGATRALADPALHLGDFPFEVLVRQRLLLRVLRPEVRCACGADADNAHANVCPLVPGGPRIQRHNHVLSAIEAWAKRLGFAVVAEPRVSSTSGERLDLSIAAAGGTFATDVVITFPGRARSAHQNPLQQAHAAKKRKWGDWAAATGTTFAPVSLESTGGLHKESFHWLLAVAGAANFPFSTRTAFEELLSCISRALHEGNAYVFEAVRANWARRLLTH

SEQ ID NO: 3783 - protein, 957 aa, Porcisia deanei
MHAHENATVDAMKAAGVDRCTLCGEFLTASGNARIAHRKKCGEFETRAAHNRKRARPDPHTPPGGENADGETPATTATPSPPRRRAPPTEEDEEWTREFPATIRTLRKQEWGHWAEAVGHTLLGYTAAAAAGRHQRQLALTELVRTRLAKPRAQARGGNDAPQEEPRDENEEAAATDPTPPTTREEGEEAEQYTGHAGATRRPNTEEHLPTSGGHTAEERHTRRILHQLSLGALGKAARTLFQAQLPRARASDVLDQLRALHPQENPADYPRPPQTPFPHGLKPERVKGVVLKRLGRAAAPGLDGWTRELLVPVVENSALLAETTALIQDILAGNVSPSFAYRLRACVVHPFLKEAGSTKVRPITPESVWLKIASHLALDAVEKPFRDTFRGWQFGVWGDASEAVAQIRATYASESADTLVALDAANAYNRVSRAGVLGAAFRHHALRHTFGVVDLSLGEPGALGVYEGGRRVEQLWSTRGVRQGMVLSPLLFANAVAETLRPIMAAHPLAKVTAYLDDLTVVGPRAAVQAFLDEAGPALAATGFDINPAKSHHLSKNTAPEPVTVSGVVVPLAAGVVRILGAGFRGSGAPVDEWVWEKTRQYEAYFSALCGEQLPRHARMNLLRASALPRLTFLLRTHSAEELHDSAAWFDDRVLHTLSALIGGAPVEGAAAILARLPLVMGGCGLRSQLAISRFAVQSVGRKGAQQAHTHQVDQHNLEALKTLLPEPALEIVKANAAPGATRALADPALRLGDFPFEVLARQRLLMRVLRPEVRCACGADADNAHVNVCPSVPGGPRIQRHNRVLSAIEAWAKRLGFSVVAEPRVSSTSGERLDLSIAAAGGTFATDVVITFPGRARSAQQNPLQQAHAGKKRKWGSWAVETGTVFAPVSLESTGGLHKESFQWLLAVAGSANFPFSARTAFEELLSSISQALHEGNAYLYEAVRANWARRLLTH

SEQ ID NO: 3784 - protein, 1710 aa, Leishmania guyanensis
MPVKQVFNTASPTVEKLGSGPQNVNYLISEEEYSSPRKRARSQQDNDNLNVETKSTTNGQRSHAVIPKYADVVRNGVLRGHGDRDLNINKADDKEHGGMPIKQSFNTAPPTVEKAGSVPKKFQFLYSEEELSSPRERANSQHRKRNGNGETRRTTNGQRSHAAIPKYADVVRNGAFRGHGNRDRNKDNADDKEHGGRPVKQSFNTAPPTVEKLGNVPKKFKYLHSEEELSSPRERDESRQSKHHINAERETTTHTRFPHPAGKRNAEPWLPQFDELQGAFELAKTLDTAIVEHTDLAGKLFARHTAMLKRHFEWANPIHSSFYYCTAVDVNGAGCTYANGSEKAVQDHIRERHPGSGATPRRFGMSPLHGGMATIGPSCSITAVVAAVCTIPGLTDMNATLLRAFRGSTADTAREVIGALGLQLPTSPGWALEKLTAQDGAIGRAFAATKRQDVYCSWCGVTEEGQPTTQTATMSCEAPAGGLQGTTATAISEAFGHVSANLPHHCPACRTEGATLSTLSTFLFGEAVAITIIPPAGNQKAAGLPEWPREVMLPTAPFSQNPYKLHAAICATTPKHVVAYVRCLEEGKEQWHRYDGTVHDTDVPPPDPATIDTLIFTRAPYKPAGEGDNEEDTGTHPVRPTRPTAPPPLPSRDPWGRTTHGMHPDTAEQEEEDTGIAPRSAEPRTETPTPPTQPPGTEREGEESDTTESVHTEPSQATEGETQAPGETRHRFRHGENTAAQQTGTIHCPVCPRTWTSRARRQQQTSHLNTTHAREVVRADALKATGVDRCLSCGEFVIASGNARRAHGRKCGEFVTRAVRNQKRARTEQSTPRQDAVAEPTPETPLPPTRHRTRPTEADAEWVQEFPATIRTLRKQEWGHWAEAVGHTLLGYTAAAAAGRYQRQLALTELVRTRLAKPRAPAREEDERHQEEPSETPREGGRDEPYTGHAGATRRANTAEHLPTRDAHTAEERRARRILHQLSLGAVGKAARTLFQAQLPRARASEALDQLRALHPQEDPAGYPCPPQTPFPHGLKPEKVRNVVLKRLGRAAAPGLDGWTRELLVPVVENAALLAETTALMQDILAGNVSASFAFRLRACVVHPFLKEPGSPKVRPITPESVWLKIASHLALNAVEKPFRDIFQGWQFGVWGDAAEAVTQIRETYASESADTLVALDATNAYNRVSRAWVLRAAYRHHALRHTFGVMDLSLGEPGALGVYEGGRRVEQLWSTRGVRQGMVLSPLLFATAVAETLRPIMAAHPLAKVTAYLDDLTVVGPRAAVQAFLDEAGPALAATGFDINPAKSHHLSKSAAPEPVSVAGVVVPLARGVVRILGAGFRGSGAPVDEWVWEKTRPYEAYFTALGGDELPRHARMNLLRASALPRLTFLLRTHSADELRDSAAWFDDRVLHTLSVLAGGAPIEGAAALLARLPLAMGGCGLRSQLAISRFAAQSVGRKGAQKAHTHQLDQHNLEALKTLLPEPALEIVKANAAPGATRALADPALHLGDFPFEVLVRQRLLLRVLRPEVRCACGADADNAHANVCPSVPGGPRIQRHNRVLTAIEAWAKRLGFAVVAEPRVSSTSGERLDLSIAAASGTFATDVVITFPGRARSAQQNPLQQAHAAKKRKWGDWAAETGTTFAPVSLESTGGLHKESFQWLLAVAGSANFPFSTRTAFEELLSCISRALHEGNAYVFEAVRANWARRLLTR

SEQ ID NO: 3785 - protein, 1445 aa, Leishmania lainsoni
MAEPELQQFDDLRVVFKIARTLDAAIAEHTALAEKLFERHTAILKRHFEWANPVRRSFYYCTAVDHNGAGCTYASDTERAVLDHIHERHPGSGAAPRRLGMSPYHGGMATIGQSCAIAAAVAAVCTMPETHNMDKTLLRAFRGSTADAAREVLRALGLQLPTSPGWTLETLAAQDGAIGRAFACTTRRDIYCPRRGTTEEGQPKTRSAAMKYKASAGDLPGTTASATSEVFGHLSTTLPHRCQTCCTAGATLSTLSHIFFGEAVAITVMPTAGTRKTKGLPELPTEVALPTAPFRPTTYKLHAAICVTTPRHVVAYVLNREEKAEKWHRYDGTTHDTDVPPPDPATIDTLIFRRAPHTPAGEGDNEETEDTRSDRPPPTAAPPQPPLIPLDPEGCAVYGMHPDTAESAEEDTATEPQTTEPRDETHIPPLEIDREEEESDTAESENTEPDQSTEEETQAPDEAQRRFHHGENTAAQQTGTIRCPVCPRTWTSRARRQQQTSHLNTTHTREVVKVDALKATGVDRCLACSEFVIASGNARRAHGRKCGEFVTRAVRNHKRTRTEQDTPRQDAEAHPPPGTPPPPTRHRTKPTEADAEWVQEFPATIRTIRKQEWGHWAEAVGHTLLGYTAANTAGRYQRQLALTELVRTRLAKPRAPARQEHESHQEEPSGTPTVGEEDEPYTGHAGATRRPNTEEHLPSRGEHTDEERRARRILHQLSLGAIGKAARTLFQAQLPRARASEALDQLRALHPQEDPAGYPCPPQTPFPHGLKPEKVRNVVLKRLGRAAAPGLDGWTRELLVPVVENAALLAETTALMQDILAGNVSASFAFRLRACVVHPFLKEPGSPKVRPITPESVWLKIASHLALDAVDKPFRETFQGWQFGVWGDAAEAVAQIRATYASESADTLVALDATNAYNRVSRAWVLRAAFRHHALRHTFGVVDLSLGEPGALGVYEDGRRVEQLWSTRGVRQGMVLSPLLFATAVAETLRPIMAAHPLAKVTAYLDDLTVVGPRAAVQAFLDEAGPALAATGFDINPAKSHHLSKSAAPEPVSVAGVVVPLADGVVRILGAGFRGSGAPVDEWVREKTRQYEAYFAALGGDGLPRHARMNLLRASALPRLTFLLRTHSADELRESAAWFDDRVLHTLSVLVGGAPVEGAAVLLARLPLAMGGCGLRSQLAISHFAAHSVGRKGAQKAHTHQLDQHNLEALKTLLPEPALEIVKANAAPGATRALADPAQHLGDYPFEVLVRQRLLLRVLRPEVRCACGADADNAHVNVCPAIPGGPRIQRHNRVLAAIEAWAKRLGFAVAAEPRVSSTSGERLDLSIAAAGGTFATDVVITFPGRARSAQQNPLQQAHGAKKRKWGDWAAETGTTFAPVSLESTGGLHKESFQWLLAVAGAAHFPFSTRTAFDELLSCMSQALHEGNAYLFEAVRAHWARRLLTR

SEQ ID NO: 3786 - protein, 630 aa, Leishmania lainsoni
MQDILAGNVSASFAFRLRACVVHPFLKEPGSPKVRPITPESVWLKIASHLALDAVEKPFRETFQGWQFGVWGDAAEAVAQIRATYASESADTLVALDATNAYNRVSRAWVLRAAFRHHALRHTFGVVDLSLGEPGALGVYEDGRRVEQLWSTRGVRQGMVLSPLLFATAVAETLRPIMAAHPLAKVTAYLDDLTVVGPRAAVQAFLDEAGPALAATGFDINPAKSHHLSKSAAPEPVSVAGVVVPLADGVVRILGAGFRGSGAPVDEWVREKTRQYEAYFAALGGDGLPRHARMNLLRASALPRLTFLLRTHSADELRESAAWFDDRVLHTLSVLVGGAPVEGAAVLLARLPLAMGGCGLRSQLAISHFAAHSVGRKGAQKAHTHQLDQHNLEALKTLLPEPALEIVKANAAPGATRALADPAQHLADYPFEVLVRQRLLLRVLRPEVRCACGADANNAHVNVCPAIPGGPRIQRHNRVLAAIEAWAKRLGFAVAAEPRVSSTSGERLDLSIAAAGGTFATDVVITFPGRARSAQQNPLQQAHGAKKRKWGDWAAETGTTFAPVSLESTGGLHKESFQWLLAVAGAAHFPFSTRTAFDELLSCMSQALHEGNAYLFEAVRAHWARRLLTR

SEQ ID NO: 3787 - protein, 630 aa, Leishmania lainsoni
MQDILAGNVSASFAFRLRACVVHPFLKEPGSPKVRPITPESVWLKIASHLALDAVDKPFRETFQGWQFGVWGDAAEAVAQIRATYASESADTLVALDATNAYNRVSRAWVLRAAFRHHALRHTFGVVDLSLGEPGALGVYEDGRRVEQLWSTRGVRQGMVLSPLLFATAVAETLRPIMAAHPLAKVTAYLDDLTVVGPRAAVQAFLDEAGPALAATGFDINPAKSHHLSKSAAPEPVSVAGVVVPLADGVVRILGAGFRGSGAPVDEWVREKTRQYEAYFAALGGDGLPRHARMNLLRASALPRLTFLLRTHSADELRESAAWFDDRVLHTLSVLVGGAPVEGAAVLLARLPLAMGGCGLRSQLAISHFAAHSVGRKGAQKAHTHQLDQHNLEALKTLLPEPALEIVKANAAPGATRALADPAQHLADYPFEALVRQRLLLRVLRPEVQCACGADANNAHVNVCPAIPGGPRIQRHNRVLAAIEAWAKRLGFAVAAEPRVSSTSGERLDLSIAAAGGTFATDVVITFPGRARSAQQNPLQQAHGARKRKWGDWAAETGTTFAPVPLESTGGLHKESFQWLLAVAGAAHFPFSTRTAFDELLSCMSQALHEGNAYLFEAVRAHWARRLLTR

SEQ ID NO: 3788 - protein, 1159 aa, Leishmania braziliensis
MLPTALFSQNPYKLHAAICATTSKHVVAYVLCREDGKEQWHRYDGTVHDTDVPPPDPATIDTLIFTRAPYKPAGEGDNEEDTGTHPVRPTRPTAPPPPPSRDPWGRTTYGMHPDIAEQEEEDTGIAPRPAEPRTETHTPPTQPPDTEREGEESDTTESVHTEPDQAAEDVSQTSDEARHRFRHGENTAAQQTGTIHCPVCPRTWTSRARRQQQTSHLNTTHAREVVRVDALKATGVDRCLSCGEFVIASGNARRAHGRKCGEFVTRAVRNQKRARTEQSTPRQDAGMEPTPETPPPPTRHRTRPTEADAEWVQEFPATIRTLRKQEWGHWAEAVGHTLLGYTAAAAAGRYQRQLALTELVRTRLAKPRAPAREEDESHQEEPSETPREGERDEPYTGHAGATRRANTEEHLPTRDAHTAEERRARRILHQLSLGAVGKAARTLFQAQLPRARASEALDQLRALHPQEDPAGYPCPPQTPFPHGLKPEKVRNVVLKRLGRAAAPGLDGWTRELLVPVVENAALLAETTALMQDILAGNVSASFAFRLRACVVHPFLKEPGSPKVRPITPESMWLKIASHLALDAVEKPFRDIFQGWQFGVWGDAAEAVAQIRETYASESADTLVALDATNAYNRVSRAWVLRAAFRHHALRHTFGVVDLSLGEPGALGVYEGGRRVEQLWSTRGVRQGMVLSPLLFATAVAETLRPIMAAHPLAKVTAYLDDLTVVGPRAAVQAFLDEAGPALAATGFDINPAKSHHLSKSAAPEPVSVAGVAVPLASGVVRILGAGFRGSGAPVDEWVWEKTRPYEAYFTALGGDELPRHARMNLLRASALPRLTFLLRTHSADELRDSAAWFDDRVLHTLSVLAGGAPIEGAAALLARLPLAMGGCGLRSQLAISRFAAHSVGRKGAQKTHTHQLDQHNLEALKTLLPEPALEIVKANAAPGATRALADPALHLGDFPFEVLVRQRLLLRVLRPEVRCACGADADNAHANVCPLVPGGPRIQRHNHVLSAIEAWAKRLGFAVVAEPRVSSTSGERLDLSIAAAGGTFATDVVITFPGRARSAQQNPLQQAHAAKKRKWGDWAAATGTTFAPVSLESTGGLHKESFHWLLAVAGAANFPFSTRTAFEELLSCISRALHEGNAYVFEAVRANWARRLLTH

SEQ ID NO: 3789 - protein, 1444 aa, Leishmania lainsoni
MTEPWLQQFDDLRVVFKMERILDAAIAEHAALAEKLFERHTAILKRHFEWANPVRRSFYYCTAVDHNGAVYVRQRHRKSGPGHIHERHPGSGAAPRRLGMSPYHGGMATIGPSCAIAAAVAAVCTMPETHNMDKTLLRAFRGSTADAARKVIRALDIQLPTSPGWTLKTLAAQDDTIGRAFAYTTRRDVYCPRCGTIAEGQPETQTAAMKYKASAGDLPGNTASAISEVFGHLSTTLPHRCPTCCTEGATLSTLSHIFFGEAVAITVMPTAGTRKTKGLPELPMEVALPTAPFRPTTYKLHAAICVTTPRHVVAYVLNREEKAEKWHRYDGTTHDTDVPPPDPATIDTLIFRRAPHTPAGEGDNEETEDTRSDRPPQTAVPPQPPLIPLDPEGRAVYGMHPDTAEPAEEDTATEPRTTEPRDEPRIPPLEIDREEEESDTAESENTEPDQSTEEETQAPDEALRRFHHGENTAAQQTGTIRCPVCPRTWTSRARRQQQTSHLNTTHTREVVRVDALKATGVDRCLACGEFVIASGNARPAHGRKCGEFVTGAVRNHKRTRTEQDTPRQDAEAHPPPGTPPPPTRHRTKPTETDAEWVQEFPATIRTIRKQEWGHWAEAVGHTLLGYTAANTAGRYQRQLALTELVRTRLAKPHAPARQEHESYQEEPSETPTVGEEDEPYTGHAGATRRPNTEEHLPSRGEHTAEERRARRILHQLSLGAIGKAARTLFQAQLPRARASEALDQLRALHPQEDPAGYPCPPQTPFPHGLKPEKVRNVVLKRLGRAAAPGLDGWTRELLVPVVENTALLAETTALMQDILAGNVSASFAFRLRACVVHPFLKEPGSPKVRPITPESVWLKIASHLALDAVDKPFRETFQGWQFGVWGDAAEAVAQIRATYASESADTLVALDATNAYNRVSRAWVLRAAFRHHALRHTFGVVDLSLGEPGALGVYEDGRRVEQLWSTRGVRQGMVLSPLLFATAVAETLRPIMAAHPLAKVTAYLDDLTVVGPRAAVQAFLNEAGPALAATGFDINPAKSHHLSKSAAPEPVSVAGVVVPLADGVVRILGAGFRGSGAPVDEWVWEKTRQYEAYFAALGGDGLPRHARMNLLRASALPRLTFLLRTHSADELRESAAWFDDRVLHTLSVLVGGAPVEGAAVLLARLPLAMGGCGLRSQLAISHFAAHSVGRKGAQKAHTHQLDQHNLEALKTLLPEPALEIVKANAAPGATRALADPAQHLADYPFEALVRQRLLLRVLRPEVQCACGADANNAHVNVCPAIPGGPRIQRHNRVLAAIEAWAKRLGFAVAAEPRVSSTSGERLDLSIAAAGGTFATDVVITFPGRARSAQQNPLQQAHGAKKRKWGDWAAETGTTFAPVSLESTGGLHKESFQWLLAVAGAAHFPFSTRTAFDELLSCMSQALHEGNAYLFEAVRAHWARRLLTR

SEQ ID NO: 3790 - protein, 1049 aa, Leishmania braziliensis
MHPHTAEQEEEDTGIAPRSAEPRTETHTPPTQPPGTEGEGEESDTAESVHTEPDQIVEDVSQTSDEARHRFHHGENTAAQQTGTIHCPVCPRTWTSRARRQQQTSHLNTTHAREVVRVDALKATGVDRCLSCGEFVIASGNARRAHGRKCGEFVTRAVRNQKRARTEQSTPRQDAVVEPTPETPLPPTRHRTRPTEADAEWVQEFPATIRTLRKQEWGHWAEAVGHTLLGYTAAAAAGRYQRQLALTELVRTRLAKPRAPAREEDESHQEEPSETPREGGRDEPYTGHAGATRRANTEEHLPTRDAHTAEERRARRILHQLSLGAVGKAARTLFQAQLPRARASEALDQLRALHPQEDPAGYPCPPQTPFPHGLKPEKVRNVVLKRLGRAAAPGLDGWTRELLVPVVENAALLAETTALMQDILAGNVSASFAFRLRACVVHPFLKESGSPKVRPITPESVWLKIASHLALDAVEKPFRDIFQGWQFGVWGDAAEAVAQIRETYASESADTLVALDATNAYNRVSRAWVLRAAFRHHALRHTFGVVDLSLGEPGALGVYEGGRRVEQLWSTRGVRQGMVLSPLLFATAVAETLRPIMAAHPLAKVTAYLDDLTVVGPRAAVQAFLDEAGPALAATGFDINPAKSHHLSKSAAPEPVSVAGVAVPLASGVVRILGAGFRGSGAPVDEWVWEKTRPYEAYFTALGGDELPRHARMNLLRASALPRLTFLLRTHSADELRDSAAWFDDRVLHTLSVLAGGAPIEGAAALLARLPLAMGGCGLRSQLAISRFAAHSVGRKGAQKTHTHQLDQHNLEALKTLLPEPALEIVKANAAPGATRALADPALHLGDLPFEVLVRQRLLLRVLRPEVRCACGADADNAHANVCPLVPGGPRIQRHNHVLSAIEAWAKRLGFAVVAEPRVSSTSGERLDLSIAAAGGTFATDVVITFPGRARSAQQNPLQQAHAAKKRKWGDWAAATGTTFAPVSLESTGGLHKESFHWLLAVAGSANFPFSTRTAFEELLSCISRALHEGNAYVFEAVRANWARRLLTH

SEQ ID NO: 3791 - protein, 1021 aa, Porcisia hertigi
MSEHGGTDAGTDAGTEAATTESRRDFWHGENADARRVGPRTCPLCPRAWSSQARRPQQISHLNTIHARETATVDAMKAAGVDRCTLCGEFLTASGNARIAHRKKCGEFETRAAHNRKRARPDPRTPPGDENADGETPATTVTTSPPRRRAPPTEEDEEWTREFPATIRTLRKQEWGHWAEAVGQTLLGYTAAAAAGRHQRQLALTELVRTRLAKPRAQTRGGDDEAQEEPRGENEETATTNPTPPATREEREEDEPYTGHAGATRRPNTEEHLPTSGGHTAEERHTRRILHQLSLGALGKAARTLFQAQLPRARASEVLDQLRALHPQENPADYPHPPQTPFPHGLKPEKVKGVVLKRLGRAAAPGLDGWTRELLVPVVENSALLAETTALIQDILAGNVSPSFAYRLRACVVHPFLKEAGSTKVRPITPESVWLKIASHLALDAVEKPFRDTFRGWQFGVWGDAAEAVAQIRATYASESADTLVALDAANAYNRVSRAGVLGAAFRQQALRHTFGVVDLSLGEPGALGVYEGGRRVEQFWSTRGVRQGMVLSPLLFANAVAETLRPIMAAHPLAKVTAYLDDLTVVGPRAAVQAFLDEAGPALAATGFDINPAKSHHLSKNTAPEPVTVSGVVVPLAAGVVRILGAGFRGNGAPVDEWVWEKTRQYEAYFSALGGEQLPRHARMNLLRASALPRLTFLLRTHSAEELHDSAAWFDDRVLHALSALIGGAPVEGAAALLARPPLVMGGCGLRSRLAISRFAVQSVGRKGAQQAHTHQVDQHNLEALKTLLPEPALEIVKANAAPGATRALADPALRLGDFPFEVLARQRLLMRVLRPEVRCACGADADNAHVNVCPSVPGGPRIQRHNRVLSAIEAWAKRLGSSVVAGPRVSSTSGERLDLSIAAAGGTFATDVVITFPGRTRSAQQNPLQQAHAGKKRKWGSWAVETGTVFAPVSLESTGGPHKESFQWLLAVAGSANFPFSARTAFEELLSSISQALHEGNAYLYEAVRANWARRLLTH

SEQ ID NO: 3792 - protein, 2220 aa, Porcisia hertigi
MYPRTKNFQGPALGTKFCNLTSPNPPSPPRELGDRPLRPPTGRAEGEAKNGDPQKRGSRHSQFFSGNPPKDAYPVSADNRTQLMRAGKRIKGVHSGTSDDERSKNCEHFENEEGSNCQRDFDTKRPFDRYSNTAETYTSKSNHGSHLMLQEKRTERFKSTASDDTRSKSCEHFENDEQSNCQRDFDEKQPLGRYRKIPETYTSKSNHGSHLTLQEKRRKRFKSTASDDTRSKSCEHFENDEQSNCQRDFDAKQPLGRYRKIPETYTSKSNHGSHLTLQEKRRKRFKSTASDDTRSKSYEHFENDENDEQSNCQRDFDAKQPFDRYSNTAETYTYKSNHGSHLTLQEKRRKRFKSTAPDDTRSKSCEHFENDEQSNCQRDFDKKQPLGRYRKIPETYTSKSNHGGHLMLQEKRTERFKSTASDDTRSKSYEHFENDENDEQSNCQRDFDEKQLLGRYRKIPETYTSKSNHGSHLTLQEKRRKRFKSTASDDTRSKSYEHFENDKNDEQSNCQRDFDAKQPLGRYRKIAETHTSKSSNGSHLMLPEKWIKRFKSAALDDTRSKSYEHFENVKPHVFRTKFPTRKGVPPPLLREKFGQKKFAAGEIEPVTQRPPAAAGRVAPRDRENPTFSHKDQNLPHKLPTREGVPPPLREKGVQKKSAAGEIEPGTRRPPATAGRVAQKDREYTTFSHKDQNLPHKLPTREGVTPPLREKGVQKKSAAGEIEPVTQRPPAAAGRDAPRERENPTFSQKDQNLSRFDVLLADIARTKMLTTAVVEHISFAERLFQRHTDILKRHFAWANPSRESFYYCTAVDQNGRACTYANGCEKTVQEHIRENHAGTRAIPRWFGLSRFHGGMANVGPSCAITAAIAALMTMKTKFDPHPVLTRAFRESNFEASKELVRELALSLPATVGMVLQTVAARDGATAALFNANRREDLYCNACGATTEGHLTPQPAIGTYETAPGNPHGTTAAALSQGFGPSWAPSRESCGHCGADGGATTALGQFFFDQAAAFTIVASRGAKQTDGMAEIPLEMSLPTAERTTARFHLHAAICATTPHHVAAYVAERENGEIFWHKYDGTRHEKDVPPPNPANIDTVIFARAPPTAARTATGGEDDDEEGGGDAGDPAEAAATAPPPPERSRDASGRFFYGQDPPGTGPEEENGRDGEEDEEAAAGRNEDPTAAPPQIPAPPAPPNTDGEEPDDMSEHGGTDAGTEAATTEPRRDFWHGENADARRVGPRTCPLCPRAWSSQARRPQQISHLNTIHARETATVDAMKAAGVDRCTLCGDFLTASGNARIAHRKKCGEFETRAAHNRKRARPDPRTPPGDENADGETPATTITPSPPRRRAPPTEEDEEWTREFPATIRTLRKQEWGHWAEAVGQTLLGYTAAAAAGRHQRQLALTELVRTRLAKPRAQTRGGDDEAQEEPRGENEETATTNPTPPATREEREEDEPYTGHAGATRRPNTEEHLPTSGGHTAEERHTRRILHQLSLGALGKAARTLFQAQLPRARASEVLDQLRALHPQENPADYPHPPQTPFPHGLKPEKVKGVVLKRLGRAAAPGLDGWTRELLVPVVENSALLAETTALIQDILAGNVSPSFAYRLRACVVHPFLKEAGSTKVRPITPESVWLKIASHLALDAVEKPFRDTFRGWQFGVWGDAAEAVAQIRATYASESADTLVALDAANAYNRVSRAGVLGAAFRQQALRHTFGVVDLSLGEPGALGVYEGGRRVEQFWSTRGVRQGMVLSPLLFANAVAETLRPIMAAHPLAKVTAYLDDLTVVGPRAAVQAFLDEAGPALAATGFDINPAKSHHLSKNTAPEPVTVSGVVVPLAAGVVRILGAGFRGDGAPVDEWVWEKTRQYEAYFSALGGEQLPRHARMNLLRASALPRLTFLLRTHSAEELHDSAAWFDDRVLHTLSALIGGAPVEGAAALLARLPLVMGGCGLRSQLAISRFAVQSVGRKGAQQTHTHQVDQHNLEALKTLLPEPALEIVKANAAPGATRALTDPALRLGDFPFEVLARQRLLMRVLRPEVRCACGADADNAHVNVCPSVPGGPRIQRHNRVLSAIEAWAKRLGFSVVAEPRVSSTSGERLDLSIAAAGGTFATDVVITFPGRTRSAQQNPLQQAHAGKKRKWGSWAVETGTVFAPVSLESTGGLHKESFQWLLAVAGSANFPFSARTAFEELLSSISQALHEGNAYLYEAVRANWARRLLTH

SEQ ID NO: 3793 - protein, 1348 aa, Endotrypanum monterogeii
MSPFHGGMATIGPSCSVTAAAAAICTMPATTGINATLLRAFRGSTADAAREVIQALGLQLPASPGGALEALAAQDGAIERAFAGTARQDIYCRWCGVTAEGPEEPQPAIVTYEAPAGGLPGTTATTLGEAFGHMSADLPRCCPDCGAEGAFLSELSLFLFGEAVAITVVPPAGAQEATGLPELPLEVLLPTAPFSPAPFKLHAAICATTPQHVVAYVVCREGGEEKWHRYDGTVHDTDVPPPDPTGIDTLVFVRAPPPPHTPAGNGDNEEETNDTRPGGPPPPAGPPPPPPRQRDARGRVFYGMHPAAADPAEEDAETETPDPGPRAATPHPDSDEEGRGSDTAENEDTASDQTAEDEPPTADETQTRFRHGENTAAQQTGTILCPLCPRAWTSRARRQQQTSHLNTTHAREAVGMEALRATGVDRCLSCGEFVVASGNARRAHGRKCGEFVTRAARNQKRARTEQGTPRQDDGGDPPDPATPPPPTRHHTKPTEADATWVQEFPATIRTLRKQEWGHWAEAVGHTLLGYTAAAAAGRYQRQLALTELVRTRLAKPRAPPRREDGGNQEGKSEEQGEGGGDEPYAGHAGATRRPNTEEHLPTSGGHTDDERRARRILHQLSLGAVGKAARTLFQAQLPRARANEVLDQLRALHPQEDPAGYPCPPQTPFLHGLKPEKVKSVVLKRLGRAAAPGLDGWTRELLVPVVENAALLAETTALIQDILAGNVSPSFAFRLRACVVHPFLKEPGSPKVRPITPESVWLKIASHLALDAVEKPFRDNFRGWQFGVWGDASEAVAQIRATYASESADTLVALDATNAYNRVSRAWVLGAAFRHHALRHTFGVVDLSLGEPGALGVYEGGRRVEQIWSTRGVRQGMVLSPLLFATAVAETLRPIMAAHPLAKVTAYLDDLTVVGPRAAVQAFLDEAGPALAATGFDINPAKSHHLSKSTAPEPVSVAGVVVPLAGGVVRILGAGFRGSGAPVNEWVWEKTRQYEAYFAALGGDDLPRHARMNLLRASALPRLTFLLRTHSADELRDSAAWFDDRVLHALSVLVGGAPVDGAAALLARLPLVMGGCGLRSQLAISRFAAHSVGRKGAQKTHTHQLDQHNLEALKTLLPEPALEIVKANAAPGATRALADPALRLGDFPFEVLTRQRLLMRVLRPEVRCACGADADNAHANVCPSVPGGPRIQRHNRVLTAIEAWAKRLGFSVVAEPRVSSTSGERLDLSIAAASGTFATDVVITFPGRARSAQQNPLQQAHAAKRRKWGDWAAETGTTFAPVSLESTGGLHRESFQWLLAVAGSANFPFSARTAFEELLSCISQALHEGNAYIFEAVRANWARRLLTH

SEQ ID NO: 3794 - protein, 937 aa, Trichogramma pretiosum
MLLKNSCERSLESIKGQRKKAEHKQRVAEILEQLRTSQQNIADNQNLQEVQQPIPEREMLAPNTALPISQRHVEYFGSLEPIEDPKLDLTRLNLLCSQLKNLQHHGLSKNTVLDTLTLVLQDLNPRAITPPKTKPRCNKSCTSKKQARRAEYSKVQNLWKKNPSKCVDRILTDQLCQEIPVPIERMEPFWRAIMTQDPGSSLELRPDQNSPIIDIWQVITPLEVRDSMPPNNSAPGPDGLKVKDLRQIPLEVTTRILNIFMLLGDVPSILKRSRTTLIPKVKGAADPSKFRPITVSSVLLRVYHKIFAERLKVVQLDPRQRAFIQTDGCTDNITLLDLTLKYHHAKCKSVFLAMLDMQKAFDSVAQEAVIEVLAAKRISPHFIAYYREINNSSSTTLQHGNWESEPIYPSCGVKQGDPLSPTIFNFIVDEMLKQAPDEIRVDLGGQRVDIMAFADDLNLLASTKGGLQHLIDFVTTFLGSCGLRANAAKCNTLAIRSLAKEKKTAVDKDCTFTIDKRAIPSLKRSDVWRYLGVSFDGNGKAKLEAKEQLETLIKKLTSAPLKPQQRLWALRVKLIPKVLFPLILGNAKIGYLRSLDRMIRRAIREWLRLPHDCPNAYFHAQVADGGLGIPALRWTAMLNRRSRLDSIRSSDYLVGDSVKEYLDRNISKTEQMLKDHNGNTMTTASMLRKFWAEQLYARFDGMGLKESAKVSGQHNWIADGNRFLSGQDFISCVKARINALPTKARTGRGRANDRFCRAGCGTLETLNHISQSCFRTHDARIKRHDAVGKHLIMKLKNSNYRVEEEPHFRTSQGLRKPDICATKDDTTFVIDFQIRGDNINLNQANEEKSRYYGTNEELQEKIRNKYGTTNTKNLAITMNWRGVWSQKSAEAAINNNILGRADIKIMSTRALIGTLCAWNIFNKRTDSRRRQNRVGIG

SEQ ID NO: 3795 - protein, 1072 aa, Centruroides sculpturatus
MCQQMQRPARRTTRSSNPTQPPNLIDCRVSITPIPVSPTTLSTAQVQGPQPPPGTPSPPPTIRRCRRRRRPNTPDDQPPPPASSCSSPPATAPPLPTPITAPAIHQPSPPTPSPINQDSHEIADPPGAIPISSTNPIVTQPAPTQSDSQSHPSWVNAWCSRFAAAIDEDMLDAMTDDLVALAHNICEVTPYQPSQRERLSHDITDDARQIQRLYRANRTKAVSVITEGQPLYCRIDSRQVQQHFTNVYASTTHTCGPFPSFLRAAYKPPDCNPLVSPFTPDEVSNRLRRCHNTGPGPDGLRYHHWLRTNPSGAILCSTFNAALRLLHIPQNWRCSNTILIHKKGDQRIIDNWRPIALSNTLGKTFSACLASRFLSWCTVNDIFSGAQKGFLRHEGCLDHSFLLQTITQDARRKLRNCHIAWLDLANAFGSVPHSTILACLNWCGLHHDSIAIIEELLRHNYTNIRTHEGLTESIPINSGVRQGCPLSPLLFNVVIETAIRSVKDLQLGYKLYDEEIGILAYADDLVLISSTTEGLQQQLNRISDWAKWAGLSFKPGKCATLSILGDKHTTGNHTFTLDGHSIDHLQRDGSYNYLGIPTGFSNCSTNESVVTNLMEDITKLDRAKLAPWQKFDAMNSILLPRLTYHLLLGTNPKKRLHTLDKHIKKCAKRWLNLPQRASPEIIHLPYDRGGTNITPCSDLADICQLTHAAHLFDSRDPTVTAIALGSLRSVVRHRIRRTPTDEDIRAYLDGSMEGDLGLPSKDITSIWTRLRAGTRRLRKSINVSWQFTGTTFILTTGDNQIPRQACTKVLTAMVKSALLNHLLQKPDQGKAFQLIAGHPTSNHFLRNGLYTSFADWRFVHRARLSVVPLHGLRRFGTRSKKCRQCSHPNETLAHVLNHCGPNLRLVTQRHNSILDRLRNAINDRGLKILCNQQVPGFDDRCRPDLVTICDRTKTATIIDIAVPFENGRNAFDVARNTKVSKYYALTQHLRQQGYDTYCDAFILGSLGGYDPANIAVIQRLGISRKYANMMTKLMVSDCIKWSREIYCNHLRYGAHSSSHRTITHRRNYVPSH

SEQ ID NO: 3796 - protein, 1141 aa, Centruroides sculpturatus
MAELTVLVPLHPPHGCQLCLPIPRDYADHAGLVKHLKHIHGTTLRFECRACGYTHDKLKAIKAHQLKTDDCRLRIEACSPPPPLPADRKKVCIPTRPRKPYQRRKRRSTDNTPTSQGRPTTSQQTQRPTRRSTRPNNSTQPSNLIDCRVSITPISEPPATLSTAQESQPPPETPSPPPTLRRCRRRHRPSTPTDQPPSPASSCPSPPTAVPPPVSPATTPTICQPPPLTPSPTCQDNQETTDPPGAIPIPSTAPAETLPAPTQTDSQPHPSWVNAWCSRFAAAIDEDMLDAMTDDLVALAHKICDVTPYQPARRERLSHDITDDARQIQRLYRTNRTKAVSIITEGQPLYCRIDSTQIQQHFTNVYASTPHTCGPFPSFLPTAYKPPDCNPLVSPFTPDEVSNRLRRCHNTAPGPDGLRYHHWLHTNPSGAILCSTFNAALRLLYIPLNWRCSNTILIHKKGDQNIIDNWRPIALSNTLGKTFSACLASRFLTWCTVNEIFSGAQKGFLRHEGCLDHSFLLQTITQDARRKLRNCHIAWLDLANAFGSVPHSTILACLNWCGLHHDSIAIIEELLRHNYTNIRTHEGLTESIPINSGVRQGCPLSPLLFNVVIETAIRSVKDLQLGYKLYDEEIGILAYADDLVLISSTADGLQQQLNRISDWAKWAGLSFKPGKCATLSILGDKRTTGNNIFTLDGHPIDHLQRDGSYNYLGIPTGFSNHNTDDNVVTNLMDNITKLDRAKLAPWQKFDAMNSILLPKLTYHLLLGTNPKKRLHALDKHIKKCAKRWLYLPQRASNEIIHLPYDRGGTNITPCSELADICQLTHAAHLFDSRDPTVTAIALGSLRSVVRHRIRRTPTDEDIRAYLDGSMEGDLGLPSKDITSIWTRLRAATRRLRKIINVSWQFTGTTFILTTNDNQIPRQACTKVLTAMVKSALLHHLLQKPDQGKAFQLIAGHPTSNHFLRDGLYTSFADWRFVHRARLSVVPLHGLRRFGTRSKKCRQCSHPNETLAHVLNHCGPNLRLVTQRHNSILNRLRNAINDRGLKILCNQQVPGFDDRCRPDLVTICDRTKTATIVDVAVPFENGRNAFDVARNTKVSKYYALTQHLRQQGYDTYCDAFILGSLGGFDPANIAVIQRLGIS

SEQ ID NO: 3797 - protein, 1064 aa, Centruroides sculpturatus
MPEVTVLVPLQPPHGCELCLPIPRNYIDHAGLVKHLKREHGATLYFECRVCGLVLDKLKTLKAHQLKAINCRTCIESQPPPEPVPKDRKIIRIPTRPRKTYVRRTKRNDTTSADSDEDNTPTTPAPRATNRRVRTSRRRTSNSQEEPQLASTQPASTSHETARQCTSVPPSTLEPTTQTAVPQVSSTPQASISSQLDINSPPETQAPLQATSPIQPTPDLDNNIVPDNLEVASTSPASHQVQRDNDTTRLQPTDYANSPHSCGSYPSFLPTAHKPADDNPLVAAFSPAEVSTRLQRSHNTVPGPDGLRYHHWLRTDPKGIILCSAFNAALRLLHIPSNWRHSNTILIHKRGDQHQIDNWRPIALSNTFGKTFSACLASRFLSWCTTNNIFSGAQKGFLRHEGCLDHSFLLQTIIQDARRTRSNCHIAWLDLANAFGSVPHDTILACLHWCGLHPDSVNVIRELLRDNFTSIRAHDSLTESIPINSGVCQGCPLSPLLFNVVVETAIRSVTELHHGYKLHGEEINILAYADDLVLISSTPDGLQQQLDRLTDWAKWAGLNFKPGKCATLSVLGERHTTSDDTFTLDGQQLPNLQRDESYTYLGIPTGFSNKHTNDSVISNLIEDISKLDRAKLAPWQKFDALNTILLPKLTFHLLLGTNPKKRLHDLDRHIKKCAKRWLNLPQRASPELIHLPYDRGGTNITPCSSLADICQLTHAAHLFDSRDPTVTTIALGTLRNVVRHRIRRVPTDEDIRAFLDGSMEGDIGLPSKDITSSWARLRAATRRLRKTIDISWHYTGTSFVLTTGGNIIPRHACTKVLMAMVKSATLHQLLQKPDQGKSFHLIAGHPTSNHFLRDGLYTSFADWRFVHRARLSVVPLNGLRRFGNMSKKCRQCSHSNETLAHVLNHCGPNLRLATQRHNSVLNRLFHAINNQDLKIYCNQNIPGFDDRCHPDLVTICERTKTATIIDVAVPFENGQNAFNVARDMKISKYSALTQHLRQQGYDIYCDAFIMGSLGGFDPANISVIQRLGISRKYAKMMTKLMVSDCIRWSREIYCNHLRYGRRNH

SEQ ID NO: 3798 - protein, 913 aa, Centruroides sculpturatus
MDSQPTPSWVTAWCDRFSIALDEDMLDKMVDDLVTLAHNICNVSPYRPSLNGDRPSWDITNDTRLIQRLYRRNRTKAVSIITDGQPTYCRIDRSLVQQHFTTIYANSPHSCGSYPSFLPTAHKPADDNPLVAAFSPAEVSTRLQRSHNTAPGPDGLRYHHWLRTDPKGIILCSAFNAALRLLHIPSNWRHSNTILIHKRGDQHQIDNWRPIALSNTFGKTFSACLASRFLSWCTTNNIFSGAQKGFLRHEGCLDHSFLLQTIIQDARRTRSNCHIAWLDLANAFGSVPHDTILACLHWCGLHPDSVNVIRELLRDNFTSIRAHDSLTESIPINSGVCQGCPLSPLLFNVVVETAIRSVTELHHGYKLHGEEINILAYADDLVLISSTPDGLQQQLDRLTDWAKWAGLNFKPGKCATLSVLGERHTTSDDTFTLDGQQLPNLQRDESYTYLGIPTGFSNKHTNDSVISNLIEDISKLDRAKLAPWQKFDALNTILLPKLTFHLLLGTNPKKRLHDLDRHIKKCAKRWLNLPQRASPELIHLPYDRGGTNITPCSSLADICQLTHAAHLFDSRDPTVTTIALGTLRNVVRHRIRRVPTDEDIRAFLDGSMEGDIGLPSKDITSSWARLRAATRRLRKTIDISWHYTGTSFVLTTGGNIIPRHACTKVLMAMVKSATLHQLLQKPDQGKSFHLIAGHPTSNHFLRDGLYTSFADWRFVHRARLSVVPLNGLRRFGNMSKKCRQCSHSNETLAHVLNHCGPNLRLATQRHNSVLNRLFHAINNQDLKIYCNQNIPGFDDRCRPDLVTICERTKTATIIDVAVPFENGQNAFNVARDMKISKYSALTQHLRQQGYDTYCDAFIMGSLGGFDPANISVIQRLGISRKYAKMMTKLMVSDCIRWSREIYCNHLRYGRRNH

SEQ ID NO: 3799 - protein, 1147 aa, Helobdella robusta
MAPVLHKCTFCFNYYKLRPDGKLHRHGRKEKGQECPGSMKAVDQPSAGSTGTSGLAPRAAPVNEGREAARTSASVTEAPMGTDLNAFFDRLTAALRKTPVIDHVPKPCREKVIKELMSLMAAICNEPCDPTHWYRLHCFFPYILKKPARGGRRFNQGNHVNKRLADYSTLEVESIVAGFEIDNTIKPRKNNPNSWIQTAIARIEQGNLSAAVRLVCSLEGLAGDSPETLVRLNAIHPRSPSDRRVFPRAAPVNEGREAARTSASVTEAPMGTDLNAFFDRLTAALRKTPVIDHVPKPCREKVIKELMSLMAAICNEPCDPTHWYRLHCFFPYILKKPARGGRRFNQGNHVNKRLADYSTLEVESIAAGFEIDNTIKPRKNNPNSWIQTAIARIEQGNLSAAVRLVCSPEGLAGDSPETLVRLNAIHPRSPSDRRVFPAPETVNGCVSPTQVLSALKSFRNGSSGGLDCLRPQHIKDLISGPLPIDEFVSSLTQFINIILSGACPSVASRFFFGGRLIALTKKDGGVRPIVVGNFWRRLASKCALILVLEETKAKLYPIQLGVGVKGGAEAAVHAARKLVLDLPDKWGFLKIDFRNAFNTLRRDSMLEAVKRLCPQIYNYCHSAYGRISFLGYNTWVMESSEGVQQGDPLGPMLFALTLHPVLEKSLSKFVCGYLDDISLAAEGAILATDFLSLKDNASIIGLELNIKKCELYANDSFEMPQTLAEVPLVSEASLSFLGTPLMEGEFQNTFFNKKLAELKFALDRVSHLPVHDALTIVRNALSLPRLMYFLRTSFSVDASILGGFDGALRSALSALCNVELTDRGWSQAQLPVRFGGLGLLSVVQLAPIVYKSSAAATLDLQSALLRQSFTNLGTPPASPNRAKHFQARLLEEAYKTTFQFLLSSSPDDATSARLLAASSDASCGWLRSWPNSSVGTRLDDETVRMAIGFRLGLTVHHKYLCRCGAEANELGHHGLVCRLGGGRQLRHSALNDYICRLFSKASIPVLKEPSGISALDGKRPDGCTLIPWRAGRCLAWDVTVPGTLAERYVHLTSKESGLAATRASDEKFKKYEGALPSMDFLPVCIEVLGPMDNNTSIFFKKICKMISGRSGDSRELFFAMNHISCLLQRFLRVCVTENVQLNADVSE

SEQ ID NO: 3800 - protein, 956 aa, Helobdella robusta
MAPVLHKCTFCFNRYKLRPDGKLHRHGGKEKGQECPGSMKAVDQPSAGSTRPSGLAPRAAPVNEGRKAARTSASVTEAPMGTDLNAFFDRLTAALRKTPVIDHVPKPCREKVIKELMSLMAAICNEPCDPTHWYRLHCFFPYILKKPARGGRRFNQGNHVNKRLADYSTLEVESIAAGFEIDNTIKPRKNNPNSWIQTAIARIEQGNLSAAVRLVCSPEGLAGDSPETLVRLNAIHPRSPSDRRVFPAPETVNGCVSPTQVLSALKSFRNGSSGGLDCLRLQHIKDLISGPLPIDEFVSSLTQFINIILSGACPSAASRFFFGGRLIALTKKDGGVRPIVVGNFWRRLASKCALILVLEETKAKLYPIQLGVGVKGGAEAAVHAARKLVLDLPDKWGFLKIDFRNAFNTLRRDSMLEAVKRLCPQIYNYCHSAYGRISSLGYNTWVMESSEGVQQDDPLGPMLFALTLHPVLEKSLSKFVCGYLDDISLAAEGAILATDFLSLKDNASIIGLELNIKKCELYANNSFEMPQTLAEVPLVSEASLSFLGTPLMEGEFQNTFFNKKLAELKFALDRVSHLPVHDALTIVRNALSLPRLMYFLRTSFSVDVSILGGFDGALRSALSALCNVELTDRGWSQAQLPVRFGGLGLLSVVQLAPIVYKSSAAATLDLQSALLRQSFTNLGTLPASPNRAKHFQARLLEEAYKTTFQFLLSSSPDDATSARLLAASSDAGCGWLRSWPNSSVGTRLDDETVRMAIGFRLGLTVHHKYLCRCGAEANELGHHGLVCRLGGGRQLRHSALNDYICRLFSKASIPVLKEPSGFPRWMETSGWLHVDSLESRRCLAWDVTVPGTLAERYVHLTSKESGLAATRASDEKFKKYEGALPSMDFLPVCIEVLGPMDNNTSIFFKKICKMISGRSGDSRELFFAMNHISCLLQRFLRVCVTENVQLNADVSE

SEQ ID NO: 3801 - protein, 954 aa, Helobdella robusta
MAPTLQQCPVCFNHYRSTPDGKLCRHGGKVKGQECSGSRKKVDPSGARAASPLGVAPDPRPGLPTRSSAASVSGDPLGLDYSGVFDKLTAVLKCVPVYDHIPKPCREKFAHDLNALLTAVCNDPGDPAHWVRLHCFVPYVLQKTSRGGRRVNQGNLVNKRLSEYSTIGLETLVLCFDGFNNAKSQKHNPDRWINAVSSCIEQGNLSSAVRLVCSPEGLAESSPATFDKLCSIHPKIPVDRRVFPALTPTAGCVSPAEVLRAVKSFKNGFSGGLDGLRPQHLKDVFSGPLPIDDTLNSVTQFINLILSGACPLSVRRFFFGGRLIALNKKDGGVRPIAVGNVWRRLAGKCALALVVVELKTKFYPTQLGVGIKGGAEAAVHAVRRLVTDLPDQWGFLKLDFKNAFNALRRDSMLEAVKLFCPNIYNFCHSAYGGVSSLGYHSWVVESSEGVQQGDPLGPLLFALTLHPLLEKASSTFVCAYLDDISIASDGPTLADGYEYLKHNSAAIGLELNIKKCELHCQSLFQVPHALAEIPRVGASELSFLGTPLVEGDYQMKFFDQKLSELEFALGRVSCLSAHDALTIIRNALSLPKLMYFLRTSKHIDPSKLGKFDGALRTALSSICNVQVTDSGWSQAQLPVRFGGLGLLSVVQLAPVVYNSSAAATLDLQSSLLHRFFCCRDILPPASAPGDRTHVQILNEEYKKIFQNLLSSCGDDFSTARLLAMSSVASCGWLRSWPNTSVGTRLDDESVRFAIGFRLGLVIQNKYTCRCGAEADEFGHHGLVCRLGGGRQLRHSALNDYICRLFSKASIPVLKEPSGISAHDGRRPDGCTLIPWRAGRCLAWDVTVPGTLAERYVNLTSKECGLAAARAADEKMKKYGSAFPSMEFLPICIEVLGPMDPNTLKFLKEIGKMISVRSGDSRELFFATNHISCLLQRFLRVCVLENIQLNADMCN

SEQ ID NO: 3802 - protein, 954 aa, Helobdella robusta
MAPTLQQCPVCFNHYRSTPDGKLCRHGGKVKGQECSGSRKKVDPSGARAASPLGAAPDPKPGLPTRSSVASVSGDPLGLDYSGVFDKLTAVLKCVPVYDHIPKPYREKFAHDLNALLTAVCNNPGDPAHWVRLHCFVPYVLQKTSRGGRRVNQGNLVNKRLSEYSTIGLETLVLCFDGFNNAKSQKHNPDRWINAVSSCIEQGNLSSAVRLICSPEGMAESSPATFDKLCSIHPKIPVDRRVFPALTPTAGCVSPAEVLRAVKSFKNGSSGGLDGLRPQHLKDVFSGPLPIDDTLNSLTQFINLILSGACPLSVRRFFFGGRLIALNKKDGGVRPIAVGNVWRRLASKCALALVVVELKTKFYPTQLGVGIKGGAEAAVHAVRRLVTDLPDQWGFLKLDFKNAFNALRRDSMLEAVKLFFPNMYNFCHSAYGGVSSLGYHSWVVESSEGVQQGDPLGPLLFALTLHPLLEKASSTFVCAYLDDISIASDGPTLADSYEYLKHNSAAIGLELNIKKCELHCQSLFQVPHALAEIPRVGASELSFLGTPLVEGDYQIKFFDQKLSELEFALGRVSCLSAHDALTIIRNALSLPKLMYFLRTSKHIDPSKLGEFDGALRTALSSISNVQVTDSGWSQAQLPVRFGGLGLLSVVQLAPVVYNSSAAATLDLQSSLLHRFFRCRDILPPASAPGDRTHVQILNEEYKKIFQNLLSSCGDDFSTTRLLAMSSVASCGWLRSWPNTSVGTRLDDESVRFAIGFRLGLVIQNKYTCRCGAEADEFGHHGLVCRLGGGRQLRHSALNDYICRLISKASIPVLKEPSGISVQDGRRPDGCTLIPWRAGRCLAWDVTVLGTLAERYVNLTSKECGLAAARAADEKMKKYGNALPSMEFLPICIEVLGPMDPNTLKFLKEIGKMISVRSGDSRELFFATNHISCLLQRFLRVCVLENIQLNADMCN

SEQ ID NO: 3803 - protein, 954 aa, Helobdella robusta
MAPTLQQCPVCFNHYRSTPDGKLCRHGGKVKGQEYSGSRKKVDPSGARAASPLGAAPDPRPGLPTRSSAASVSGDPLGLDYSGVFDKLTAVLKCVPVYDHIPKPCREKFAHDLNALLTAVCNDPGDPAQWVRLHCFVPYVLQKTSRGGRRVNQGNLVNKRLSEYSTIGLETLVLCFDGFNNAKSQKHNPDRWINAVSSCIEQGNLSSAVRLVCSPEGLAESSPATFDKLCSIHPKIPVDRRVFPALTPTAGCVSPAEVLRAVKSFKNGSSGGLDGLRPQHLKDVFSGPLPIDDTLNSLTQFINLILSGACPLSVRRFFFGGRLIALNKKDGGVRPIAVRNVWRRLAGKCALALVVVELKTKFYPTQLGVGIKGGAEAAVHAVRRLVTDLPDQWGFLKLDFKNAFNALRRDSMLEAVKLFYPNIYNFCHSAYGGVSSLGYHSWVVESSEGVQQGDPLGLLLFALTLHPLLEKASSTFVCAYLDDISIASDGPTLADGYEYLKHNSAAIGLELNIKKCELHCQSLFQVPHALTEIPRVGASELSFLGTPLVEGDYQIKFFDQKLSELEFALGRVSCLSAHDALTIIRNALSLPKLMYFLRTSKHIDPSKLGEFDGALRTALSSICNVQVTDSGWSQAQLPVRFGGLGLLSVVQLAPVVYNSSAAATLDLQFSLLHRFFRCRDILPPASAPGDRTHVQILNEEYKKIFQNLLSSCGDDFSTARLLAMSSVASCGWLRSWPNTSVGTRLDDEFVRFAIGFRLGLVIQNKYTCRCGAEADGFGHHSLVCRLGGGRQLRHSALNDYICRLFSKASIPVLKEPSGISAHDGRRPDGCTLIPWRAGRCLAWDVTVPGTLAERYVNLTSKECGLAAARAADEKMKKYGNALPSMEFLPICIEVLGPMDPNTLKFLKEIGKRISVRSGDSRELFFATNHISCLLQRFLRVCVLENIQLNADMCN

SEQ ID NO: 3804 - protein, 958 aa, Helobdella robusta
MAPVLYQCTVCLNHYKIKPDGKLYRHGGKVKGQECPGSFKAADQPPAGSSASARPPLTAAPVINPHVATRGSSASVSESPSQVDFFHVFDRLTVVLRTAHLYDHVPKPCRDKVSKALSALLTAVCDDPCDAADWCRLQCFFAFVLFKPTRGGRRTNQANYVIKRLAEFSSTEVEFIVASFNTDHNTKPRKHNPNSWISAVTTRIEQGSLSAAVRLACSPAGLAESSPETLAKLKAIHPSAPLNRRTFPAQEPSNGRVSPAQVLTALKSFNNGSSGGLDGLRPQHIKDLLSGPTPTDELLNNLTRFVNLLLSGVCPPVVSRFFFGGRLVALNKKDGGIRPIAVGNFWRRLASKCALALVLEQVKAKLYPIQLGVGVKGGAEAAVHAVRELISALPKQWGFLKIDFKNAFNTLRRDSMLEAVKQHCPQIYNFCHSAYGRVSSLGYDAWVVESCEGVQQGDPLGPMLFALTLHPLLTKSSSAFVCGYLDDVSLAAEGNILADDFLSLRVGASIIGLELNTNKCELLVNDTFQMPHVLANVPTVPHSSLNFLGTPMMAGDHQDRFFNKKLFELRFALERVSLLPVHDALTIIRGALSLPKLMYFLRTSNFVNAAILGEFEGALRVALSAICNVDITDKGWSQAQLPVRFGGLGLLSVVQLAPIVYKSSESATLDLQSALLRQFSSLHCTPPTPIQPTDLSQGNILEEAYKRTFKELLSSSPDSATSARLLAVSSEASCGWLRSLPNTSVGTRLDDETVRTAIGFRLGLAVQSRYTCRCGAEADELGHHGLVCRLGEGRQQRHSAINDFVCRLFCKASIPVLKEPSGIAAHDGKRPDGCTLIPWRAGRCLAWDVTVSGTFAERYVQLTSKESGLAATRASDEKIKKYDGALPSMEFLPICIEVLGPMDRNTSGFFNRICKNISIRSGDSREYFFAMNNISCILQRFLRVCVLENVELNADGVE

SEQ ID NO: 3805 - protein, 879 aa, Periplaneta americana
MSHWKAEFENITTEEDFYSKVDNFSQFLANAITLLPGPKHPARKYYEARQDKRLLNNQRSYEQSSNPERATKRDREKRRSKYMYQLTQFQYFNQRRKAVHSILRQNNQRCTINVNKVHNSFSKNFSVPNNCIRPSYEHVSDTDDLTPTETFSTTITKEEIVAAANKIAVDTSPGPDHVLMRAIRNVVCYEIISLIATRMLSLCEIPPCLTKARTILIYKGGDVTDLGNWRPITICSILRRIIERVLDKRLRKIVTFHEFQRGFTNSPGTLINTSLLNSILKEAKSRKTNTTLVFLDIRKAFDNIGHLHLRNTLSSLNVPSPLAELIAKLQEVNTTQIEVNHRKTEPIVISRGVMQGSPLSPSLYNIATDHILHELTSEELAEEYGFKLVSGLPNVTVLSFADDMVIVGKDSEAAKHIAEIATRRLHEIGLEINAKKSKCISIVNGKLNTSSIYLDSTTEVPALDINETVKYLGVTYNDETVFDSARTMEALRSQLERLTTSPLLQPYQKYNVVSSFICPKLVYPFQTTPPDKLPVKFLKDVDLLIKSSIKDILQLPGDIPDNMLYSDKKFKGLGIFCARWEAYLQHVNSCMKLNMCNNMYINNTRCLMEEAKHCLNNLQIDETEHLTSTSGVINTRKIRTELRQREYNAWCNLPQKGKGVILYSEFTPSNKWITKPDGMTSGEWKEAIKMTANVSAVRAIPGRSQDNHCRRCLSEIETLGHVLGACPYGETLRIHRHHAIRTKLADALRKLKYTVYEEVHGTADNGSNRRIDIIAISESLSQGMIIDPTIRFETYKGQLEDVHGEKRAIYVPNIPYYKDKYQLHDISVTGLMFGARGTIPNFSSQFCKTLGLYKSFLNELALLIIRESVKLLRNHVYGL

SEQ ID NO: 3806 - protein, 1013 aa, Periplaneta americana
MSCKLNSETSPVLTLYNEPNCTQNSSTQDNTQCNSQCTSMPSSTTPCPHCGKFYRGQHGIKIHIARAHPEKHRIAIVERQPNWQNKKHSSNEHNDTTLISSVSPDVILDPITTEKSPVRQTPHNSSSRQLNQYNQEMSHWKAEFENITTEEDFYSKVDNFSQFLANAITLLPGPKHPARKYYEARQDKRLLNNQRSYEQSSNPERATKRDREKRRSKYMYQLTQFQYFNQRRKAVHSILRQNNQRCTINVNKVHNSFSKNFSVPNNCIRPSYEHVSDTDDLTPTETFSTTITKEEIVAAANKIAVDTSPGPDHVLMRAIRNVVCYEIISLIATRMLSLCEIPPCLTKARTILIYKGGDVTDLGNWRPITICSILRRIIERVLDKRLRKIVTFHEFQRGFTNSPGTLINTSLLNSILKEAKSRKTNTTLVFLDIRKAFDNIGHLHLRNTLSSLNVPSPLAELIAKLQEVNTTQIEVNHRKTEPIVISRGVMQGSPLSPSLYNIATDHILHELTSEELAEEYGFKLVSGLPNVTVLSFADDMVIVGKDSEAAKHIAEIATRRLHEIGLEINAKKSKCISIVNGKLNTSSIYLDSTTEVPALDINETVKYLGVTYNDETVFDSARTMEALRSQLERLTTSPLLQPYQKYNVVSSFICPKLVYPFQTTPPDKLPVKFLKDVDLLIKSSIKDILQLPGDIPDNMLYSDKKFKGLGIFCARWEAYLQHVNSCMKLNMCNNMYINNTRCLMEEAKHCLNNLQIDETEHLTSTSGVINTRKIRTELRQREYNAWCNLPQKGKGVILYSEFTPSNKWITKPDGMTSGEWKEAIKMTANVSAVRAIPGRSQDNHCRRCLSEIETLGHVLGACPYGETLRIHRHHAIRTKLADALRTPKYTVYVHGTADNGINRRIDIIAISESLSQGMIIDPTIRFERYKGQPEDVHEEKRAIYVPTIPYYKDKYQLHDISVTGLMFGARGTIPNFSSQFCKTLGLHKSFLNELALLIIKESVKLLRNHVYGL

SEQ ID NO: 3807 - protein, 877 aa, Periplaneta americana
MSHWKAEFENITTEEDFYSKVDNFSQFLANAITLLPGPKHPARKYYEARQDKRLLNNQRSYEQSSNPERATKRDREKRRSKYMYQLTQFQYFNQRRKAVHSILRQNNQRCTINVNKVHNSFSKNFSVPNNCIRPSYEHVSDTDDLTPTETFSTTITKEEIVAAANKIAVDTSPGPDHVLMRAIRNVVCYEIISLIATRMLSLCEIPPCLTKARTILIYKGGDVTDLGNWRPITICSILRRIIERVLDKRLRKIVTFHEFQRGFTNSPGTLINTSLLNSILKEAKSRKTNTTLVFLDIRKAFDNIGHLHLRNTLSSLNVPSPLAELIAKLQEVNTTQIEVNHRKTEPIVISRGVMQGSPLSPSLYNIATDHILHELTSEELAEEYGFKLVSGLPNVTVLSFADDMVIVGKDSEAAKHIAEIATRRLHEIGLEINAKKSKCISIVNGKLNTSSIYLDSTTEVPALDINETVKYLGVTYNDETVFDSARTMEALRSQLERLTTSPLLQPYQKYNVVSSFICPKLVYPFQTTPPDKLPVKFLKDVDLLIKSSIKDILQLPGDIPDNMLYSDKKFKGLGIFCARWEAYLQHVNSCMKLNMCNNMYINNTRCLMEEAKHCLNNLQIDETEHLTSTSGVINTRKIRTELRQREYNAWCNLPQKGKGVILYSEFTPSNKWITKPDGMTSGEWKEAIKMTANVSAVRAIPGRSQDNHCRRCLSEIETLGHVLGACPYGETLRIHRHHAIRTKLADALRKLKYTVYEEVHGTADNGSNRRIDIIAISESLSQGMIIDPTIRSETYKGQPEDVHEEKRYVPTIPYYKDKYQLHDISVTELMFGARGTIPNFSSQFCKTLELHKSFLNELALLIIRESVKLLRNHVYGL

SEQ ID NO: 3808 - protein, 1115 aa, Schmidtea mediterranea
MERFPDSILLKYFNNLSLSADFVLLGFTMCTAILDDCTHYLNEHLNYKCLQNAKVVFAIFAPPKSRETLMVIDYNTDEHYFLDPTTLDVSLNYTFICKVLVTKINEIRNSRGCAIRPGKCPHDVRGSGLLSKILICAFINNYAHDMSLENINLREIARIINSVLPIVSEINNKDKEKILTKAKETIKFDLQHCKNKVFELIISFENSDVNQIVERIIRQIPHLNNFTEIKSHEPYLGSKQNSNIISKYKSRSEFLINMKLTFYKIINDLPFTVRPEIQDILNQFSHEDPVSNSWNKILKDCRSTTNVLNLVDILPFEVIYELKRADNTSPGIDGIQYKDLALLDPEGILLSLLFNKIISSKIISTSWKTFKTILIPKPDKTDNYDKVSSWRPIALLSVIYKVFASILTTRLTAWVICNDILHIGQKGGSVHEGCVEHNSILSSALEHSKYSKNSPLAIAWLDIKDAFESVPHDYLWSVLKTIGVSEEFITIVKLLYTDTQSFYSCGPIVTPNLSIKKGVKQGCPLSMILFSIAINPVLEAISRSCIEPFMIGDSPVQVLAYADDIALVANNVENLQKIVDVAVEAATEIGFEYRPEKCGYMQLPRVNINGEILINEKEIKKLLSKEFYQYLGVPVGEDNDQSPYAILDKVVSDTKNIADSGLFGWQKLKAYKIFIHSRLTFAFRTCEIKTMALSASQGNTNSCDNNTSKLRGHLRRILNLPHNSETVYLYNLTENGGASCVDLLDEYHTQTIVHFFRLFTSNCYYSRKVNIDSLKFVTGPRLGIKEPTLQQSFYWINGAETKLNHGGRKTRFQHARTSIIYFKREHSISVSFHIVKEQVFLYLITKSHGTSILTTKFRKAISKIFHSALYDSYMQKWQLSNKSDMIAAAIKLSPQINKVIFKSKLGEFAWNFIHRARTNTRNINAKPNRKGDSRLCRRCEKEDETMSHALQSCKIHQILTLERHNECIKIITNNLKNPNFIIVVDHSCSLVLNSKQRVDLIITDTERKRIFMIDIKCPLDSVSHFELTDKANIEKYSLLQSELQVAKPDYQVELYTCIIGALGSIPPSTYDLICKLGIEPLQTEGLLKECAMINILHSAKIWYYHVHGILPDFCN

SEQ ID NO: 3809 - protein, 1087 aa, Schmidtea mediterranea
MCTAILDDCTHYLNEHLNYKCLQNAKVVFAIFAPPKSRETLVVIDYNTDEHYFLDPTTLDVSLNYTFICKVLVTKINEIRNSRGCAIRAGKCPHDVRGSGLLSKILICAFINNYAHDMSLENINLREIARIINSVLPIVSEINNKDKEKILTKAKETIKFDLQQRKNKVFELIISFENADVNQIVESIIRQIPHLNNFTEIKSHEPYLGSKQNSNIISKYKSRSEFLINMKLTFYKIINDLPVTVRPEIQDILNQFSHEDPVSNSWNKILKDCRSTTNVLNLVDILPFEVIYELKRADNTSPGIDGIQYKDLALLDPEGILLSFLFNKIISSKIIPTSWKTFKTILIPKPDKTDNYDKVSSWRPIALLSVIYKVFASILTTRLTSWVICNDILHIGQKGGSFHEGCVEHNSILSSALEHSKYSKNSPLAIAWLDIKDAFGSVPHDYLWSVLKTIGVSEEFITIVKLLYTDTQSFYSCGPIVTPNLSIKKGVKQGCPLSMILFSIAINPVLEAISRSCIEPFMIGDLPVQVLAYADDIALVANNVENLQKIVDVAVEAATEIGFEYRPEKCGYMQLPRVNINSEILINEKEIKKLLSKEFYQYLGVPVGEDNDQSPYAILDKVVSDTKKIADSGLFGWQKLKAYKIFIHSRLIFAFRTREIKTMALSASQGNTNPCGNNSSKLRGHLRRILNLPHNSETVYLYNSTENGGASCVDLLDEYHTQTIVHFFRLFTSNCDYSRKVNIDSLKFVTGPRLGIKEPTLQQSFDWINGAETKLNHGGRKTRFQRARTSIIYFKREHSISVSFHIVKEQVFLYLITKSHGTFILTTKFRKAISKIFHSALYDSYMQKWQLSNKSDMIAAAIKLSPQINKAIFKSKLGEFAWNFIHRARTNTLNINAKPNRKGDSRLCRRCEKEDETMSHALQSCKIHQILTLERHNDCIKIITNNLKNPNFIVVVDHSCSLVLNSKQRVDLIITDTERKRIFMIDIKCPMDSVSHFELTDKANIEKYSLLQSELQVAKPDYQVELYTCIIGALGSIPPSTYDLICKLGIEPLQTEGLLKECAMSNILHSAKIWYYHVHGILPDFCN

SEQ ID NO: 3810 - protein, 858 aa, Schmidtea mediterranea
MKLTFYKIINDLPVTVRPEIQDILNQFSHEDPVSNSWNKILKDCRSTTNLLNLVDILPFEVIYELKRADNTSPGIDGIQYKDLALLDPEGILLSFLFNKIISSKTIPTSWKTFKTILIPKPDKTDNYDKVSSWRPIALLSVIYKVFASILTTRLTSWVICNDILHIRQKAGSVHEGCVEHNSILSFALEHSKYSKNSPLAIAWLDIKDAFGSVPHDYLWSVLKTIGVSEEFITIVKLLYTDTQSFYSCGPIVTPNLSIKKGVKQGCPLSMILFSIAINPVLEAISRSCIEPFMIGDLPVQVLAYADDIALVANNVENLQKIVDIAVEAATEIGFEYRPKKCGYMQLPRVNINGEILINEKEIKKLLSKEFYQYLGVPVGEDNDQSPYAIVDKVVSDTKKIADSGLFGWQKLKAYKIFIHSRLTFAFRTREIKTSALSAFQGNTNPCGNNSSKLRGHLRRILNLPHNSETVYLYNSTENGGASCVDLLDEYHTQTIVHFFRLFTSNCDYSRKVNIDSLKFVTGPRLGIKEPTLLQSFDWINGAETKLNHGGRKTRFQRVRTSIIYFKREHSISVSFHIVKEHVFLYLITKSHGTFILTTKFRKAISKIFHSALYDSYMQKWQLSNKSDMIAAAIKLSPQINKAIFKSKLGEFAWNFIHRARTNTLNINAKPNRKGDSRLCRRCEKEDETMSHALQSCKIHQILTLERHNDCIKVITNNLKNPNFIVVVDHSCSLVLNSKQRVDLIITDTERKRIFMIDIKCPMDSVSHFELTDKANIEKYSLLQSELQVAKPDYRVELYTCIIGALGSIPPSTFDLICKLGIEPLQTEGLLKECAMSNVLHSAKIWYYHVHGILPDFCN

SEQ ID NO: 3811 - protein, 1319 aa, Schmidtea mediterranea
MGINFKKAIALTLEKQKRNINNSINIKPKFQKSCVSFLLSKWFKSNTNILVLSPDLTINLIAQNNNYIFENVNFRQFKDVQHVISIIPNENYWCLLLYSTRRMTCNIFDFRKTDISDRLTEIGGNFTDYLNSFFLSMKIKFQINHGILHRCFISDDPTFHATAFIVFLEKLILDRDFQHDKIYKLLDDIKTKECVEISLNLNLINGKITDSILIKYFNNLSFSTDFVLLGFTMCTAILDDCTHYLNEHLNYKCLQNAKVVFAIFAPPKSRETLMVIDYYTDEHYFLDPTTLDVSLNYTFICKVLVTKINEIRNSRGCAIRAGKCPHDVRGSGLLSKILICAFINNYAHDMSLENINLREIARIINSVLPIVSEINNKDKEKILTKAKETIKFDLQQRKNKVFELIISFENADVNQIVESIIRQIPHLNNFTEIKSHEPYLGSKQNSNIISKYKSRSEFLINMKLTFYKIINDLPVTVRPEIQDILNQFSHEDPVSNSWNKILKDCRSTTNVLNLVDNLPFEVIYELKRADNTSPGIDGIQYKDLALLDPEGILLSFLFNKIISSKIIPTSWKTFKTILIPKPDKTDNYDKVSSWRPIALLSVIYKVFASILTTRLTSWVICNDILHIGQKGGSFHEGCVEHNSILSSALEHSKYSKNSPLAIAWLDIKDAFGSVPHDYLWSVLKTIGVSEEFITIVKLLYTDTQSFYSCGPIVTPNLSIKKGVKQGCPLSMILFSIAINPVLEAISRSCIKPFMIGDLPVQVLAYADDIALVANNVENLQKIVDVAVKAATEIGFEYRPEKCGYMQLPRVNINSEILINEKEIKKLLSKEFYQYLGVPVGEDNDQSPYAILDKVVSDTKQIADSGLFGWQKLKAYKIFIHSRLTFAFRTREIKTMALSASQGNTNPCGNNSSKLRGHLRRILNLPHNSKTVYLYNSTENGGASCVDLLDEYHTQTIVHFFRLFTSNCDYSRKVNIDSLKFVTGPRLGIKEPTLQQSFDWINGAETKLNHGGRKTRFQRARTSIIYFKREHSISVSFHIVKEQVFLYLITKSHGTFIVTTKLRKAISKIFHSALYDSYMQKWQLSNKSDMIAAAIKLSPQINKAIFKSKLGEFAWNFIHRARTNTLNINAKPNRKGDSRLCRRCEKEDETMSHALQSCKIHQILTLERHNDCIKIITNNLKNPNFIVVVDHSCSLVLNSKQRVDLIITDTERKRIFMIDIKCPMDSVSHFELTDKANIEKYSLLQSELQVAKPDYQVELYTCIIGALGSIPPSTYDLICKLGIEPLQTEGLLKECAMSNILHSAKIWYYHVHGILPDFCN

SEQ ID NO: 3812 - protein, 1217 aa, Schmidtea mediterranea
MTCNIFDFRKTDISDRLTEIGGNFTDYLNSFFLSMKIKFQINHGILHRCFISDDPTFHATAFIVFLEKLILDRDFQHDKIYKLLDDINTKQCVEISLNLNLINGKITDSILIKYFNNLSLSTDFVLLGFTMCTAILDDCTHYLNEHLNYKCLQNAKVVFAIFAPPKSRETLMVIDYNTDEHYFLDPTTLDVSLNYTFICKVLVTKINQIRNSRGCAIRAGKCPHDVRGSGLLSKILICAFINNYAHDMSLENINLREIARIINSVLPIVSEINNKDKEKILTKAKETIKFDLQQRKNKVFELIISFENADVNQIVESIILQIPHLNNFTEIKSHEPYLGSKQNSNIISKYKSRSEFLINMKLTFYKIINDLPVTVRPEIQDILNQFSHENPVSNSWNKILKGCRSTTNVLNLVDILPFEVIYELKRADNTSPGIDGIQYKDLALLDPEGILLSFLFNKIISSKIIPTSWKTFKTILIPKPDKTDNYDKVSSWRPIALLSVIYKVFASILTTRLTSWVICNDILHIGQKGGSVHEGCVEHNSILSSALEHSKYSKNSPLAIAWLDIKDAFGSVPHHYLWSVLKTIGVSEEFITIVKLLYTDTQSFYSCGPIVTPNLSIKKGVKQGCPLSMILFSIAINPVLEAISRSCIEPFMIGDLPVQVLAYADDIALVANNVENLQKIVDVAVEAATEIGFEYRPEKCGYMQLPRVNINGEILINEKEIKKLLSKEFYQYLGVPVGEDNDQSPYAILDKVVSDTKKIADSGLFGWQKLKAYKIFIHSRLTFAFRTREIKTMALSASQGNTNPCGNNSSKLRGHLRRILNLPHNSETVYLYNSTENGGASCVDLLDEYHTQTIVHFFRLFTSNCDYSRKVNIDSLKFVTGPRLGIKEPTLQQSFDWINGAETKLNHGGRKTRFQRARTSIIYFKREHSISVSFHIVKEQVFLYLITKSHGTFILTTKFRKAISKIFHSALYDSYMQKWQLSNKSDMIAAAIKLSPQINKAIFKSKLGEFAWNFIHRARTNTLNINAKPNRKGDSRLCRRCEKEDETMSHALQSCKIHQILTLERHNDCIKIITNNLKNPNFIVVVDHSCSLVLNSKQRVDLIITDTERKRIFMIDIKCPMDSVSHFELTDKANIEKYSLLQSELQVAKPDYQVELYTCIIGALGSIPPSTYDLICKLGIEPLQTEGLLKECAMSNILHSAKIWYYHVHGILPDFCN

SEQ ID NO: 3813 - protein, 1087 aa, Schmidtea mediterranea
MCTAILDDCTHYLNEHLNYKCLQNAKVVFAIFAPPKSRETLMVIDYNTDEHYFLDPTTLDVSLNYTFICKVLVTKINEIRNSRGCAIRAGKCPHDVRGSGLLSKILICAFINNYAHDMYLENINLREIARIINSVLPIVSEINNKDKEKTLTKAKETIKFDLQQRKNKIFELIISFENADVNQIVESIIRQIPHLNNFTEIKSHEPYLGSKQNPNIISKYKSRSEFLINMKLTFYKIINDLPVTVRPEIQDILNQFSHEDPVSNSWNKILKDCRSTTNVLNLVDILPFEVIYELKRADNTLPGIDGIQYKDLALLDPEGILLSFLFNKIISSKIIPTSWKTFKTILIPKPDKTDNYDKVSSWRPIALLSVIYKVFASILTTRLTSWVICNDILHIGQKGGSVHEGCVEHNSILSSALEHSKYSKNSPLAIAWLDIKDAFGSVPHDYLWSVLKTIGVSGEFITIVKLLYTDTQSFYSCGPIVTPNLSIKKGVKQGCPLSMILFSIAINPVLEAISRSCIEPFMIGDSPVQVLAYADDIALVANNVENLQKIVDVAVEAATEIGFEYRPEKCGYMQLPRVNINGEILINEKEIKKLLSKEFYQYLGVPVGEDNDQSPYAILDKVVSDTKKIADSGLFGWQKLKAYKIFIHSRLTFAFRTREIKTMALSASQGNTNSCGNNSSKLHGHLRRILNLPHNSETVYLYNSTENGGASCVDLLDEYHTQTIVHFFRLFTSNCDYSRKVNIDSLKFVTDPRLGIKEPTLQQSFDWINGAETKLNHGGRKTKFQRARTSIIYFKREHSISVSFHIVKEQVFLYLITKSHGTFILTTKFRKAISKIFHSELFDSYMQKWQLSNKSDMIAAAIKLSPQINKAIFKSKLGEFAWNFIHRARTNTLNINAKPNRKGDSRLCRRCEKEDETMSHALQSCKIHQILTLERHNDCIKIITNNLKNPNFIVVVDHSCSLVLNSKQRVDLIITDTERKRIFMIDIKCPMDSVSHFELTDKANIEKYSLLQSELQVAKPDYQVELYTCIIGALGSIPPSTYDLICKLGIEPLQTEGLLKECAMSNILHSAKIWYYHVHGILPDFCN

SEQ ID NO: 3814 - protein, 1217 aa, Schmidtea mediterranea
MTCNIFDFRKTDISDRLTEIGGNFTDYLNSFFLSMKIKFQINHGILHRCFISDDPTFHATAFIVFLEKLILDRDFQHDKIYKLLDDINTKQCVEISLNLNLINGKITDSILIKYFNNLSFSTDFVLLGFTMCTAILDDFTHYLNEHLNYKCLQNAKVVFAIFVPPKSRETLMVIDYNTDEHYFLDPTTLDVSLNYTFICKVLVTKINEIRNSRGGAIRAGKCPHDVRGSGLLSKILICAFINNYAHDMSLENINLREIARIINSVLPIVSEINNKDKEKILTKAKETIKFDLQQRKNKVFELIISFENADVNQIVESIIRQIPHLNNFTEIKSHEPYLGSKQNSNIISKYKSRSEFLINMKLTFYKIINDLPVTVRPEIQDILNQFSHEDPVSNSWNKILKDCRSTTNVLNLVDILPFEVIYELKRADNTSPGIDGIQYKDLALLDPECILLSFLFNKIISSKIIPTSWKTFKTILIPKHDKTDNYDKVSSWRPIALLSVIYKVFASILTTRLTSWVICNDILHIGQKGGSVHEGCVEHNSILSSALEHSKYSKNSPLAIAWLDIKDAFGSVPHEYLWSVLKTIGVSEEFITIVKLLYTDTQSFYSCGPILTPNLSIKKGVKQGCPLSMILFSIAINPVLEAISRSCIEPFMIGDLPVQVLAYADDIALVANNVENLQKIVDVAVEAATEIGFEYRPEKCGYMQLPRVNINGEILINEKEIKKLLSKEFYQYLGVPVGEDNDQSPYAILDKVVSDTKKIADSGLFGWQKLKAYKIFIHSRLTFAFRTREIKTMALSASQGNTNPCGNNSSKLRGHLRRILNLPHNSETVYLYNSTENGGASCVDLLDEYHIQTIVHFFRLFTSNCDYSRKVNIDSLKFVTGPRLGIKEPTLQQSFDWINGAETKLNHGGRKTRFQRARTSIIYFKREHSISVSFHIVKEQVFLYLITKSHGTFILTTKFRKAISKIFHSALYDSYMQKWQLSNKSDMIAAAIKLSPQINKAIFKSKLGEFAWNFIHRARTNTLNINAKPNTKGDSRLCRRCEKEDETMSHALQSCKIHQILTLERHNDCIKIITNNLKNPNFIVVVDHSCSLVLNSKQRVDLIITDTERKRIFMIDIKCPMDSVSHFELTDKANIEKYSLLQSELQVAKPDYQVELYTCIIGALGSIPPSTYDLICKIGIEPLQTEGLLKECAMSNILHSAKIWYYHVHGILPDFCN

SEQ ID NO: 3815 - protein, 858 aa, Schmidtea mediterranea
MKLTFYKIINDLPVTDSPEIQNILNQFSHEDPVSKSWNKILKDCRSTTNVLNLVDILPFEVIYELKRANNTSPGIDGIQYEDLALLDPEGILLSFLFNKIISSKIIPTSWKTVTTILIPKPDKTDNYDKVSSWRPIALLSVIYKVFASILTTRLTSLVICNDILHIGEKGGYVHEGCIEHNSILSSALEHSKYSKDSPLAIAWLDIKNAFGSVPHDYLWNVLKTIDVSGEFITVVKLLYTDTQSLNSCGPIVTSNLSIKKGVKQGCPLSMILFSIAINPVLEAISRSCIEPFMIDNSPVQVLAYADDIALVANNVDNLQKSVDVAVKAATEIGFEYRPEKCGYMQLPRVNINGEILINEKEIRKLLSKEFYQYLGVPVGEDNDQSPYAILDKVVSDIKKIADSGLFGWQKLKAYKIFIHSQLTFAFRTREIKISALSTSQGNTNPCGNNSSKLRGHLKRILNLPHNSETVYLYNSTENGGASCVDLLDEYHTQTILHFFRLFISNCDYSRNVNIDSLKFVTGPRLGIKDPTLQQSFDWINGAETKLNHGGKKTRFQPACTSIIYFKREHSISVSFHIVKEKVFLYLITKSNGTFIRTTKSRKAISKILHSALYDSYMQKWQLSNKSDMIAAAIKLSPQINKAIFKSKLGGFGWNFIHRARTNTLNINAKPNRKGDSRLCRRCEKEDETMFHALQSCKIHQILTLERHNDCLKIITNNLKNPNFIIVVDHSCSLVLNSKQRVDLIITDTERKRIFMIDIKCPMDSVSHFDLTDKANIEKYSLLQSELQVAKPDYQVELYTCIIGALDSIHPSTYDLICKLGIEPLQTEGLLKECAMSNILHSAKMLYYHVHGILPDFCN

SEQ ID NO: 3816 - protein, 1243 aa, Schmidtea mediterranea
MGINFKKAIALTLEKQKRNINNSINIKPKFQKSCVSFLLSKLFKSNTNILVLSPDLTINLIAQNNNYIIENVNFRQFKDVQHVISIIPNENYWCLLLYSIRRMTCNIFDFRKTDISDILTEIGGNFTDYLNSFFLSMKIKFQINHGILHRCFISDDPTFHASAFIVFLEKLILDRDFQHDKIYKLLDDINTKKCVEISLNLNLINGKITDSILIKYFNNLSLSTDFVLLGFTMCTAILDDCTHYLNEHLNYKCLQNARVVFGIFAPPKSRETLMVIDYNTDEHYFLDPTTLDVSLNYTFICKVLVTKINEIRNSRGCTIRAGKCPHDVRGSGLLSKILICAFINNYAHDMSLENINLREIARIINSGLPIVSEINNKEKEKTLTKAKETIKFDLQQRKNKVFELIISFENADVNQIVESIIRQIPHLNNFTEIKSHEPYLGSKQNPNIISKYKSRSEFLINMKLTFYKIINDLPVTVRPEIQDILNQFSHEDPVSNSWNKILKDCRSTTNVLNLVDILPFEVIYELKRGDNTSPGIDGIQYKDLALLDPEGILLSFLFNKIISSKIIPTSWKTFKTILIPKPDKTDNYDKVSSWRPIALLSVIYKVFASILTTRLTSWVICNDILHIGQKGGSVHEGCVEHNSILSSALEHSKYSKNSPLAIAWLDIKDAFGSVPHDYLWSVLKTIGVSGEFITIVKLLYTDTQSFYSCGPIVTPNLSIKKGVKQGCPLSMILFSIAINPVLEAISRSCIEPFMIGDSPVQVLAYADDIALVANNVENLQTIVDVVVEAATEIGFEYRPEKCGYMQLPRVNINGEILINEKEIKKLLSKIFYQYLGVPVDEDNDKSPYAILDKVVSDTKKIADSGLFGWQKLKAYKIFIHSRLTFAFRTREIKTMALSASQGNTNSCGINSSKLRGHLRRILNLPHNSETVYLYNSTENGGASCVDLLDEYHTQTIVHFFRIFTSNCDYSRKVNIDSLKFVTGPRLGIKEHTLQQSFDWINGAETKLNHGGRKTRFQRARTLIIYFKREHSISVSFHIVKEQVFLYLITKSHGTFILTTKFRKAISKIFHSALFDSYMQKWQLSNKSDMIAAAIKLSPQINKAIFKSKLGEFAWNFIHRARTNTLNINAKPNRKGDSRLCRRCEKEDETMSHALQSCKIHQILTLERHNDCIKIITNNLKNPNFIVVVDHYCSLVLNSKQRVDLIITDTERKRIFMIEIKCPMDSVSHFELTDKANIEKYSLL

SEQ ID NO: 3817 - protein, 1339 aa, Schmidtea mediterranea
MIFKFLAQTKYPKLSVGTILKIINFKKAIELTLEKQKRNINNSINIKPKFQKSCVSFLLSKWFKSNTNILVLSPDLTINLIAQNNNYIIENVNFRQFKDVQHVISIIPNENYWCLLLYSTRRMTCNIFDFRKTDISDRLTEIGGNFTDYLNSFFLSMKIKFQINHGILHRCFISDDPTFHATAFIVFLEKLILDRDFQHYKIYKLLDDINTKECVEISLNLNLINGNITNSILIKYFNNLSLSTDFVLLGFTMCTAIFDDCTHYLNEHLNYKCLQNAKVVFAIFAPPKFPETLMVIDYNTDEHYFLDPTTLDVSLNYTFICKVLVTKINEIRNSRGCAIRAGKCPHNVRGSGLLSKILICAFINNYAHDMSLENINLREIARIINSVLPIVSEINNKDKEKILTKAKETIKFDLQQRKNKVFELIISFENADVNQIVESIIRQIPHLNNFTEIKSHEPYLGSEQNSNIISKYKSRSEFLINMKLTFYKIINDLPVTVRPEIQDILKQFSHEDPISNSWNKILKDCRSTTNVLNLVDILPFEVIYELKRADNTTPGIDGIQYKDLGLLDPEGILLSFLFNKIISSKIIPTSWKTFKTILIPKPDKTDNYDKVSSWRPIALLSVIYKVFASILTTSLTSWVICNDILHIGQKGGSVHEGCVEHNSILSSALEHSKYSKNSPLAIAWLDIKDAFGSVPHDYLWSVLKTIGVSEEFITIVKLLYTDTQSFYSCGPIVTHNLSIKKGVKQGCSLSMILFSIAINPVLEAISRSCIEPFMIGDSPVQVLAYADDIALVANNVENLQKIVDVAVEAATEIGFEYRPEKCGYMQLPRVNINSEILINEKEIKKLLSKEFYQYLGVPVGEDNDQSPYAILDKVVSDRKKIADSGLFGWQKLKAYKIFIHSRLTFAFRTREIKAMALSASQGNTNSCGNNSSKLRGHLRRILSLPHNSETVYLYNSTENGGASCVDLLDEYHTQTIVHFFRLFTSNCDYSRKVNIDSLKFVTGPRLGIKDPTLQQSFDWINGAETKLNHGGRKTRFQRARTSIIYFKREHSISVSFHIVKEQVFLYLITKSHGTFILTTKFRKAISKIFHSALFDSYMQKRQLCNKSDMIAAAIKLSPQINKAIFKSKLGEFAWNFIHRALTNTLNINAKPNRKGDSRLCRRCEKEDETMSHALQSCKVHQILTLERHNDCIKIITNNLKNPNFIVVVDHSCFLVLNSKQRVDLIITDTERKRIFMIDIKCPMDSVSHFELTDKANIEKYSLLLSELQVAKPDYQVELYTCIIGALWSIPPSTYDLICKLGIEPFQTEGLLKECAMSNILHSAKIWYYHVHGILQDFCN

SEQ ID NO: 3818 - protein, 1319 aa, Schmidtea mediterranea
MGINFKKAIALTLEKQKRNINNSINIKPKFQKSCVSFLLSKWFKSNTNILVLSPDLTINLIAQNNNYIIENVIFRQFKDVQHVISIIPNENYWCLLLYSTRRMTCNIFDFRKTDISDRLTEIGGNFTDYLNSFFLSMKIKFQINHGILHRCFISDDPTFHATAFIVFLEKLILDRDFQHDKIYKLLDDINTKECVEISLNLNLINGKITDSILIKYFNNLSLSTDFVLLGFTMCTAILDDCTHYLNEHLNYKCLQNAKVVIAIFAPPKSRETLMVIDYNTDEHYFLDPTTLDVSLNYTFICKVLVTKINEIRNSRGCAIRAGKCPHDVRGSGLLSKILICAFINNYAHDMSLENINLREIARIINSVLPIVSEINNKDKEKILTKAKETIKFDLQQRKNKIFELIISFENADVNQIVESIIRQIPHLNNFTEIKSHEPYLGSKQNSNIISKYKSRSEFLINMKLTFYKIINDLPVTVRPEIQDILNQFSHEDPVSNSWNKILKDCRSRTNVLNLVDILPFEVIYELKRADNTSPGIDGIQYKDLALLDPEGILLSFLFNKIISSKIIPTSWKTFKTILFPKPDKTDNYDKVSSWRPIALLSVIYKVFASILTTRLTSWVICNDIFHIGQKGGSVHEGCVEHNSILSSALEHSKYSKNSPLAIAWLDIKDAFGSVPHHYLWSVLKTIGVSEEFITIVKLLYTDTQSFYSCGPILTPNLSIKKGVKQGCPLSMILFSIAINPVLEAISRSYIEPFMIGDLPVQVLAYADGIALVANNVENLQKIVDVAVKAATEIGFEYRPEKCGYMQLPRVNINGEILINEKEIKKLLSKEFYQYLGVPVGEDNDQSPYAILDKVVSDTKKIADSGLFGWQKLKAYKIFIHSRLTFAFRTREIKTMALSASQGNTNPCGNNSSKLRGHLRRILNLPHNSETVYLYNSTENGGASCVDLLDEYHTQTIVHFFRLFTSNCDYSRKVNIDSLKFVTGPRLGIKEPTLQQSFDWINGAETKLNHGGRKTRFQRARTSIIYFKREHSISVSFHIVKEQVFLYLITKSHGTFILTTKFRKAISKIFHSALYDSYMQKWQLSNKSDVIAAAIKLSPQINKAIFKSKLGEFAWNFIHRARTNTLNINAKPNRKGDSRLCRRCEKEDETMSHALQSCKIHQILTLERHNDCIKIITNNLKNPNFIVVVDHSCSLVLNSKQRVDLIITDTERKRIFMIDIKCPMDSVSHFELTDKANIEKYSLLQSELQVAKPDYQVELYTCIIGALGSIPPSTYDLICKLGIEPLQTEGLLKECAMSNILHSAKIWYYHVHGILADFCN

SEQ ID NO: 3819 - protein, 1319 aa, Schmidtea mediterranea
MGINFKKAIALTLEKQKRNINNSINIKPKFQKSCVSFLLSKWFKSNTNILVLSPDLTINLIAQNNNYIFENVNFRQFKDVQHVISIIPNENYWCLLLYSTSRMTCNIFDFRKTDISDRLTEIGGNFTDYLNSFFLSMKIKFQINHGILHRCFISDDPTFHATAFIVFLEKLILDRDFQHDKIYKLLDDINTKECVEISLNLNLINGKITDSILIKYFNNLSFSTDFVLLGFTMCTAILDDCTHYLNEHLNYKCLQNAKVVFAIFAPPKSRETLVVIDYNTDEHYFLDPTTLDVSLNYTFICKVLVTKINEIRNSRGCAIRAGKCPHDVRGSGLLSKILICAFINNYAHDMSLENINLREIARIINSVLPIVSEINNKDKEKILTKAKETIKFDLQQRKNKVFELIISFENADVNQIVESIIRQIPHLNNFTEIKSHEPYLGSKQNSNIISKYKSRSEFLINMKLTFYKIINDLPVTVRPEIQDILNQFSHEDPVSNSWNKILKDCRSTTNVLNLVDILPFEVIYELKRADNTSPGIDGIQYKDLALLDPEGILLSFLFNKIISSKIIPTSWKTFKTILIPKPDKTDNYDKVSSWRPIALLSVIYKVFASILTTRLTSWVICNDILHIGQKGGSFHEGCVEHNSILSSALEHSKYSKNSPLAIAWLDIKDAFGSVPHDYLWSVLKTIGVSEEFITIVKLLYTDTQSFYSCGPIVTPNLSIKKGVKQGCPLSMILFSIAINPVLEAISRSCIEPFMIGDLPVQVLAYADDIALVANNVENLQKIVDVAVEAATEIGFEYRPEKCGYMQLPRVNINSEILINEKEIKKLLSKEFYQYLGVPVGEDNDQSPYAILDKVVSDTKKIADSGLFGWQKLKAYKIFIHSRLIFAFRTREIKTMALSASQGNTNPCGNNSSKLRGHLRRILNLPHNSETVYLYNSTENGGASCVDLLDEYHTQTIVHFFRLFTSNCDYSRKVNIDSLKFVTGPRLGIKEPTLQQSFDWINGAETKLNHGGRKTRFQRARTSIIYFKREHSISVSFHIVKEQVFLYLITKSHGTFILTTKFRKAISKIFHSALYDSYMQKWQLSNKSDMIAAAIKLSPQINKAIFKSKLGEFAWNFIHRARTNTLNINAKPNRKGDSRLCRRCEKEDETMSHALQSCKIHQILTLERHNDCIKIITNNLKNPNFIVVVDHSCSLVLNSKQRVDLIITDTERKRIFMIDIKCPMDSVSHFELTDKANIEKYSLLQSELQVAKPDYQVELYTCIIGALGSIPPSTYDLICKLGIEPLQTEGLLKECAMSNILHSAKIWYYHVHGILPDFCN

SEQ ID NO: 3820 - protein, 1087 aa, Schmidtea mediterranea
MCTAILHDCTHYLNEHLNHKCLQNAKVVFAIFAPPKSRETLMVIDYNTDEHYFLDPTTLDVSLNYTFICKVLVTKINEIRNSRGCAIRAGKCPHDVRGSGLLSKIPIMTFINNYAHDMSLENINLREIARIINSVLPIVSEINNKDKEKILTKAKETIKFDLQQRKNKVFELIISPENADVNQIVESIIRQIPHLNNFTEIKSHEPYLGSKQNSNIISKYKSRSEFLINMKLTFYKIINDLPVTVRPEIQDILKQFSHENPVSNSWNKILKDCRITTNVLNLVDILPFEVIYELKRADNTSPGIDGIQYKDLALLHPEGILLSFLFNKIISSKIIPTSWKTFKTILIPKPDKTDHYDKVSSWRPIALLSVIYKVFASILTTRLTSWVICNDILHIGQKGGSVHEGCVEHNSILSSALEHSKYSKNSPLAIAWLDIKDAFGSVPHDYLRSVLKNIGVSEEFITIVKLLYTNTQSFYSCGPIVTPNLSIKKGVKQGCPLSMILFSIAINPVLEAISRSCIEPFMIGDSPVQVLAYADDIALVANNVENLQKIVDVAVEAATEIGFEYRPEKCGYMQLPRVNINGEILINEKEIKKLLSKEFYQYLGVPVGEDNDQSPYAILDKVVSDTKKIADSGLFGWQKLKAYKIFIHSRLIFAFRTREIKTMALSAFQGNTNSCGNNSSKLRGHLRRILNLPHNSETVYLYNSTENGGASCVDLLDEYHTQTIVHFFRLFTSNCDYSRKVNIDSLKFVTGPRLGIKEPTLQQSFDWINGAETKLNHGGRKTRFQRARTSIIYFKREHSISVSFHIVKEQFFLYLITKSHGTFILTTKFRKAISKIFHSALFDSYMQKWQLSNKSDMIAAAIKLSPQINKAISKSKLGEFAWNFIHRARTNTLNINAKPNRKGDSRLCRRCEKEDETMSHALQSCKIHQILTLERHNDCLKIITNNLKNPNFIVVFDHSCSLVLNSKQRVDLIITDTERKRIFMIDIKCPMDSVSHFELTDKANIEKYSLLQSELQVAKPDYQVELYTCIIGALGSIPPSTYDLICKLGIEPFQTEGRIKECAMSNILHSAKIWYYYVHGILPDFCN

SEQ ID NO: 3821 - protein, 526 aa, Schmidtea mediterranea
MILFSIAINPVLEAISRSCIEPFMIGDSPVQVLAYADDIALVANNVENLQKIVDVAVEAATEIGFEYRPEKCGYMQFPRININGEILINEKEIKKLLSKEFYQYLGVPVGEDNDQSPYAILDKVVSDTKQIADSGLFGWQKLKAYKIFIHSRLTFAFRTREIKTMALSASQGNTNSCGNNSSKLRGHLRRILNLPHNSETVYLYNSTENGGASCVDLLDEYHTQTIVHFFRLFTSNCDYSRKVNIDSLKFVTGPRLGIKEPTLQQSFDWINGAETKLNHGGRKTRFQRARTSIIYFKREHSISVSFHIVKEQVFLYLITKSHGTFILMTKFRKAISKIFHSALFDSYMQKWQLSNKSDMIAAAIKLSPQINKAIFKSKLGEFAWNFIHRARTNTLNINAKPNRKGDSRLCRRCEKEDETMSHALQSCKIHQILTLERHNDCIKIITNNLKNPNFIVVVDHSCSLVLNSKQRVDLIITDTERKRIFMIDIKCPMDSVSHFELTDKANIEKYSLLQSELQVAKPDYQT

SEQ ID NO: 3822 - protein, 1248 aa, Schmidtea mediterranea
MGINFKKAIALTLEKQKRNINNSINIKPKFQNSCVSFLLSKWFKSNTNILVLSPDLTINLIAQNNNYIFENVNFRQFKDVQHVISIIPNENYWCLLLYSTSRMTCNIFDFRKTDISDRLTEIGGNFTDYLNSFFLSMKIKFQINHGILHRCFISDDPTFHATAFIVFLEKLILDRDFQHDKIYKLLDDINTKECVEISLNLNLINGKITDSILIKYFNNLSFSTDFVLLGFTMCTAILDDCTHYLNEHLNYKCLQNAKVVFAIFAPPKSRETLVVIDYNTDEHYFLDPTTLDVSLNYTFICKVLVTKINEIRNSRGCAIRAGKCPHDVRGSGLLSKILICAFINNYAHDMSLENINLREIARIINSVLPIVSEINNKDKENILTKAKETIKFDLQQRKNKVFELIISFENADVNQIVESIIRQIPHLNNFTEIKSHEPYLGSKQNSNIISKYKSRSEFLINMKLTFYKIINDLPVTVRPEIQDILNQFSHEDPVSNSWNKILKDCRSTTNVLNLVDILPFEVIYELKRADNTSPGIDGIQYKDLALLDPEGILLSFLFNKIISSKIIPTSWKTFKTILIPKPDKTDNYDKVSSWRPIALLSVIYKVFASILTTRLTSWVICNDILHIGQKGGSFHEGCVEHNSILSSALEHSKYSKNSPLAIAWLDIKDAFGSVPHDYLWSVLKTIGVSEEFITIVKLLYTDTQSFYSCGPIVTPNLSIKKGVKQGCPLSMILFSIAINPVLEAISRSCIEPFMIGDLPVQVLAYADDIALVANNVENLQKIVDVAVEAATEIGFEYRPEKCGYMQLPRVNINSEILINEKEIKKLLSKEFYQYLGVPVGEDNDQSPYAILDKVVSDTKKIADSGLFGWQKLKAYKIFIHSRLTFAFRTREIKTMALSASQGNTNPCGNNSSKLRGHLRRILNLPHNSETVYLYNSTENGGASCVDLLDEYHTQTIVHFFRLFTSNCDYSRKVNIDSLEFVTGPRLGIKEPTLQQSFDWINGAETKLNHGGRKTRFQRARTSIIYFKREHSISVSFHIVKEQVFLYLITKIHGTFILTTKFRKAISKIFHSALYDSYMQKWQLSNKSDMIAAAIKLSPQINKAIFKSKLGEFAWNFIHRARTNTLNINAKPNRKGDSRLCRRCEKEDETMSHALQSCKIHQILTLERHNDCIKIITNNLKNPNFIVVVDHSCSLVLNSKQRVDLIITDTERKRIFMIDIKCPMDSVSHFELTDKANIEKYSLLQSELQ

SEQ ID NO: 3823 - protein, 858 aa, Schmidtea mediterranea
MKLTFYKIINDLPVTVRPEIQDILNQFSHEDPVSNSWNKILKDCRSTTNVLNLVDILPFEVIYELKRADNTSPGIDGIQYKDLALLDPEGILLSFLFNKIISSKIIPTSWKTFKTILIPKPHKTDNYDKVSSWRPIALLSVIYKVFASILTTRLTSWVICNDILHIGQKGGSVHEGCVEHNSILSSALEHSKYSKNSPLAIAWLDIKDAFGSVPHDYLWSVLKTIGVSEEFITIVKLLYTDTQSFYSCGPIVTPNLSIKKGVKQGCPLSMILFSIAINPVLEAISRSCIEPFMIGDSPVQVLAYADDIALVANNVENLQKIVDVAVEAATEIGFEYRPEKCGYMQLPRVNINGEILINEKEIKKLLSKEFYQYLGVPVGEDNDQSPYAILDKVVSDTKKIADSGLFGWQKLKAYKIFIHSRLTFAFRAREIKTMALSDFQGNTNPCGNNSSKLRGHLRRILNLPHNSETVYLYNSTENGGASCVDLLDEYHTQTIVHFFRLFTSNCDYSRKVNIDSLKFVTGPRLGIKEPTLQQSFDWINGAETKLNHGGRKTRFQRARTSIIYFKREHSISVSFHIVKEQVFLYLITKSHGTFILTTKFRKAISKIFHSALYDSYMQKWQLSNKSDMIAAAIKLSPQINKAIFKSKLGEFAWNFIHRARTNTLNINAKPNRKGDSRLFRRCEKEDETMSHALQSCKIHQILTLERHNDCIKIITNNLKNPNFIVVVDHSCSLVLNSKQRVDLIITDTERKRIFMIDIKCPMDSVSHFELTDKANIEKYSLLQSELQVTKPDYHIELHTCIIGALGSIPPSTYDLICKLGIEPLQTEGLLKECAMSNILHSAKIWYYHVHGILPDFCN

SEQ ID NO: 3824 - protein, 858 aa, Schmidtea mediterranea
MKLTFYKIINDLPVTVRPEIQDILNQFSHEDPVSNSWNKILKDCRSTTNVLNLVDILPFEVIYELKRADNTSPGIDGIQYKDLALLDPEGILLSFLFNKIISSKIIPTSWKTFKTILIPKPDKTDNYDKVSSWRPIALLSVIYKVFASILTTRLTSWVICNDILHIGQKGGSFHEGCVEHNSILSSALEHSKYSKNSPLAIAWLDIKDAFGSVPHDYLWSVLKTIGVSEEFITIVKLLYTDTQSFYSCGPIVTPNLSIKKGVKQGCPLSMILFSIAINPVLEAISRSCIEPFMIGDLPVQVLAYADDIALVANNVENLQKIVDVAVEAATEIGFEYRPEKCGYMQLPRVNINSEILINEKEIKKLLSKEFYQYLGVPVGEDNDQSPYAILDKVVSDTKKIADSGLFGWQKLKAYKIFIHSRLTFAFRTREIKTMALSASQGNTNPCGNNSSKLRGHLRRILNLPHNSETVYLYNSTENGGASCVDLLDEYHTQTIVHFFRLFTSNCDYSRKVNIDSLKFVTGPRLGIKEPTLQQSFDWINGAETKLNHGGRKTRFQRARTSIIYFKREHSISVSFHIVKEQVFLYLITKSHGTFILTTKFRKAISKIFHSALYDSYMQKWQLSNKSDMIAAAIKLSPQINKAIFKSKLGEFAWNFIHRARTNTLNINAKPNRKGDSRLCRRCEKEDETMSHALQSCKIHQILTLERHNDCIKIITNNLKNPNFIVVVDHSCSLVLNSKQRVDLIITDTERKRIFMIDIKCPMDSVSHFELTDKANIEKYSLLQSELQVAKPDYQVELYTCIIGALGSIPPSTYDLICKLGIEPLQTEGLLKECAMSNILHSAKIWYYHVHGILPDFCN

SEQ ID NO: 3825 - protein, 1319 aa, Schmidtea mediterranea
MGINFKKAIALTLEKQKRNINNSINIKPKFQKSCVSFLLSKWFKSNTNILVLSPDLTINLIAQNNNYIIENVIFRQFKDVQHVISIIPNENYWCLLLYSTRRMTCNIFDFRKTDISDRLTEIGGNFTDYLNSFFLSMKIKFQINHGILHRCFISDDPTFHATAFIVFLEKLILDRDFQHDKIYKLLDDINTKVCVEISLNLNLINGKITDSILIKYFNNLSLSTDFVLLGFTMCTAIFDDCTHYLNEHLNYKCLQNAKVVFAIFAPPKSRETLMVIDYNTDEHYFLDPKTLDVSLNYTFICKVLVTKINEIRNSRGCAIRAGKCPHDVRGSGLLSKILICAFINNYAHDMSLENINLREIARIINSVLPIVSEINNKDKEKILTKAKETIKFDLQQRKNKVFELIISFENADVNQIVESIIRQIPHLNNFTEIKSHEPYLGSKQNSNIISNYKSRSEFLINMKLTFYKIINDLPVTVRPEIQDILNQFSHEDPVSNSWNKILKDCRSTTNVLNLVDILPFEVIYELKRADNTSPGIDGIQYKDLALLDPEGILLSFLFNKIISSKIIPTSWKTFKTILIPKPDKTDNYDKVSSWRPIALLSVIYKVFASILTTRLTSWVICNDILHIGQKGGSVHEGCVEHNSILSSALEHSKYSKNSPLAIAWLDIKDAFGSVPHDYLWSVLKTIGVSEEFITIVKLLYTDNQSFYSCGPILTPNLSIKKGVKQGCPLSMILFSIAINSVLEAISRSCIEPFMIGDLPVQVLAYADDIALVANNVENLQKIVDVAVKAATEIGFEYRPEKCGYMQLPRVNINGEILINEKEIKKLLSKEFYQYLGVPVGEDNDQSPYAILDKVVSDTKKIADSGLFGWQKLKAYKIFIHSRLTFAFRTREIKTMALSASQGNTNPCGNNSSKLRGHLRRILNLPHNSETVYLYNSTENGGASCVDLLDEYHTQTIVHFFRLFTSNCDYSRKVNIDSLKFVTGPCLGIKEPTLQQSFDWINGAETKLNHGGRKTRFQRARTSIIYFKREHSISVSFHIVKEQVFLYLITKSHGTFILMTKFRKAISKIFHSALYDSYMQKWQLSNKSDMIAAAIKLSPQINKAIFKSKLGEFAWNFIHRARTNTLNINAKPNRKGDSRLCRRCEKEDETMSHALQSCKIHQILTLERHNDCIKIITKHLKNPNFIVVVDHSCSLVLNSKQRVDLIITDTERKRIFMIDIKCPMDSVSHFELTDKANIEKYSLLQSELQVAKPDYQVEFYTCIIGALGSIPPSTYDLICKLGIEPLQTEGLLKECAMSNILHSAKIWYYHVHGILPDFCN

SEQ ID NO: 3826 - protein, 970 aa, Schmidtea mediterranea
MSLDNINLREIARIINSVLSIVSEINNKDKEKILTKAKETIKFDLQQRKNKVFELIISFENADVNQIVESIIRQIPHLKKFTEIKSHEPNLGSKQNSNIISKYKSRSEFLINMKLTFYKIINDLPVTVRPEIQDILNQFSHENPVLNSWNKILKDCRSTTNVLNLVDILPFEVIYELKRADNTSPGIDGIQYKDLALLDPEGILLSFLFNKIISSKIIPTSWKTFKTILIPKPDKTDNFDKVSSWRPIALLSVIYKVFASILTTRLTSWVICNDILYIGQNGGSVHEGCVEHNSILSSALEHSKYSKDSPLAIAWLDIKDAFGSVPHDYLWSVLKTIGVSGEFITIVKLLYIDTQSFYSCGPIVTPNLSIKKGVKQGCPLSMILFSIAINPVLEAISRSCIEPFMIGDSPVQVLDYADDIALVANNVENLQKIVDVAVEAATEIGFEYRPEKCSYMQLPKININGEILINEKEIKKLLSKEFYQYLGVPVGEDNDQSPYAILDKVVSDTKKIADSGLFGCQKLKAYKIFIHSRLTFAFRTREIKTMALSASQGNTNPCGNNSSKLRGHLRRILNSSHNSETVYLYNSTENGGSSCVDLLDEYHTQTIVHFFRLFTSNCDYSRKVNIDSLKFVTGPRLGIKEPTLQQSFDWINGAETKLNHGGKKTRFQRARTSIIYFKREHLISVSFHIVKEQVFLYLITKSHRTFILTTKFRKAISNIFHSALYDSYMQKWQLSNKSDMIAAAVKLSSQINKAIFKSKLVELAWNFIHRARTNTLNINAKPNRKGDFRLCTRCEKEDETMSHALQSCKIHQILTLERHNDCLKIITNNLKNPNFIVMVDHSCSLVLNSKQSVDLIITDTERKRIFMIDIKCPMYSVSHFDLTDNSNIEKYSLLQSELQVAKPDYQVELYICIIAALGSIPPSTYDLICKLGIEPLQTEGLLKECAMSNILHSAKIWYYPVHGILPDFCN

SEQ ID NO: 3827 - protein, 1087 aa, Schmidtea mediterranea
MCTAILDDCTHYLNEHLNYKCLQNAKVVFAIFAPPKSRETLMVIDYNTDEHYFLDPTTLDVSLNYTFICKVLVTKINEIRNSRGCAIRAGKCPHGVRGSGLLSKILICAFINNYAHDMSLENINLREIARIINSVLPIVSEINNKDKEKILTKAKETIKFDLQQRKNKVFELIISFENADVNQIVESIIRQIPHLNNFTEIKSHEPYLGSKQNSNIISKYKSRSEFLINMKLTFYKIINDLPVTVRPEIQDILNQFSHEDPVSNSRNKILKDCRSTTNVLNLVDILPFEVIYELKRADNTSPGIDGIQYKDLALLDPEGILLSFLFNKIISSKIIPTSWKTFKTILIPKPDKTDNYDKVSSWRPIALLSVIYKVFASILTTRLTSWVIYNDILHIGQKGGSFHEGCVEHNSILSSALEHSKYSKNSPLAIAWLDIKDAFGSVPHDYLWSVLKTIGVSEEFITIVKLLYTDTQSFYSCGPILTPNLSIKKGVKQGCPLSMILFSIAINPVLEAISRSCIEPFMIGNLPVQVLAYADDIALVANNVENLQKIVDVAVEAATEIGFEYRPEKCGYMQLPRVNINGEILINEKEIKKLLSKEFYQYLGVPVGEDNDQSPYAILDKVVSDTKKIADSGLFGWQKLKAYKIFIHSRLTFAFRTREIKTMALSASQGNTNPCGNNSSKLRGHLRKILNLPHNSETVYLYNSTENGGASCVDLLDEYHTQTIVHFFRLFTSNCDYSRKVNIDSLKFVTGPRLGIKEPILQQSFDWINGAETKLNHGGRKTRFQRARTSIIYFKREHSISVSFHIVKEQVFLYLITKSHGTFILTTKFRKAISKIFHSALYDSYMQKWQLSNKSDMIAAAIKLSPQINKAIFKSKLGEFAWNFIHRARTNTLNINAKPNRKGDSRLCRRCEKEDETMSHALQSCKIHQILTLERHNDCIKIITNNLKNPNFIVVVDHSCSLVLNSKQRVDLIITDSERKRIFMIDIKCPMDSVSHFELTDKANIEKYSLLQSELQVAKPDYQIELYTCIIGALGSIPPSTYDLICKLGIEPLQTEGLLKECAMSNILHSVKIWYYHVHSILPDFCN

SEQ ID NO: 3828 - protein, 970 aa, Schmidtea mediterranea
MSLENINLREIARIINSVLPIVSEINNKDKEKILTKAKETIKFDLQQRKNKVFELIISFENADVNQIVESIIRQIPHLNNFTEIKSHEPYLGSKQNSNIISKYKSRSEFLINMKLTFYKIINDLPVTVRPEIQDILNQFSHEDPVSNSWNKILKDCRSTTNVLNLVDILPFEVIYELKRADNTSPGIDGIQYKDLALLDPEGILLSFLFNKIISSKIIPTSWKTFKTILIPKPDKTDNYDKVSSWRPIALLSVIYKVFASILTTRLTSWVICNDILHIGQKGGSFHEGCVEHNSILSSALEHSKYSKNSPLAIAWLDIKDAFGSVPHDYLWSVLKTIGVSEEFITIVKLLYTDTQSFYSCGPIVTPNLSIKKGVKQGCPLSMILFSIAINPVLEAISRSCIEPFMIGDLPVQVLAYADDIALVANNVENLQKIVDVAVEAATEIGFEYRPEKCGYMQLPRVNINGEILINEKEIKKLLSKEFYQYLGVPVGEDNDQSPYAILDKVVSDTKKIADSGLFGWQKLKAYKIFIHSRLTFAFRTREIKTMALSASQGNTNPYGNNSSKLRGHLRRILNLPHNSETAYLYNSTENGGASCVDLLDEYHTQTIVHFFRLFTSNCDYSRKVNIDSLKFVTGPRLGIKEPTLQQSFDWINGAETKLNHGGRKTRFQRARTSIIYFKREHSISVSFHIVKEQVFLYLITKSHGTFILTTKFRKAISKIFHSALYDSYMQKWQLSNKSDMIAAAIKLSPQINKAIFKSKLGEFAWNFIHRARTNTLNINAKPNRKGDSRLCRRCEKEDETMSHALQSCKIHQILTLERHNDCIKIITNNLKNPNFIVVVDHSCSLVLNSKQRVDLIITDTERKRIFMIDIKCPMDSVSHFELTDKANIEKYSLLQSELQVAKPDYQVELYTCIIGALGSIPPSTYDLICKLGIEPLQTEGLLKECAMSNILHSAKIWYYHVHGILPDFCN

SEQ ID NO: 3829 - protein, 1079 aa, Sitophilus oryzae
METKLHTEMNKTFPHLKLTQQNVSDRLRAIYSKKLLAQQEIDQIRREVGHILTQIQTNLEIREDTSIDFTHSYHRDTPVAIREVTEPVSTTERETYELFQFNYSLFHSTDPLSRPLIPQLNFKKNTTKILNDVKFIFQNHIKDIDEIEQFHLALYAAAVTTIELNCQQVMEKNKSHKQQLQKEPAWKVRLTKTIDDLRRQISTITEYLNGNTSNRIARKLKIILKHTHINPEEHEKTRKLIVVRDELSQKCKAKGARLRRYNKATRRKEDNFQYSKCPKKFYQKLENPTDDRRMDIEMDSSQFFSFWRDTWATPSNFKTDTEWMNVVENSTHDINAMPQIQFTKDDIAICLKSLRNWRAPGPDGIQNFWLKTFGGNGEAIARCFNKIIENPSALPTFLASGNTFLFYKKGDRSKPENYRPITCLSSVYKLLTAAITCKIYDHCTLNNIIASEQKGCIKNSLGSKEQLTIDAILIKHAQVKRRNINMSYIDYSKAFDSVPHDWLIKVLDIYKIHPSIKMLLNTAMKKWNTQLFANNTNLGQIDIKKGIFQGDSLSPLWFVLSLNPLSLLLNSTTHGYRPNPKENNKISHLMFMDDIKLYAETPAHLHQLIDTTKTFSNDIQMNFGMEKCATIYINKGKWQNENLPISEIKPLSQTDTYKYLGVAQNRSIDHTTLKKEFKEKYRSRLTKLLNTYLNSRNLISAVNSWAVSTLTYSFGILRYSDADLDELDRLTRRLLKKFRCHHPQSALERLYLKRKEGGRGLLNIKSLCRSQEQSMKAYFIKSNSNLHKLIVTADNKYTPLNLSTDNGDIQQKKTTMVDAQHSWRQKILHGKFPASLDDPNIDKENSLTWLRKGVLHPETEGFVISIQDRVIRTRNYEKHILNKNVQDTCRKCGAANETIDHVIAGCPCLSDTAYLARHNQIAKIIHKEMALKYRLIEHPPPYYRYSPEPVLESAHLVLYWDRPIITDRTIDYNRPDLVLIDKDNKKALIIDIACPLTHNLHKTEVEKIRKYENLAVELKHVWQLSTVEIIPIVISACGVMTTNLRKNIDRLGLCKELSSLMQKSVLLQTCAITRKFLNV

SEQ ID NO: 3830 - protein, 1101 aa, Sitophilus oryzae
MNCLVIKMFLQINECRDDPLPGWRQKLHTEMNKTFPHLKLTQQNVSDRLRAIYSKKLLAQQEIDQIRREVGHILTQIQTNLEIREDTSIDFTHSYHRDTPVAIREVTEPVSTTERETYELFQFNYSLFHSTDPLSRPLIPQLNFKKNTTKILNDVKFIFQNHIKDIDEIEQFHLALYAAAVTTIELNCQQVMEKNKSHKQQLQKEPAWKVRLTKTIDDLRRQISTITEYLNGNTSNRIARKLKIILKHTHINPEEHEKTRKLIVVRDELSQKCKAKGARLRRYNKATRRKEDNFQYSKCPKKFYQKLENPTDDRRMDIEMDSSQFFSFWRDTWATPSNFKTDTEWMNVVENSTHDINAMPQIQFTKDDIAICLKSLRNWRAPGPDGIQNFWLKTFGGNGEAIARCFNKIIENPSALPTFLASGNTFLFYKKGDRSKPENYRPITCLSSVYKLLTAAITCKIYDHCTLNNIIASEQKGCIKNSLGSKEQLTIDAILIKHAQVKRRNINMSYIDYSKAFDSVPHDWLIKVLDIYKIHPSIKMLLNTAMKKWNTQLFANNTNLGQIDIKKGIFQGDSLSPLWFVLSLNPLSLLLNSTTHGYRPNPKENNKISHLMFMDDIKLYAETPAHLHQLIDTTKTFSNDIQMNFGMEKCATIYINKGKWQNENLPISEIKPLSQTDTYKYLGVAQNRSIDHTTLKKEFKEKYRSRLTKLLNTYLNSRNLISAVNSWAVSTLTYSFGILRYSDADLDELDRLTRRLLKKFRCHHPQSALERLYLKRKEGGRGLLNIKSLCRSQEQSMKAYFIKSNSNLHKLIVTADNKYTPLNLSTDNGDIQQKKTTMVDAQHSWRQKILHGKFPASLDDPNIDKENSLTWLRKGVLHPETEGFVISIQDRVIRTRNYEKHILNKNVQDTCRKCGAANETIDHVIAGCPCLSDTAYLARHNQIAKIIHKEMALKYRLIEHPPPYYRYSPEPVLESAHLVLYWDRPIITDRTIDYNRPDLVLIDKDNKKALIIDIACPLTHNLHKTEVEKIRKYENLAVELKHVWQLSTVEIIPIVISACGVMTTNLRKNIDRLGLCKELSSLMQKSVLLQTCAITRKFLNV

SEQ ID NO: 3831 - protein, 1071 aa, Sitophilus oryzae
MNKTFPHLKLTQQNVSDRLRAIYSKKLLAQQEIDQIRREVGHILTQIQTNLEIREDTSIDFTHSYHRDTPVAIREVTEPVSTTERETYELFQFNYSLFHSTDPLSRPLIPQLNFKKNTTKILNDVKFIFQNHIKDIDEIEQFHLALYAAAVTTIELNCQQVMEKNKSHKQQLQKEPAWKVRLTKTIDDLRRQISTITEYLNGNTSNRIARKLKIILKHTHINPEEHEKTRKLIVVRDELSQKCKAKGARLRRYNKATRRKEDNFQYSKCPKKFYQKLENPTDDRRMDIEMDSSQFFSFWRDTWATPSNFKTDTEWMNVVENSTHDINAMPQIQFTKDDIAICLKSLRNWRAPGPDGIQNFWLKTFGGNGEAIARCFNKIIENPSALPTFLASGNTFLFYKKGDRSKPENYRPITCLSSVYKLLTAAITCKIYDHCTLNNIIASEQKGCIKNSLGSKEQLTIDAILIKHAQVKRRNINMSYIDYSKAFDSVPHDWLIKVLDIYKIHPSIKMLLNTAMKKWNTQLFANNTNLGQIDIKKGIFQGDSLSPLWFVLSLNPLSLLLNSTTHGYRPNPKENNKISHLMFMDDIKLYAETPAHLHQLIDTTKTFSNDIQMNFGMEKCATIYINKGKWQNENLPISEIKPLSQTDTYKYLGVAQNRSIDHTTLKKEFKEKYRSRLTKLLNTYLNSRNLISAVNSWAVSTLTYSFGILRYSDADLDELDRLTRRLLKKFRCHHPQSALERLYLKRKEGGRGLLNIKSLCRSQEQSMKAYFIKSNSNLHKLIVTADNKYTPLNLSTDNGDIQQKKTTMVDAQHSWRQKILHGKFPASLDDPNIDKENSLTWLRKGVLHPETEGFVISIQDRVIRTRNYEKHILNKNVQDTCRKCGAANETIDHVIAGCPCLSDTAYLARHNQIAKIIHKEMALKYRLIEHPPPYYRYSPEPVLESAHLVLYWDRPIITDRTIDYNRPDLVLIDKDNKKALIIDIACPLTHNLHKTEVEKIRKYENLAVELKHVWQLSTVEIIPIVISACGVMTTNLRKNIDRLGLCKELSSLMQKSVLLQTCAITRKFLNV

SEQ ID NO: 3832 - protein, 1191 aa, Sitophilus oryzae
MKTNIGNSKQPLPGDRQGMSGADAGHDSMRDVGDKVLKRRALVPKQTTAQTNNEVDKTTETVSSNPGTSQDSADISRKSTKGTRIKWTKEMNCLVIKMFLQINECRDDPLPGWRQKLHTEMNKTFPHLKLTQQNVSDRLRAIYSKKLLAQQEIDQIRREVGHILTQIQTNLEIREDTSIDFTHSYHRDTPVAIREVTEPVSTTERETYELFQFNYSLFHSTDPLSRPLIPQLNFKKNTTKILNDVKFIFQNHIKDIDEIEQFHLALYAAAVTTIELNCQQVMEKNKSHKQQLQKEPAWKVRLTKTIDDLRRQISTITEYLNGNTSNRIARKLKIILKHTHINPEEHEKTRKLIVVRDELSQKCKAKGARLRRYNKATRRKEDNFQYSKCPKKFYQKLENPTDDRRMDIEMDSSQFFSFWRDTWATPSNFKTDTEWMNVVENSTHDINAMPQIQFTKDDIAICLKSLRNWRAPGPDGIQNFWLKTFGGNGEAIARCFNKIIENPSALPTFLASGNTFLFYKKGDRSKPENYRPITCLSSVYKLLTAAITCKIYDHCTLNNIIASEQKGCIKNSLGSKEQLTIDAILIKHAQVKRRNINMSYIDYSKAFDSVPHDWLIKVLDIYKIHPSIKMLLNTAMKKWNTQLFANNTNLGQIDIKKGIFQGDSLSPLWFVLSLNPLSLLLNSTTHGYRPNPKENNKISHLMFMDDIKLYAETPAHLHQLIDTTKTFSNDIQMNFGMEKCATIYINKGKWQNENLPISEIKPLSQTDTYKYLGVAQNRSIDHTTLKKEFKEKYRSRLTKLLNTYLNSRNLISAVNSWAVSTLTYSFGILRYSDADLDELDRLTRRLLKKFRCHHPQSALERLYLKRKEGGRGLLNIKSLCRSQEQSMKAYFIKSNSNLHKLIVTADNKYTPLNLSTDNGDIQQKKTTMVDAQHSWRQKILHGKFPASLDDPNIDKENSLTWLRKGVLHPETEGFVISIQDRVIRTRNYEKHILNKNVQDTCRKCGAANETIDHVIAGCPCLSDTAYLARHNQIAKIIHKEMALKYRLIEHPPPYYRYSPEPVLESAHLVLYWDRPIITDRTIDYNRPDLVLIDKDNKKALIIDIACPLTHNLHKTEVEKIRKYENLAVELKHVWQLSTVEIIPIVISACGVMTTNLRKNIDRLGLCKELSSLMQKSVLLQTCAITRKFLNV

SEQ ID NO: 3833 - protein, 1402 aa, Parapoynx stratiotata
MELRSGKLLSKESLPGGNRRGTPGADAGCLSMRSIGGRGLSRRVHAEKLTTAETYNTDIVYRLSNSSDNNSLIHFTEQITNKENNLNYSCNPLARSSLSSTYSPPKSPSTSSCSALSDDVVQETLSVTSPVPTANRSTVRRKWSKEMNAFILRTYFQTTLLETDTKAYLLPLYKKFIEKFPDMQKISRQRLGDQRRAIINNKLLPQVEIDQIYNKVKTELQNSTHINNSYTPTQNIQRATIHAQTNTLTRMRWTTQHNETIIRAYLKITQLETNLTAYRKPLHQHFIKEFPYLAHITEQRIADQKRVILAKGYIPADRLQSIKQEVAKELESYENVSFNSHSHNNHNDSGNDDDSSIISPIHTQNNQNSIPVDTQSTHTNFSSNVRAGIPEDLPQTLLAQLFTALDNYSEMKPEDRPKLPKLKETKQLYQLVHIFNTHVLQKISDSKLDITQIHTIFYCSAAVICTHLGYKIGTQHHYRYTRKNEKKQWQIRLENDIKSLRSDIGRVTQYIHNNRSRKLVQKVNSIFNKHRVHSTHENNNKSPEDVLDTLKQKLALKANRLARYNKALKRKTDNKQFITNEKGFYRSLTANNHNFTNQKATSTIVKEDLENFWADLWQKERSYNFESDWIIQEENKWKEIDEMEFTVVTRQDIETVTKKMKNWKAAGIDSLHNFWYKKFFVLHDALANIVTDLIKGNTALPDFLAKGITYMLPKSTNPSDPSQFRPITCLTTLYKLITACITNKINKHIESNNILAEEQKGCRQNYKGCKEQLIIDSIVLKHAQKHNRNIHVTYIDYKKAFDSVPHSWLVRVLQLYKVNPSIITFLEDAMTKWRTNIHLYSETTTIKTDEIKISNGIFQGDSLSPLWFCLALNPLSSLLTQTNFGYKLSTDTSITHLLYMDDIKLYAKSETDLRNLIQTTANFSVDINMSFGLDKCRSLHICKGKVVNSNNKIYEDFNIQDMQTNDTYRYLGINQNKYINHSQMKRELTTEYARRINILCKKQLNSRNLFKAINTFAIPVLTYSFGIIKWTNTDINKIQIKTRSTLTKHNYLHPRSAIERMTVKRTCGGRGLIDIKYLNISQTQILRKFFLEKATQSPFHATIVKADTNYTVLNLETPDIVFKSKEEIETIKIERWRNKQLHGRHLHDLEQSHINIEASNKWLTLGYLFPETEGFLIAIQDQIINTKNYKKFILKKSVDDKCRKCRNQSETIQHIINGCPMLTQHDYTHRHNQVAHYIHQKLAIKHKLISNKIVPYYQYNPKPVLECPRYRMYFDRAILTDKTIHCNRPDITLVDKVQKEAYLIDIAITCTHNLQKTISEKLHKYSDLKEEITRIWNLNKVYIIPLVLSSTGVIPKHLAHSLKILDLPEKSYITMQKAAILNTCRMVRHFLQDDLSNSPPQT

SEQ ID NO: 3834 - protein, 956 aa, Tinea semifulvella
MSVDAVSASSDVPDHFSDTLYVKCEQCSQPRFFRGSRGLKIHIGKTHKQNSIQASSNTCPDQSDFSNILGHYKNSLPLIKRIPRGARITVAKALTKLINKVVAENSKISWEFLLTFAYRTLYVKRGEGHSVSLTQNIKDNCDQISDGLNIITPPPFKNHSKNYSIKKIEDKINDGDLKGAADLLFFHDVVAPDSPETLAALQNKHPPPATTLLLPDPPGQNEPCLQITSSEVQNAILSFKNGSAGGLDGLTPQHYKDLIGGTAGEAAEPLLVALTSLVNIMLSGQVPISITDILYGANICALKKKDGGIRPIAVGCTLRRIVSKICSKIILPTLTSKFQPLQVGFGSKGGCEAAVHAARSFVVHHGGDVMLKVDVKNAFNSVDRGVMLDQVKQQTPEIFSYLWQCYSTSSKLIYKNNTILSAVGCQQGDPLGPAIFSLAIHNIISSLNSKFNIWYLDDGTIGGNADTVLDDLQKLIYDFGTIGLELNFSKCELYLSNLLTHDKQIEIISKFNSLAPNIKILNNETLRLLGSPILDESIQIYVQEQLTKFNLTSERLFKIQPHMALFIIRYCLFAPKFMYVLRCSQLWKFSEELVLLDKQLQNSLTEILNCPMNDRTWAQASLPIRFGGLGTRKISSVALPAFLSSVHSTVELYGRITNPSLGSVEPSYLSDARDAWSAACPNVSVPISPKIQRLWDEPLCKLVQEDILSASNMKERARLMAVSTRESGLWLQAFPSASVGTLLDRHTLTMAVCLRLGARTVHPHQCRCGEPVDHLGHHGLSCARSAGRIPRHAALNDIIRRALVTAGVPAILEPSGIVRSDGKRPDGMTVGPWKLGRSLVWDATCVDTLAPSHIQATSSGAGRAAFSAENLKLRKYANLSSGYEFAPFGVETMGPWGPSARRLAKELSKRLTERSGDRKAGNYFCQRISLAIQRGNVASLLGTISDGTSLEDIFYL

SEQ ID NO: 3835 - protein, 810 aa, Tinea semifulvella
MSELEDIIAPPPLKHHTNNIRFKKIETKMNDGDLKGAADLLFSNDVIAPDSSETLAALQRKHPPPAATLLLPDPPGQNEPCLQITSTEVQNAILSFKNGSAGGLDGLTPQHYKDLISGTAGDAAEPLLAALTSLVNIMLSGKVSISITDILYGANICALEKKDGGIRPIAVGCTLRRIVSKICSKKVLPTLTSKFQPLQVGFGSKGGCEAAVHAARSFVVNHGGDVLLKVDVKNAFNSVDRGAMLEQIKQHTPEIYSYLWQNYSTPSKLIYKNNTLLSAVGCQQGDPLGPAIFSLAIHKIISSLNSKFNIWYLDDGTIGGNVDTVLGDLQKLIKDFGTIGLELNFSKCELYISNLLTSGKQSEIISLFNSLAPNIKILNNETLRLLGSPILDESIQIYVQEQLNKFNSTSERLFQIQPHMALFIIRFCLFAPKFTYVLRCSQLWKFPDELLLLDKLLQNSLIKILNCPMNDRTWAQASLPIRFGGLGTRKISSVALPAFLSSVHSTVELYGKITNPSLGSVEPSYLSDARDAWSVACPNKSVPNLTKFQRLWDEPLCKLVLDDILSSSNTRERARLMAVSTRESGLWLQAFPSASVGTLLDRNTLTMAVCLRLGARTVHPHQCRCGEPVEHLGHHGLSCARSAGRISRHAALNDIIRRAFVTAGVPAILEPSGIARSDGKRPDGMTVGPWKLGRSLVWDATCVDTLAPSHIQATSSSAAVSAENLKLRKYANLSTGYEFAPFGVETMGPWGHSAKRLAKELSKRLTEKSGDRKAGNYFCQRISLAIQRGNVASLLGTITEGSSLEDIFYL

SEQ ID NO: 3836 - protein, 948 aa, Tinea semifulvella
MSVDAVSASSDVPDHFSDTLYVKCEQCSQPRFFRGSRGLKIHIGKTHKQNSIQASSNTCPDQSDFSNILGHYKNSLPLIKRIPRGARITVAKALTKLINKVVAENSKISWEFLLTFAYRTLYVKRGEGHSVSLTQKIKDNCDQISDGLNIITPPPFKNHSKNYSIKKIEDKINDGDLKGAADLLFSHDVVAPDSPETLAALQNKHPPPATTLLLPDPPGQNEPCLQITSSEVQNAILSFKNGSAGGLDGLTPQHYKDLIGGTAGDAAEPLLVALTSLVNIMLSGQVPISITDILYGANICALKKKDGGIRPIAVGCTLRRIVSKICSKIILPTLTSKFQPLQVGFGSKGGCEAAVHAARSFVVHHGGDVMLKVDVKNAFNSVDRGVILDQDQTPEIFSYLWQCYSTSSKLIYKNNTILSAVTLGPAIFSLAIHNNISSLNSKFNIWYLDDGTIGGNADTVLDDLQKLIYDFGTIGLELNFSKCELYLSNLLTHDKQIEIISKFNSLAPNIKILNNETLRLLGSPILDESIQIYVQEQLTKFNLTSERLFKIQPHMALFIIRYCLFAPKFMYVLRCSQLWKFSEELVLLDKQLQNSLTEILNCPMNDRTWAQASLPIRFGGLGTRKISSVALPAFLSSVHSTVELYGRITIPSLGSVEPSYLSDARDAWSVACPNVSVPISPKIQRLWDEPLCKLVQEDILSASNIKERARLMAVSTRESGLWLQAFPSASVGTLLDRHTLTMAVCLRLGARTVHPHQCRCGEPVDHLGHHGLSCARSAGRIPRHAALNDIIRRALVTAGVPAILEPSGIVRSDGKRPDGMTVGPWKLGRSLVWDATCVDTLAPSHIQATSSGAGRAAFSAENLKLRKYANLSSGYEFAPFGVETMGLWGPSARRLAKELSKRLTERSGDRKAGNYFCQRISLAIQRGNVASLLGTISDGTSLEDIFYL

SEQ ID NO: 3837 - protein, 956 aa, Tinea semifulvella
MSLDVLPASSDVPSQSSDTSLYVRCEQCSQPRFFRGSRGLKIHIGKAHKQNSIEASSNTLSDQLDFSQVLGRYKNSLPLIKRIPRGARITVAKSLTKLINNVVNENSKKCWELLLTFAYRTLYVKRGEGHSSLTQKIKDNCTQMSELEDIIAPPPLKHHTNNIRFKKIETKMNDGDLKGAADLLFSNDVIAPDSSETLAALQRKHPPPVATLLLPDPPGQNEPCLQITSTEVQNAILSFKNGSAGGLDGLTPQHYKDLISGTAGDAAEPLLAALTSLVNIMLSGKVSISITDILYGANICALEKKDGGIRPIAVGCTLRRIVSKICSKKVFPTLTSKFQPLQVGFGSKGGCEAAVHAARSFVVNHGGDVLLKVDVKNAFNSVDRGAMLEQIKQHTPEIYSYLWQNYSSPSKLIYKNNTLLSAVGCQQGDPLGPAIFSLAIHKIISSLNSKFNIWYLDDGTIGGNVDTVLGDLQKLIKDFGTIGLELNFSKCELYISNLLTSGKQSEIISLFNSLAPNIKILNNETLRLLGSPILDESIQIYVQEQLNKFNSTSERLFQIQPHMALFIIRFCLFAPKFTYVLRCSQLWKFPDELLLLDKLLQNSLIKILNCPMNDRTWAQASLPIRFGGLGTRKISSVALPAFLSSVHSTVELYGKITNPSLGSVEPSYLSDARDAWSVACPNKSVPNLTKFQRLWDEPLCKLVLDDILSSSNTRERARLMAVSTRESGLWLQAFPSASVGTLLDRNTLTMAVCLRLGARTVHPHQCRCGEPVEHLGHHGLSCARSAGRIPRHAALNDIIRRAFVTAGVPAILEPSGIARSDGKRPDGMTVGPWKLGRSLVWDATCVDTLAPSHIQATSSSAGSAAVSAENLKLRKYANLSTGYEFAPFGVETMGPWGHSAKRLAKELSKRLTEKSGYRKAGNYFCQRISLAIQRGNVASLLGTITEGSSLEDIFYL

SEQ ID NO: 3838 - protein, 956 aa, Tinea semifulvella
MSLDVLPASSDVPSQSSDTSLYVRCEQCSQPRFFRGSRGLKIHIGKAHKQNSIEASSNTLSDQLDFSQVLGRYKNSLPLIKRILRGARITVAKSLTKLINNVVNENSKKCWELLLTFAYRTLYVKRGEGHSSLTQKIKDNCTQMSELEDIIAPPPLKHHTNNIRFKKIETKMNDGDLKGAADLLFSNDVIAPDSSETLAALQRKHPPPAATLLLPDPPGQNEPCLQITSTEVQNAILSFKNGSAGGLDGLTPQHYKDLISGTAGDAAEPLLAALTSLVNIMLSGKVSISITDILYGANICALEKKDGGIRPIAVGCTLRRIVSKICSKKVLPTLTSKFQPLQVGFGSKGGCEAAVHAARSFVVNHGGDVLLKVDVKNAFNSVDRGAMLEQIKQHTPEIYSYLWQNYSTPSKLIYKNNTLLSAVGCQQGDPLGPAIFSLAIHKIISSLNSKFNIWYLDDGTIGGNVDTVLGDLQKLIKDFGTIGLELNFSKCELYISNLLTSGKQSEIISLFNSLAPNIKILNNETLRLLGSPILDESIQIYVQEQLNKFNSTSERLFQIQPHMALFIIRFCLFAPKFTYVLRCSQLWKFPDELLLLDKLLQNSLIKILNCPMNDRTWAQASLPIRFGGLGTRKISSVALPAFLSSVHSTVELYGKITNPSLGSVETSYLSDARDAWSVACPNKSVPNLTKFQRLWDEPLCKLVLDDILSSSNTRERARLMAVSTRESGLWLQAFPSASVGTLLDRNTLTMAVCLRLGARTVHPHQCRCGEPVEHLGHHGLSCARSAGRIPRHAALNDIIRRAFVTAGVPAILEPSGIARSDGKRPDGMTVGPWKLGRSLVWDATCVDTLAPSHIQATSSSAGSAAVSAENLKLRKYANLSTGYEFAPFGVETMGPWGHSAKRLAKELSKRLTEKSGDRKAGNYFCQRISLAIQRGNVASLLGTITEGSSLEDIFYL

SEQ ID NO: 3839 - protein, 952 aa, Tinea trinotella
MSSDVASTSSDVPSQSVYVKCEQCSQPRYFRGSRGLKIHIGKAHKQNYIQSSSNTFSDQLDFGKILGQYKNSLPLIKRIPRGARITVAKSLTKLINKVLNENSKKNWEDLLTFAYRTLYVNRGEGHNVSLTQKIKDNCDQILDRPNIITPPKKLQTQNYSIKKIEDKINDGDLKGAADLLFSNDVVAPDSPETLAALQSKHPPPAATLLLPDPPGQDEHCLQITSTEVKNAILSFKNGSAGGLDGLTPQHYKDMISGTAGDAAEPLLAAITSLVNIMLSGKVPFGITDILYGANICALKKKDGGIRPIAVGCTLRRIVSKISSKKILPNLTAKFQPLQVGFGSKGGCEAAVHAARSFVVNNGGDVMLKVDVKNAFNSVDRGAMLEQIKQHTPEIYNYVWQCYSTPSKLIYKNHSLVSAVGCQQGDPLGPAIFSLTIHKIISSLNSKFNLWYLDDGTIAGNADTVFGDLKKIINDFRTIGLELNFTKCELYLSNLLTPGEQSKIISIFNSLAPNIKILNDETLRLLGSPILDESIQIYVQEQLTKFNSTSERLFQIQPHMALFIIRFCLFAPKFTYVLRCSQLWKFPNELLLLDKLLQNTLTEILNCPMNDRTWAQASLPIRFGGLGTRKISSVALTAFLSSVYSTVELYGSITNPSLGSVEPAYMSDARDAWSVACPNISLPISPKFQRLWDEPLCKMVMEDILSSSNMRERARLIAVSTRESGFWLQAFPSASVGTLLDRNTLTLAVCLRLGARTVHQHQCRCGEPVDNLGHHGLSCVRSAGRIPRHAALNDIIRRALVTVGVPAILEPCGIARSDGKRPDGMTVGPWKLGRSLVWDATCVDTLAPSHIQATSLSAGSAAISAENLKLRKYANLGTGYEFAPFGVETMGPWGPSAKRLARELSRRLTEKSGDRKAGNYFCQRISLAIQRGNVASLLGTISDATSLDDIFYL

SEQ ID NO: 3840 - protein, 956 aa, Tinea semifulvella
MSLDVLPASSDVPSQSSDTSLYVRCEQCSQPRFFRGSRGLKIHIGKAHKQNSIEASSNTLSDQLDFSQVLGRYKNSLPLIKRIPRGARITVAKSLTKLINNVVNENSKKCWELLLTFAYRTLYVKRGEGHSSLTQKIKDNCTQMSELEDIIAPPPLKHHTNNIRFKKIETKMNDGDLKGAADLLFSNDVIAPDSSETLAALQRKHPPPAATLLLPDPPGQNEPCLQITSTEVQNAILSFKNGSAGGLDGLTPQHYKDLISGTAGDAAEPLLAALTSLVNIMLSGKVSISITDILYGANICALEKKDGGIRPIAVGCTLRRIVSKICSKKVLPTLTSKFQPLQVGFGSKGGCEAAVHAARSFVVNHGGDVLLKVDVKNAFNSVDRGAMLEQIKQHTPEIYSYLWQNYSTPSKLIYKNNTLLSAVGCQQGDPLGPAIFSLAIHKIISSLNSKFNIWYLDDGTIGGNVDTVLGDLQKLIKDFGTIGLELNFSKCELYISNLLTSGKQSEIISLFNSLAPNIKILNNETLRLLGSPILDESIQIYVQEQLNKFNSTSERLFQIQPHMALFIIRFCLFAPKFTYVLRCSQLWKFPDELLLLDKLLQNSLIKILNCPMNDRTWAQASLPIRFGGLGTRKISSVALPAFLSSVHSTVELYGKITNPSLGSVEPSYLSDARDAWSVACPNKSVPNLTKFQRLWDEPLCKLVLDDILSSSNTRERARLMAVSTRESGLWLQAFPSASVGTLLDRNTLTMAVCLRLGARTVHPHQCRCGEPVEHLGHHGLSCARSAGRIPRHAALNDIIRRAFVTAGVPAILEPSGIARSDGKRPDGMTVGPWKLGRSLVWDATCVDTLAPSHIQATSSSAGSAAVSAENLKLRKYANLSTGYEFAPFGVETMGPWGHSAKRLAKELSKRLTEKSGDRKAGNYFCQRISLAIQRGNVASLLGTITEGSSLEDIFYL

SEQ ID NO: 3841 - protein, 956 aa, Tinea semifulvella
MSLDVLPASSDVPSQSSDTSLYVRCEQCSQPRFFRGSRGLKIHIGKAHKQNSIEASSNTLSDQLDFSQVLGRYKNSLPLIKRIPRGARITVAKSLTKLINNVVNENSKKCWELLLTFAYRTLYVKRGEGHSSLTQKIKENCTQMSELEDIIAPPPLKHHTNNIRFKKIETKMNDGDLKGAADLLFSNDVIAPDSSETLAALQRKHPPPAATLLLPDPPGQNEPCLQITSTEVQNAILSFKNGSAGGLDGLTPQHYKDLISGTAGDAAEPLLAALTSLVNIMLSGKVSISITDILYGANICALEKKDGGIRPIAVGCTLRRIVSKICSKKVLPTLTSKFQPLQVGFGSKGGCEAAVHAARSFVVNHGGDVLLKVDVKNAFNSVDRGAMLEQIKQHTPEIYSYLWQNYSTPSKLIYKNNTLLSAVGCQQGDPLGPAIFSLAIHKIISSLNSKFNIWYLDDGTIGGNVDTVLGDLQKLIKDFGTIGLELNFSKCELYISNLLTSGKQSEIISLFNSLAPNIKILNNETLRLLGSPILDESIQIYVQEQLNKFNSTSERLFQIQPHMALFIIRFCLFAPKFTYVLRCSQLWKFPDELLLLDKLLQNSLIKILNCPMNDRTWAQASLPIRFGGLGTRKISSVALPAFLSSVHSTVELYGKITNPSLGSVEPSYLSDARDAWSVACPNKSVPNLTKFQRLWDEPLCKLVLDDILSSSNTRERARLMAVSTRESGLWLQAFPSASVGTLLDRNTLTMAVCLRLGARTVHPHQCRCGEPVEHLGHHGLSCARSAGRIPRHAALNDIIRRAFVTAGVPAILEPSGIARSDGKRPDGMTVGPWKLGRSLVWDATCVDTLAPSHIQATSSSAGSAAVSAENLKLRKYANLSTGYEFAPFGVETMGPWGHSAKRLAKELSKRLTEKSGDRKAGNYFCQRISLAIQRGNVASLLGTITEGSSLEDIFYL

SEQ ID NO: 3842 - protein, 676 aa, Tinea semifulvella
MLSGQVPISITDILYGANICALKKKDGGIRPIAVGCTLRRIVSKICSKIILPTLTSKFQPLQVGFGSKGGCEAAVHAARSFVVHHGGDVMLKVDVKNAFNSVDRGVMLDQVKQQTPEIFSYLWQCYSTSSKLIYKNNTILSAVGCQQGDPLGPAIFSLAIHNIISSLNSKFNIWYLDDGTIGGNADTVLDDLQKLIYDFGTIGLELNFSKCELYLSNLLTHDKQIEIISKFNSLAPNIKILNNETLRLLGSPILDESIQIYVQEQLTKFNLTSERLFKIQPHMALFIIRYCLFAPKFMYVLRCSQLWKFSEELVLLDKQLQNSLTEILNCPMNDRTWAQASLPIRFGGLGTRKISSVALPAFLSSVHSTVELYGRITNPSLGSVEPSYLSDARDAWSVACPNVSVPISPKIQRLWDEPLCKLVQEDILSASNIKERARLMAVSTRESGLWLQAFPSASVGTLLDRHTLTMAVCLRLGARTVHPHQCRCGEPVDHLGHHGLSCARSAGRIPRHAALNDIIRRALVTAGVPAILEPSGIVRSDGKRPDGMTVGPWKLGRSLVWDATCVDTLAPSHIQATSSGAGRAAFSAENLKLRKYANLSSGYEFAPFGVETMGPWGPSARRLAKELSKRLTERSGDRKAGNYFCQRISLAIQRGNVASLLGTISDGTSLEDIFYL

SEQ ID NO: 3843 - protein, 956 aa, Tinea semifulvella
MSLDVLPASSDVPSQSSDTSLYVRCEQCSQPRFFRGSRGLKIHIGKAHKQNSIEASSNTLSDQLDFSQVLGRYKNSLPLIKRIPRGARITVAKSLTKLINNVVNENSKKCWELLLTFAYRTLYVKRGEGHSSLTQKIKDNCTQMSELEDIIAPPPLKHHTNNIRFKKIETKMNDGDLKGAADLLFSNDVIAPDSSETLAALQRKHPPPAATLLLPDPPGQNEPCLQITSTEVQNAILSFKNGSAGGLDGLTPQHYKDLISGTAGDAAEPLLAALTSLVNIMLSGKVSISITDILYGANICALEKKDGGIRPIAVGCTLRRIVSKICSKKVLPTLTSKFQPLQVGFGSKGGCESAVHAARSFVVNHGGDVLLKVDVKNAFNSVDRGAMLEQIKQHTPEIYSYLWQNYSTPSKLIYKNNTLLSAVGCQQGDPLGPAIFSLAIHKIISSLNSKFNIWYLDDSTIGGNVDTVLGDLQKLIKDFGTIGLELNFSKCELYISNLLTSGKQSEIISLFNSLAPNIKILNNETLRLLGSPILDESIQIYVQEQLNKFNSTSERLFQIQPHMALFIIRFCLFAPKFTYVLRCSQLWKFPDELLLLDKLLQNSLIKILNCPMNDRTWAQASLPIRFGGLGTRKISSVALPAFLSSVHSTVELYGKITNPSLGSVEPSYLSDARDAWSVACPNKSVPNLTKFQRLWDEPLCKLVLDDIFSSSNTRERARLMAVSTRESGLWLQAFPSASVGTLLDRNTLTMAVCLRLGARTVHPHQCRCGEPVEHLGHHGLSCARSAGRIPRHAALNDIIRRAFVTAGVPAILEPSGIARSDGKRPDGMTVGPWKLGRSLVWDATCVDTLAPSHIQATSSSAGSAAVSAENLKLRKYANLSTGYEFAPFGVETMGPWGHSAKRLAKELSKRLTEKSGDRKAGNYFCQRISLAIQRGNAASLLGTITEGSSLEDIFYL

SEQ ID NO: 3844 - protein, 941 aa, Tinea semifulvella
MSVDAVSASSDVPDHFSDTLYVKCEQCSQPRFFRGSRGLKIHIGKTHKQNSIQASSNTCPDQSDFSNILGHYKNSLPLIKRIPRGARITVAKALTKLINKVVAENSKISWEFLLTFAYRTLYVKRGEGHSVSLTQKIKDNCDQISDGLNIITPPPFKNHSKNYSIKKIEDKINDGDLKGAADLLFSHDVVAPDSPETLAALQNKHPPPATTLLLPDPPGQNEPCLQITSSEVQNAILSFKNGSAGGLDGLTPQHYKDLIGGTAGDAAEPLLVALTSLVNIMLSGQVPISITDILYGANICALKKKDGGIRPIAVGCTLRRIVSKICSKIILPTLTSKFQPLQVGFGSKGGCEAAVHAARSFVVHHGGDVMLKVDVKNAFNSVDRGVMLDQVKQQTPEIFSYLWQCYSTSSKLFYKNNTILSAVGCQQGDPLGPAIFSLAIHNIISSLNSKFNIWYLDDGTIGGNADTVLDDLQKLIYDFGTIGLELNFSKCELYLSNLLTHDKQIEIISKFNSLAPNIKILNNETLRLLGSPILDESIQIYVQEQLTKFNLTSERLFKIQPHMALFIIRYCLFAPKFMYVLRCSQLWKFSEELVLLDKQLQNSLTEILNCPMNDRTWAQASLPIRFGGLGTRKISSVALPAFLSSVHSTVELYGRITNPSLGSVEPSYLSDARDAWSVACPNVSVPISPKIQRLWDEPLCKLVQEDILSASNIKERARLMAVSTRESGLWLQAFPSASVGTLLDRHTLTMAVCLRLGARTVHPHQCRCGEPVDHLGHHGLSCARSAGRIPRHAALNDIIRRALVTAGVPAILEPSGIVRSDGKRPDGMTVEPWKLGRSLVWDATCVDTLAPSHIQATSSGAGRAAFSAENLKLRKYANLSSGYEFAPFGVETMGPWGPSARRLAKELSKRLTERSGDRKAGNYFCLGTISDGTSLEDIFYL

SEQ ID NO: 3845 - protein, 956 aa, Tinea semifulvella
MSLDVLPASSDVPSQSSDTSLYVRCEQCSKPRFFRGSRGLKIHIGKAHKQNSIEASSNTLSDQLDFSQVLGRYKNSLPLIKRIPRGARITVAKSLTKLINNVVNENSKKCWELLLTFAYRTLYVKRGEGHSSLTQKIKENCTQMSELEDIIAPPPLKHHTNNIRFKKIETKMNDGDLKGAADLLFSNDVIAPDSSETLAALQRKHPPPAATLLLPDPPGQNEPCLQITSTEVQNAILSFKNGSAGGLDGLTPQHYKDLISGTAGDAAEPLLAALTSLVNIMLSGKVSISITDILYGANICALEKKDGGIRPIAVGCTLRRIVSKICSKKVLPTLTSKFQPLQVGFGSKGGCEAAVHAARSFVVNHGGDVLLKVDVKNAFNSVDRGAMLEQIKQHTPEIYSYLWQNYSTPSKLIYKNNTLLSAVGCQQGDPLGPAIFSLAIHKIISSLNSKFNIWYLDDGTIGGNVDTVLGDLQKLIKDFGTIGLELNFSKCELYISNLLTSGKQSEIISLFNSLAPNIKILNNETLRLLGSPILDESIQIYVQEQLNKFNSTSERLFQIQPHMALFIIRFCLFAPKFTYVLRCSQLWKFPDELLLLDKLLQNSLIKILNCPMNDRTWAQASLPIRFGGLGTRKISSVALPAFLSSVHSTVELYGKITNPSLGSVEPSYLSDARDAWSVACPNKSVPNLTKFQRLWDEPLCKLVLDDILSSSNTRERARLMAVSTRESGLWLQAFPSASVGTLLDRNTLTMAVCLRLGARTVHPHQCRCGEPVEHLGHHGLSCARSAGRIPRHAALNDIIRRAFVTAGVPAILEPSGIARSDGKRPDGMTVGPWKLGRSLVWDATCVDTLAPSHIQATSSSAGSAAVSAENLKLRKYANLSTGYEFAPFGVETMGPWGHSAKRLAKELSKRLTEKSGDRKAGNYFCQRISLAIQRGNVASLLGTITEGSSLEDIFYL

SEQ ID NO: 3846 - protein, 956 aa, Tinea semifulvella
MSVDAVSASSDVPDHFSDTLYVKCEQCSQPRFFRGSRGLKIHIGKTHKQNSIQASSNTCPDQSDFSNILGHYKNSLPLIKRIPRGARITVAKALTKLINKVVAENSKISWEFLLTFAYRTLYVKRGEGHSVSLTQKIKDNCDQISDGLNIITPPPFKNHSKNYNIKKIEDKINDGDLKGAADLLFSHDVVAPDSPETLAALQNKHPPPATTLLLPDPPGQNEPCLQITSSEVQNAILSFKNGSAGGLDGLTPQHYKDLIGGTAGDAAEPLLVALTSLVNIMLSGQVPISITDILYGANICALKKKDGGIRPIAVGCTLRRIVSKICSKIILPTLTSKFQPLQVGFGSKGGCEAAVHAARSFVVHHGGDVMLKVDVKNAFNSVDRGVMLDQVKQQTPEIFSYLWQCYSTSSKLIYKNNTILSAVGCQQGDPLGPAIFSLAIHNIISSLNSKFNIWYLDDGTIGGNADTVLDDLQKLIYDFGTIGLELNFSKCELYLSNLLTHDKQIEIISKFNSLAPNIKILNNETLRLLGSPILDESIQIYVQEQLTKFNLTSERLFKIQPHMALFIIRYCLFAPKFMYVLRCSQLWKFSEELVLLDKQLQNSLTEILNCPMNDRTWAQASLPIRFGGLGTRKISSVALPAFLSSVHSTVELYGRITNPSLGSVEPSYLSDARDAWSVACPNVSVPISPKIQRLWDEPLCKLVQEDILSASNIKERARLMAVSTRESGLWLQAFPSASVGTLLDRHTLTMAVCLRLGARTVHPHQCRCGEPVDHLGHHGLSCARSAGRIPRHAALNDIIRRALVTAGVPAILEPSGIVRSDGKRPDGMTVGPWKLGRSLVWDATCVDTLAPSHIQATSSGAGRAAFSAENLKLRKYANLSSGYEFAPFGVETMGPWGPSARRLAKELSKRLTERSGDRKAGNYFCQRISLAIQRGNVASLLGTISDGTSLEDIFYL

SEQ ID NO: 3847 - protein, 956 aa, Tinea semifulvella
MSLDVLPSSSDVPSQSSDTSLYVRCEQCSQPRFFRRSRGLKIHIGKAHKQNSIEASSNTLSDQLDFSQVLGRYKNSLPLIKRIPRGARITVAKSLTKLINNVVNENSKKCWELLLTFAYRTLYVKRGEGHSSLTQKIKDNCTQMSELEDIIAPPPLKHHTNNIRFKKIETKMNDGDLKGAADLLFSNDVIAPDSSETLAALQRKHPPPAATLLLPDPPGQNEPCLQITSTEVQNAILSFKNGSAGGLDGLTPQHYKDLISGTAGDAAEPLLAALTSLVNIMLSGKVSISITDILYGANICALEKKDGGIRPIAVGCTLRRIVSKICSKKVLPTLTSKFQPLQVGFGSKGGCEAAVHATRSFVVNHGGDVLLKVDVKNAFNSVDRGAMLEQIKQHTPEIYSYLWQNYSTPSKLIYKNNTLLSAVGCQQGDPLGPAIFSLAIHKIISSLNSKFNIWYLDDGTIGGNVDTVLGDLQKLIKDFGTIGLELNFSKCELYISNLLTSGKQSEIISLFNSLAPNIKILNNETLRLLGSPILDESIQIYVQEQLNKFNSTSERLFQIQPHMALFIIRFCLFAPKFTYVLRCSQLWKFPDELLLLDKLLQNSLIKILNCPMNDRTWAQASLPIRFGGLGTRKISSVALPAFLSSVHSTVELYGKITNPSLGSVEPSYLSDARDAWSVACPNKSVPNLTKFQRLWDEPLCKLVLDDILSSSNTRERARLMAVSTRESGLWLQAFPSASVGTLLDRNTLTMAVCLRLGARTVHPHQCRCGEPVEHLGHHGLSSARSAGRIPRHAALNDIIRRAFVTAGVPAILEPSGIARSDGKRPDGMTVGPWKLGRSLVWDATCVDTLAPSHIQATSSSAGSAAVSAENLKLRKYANLSTGYEFAPFGVETMGPWGHSAKRLAKELSKRLTEKSGDRKAGNYFCQRISLAIQRGNVASLLGTITEGSSLEDIFYL

SEQ ID NO: 3848 - protein, 956 aa, Tinea semifulvella
MSLDVLPASSDVPSQSSDTSLYVRCEQCSQPRFFRGSRGLKIHIGKAHKQNSIEASSNTLSDQLDFSQVLGRYKNSLPLIKRIPRGARITVAKSLTKLINNVVNENSKKCWELLLTFAYRTLYVKRGEGHSSLTQKIKENCTQMSELEDIIAPPPLKHHTNNIRFKKIETKMNDGDLKGAADLLFSNDVIAPDSSETLAALQRKHPPPAATLLLPDPPGQNEPCLQITSTEVQNAILSFKNGSAGGLDGLTPQHYKDLISGTAGDAAEPLLAALTSLVNIMLSGKVSISITDILYGANICALEKKDGGIRPIAVGCTLRRIVSKICSKKVLPTLTSKFQPLQVGFGSKGGCEAAVHAARSFLVNHGGDVLLKVDVKNAFNSVDRGAMLEQIKQHTPEIYSYLWQNYSTPSKLIYKNNTLLSAVGCQQGDPLGPAIFSLAIHKIISSLNSKFNIWYLDDGTIGGNVDTVLGDLQKLIKDFGTIGLELNFSKCELYISNLLTSGKQSEIISLFNSLAPNIKILNNETLRLLGSPILDESIQIYVQEQLNKFNSTSERLFQIQPHMALFIIRFCLFAPKFTYVLRCSQLWKFPDELLLLDKLLQNSLIKILNCPMNDRTWAQASLPIRFGGLGTRKISSVALPAFLSSVHSTVELYGKITNPSLGSVEPSYLSDARDAWSVACPNKSVPNLTKFQRLWDEPLCKLVLDDILSSSNTRERARLMAVSTRESGLWLQAFPSASVGTLLDRNTLTMAVCLRLGARTVHPHQCRCGEPVEHLGHHGLSCARSAGRIPRHAALNDIIRRAFVTAGVPAILEPSGIARSDGKRPDGMTVGPWKLGRSLVWDATCVDTLAPSHIQATSSSAGSAAVSAENLKLRKYANLSTGYEFAPFGVETMGPWGHSAKRLAKELSKRLTEKSGDRKAGNYFCQRISLAIQRGNVASLLGTITEGSSLEDIFYL

SEQ ID NO: 3849 - protein, 956 aa, Tinea semifulvella
MSVDAVSASSDVPDHFSDTLYVKCEQCSQPRFFRGSRGLKIHIGKTHKQNSIQASSNTCPDQSDFSNILGHYKNSLPLIKRIPRGARITVAKTLTKLINKVVAENSKISWEFLLTFAYRTLYVKRGEGHSVSLTQKIKDNCDQIPDGLNIITPPPFKNHSKNYSIKKIEDKINDGDLKGAADLLFSHDVVAPDSPETLAALQNKHPPPATTLLLPDPPGQNEPCLQITSSEVQNAILSFKNGSAGGLDGLTPQHYKDLIGGTAGDAAEPLLVALTSLVNIMLSGQVPISITDILYGANICALKKKDGGIRPIAVGCTLRRIVSKICSKIILPTLTSKFQPLQVGFGSKGGCEAAVHAARSFVVHHGGDVMLKVDVKNAFNSVDRGVMLDQVKQQTPEIFSYLWQCYSTSSKLIYKNNTILSAVGCQQGDPLGPAIFSLAIHNIISSLNSKFNIWYLDDGTIGGNADTVLDDFQKLIYDFGTIGLELNFSKCELYLSNLLTYDKQIEIISKFNSLAPNIKILNNETLRLLGSPILDESIQIYVQEQLTKFNLTSERLFKIQPHMALFIIRYCLFAPKFMYVLRCSQLWKFSEKLVLLDKQLQNSLTEILNCPMNDRTWAQASLPIRFGGLGTRKISSVALPAFLSSVHSTVELYGRITNPSLGSVEPSYSSDARDAWSVACPNVSVPISPKIQRLWDEPLCKLVQEDILSASNIKERARLMAVSTRESGLWLQAFPSASVGTLLDRHTLTMAVCLRLGARTVHPHQCRCGEPVDHLGHHGLSCARSAGRIPRHAALNDIIRRALVTAGVPAILEPSGIVRSDGKRPDGMTVGPWKLGRSLVWDATCVDTLAPSHIQATSSGAGRAAFSAENLKLRKYANLSSGYEFAPFGVETMGPWGPSARRLAKELSKRLTERSGDRKAGNYFCQRISLAIQRGNVASLLGTISDGTSLEDIFYL

SEQ ID NO: 3850 - protein, 956 aa, Tinea semifulvella
MSLDVLPASSDVPSQSSDTSLYVRCEQCSQPRFFRGSRGLKIHIGKAHKQNSIEASSNTLSDQLDFSQVLGRYKNSLPLIKRIPRGARITVAKSLTKLINNVVNENSKKCWELLLTFAYRTLYVKRGEGHSSLTQKIKDNCTQMSELEDIIAPPPLKHHTNNIRFKKIETKMNDGDLKGAADLLFSNDVIAPDSSETLAALQRKHPPPAATLLLPDPPGQNEPCLQITSTEVQNAILSFKNGSAGGLDGLTPQHYKDLISGTAGDAAEPLLAALTSLVNIMLSGKVSISITDILYGANICALEKKDGGIRPIAVGCTLRRIVSKICSKKVLPTLTSKFQPLQVGFGSKGGCEAAVHAARSFVVNHGGDVLLKVDVKNAFNSVDRGAMLEQIKQHTPEIYSYLWQNYSTPSKLIYKNNTLLSAVGCQQGDPLGPAIFSLAIHKIISSLNSKFNIWYLDDGTIGGNVDTVLGDLQKLIKDFGTIGLELNFSKCELYISNLLTSGKQSEIISLFNSLAPNIKILNNETLRLLGSPILDESIQIYVQEQLNKFNSTSERLFQIQPHMALFIIRFCLFAPKFTYILRCSQLWKFPDELLLLDKLLQNSLIKILNCPMNDRTWAQASLPIRFGGLGTRKISSVALPAFLSSVHSTVELYGKITNPSLGSVEPSYLSDARDAWSVACPNKSVPNLTKFQRLWDEPLCKLVLDDILSSSNTRERARLMAVSTRESGLWLQAFPSASVGTLLDRNTLTMAVCLRLGARTVHPHQCRCGEPVEHLGHHGLSCARSAGRIPRHAALNDIIRRAFVTAGVPAILEPSGIARSDGKRPDGMTVGPWKLGRSLVWDATCVDTLAPSHIQATSSSAGSAAVSAENLKLRKYANLSTGYEFAPFGVETMGPWGHSAKRLAKELSKRLTEKSGDRKAGNYFCQRISLAIQRGNVASLLGTITEGSSLEDIFYL

SEQ ID NO: 3851 - protein, 956 aa, Tinea semifulvella
MSLDVLPASSDVPSQSSDTSLYVRCEQCSQPRFFRGSRGLKIHIGKAHKQNSIEASSNTLSDQLDFSQVLGRYKNSLPLIKRIPRGARITVAKSLTKLINNVVNENSKKCWELLLTFAYRTLYVKRGEGHSSLTQKIKENCTQMSELEDIIAPPPLKHHTNNIRFKKIETKMNDGDLKGAADLLFSNDVIAPDSSETLAALQRKHPPPAATLLLPDPPGQNEPCLQITSTEVQNAILSFKNGSAGGLDGLTPQHYKDLISGTAGDAAEPLLAALTSLVNIMLSGKVSISITDILYGANICALEKKDGGIRPIAVGCTLRRIVSKICSKKVLPTLTSKFQPLQVGFGSKGGCEAAVHAARSFVVNHGGDVLLKVDVKNAFNSVDRGAMLEQIKQHTPEIYSYLWQNYSTPSKLIYKNNTLLSAVGCQQGDPLGPAIFSLAIHKIISSLNSKFNIWYLDDGTIGGNVDTVLGDLQKLIKDFGTIGLELNFLKCELYISNLLTSGKQSEIISLFNSLAPNIKILNNETLRLLGSPILDESIQIYVQEQLNKFNSTSERLFQIQPHMALFIIRFCLFAPKFTYVLRCSQLWKFPDELLLLDKLLQNSLIKILNCPMNDRTWAQASLPIRFGGLGTRKISSVALPAFLSSVHSTVELYGKITNPSLGSVEPSYLSDARDAWSVACPNKSVPNLTKFQRLWDEPLCKLVLDDILSSSNTRERARLMAVSTRESGLWLQAFPSASVGTLLDRNTLTMAVCLRLGARTVHPHQCRCGEPVKHLGHHGLSCARSAGRIPRHAALNDIIRRAFVTAGVPAILEPSGIARSDGKRPDGMTVGPWKLGRSLVWDATCVDTLAPSHIQATSSSAGSAAVSAENLKLRKYANLSTGYEFAPFGVETMGPWGHSAKRLAKELSKRLTEKSGDRKAGNYFCQRISLAIQRGNVASLLGTITEGSSLEDIFYL

SEQ ID NO: 3852 - protein, 956 aa, Tinea semifulvella
MSLDAVSASSDVPDQFSDTLYVKCEQCSQPRFFRGSRGLKIHIGKTHKQNSIQASSNTCPDQLDFSKILGHYKNSLPLIKRIPRGARITVAKALTKLINKVVAENSKISWEYLLTFAYRTLYVKRGEGHSVSLTQKIKDNCDQISDGLNIITPPPFKNHTKNYSVKKIEDKINDGDLKGAADLLFSHDVVAPDSPETLAALQNKHPPPATTLLLPDPPGQNEPCLQVTSSEVQNAILSFKNGSAGGLDGLTPQHYKDLISGTAGDAAEPLLVALTSLVNVMLSGQVPISITDILYGANICALKKKDGGIRPIAVGCTLRRIVSKICSKIILPTLTSKFQPLQVGFGSKGGCEAAVHAARSFVVHHGGDVMLKVDVKNAFNSVDRGVMLDQVKQQTPEIFSYIWQCYSTPSKLIYKNNSLLSAVGCQQGDPLGPAIFSLAIHNIISSLNSKFNIWYLDDGTIGGNADTVLGDLQKLIYDFGTIGLELNFSKCELYLSNLLTHGKQIEIISKFNSLAPNIKILNNESLRLLGSPILDESIQIYVQEQLTKFNSTSERLFQIQPHMALFIIRFCLFAPKFTYVLRCSQLWKFSEELFLLDKQLQNSLTEILNCPMNDRTWAQASLPIRFGGLGTRKISSVALPAFLSSVHSTVELYGRITNPSLGSVEPSYLSDARDAWSVACPNVSVPNLPKIQRLWDEPLCKLVQEDILSASNMKERARLMAVSTRESGLWLQAFPSASVGTLLDRNTLTMAVCLRLGARTVHPHQCRCGEPVDHLGHHGLSCARSSGRIPRHAALNDIIRRALVTAGVPAILEPSGIVRSDGKRPDGMTVGPWKLGKSLVWDATCVDTLAPSHIQATSSGAGKAAFSAENLKLRKYANLGIGYEFVPFGVETMGPWGPSARRLAKELSRRLTERSGDRKAGNYFCQRISLAIQRGNVASLLGTISDGTSLEDIFYL

SEQ ID NO: 3853 - protein, 956 aa, Tinea semifulvella
MSLDVLPASSDVPSQSSDTSLYVRCEQCSQPRFFRGSRGLKIHIGKALKQNSIEASSNTLSDQLDFSQVLGRYKNSLPLIKRIPRGARITVAKSLTKLINNVVNENSKKCWELLLTFAYRTLYVKRGEGHSSLTQKIKENCTQMSELEDIIAPPPLKHHTNNIRFKKIETKMNDGDLKGAADLLFSNDVIAPDSSETLAALQRKHPPPAATLLLPDPPGQNEPCLQITSTEVQNAILSFKNGSAGGLDGLTPQHYKDLISGTAGDAAEPLLAALTSLVNIMLSGKVSISITDILYGANICALEKKDGGIRPIAVGCTLRRIVSKICSKKVLPTLTSKFQPLQVGFGSKGGCEAAVHAARSFVVNHGGDVLLKVDVKNAFNSVDRGAMLEQIKQHTPEIYSYLWQNYSTPSKLIYKNNTLLSAVGCQQGDPLGPAIFSLAIHKIISSLNSKFNIWYLDDGTIGGNVDTVLGDLQKLIKDFGTIGLELNFSKCELYISNLLTSGKQSEIISLFNSLAPNIKILNNETLRLLGSPILDESIQIYVQEQLNKFNSTSERLFQIQPHMALFIIRFCLFAPKFTYVLRCSQLWKFPDELLLLDKLLQNSLIKILNCPMNDRTWAQASLPIRFGGLGTRKISSVALPAFLSSVHSTVELYGKITNPSLGSVEPSYLSDARDAWSVACPNKSVPNLTKFQRLWDEPLCKLVLDDILSSSNTRERARLMAVSTRESGLWLQAFPSASVGTLLDRNTLTMAVCLRLGARTVHPHQCRCGEPVEHLGHHGLSCARSAGRIPRHAALNDIIRRAFVTAGVPAILEPSGIARSDGKRPDGMTVGPWKLGRSLVWDATCVDTLAPSHIQATSSSAGSAAVSAENLKLRKYANLSTGYEFAPFGVETMGPWGHSAKRLAKELSKRLTEKSGDRKAGNYFCQRISLAIQRGNVASLLGTITEGSSLEDIFYL

SEQ ID NO: 3854 - protein, 956 aa, Tinea semifulvella
MSLDAVSASSDVPDQFSDTLYVKCEQCSQPRFFRGSRGLKIHIGKTHKQNSIQASSNTFPDQLDFSKILGNYKNSLPLIKRIPRGARITVAKALTKLINKVVAENSKISWEFLLTFAYRTLYVKRGEGHSVSLTQKIKDNCDQISDGLNIMTPPPFKNHTKNYSIKKIEDKINDGDLKGAADLLFSHDVVAPDSPETLAALQNKHPPPATTLLLPDPPGQNEPCLQVTSSEVQNAILSFKNGSAGGLDGLTPQHYKDLISGTAGDAAEPLLVALTSLVNIMLSGQVPISITDILYGANICALKKKDGGIRPIAVGCTLRRIVSKICSKIILPTLTSKFQPLQVGFGSKGGCEAAVHAARSFVVHHGGDVMLKVDVKNAFNSVDRGVMLDQIKQQTPEIYSYLWQCYSTSSKLFFKNNTLLSAVGCQQGDPLGPAIFSLAIHNIISSLNSKFNIWYLDDGTIGGNADTVLSDLQKLIYDFGTIGLELNFSKCELYLSNLLTHGKQIEIISKFNSLAPNIKILNNETLRLLGSPILDESIQIYVQEQLTKFNSTSERLFQIQPHMALFIIRFCLFAPKFTYVLRCSQLWKFSEELFLLDKQLQNSLTEILNCPMNDRTWAQASLPIRFGGLGTRKISSVALPAFLSSVHSTVELYGRITNPSLGSVEPSYLSDARDAWSVACPNVSVPNSPKIQRLWDEPLCKLLQKDILSASNMKERARLMAVSTRESGLWLQAFPSASVGTLLDRNTLTMAVCLRLGARTVHPHQCRCGEPVDHLGHHGLSCARSAGRIPRHAALNDIIRRALVTAGVPAILEPSGIVRSDGKRPDGMTVGPWKLGRSLVWDATCVDTLAPSHIQATSSGAGSAAFSAENLKLRKYANLGIGYEFAPFGVETMGPWGPSARRLAKELSKRLTERSGDRKAGNYFCQRISLAIQRGNVASLLGTISDGTSLEDIFYL

SEQ ID NO: 3855 - protein, 938 aa, Tinea semifulvella
MSLDVLPASSDVPSQSSDTSLYVRCEQCSQPRFFRGSRGLKIHIGKAHKQNSIEASSNTLSDQLDFSQVLGRYKNSLPLIKRIPRGARITVAKSLTKLINNVVNENSKKCWELLLTFAYRTLYVKRGEGHSSLTQKIKENCTQMSELEDIIAPPPLKHHTNNIRFKKIETKMNDGDLKGAADLLFSNDVIAPDSSETLAALQRKHPPPAATLLLPDPPGQNEPCLQITSTEVQNAILSFKNGSAGGLDGLTPQHYKDLISGTAGDAAEPLLAALTSLVNIMLSGKVSISITDILYGANICALEKKDGGIRPIAVGCTLRRIVSKICSKKVLPTLTSKFQPLQVGFGSKGGCEAAVHAARSFVVNHGGDVLLKVDVKNAFNSVDRGAMLEQIKQHTPEIYSYLWQNYSTPSKLIYKNNTLLSAVGCQQGDPLGPAIFSLAIHKIISSLNSKFNIWYLDDGTIGGNVDTVLGDLQKLIKDFGTIGLELNFSKCELYISNLLTSGKQSEIISLFNSLAPNIKILNNETLRLLGSPILDESIQIYVQEQLNKFNSTSERLFQIQPHMALFIIRFCLFAPKFTYVLRCSQLWKFPDELLLLDKLLQNSLIKILNCPMNDRTWAQASLPIRFGGLGTRKISSVALPAFLSSVHSTVELYGKITNPSLGSVEPSYLSDARDAWSVACPNKSVPNLTKFQRLWDEPLCKLVLDDILSSSNTRERARLMAVSTRESGLWLQAFPSASVGTLLDRNTLTMAVCLRLGARTVHPHQCRCGEPVEHLGHHGLSCARSAGRIPRHAALNDIIRRAFVTAGVPAILEPSGIARSDGKRPDGMTVGPWKLGRSLVWDATCVDTLAPSHIQATSSSAGSAAVSAENLKLRKYANLSTGYEFAPFGVETMGPWGHSAKRLAKELSKRLTEKSGDRKAGNYFCQRISLAIQTYILN

SEQ ID NO: 3856 - protein, 949 aa, Tinea trinotella
MSSDVASTSSDVPSQSVYVKCEQCSQPRYFRGSRGLKIHIGKTHKQNYIQTSSNTFSDQLDFGKILGQYKNSLPLIKRIPRGARITVATKLINKVLNENSKKNWEDLLTFAYRTLHVNRGVGLNVSLTQKIKDNCDQILDRPNIITPPKKLQTQNYNIKKIEDKINDGDLKGAADLLFSNDVVAPDSPETLAALQSKHPPPAATLLLPDPPGQDEHCLQITSTEVKNSILSFKNGSAGGLDGLTPQHYKDMISGSAGDAAEPLLAAITSLVNIMLSGKVPFGITDILYGANICALKKKDGGIRPIAVGCTLRRIVSKISSKKILPNLTAKFQPLQVGFGSKGGCEAAVHAARSFVVNNGGDVMLKVDVKNAFNSVDRGAMLEQIKQHTPEIYSYLWQCYSTPSKLIYKNHSLVSAVGCQQGDPLGPAIFSLTIHKIISSLNSKFNLWYLDDGTIAGNADTVLRDLQKIINDFKTIGLELNFAKCELYPSNLLTPGEQSKIISIFNSLAPNIKILNNETLRLLGSPILDESIQIYVQEQLTKFNSTSERLFQIQPHMALFIIRFCLFAPKFTYVLRCSQLWKFPNELLLLDKLLQNTLTEILNCPMNDRTWAQASLPIRFGGLGIRKISSVALPAFLSSVYSTVELYGSITNPSLGSVEPAYMSDARDAWSVACPNISLPISPKFQRLWDEPLCKMVMEDILSSSNMRERARLIAVSTRESGFWLQAFPSASVGTLLDRNTLTLAVCLRLGARTVHQHQCRCGEPVDNLGHHGLSCARSAGRIPRHAALNDIIRRALVTVGVPAILEPCGIARSDGKRPDGMTVGPWKLGRSLVWDATCVDTLAPSHIQATSLSAGSAAISAENLKLRKYANLGTGYEFAPFGVETMGPWGPSAKCLAKELSRRLTEKSGDRKAGNYFCQRISLAIQRGNVTSLLGTISDATSLDDIFYL

SEQ ID NO: 3857 - protein, 950 aa, Tinea semifulvella
MSLDVLPASSDVPSQSSDTSLYVRCEQCSQPRFFRGSRGLKIHIGKTHKQNSIEASSNTLSDQLDFSQVLGRYKNSLPLIKRIPRGARITVAKSLTKLINNVVNENSKKCWELLLTFAYRTLYVKRGEGHSSLTQKIKDNCTQMSELEDIIAPPPLKHHTNNIRFKKIETKMNDGDLKGAADLLFSNDVIAPDSSETLAALQRKHPPPAATLLLPDPPGQNEPCLQITSTEVQNAILSFKNGSAGGLDGLTPQHYKDLISGTAGDAAEPLLAALTSLVNIMLSGKVSISITDILYGANICALEKKDGGIRPIAVGCTLRRIVFKICSKKVLPTLTSKFQPLQVGFGSKGGCEAAVHAARSFVVNHGGDVLLKVDVKNAFNSVDRGAMLEQIKQHTPEIYSYLWQNYSSPSKLIYKNNTLLSAVGCQQGDPLGPAIFSLAIHKIISSLNSKFNIWYLDDGTIGGNVDTVLGDLQKLIKDFGTIGLELNFSKCELYISNLLTSGKQSEIISLFNSLAPNIKILNNETLRLLGSPILDESIQIYVQEQLNKFNSTSERLFQIQPHMALFIIRFCLFAPKFTYVLRCSQLWKFPDELLLLDKLLQNSLIKILNCPMNDRTWAQASLPIRFGGLGTRKISSVALPAFLSSVHSTVELYGKITNPSLGSVEPSYLSDARDAWSVACPNKSVPNLTKFQRLWDEPLCKLVLDDILSSSNTRKRARLMAVSTRESGLWLQAFPSASVGTLLDRNTLTMAVCLRLGARTVHPHQCRCGEPVEHLGHHGLSCARSAGRIPRHAALNDIIRRAFVTAGVPAILEPSGIARSDGKRPDGMTVGPWKLGRSLVWDATCVDLQATSSSAGSAAVSAENLKLRKYASLSTGYEFAPFGVETMGPWGHSAKRLAKELSKRLTEKSGDRKAGNYFCQRISLAIQRGNVASLLGTITEGSSLEDIFYL

SEQ ID NO: 3858 - protein, 956 aa, Tinea semifulvella
MSVDAVSASSDVPDHFSDTLYVKCEQCSQPRFFRGNRGLKIHIGKTHKENSIQASSNTCPDQSDFSNILGHYKNSLPLIKRIPRGARITVAKALTKLINKVVAENSKISWEFLLTFAYRTLYVKRGEGHSVSLTQKIKDNCDQISDGLNIITPPPFKNHSKNYSIKKIEDKINDGELKGAADLLFSHDVVAPDSPETLAALQNKHPPPATTLLLPDPPGQNEPCLQITSSEVQNVILPFKNGSAGGLDGLTPQHYKDLIGGTAGDAAEPLLVALTSLVNIMLSGQVPISITDILYGANICALKKKDGGIRPIAVGCTLRRIVSKICSKIILPTLTSKFQPLQVGFGSKGGCEAAVHAARSFVVHHGGDVMLKVDVKNAFNSVDRGVMLDQVKQQTPEIFSYLWQCYSTSSKLIYKNNTILSAVGCQQGDPLGPAIFSLAIHNIISSLNSKFNIWYLDDGTIGGNADTVLDDLQKLIYDFGTIGLELNFSKCELYLSNLLTHDKQIEIISKFNSLAPNIKILNNETLRLLGSPILDESIQIYVQEQLTKFNLTSERLFKIQPHMALFIIRYCLFAPKFMYVLRCSQLWKFSEELVLLDKQLQNSLTEILNCPMNDRTWAQASLPIRFGGLGTRKISSVALPAFLSSVHSTVELYGRITNPSLGSVEPSYLSDARDAWSVACPNVSVPISPKIQRLWDEPLCKLVQEDILSASNIKERARLMAVSTRESGLWLQAFPSASVGTLLDRHTLTMAVCLRLGARTVHPHQCRCGEPVDHLGHHGLSCARSAGRIPRHAALNDIIRRALVTAGVPAILEPSGIVRSDGKRPDGMTVGPWKLGRSLVWDATCVDTLAPSHIQATSSGAGRAAFSAENLKLRKYANLSSGYEFAPFGVETMGPWGPSARRLAKELSKRLTERSGDRKAGNYFCQRICLAIQRGNVASLLGTISDGTSLEDIFYL

SEQ ID NO: 3859 - protein, 956 aa, Tinea semifulvella
MSVDAVSASSDVPDHISDTLYVKCEQCSQPRFFRGSRGLKIHIGKTHKQNSIQASSNTCPDQSDFSNILGHYKNSLPLIKRIPRGARITVAKALTKLINKVVAENSKISWEFLLTFAYRTLYVKRGEGHSVSLTQKIKDNCDQISDGLNIITPPPFKNHSKNYSIKKIEDKINDGDLKGAADLLFSHDVVAPDSPETLAALQNKHPPPATTLLLPDPPGQNEPCLQITSSEVQNAILSFKNGSAGGLDGLTPQHYKDLIGGTAGDAAEPLLVALTSLVNIMLSGQVPISITDILYGANICALKKKDGGIRPIAVGCTLRRIVSKICSKIILPTLTSKFQPLQVGFGSKGGCEAAVHAARSFVVHHGGDVMLKVDVKNAFNSVDRGVMLDQVKQQTPEIFSYLWQCYSTSSKLIYKNNTILSAVGCQQGDPLGPAIFSLAIHNIISSLNSKFNIWYLDDGTIGGNADTVLDDLQKLIYDFGTIGLELNFSKCELYLSNLLTHDKQIEIISKFNSLAPNIKILNNETLRLLGSPILDESIQIYVQEQLTKFNLTSERLFKIQPHMALFIIRYCLFAPKFMYVLRCSQLWKFSEELVLLDKQLQNSLTEILNCPMNDRTWAQASLPIRFGGLGTRKISSVALPAFLSSVHSTVELYGRITNPSLGSIEPSYLSDARDAWSVACPNVSVPISPKIQRLWDEPLCKLVQEDILSASNIKERARLMAVSTRESGLWLQAFPSASVGTLLDRHTLTMAVCLRLGARTVHPHQCRCGEPVDHLGHHGLSCARSAGRIPRHAALNDIIRRALVTAGVPAILEPSGIVRSDGKRPDGMTVGPWKLGRSLVWDATCVDTLAPSHIQATSSGAGRAAFSAENLKLRKYANLSSGYEFAPFGVETMGPWGPSARRLAKELSKRLTERSGDRKAGNYFCQRISLAIQRGNVASLLGTISDGTSLEDIFYL

SEQ ID NO: 3860 - protein, 956 aa, Tinea semifulvella
MSVDAVSASSDVPDHISDTLYVKCEQCSQPRFFRGSRGLKIHIGKTHKQNSIQASSNTCPDQSDFSNILGHYKNSLPLIKRIPRGARITVAKALTKLINKVVAENSKISWEFLLTFAYRTLYVKRGEGHSVSLTQKIKDNCDQISDGLNIITPPPFKNHSKNYSIKKIEDKINDGDLKGAADLLFSHDVVAPDSPETLAALQNKHPPPATTLLLPDPPGQNEPCLQITSSEVQNAILSFKNGSAGGLDGLTPQHYKDLIGGTAGDAAEPLLVALTSLVNIMLSGQVPISITDILYGANICALKKKDGGIGPIAVGCTLRRIVSKICSKIILPTLTSKFQPLQVGFGSKGGCEAAVHAARSFVVHHGGDVMLKVDVKNAFNSVDRGVMLDQVKQQTPEIFSYLWQCYSTSSKLIYKNNTILSAVGCQQGDPLGPAIFSLAIHNIISSLNSKFNIWYLDDGTIGGNADTVLDDLQKLIYDFGTIGLELNFSKCELYLSNLLTHDKQIEIISKFNSLAPNFKILNNETLRLLGSPILDESIQIYVQEQLTKFNLTSERLFKIQPHMALFIIRYCLFAPKFMYVLRCSQLWKFSEELVLLDKQLQNSLTEILNCPMNDRTWAQASLPIRFGCLGTRKISSVALPAFLSSVHSTVELYGRITNPSLGSVEPSYLSDARDAWSVACPNVSVPISPKIQRLWDEPLCKLVQEDILSASNIKERARLMAVSTRESGLWLQAFPSASVGTLLDRHTLTMAVCLRLGARTVHPHQCRCGEPVDHLGHHGLSCARSAGRIPRHAALNDIIRRALVTAGVPAILEPSGIVRSDGKRPDGMTVGPWKLGRSLVWDATCVDTLAPSHIQATSSGAGRAAFSAENLKLRKYANLSSGYEFAPFGVETMGPWGPSARRLAKELSKRLTERSGDRKAGNYFCQRISLAIQRGNVASLLGTISDGTSLEDIFYL

SEQ ID NO: 3861 - protein, 676 aa, Tinea semifulvella
MLSGQVPISITDILYGANICALKKKDGGIRPIAVGCTLRRIVSKICSKIILPTLTSKFQPLQVGFGSKGGCEDAVHAARSFVVHHGGDVMLKVDVKNAFNSVDRGVMLDQVKQQTPEIFSYIWQCYSTPSKLIYKNNSLLSAVGCQQGDPLGPAIFSLAIHNIISSLNSKFNIWYLDDGTIGGNADTVLGDLQKLIYDFGTIGLELNFSKCELYLSNLLTHGKQIEIISKFNSLAPNIKILNNESLRLLGSPILDESIQIYVQEQLTKFNSTSERLFQIQPHMALFIIRFCLFAPKFTYVLRCSQLWKFSEELFLLDKQLQNSLTEILNCPMNDRTWAQASLPIRFGGLGTRKISSVALPAFLSSVHSTVELYGRITNPSLGSVEPSYLSDARDAWSVACPNVSVPNLPKIQRLWDEPLCKLVQEDILSASNMKERARLMAVSTRESGLWLQAFPSASVGTLLDRNTLTMAVCLRLGARTVHPHQCRCGEPVDHLGHHGLSCARSAGRIPRHAALNDIIRRALVTAGVPAILEPSGIVRSDGKRPDGMTVGPWKLGKSLVWDATCVDTLAPSHIQATSSGAGKAAFSAENLKLRKYANLGIGYEFVPFGVETMGPWGPSARRLAKELSRRLTERSGDRKAGNYFCQRISLAIQRGNVASLLGTISDGTSLEDIFYL

SEQ ID NO: 3862 - protein, 956 aa, Tinea semifulvella
MSVDAVSASSDVPDHFSDTLYVKCEQCSQPRFFRGSRGLKIHIGKTHKQNSIQASSNTCPDQSDFSNILGHYKNSLPLIKRIPRGARITVAKALTKLINKVVAENSKISWEFLLTFAYRTLYVKRGEGHSVSLTQKIKDNCDQISDGLNIITPPPFKNHSKNYSIKKIEDKINDGDLKGAADLLFSHDVVAPDSPETLAALQNKHPPPATTLLLPDPPGQNEPCLQITSSEVQNAILSFKNGSAGGLDGLTPQHYKDLIGGTAGDAAEPLLVALTSLVNIMLSGQVPISITDILYGANICALKKKDGGIRPIAVGCTLRRIVSKICSKIILPTLTSKFQPLQVGFGSKGGCEAAVHAARSFVVHHGGDVMLKVDVKNAFNSVDRGVMLDQVKQQTPEIFSYLWQCYSTSSKLIYKNNTILSAVGCQQGDPLGPAIFSLAIHNIISSLNSKFNIWYLDDGTIGGNADTVLDDLQKLIYDFGTIGLELNFSKCELYLSNLLTHDKQIEIISKFNSLAPNIKILNNETLRLLGSPILDESIQIYVQEQLTKFNLTSERLFKIQPHMALFIIRYCLFAPKFMYVLRCSQLWKFSEELVLLDKQLQNSLTEILNCPMNDRTWAQASLPIRFGGLGTRKISSVALPAFLSSVHSTVELYGRITNPSLGSVEPSYLSDARDAWSVACPNVSVPISPKIQRLWDEPLCKLVQEDILSASNIKERARLMAVSTRESGLWLQAFPSASVGTLLDRHTLTMAVCLRLGARTVHPHQCRCGEPVDHLGHHGLSCARSAGRIPRHAALNDIIRRALVTAGVPAILEPSGIVRSDGKRPDGMTVGPWKLGRSLVWDATCVDTLAPSHIQATSSGAGRAAFSAENLKLRKYANLSSGYEFAPFGVETMGPWGPSARRLAKELSKRLTERSGDRKAGNYFCQRISLAIQRGNVASLLGTISDGTSLEDIFYL

SEQ ID NO: 3863 - protein, 956 aa, Tinea semifulvella
MSLDAVSASSDVPDQFSDTLYVKCEQCSQPRFFRGSRGLKIHIGKTHKQNSIQASSNTCPDQLDFSKILGHYKNSLPLIKRIPRGARITVANALTKLINKVVAENSKISWEYLLTFAYRTLYVKRGEGHSVSLTQKIKDNCDQISDGLNIITPPPFKNHTKNYSVKKIEDKINDGDLKGAADLLFSHDVVAPDSPETLAALQNKHPPPATTLLLPDPPGQNEPCLQVTSSEVQNAILSFKNGSAGGLDGLTPQHYKDLISGTAGDAAEPLLVALTSLVNVMLSGQVPISITDILYGANICALKKKDGGIRPIAVGCTLRRIVSKICSKIILPTLTSKFQPLQVGFGSKGGCEAAVHAARSFVVHHGGDVMLKVDVKNAFNSVDRGVMLDQVKQQTPEIFSYIWQCYSTPSKLIYKNNSLLSAVGCQQGDPLGPAIFSLAIHNIISSLNSKFNIWYLDDGTIGGNADTVLGDLQKLIYDFGTIGLELNFSKCELYLSNLLTHGKQIEIISKFNSLAPNIKILNNESLRLLGSPILDESIQIYVQEQLTKFNSTSERLFQIQPHMALFIIRFCLFAPKFTYVLRCSQLWKFSEELFLLDKQLQNSLTEILNCPMNDRTWAQASLPIRFGGLGTRKISSVALPAFLSSVHSIVELYGRITNPSLGSVEPSYLSDARDAWSVACPNVSVPNLPKIQRLWDEPLCKLVQEDILSASNMKERARLMAVSTRESGLWLQAFPSASVGTLLDRNTLTMAVCLRLGARTVHPHQCRCGEPVDHLGHHGLSCARSAGRIPRHAALNDIIRRALVTAGVPAILEPSGIVRSDGKRPDGMTVGPWKLGKSLVWDATCVDTLAPSHIQATSSGAGKAEFSAENLKLRKYANLGIGYEFVPFGVETMGPWGPSARRLAKELSRRLTERSGDRKAGNYFCQRISLAIQRGNVASLLGTISDGTSLEDIFYL

SEQ ID NO: 3864 - protein, 956 aa, Tinea semifulvella
MSLDAVSASSDVPDQFSDTLYVKCEQCSQPRFFRGSRGLKIHIGKTHKQNSIQASSNTFPDQLDFSKILGNYKNSLPLIKRIPRGARITVAKALTKLINKVVAENSKISWEFLLTFAYRTLYVKRGEGHSVSLTQKIKDNCDQISDGLNIMTPPPFKNHTKNYSIKKIEDKINDGDLKGAADLLFSHDVVAPDSPETLAALQNKHPPPATTLLLPDPPGQNEPCLQVTSSEVQNAILSFKNGSAGGLDGLTPQHYKDLISGTAGDAAEPLLVALTSLVNIMLSGQVPISITDILYGANICALKKKDGGIRPIAVGCTLRRIVSKICSKIILPTLTSKFQPLQVGFGSKGGCEAAVHAARSFVVHHGGDVMLKVDVKNAFNSVDRGVMLDQIKQQTPEIYSYLWQCYSTSSKLFFKNNTLLSAVGCQQGDPLGPAIFSLAIHNIISSLNSKFNIWYLDDGTIGGNADTVLSDLQKLIYDFGTIGLELNFSKCELYLSNLLTHGKQIEIISKFNSLAPNIKILNNETLRLLGSPILDESIQIYVQEQLTKFNSTSERLFQIQPHMALFIIRFCLFAPKFTYVLRCSQLWKFSEELFLLDNQLQNSLTEILNCPMNDRIWAQASLPIRFGGLGTRKISSVALPAFLSSVHSTVELYGRITNPSLGSVEPSYLSDARDAWSVACPNVSVPNSPKIQRLWDEPLCKLLQKDILSASNMKERARLMAVSTRESGLWLQAFPSASVGTLLDRNTLTMAVCLRLGARTVHPHQCRCGEPVDHLGHHGLSCARSAGRIPRHAALNDIIRRALVTAGVPAILEPSGIVRSDGKRPDGMTVGPWILGRSLVWDATCVDTLAPSHIQATSSGAGSAAFSAENLKLRKYANLGIGYEFAPFGVETMGPWGPSARRLAKELSKRLTERSGDRKAGNYFCQRISLAIQRGNVASLLGTISDGTSLEDIFYL

SEQ ID NO: 3865 - protein, 950 aa, Tinea semifulvella
MSVDAVSASSDVPDHFSDTLCVKCEQCSQPRFFRGSRGLKIHIGKTHKQNSIQASSNLRPDQSDFSNILGHYKNSLPLIKRIPRGARITVAKALTKLINKVVAENSKISWEFLLTFAYRTLYVKRGEGHSVSLTQKIKDNCDQISDGLNIITPPPFKNHSKNYSIKKIEDKINDGDLKGAADLLFSHDVVAPDSPETLAALQNKDLPPATTLLLPDPPGQNEPCLQITSSEVQNAILSFKNGSAGGLDGLTPQHYKDLIGGTAGDAAEPLLVALTSLVNIMLSGQVPISITDILYGANICALKKKDGGIRPLRRIVSKICSKIILPTLTSKFQPLQVGFGSKGGCEAAVHAARSFVVHHGGDVMLKVDVKNAFNSVDRGVMLDQVKQQTPEIFSYLWQCYSTSSKLIYKNNTILSAVGCQQGDPLGPAIFSLAIHNIISSLNSKFNIWYLDDGTIGGNADTVLDDLQKLIYDFGTIGLELNFSKCELYLSNLLTHDKQIEIISKFNSLAPNIKILNNETLRLLGSPILDESIQIYVQEQLTKFNLTSERLFKIQPHMALFIIRYCLFAPKFMYVLRCSQLWKFSEELVLLDKQLQNSLTEILNCPMNDRTWAQASLPIRFGGLGTRKISSVALPAFLSSVHSTVELYGRITNPSLGSVEPSYLSDARDAWSVACPNVSVPISPKIQRLWDEPLCKLVQEDILSASNIKERARLMAVSTRESGLWLQAFPSASVGTLLDRHTLTMAVCLRLGARTVHPHQCRCGEPVDHLGHHGLSCARSAGRIPRHAALNDIIRRALVTAGVPAILEPSGIVRSDGKRPDGMTVGPWKLGRSLVWDATCVDTLAPSHIQATSSGAGRAAFSAENLKLRKYANLSSGYEFAPFGVETMGPWGPSARRLAKELSKRLTERSGDRKADNYFCQRISLAIQRGNVASLLGTISDGTSLEDIFYL

SEQ ID NO: 3866 - protein, 925 aa, Tinea semifulvella
MSLDVLPASSDVPSQSSDTSLYVRCEQCSQPRFFRGSRGLKIHIGKAHKQNSIEASSNTLSDQLDFSQVLGRYKNSLPLIKRIPRGARITVAKSLTKLINNVVNENSKKCWELLLTFAYRTLYVKRGEGHSSLTQKIKDNCTQMSELEDIIATPPLKHHTNNFRFKKIETKMNDGDLKGAADLLFSNDVIAPDSSETLAALQRKHPPPAATLLLPDPPGQNEPCLQITSTEVQNAILSFKNGSAGGLDGLTPQHYKDLISGTAGDAAEPLLAALTSLVNIMLSGKVSISITDILYGANICALEKKDGGIRPIAVGCTLRRIVSKICSKKVLPTLTSKFQPLQVGFGSKGGCEAAVHAARSFVVNHGGDVLLKVDVKNAFNSVDRGAMLEQIKQHTPEIYSYLWQNYSTPSKLIYKNNTLLSAVGCQQGDPLGPAIFSLAIHKIISSLNSKFNIWYLDDGTIGGNVDTVLGDLQKLIKDFGTIGLELNFSKCELYISNLLTSGKQSEIISLFNSLAPNIKILNNETLRLLGSPILDESIQIYVQEQLNKFNSTSERLFQIQPHMALFIIRFCLFAPKFIYVLRCSQLWKFPDELLLLDKLLQNSLIKILNCPMNDRTWAQASLPIRFGGLGTRKISSVALPAFLSSVHSTVELYGKITNPSLGSVEPSYLSDARDAWSVACPNKSVPNLTKFQRLWDEPLCKLVLDDILSSSNTRERARLMAVSTRESGLWLQAFPSASVGTLLDRNTLTMAVCLRLGARTVHSHQCRCGEPVEHLGHHGLSCARSAGRIPRHAALNDIIRRAFVTAGVPAILEPSGIARSDGKRPDGMTVGPWKLGRSLVWDATCVDTLAPSHIQATSSSAGSAAVSAENLKLRKYANLSTGYEFAPFGVETMGPWGHSAKRLAKELSKRLTEKSGDRKAGNYFC

SEQ ID NO: 3867 - protein, 956 aa, Tinea semifulvella
MSLDVLPASSDVPSQSSDTSLYVRCEQCSQPRFFRGSRGLKIHIGKAHKQNSIEASSNTLSDQLDFSQVLGRYKNSLPLIKRIPRGARITVAKSLTKLINNVVNENSKKCWELLLTFAYRTLYVKRGEGHSSLTQKIKENCTQMSELEDIIAPPPLKHHTNNIRFKKIETKMNDGDLKGAADLLFSNDVIAPDSSETLAALQRKHPPPAATLLLPDPPGQNEPCLQITSTEVQNAILSFKNGSAGGLDGLTPQHYKDLISGTAGDAAEPLLAALTSLVNIMLSGKVSISITDILYGANICALEKKDGGIRPIAVGCTLRRIVSKICSKKVLPTLTSKFQPLQVGFGSKGGCEAAVHAARSFVVNHGGDVLLKVDVKNAFNSVDRGAMLEQIKQHTPEIYSYLWQNYSTPSKLIYKNNTLLSAVGCQQGDPLGPAIFSLAIHKIISSLNSKFNIWYLDDGTIGGNVDTVLGDLQKLIKDFGTIGLELNFSKCELYISNLLTSGKQSEIISLFNSLAPNIKILNNETLRLLGSPILDESIQIYVQEQLNKFNSTSERLFQIQPHMALFIIRFCLFAPKFTYVLRCSQLWKFPDELLLLDKLLQNSLIKILNCPMNDRTWGQASLPIRFGGLGTRKISSVALPAFLSSVHSTVELYGKITNPSLGSVEPSYLSDARDAWSVACPNKSVPNLTKFQRLWDEPLCKLVLDDILSSSNTRERARLMAVSTRESGLWLQAFPSASVGTLLDRNTLTMAVCLRLGARTVHPHQCRCGEPVEHLGHHGLSCARSAGRIPRHAALNDIIRRAFVTAGVPAILEPSGIARSDGKRPDGMTVGPWKLGRSLVWDATCVDTLAPSHIQATSSSAGSAAVSAENLKLRKYANLSTGYEFAPFGVETMGPWGHSAKRLAKELSKRLTEKSGDRKAGNYFCQRISLAIQRGNVASLLGTITEGSSLEDIFYL

SEQ ID NO: 3868 - protein, 956 aa, Tinea semifulvella
MSLDAVSASSDVPDQFSDTLYVKCEQCSQPRFFRGSRGLKIHIGKTHKQNSIQASSNTYPDQLDFSKILGHYKNSLPLIKRIPRGARITVAKALTKLINKVVAENSKISWEYLLTFAYRTLYVKRGEGHSVSLTQKIKDNCDQISDGLNIITPPPFKNHTKNYSVKKIEDKINDGDLKGAAELLFSHDVVAPDSPETLAALQNKHPPPATTLLLPDPPGQNEPCLQVTSSEVQNAILSFKNGSAGGLDGLTPQHYKDLISGTAGDAAEPLLVALTSLVNVMLSGQVPISITDILYGANICALEKKDGGIRPIAVGCTLRRIVSKICSKIILPTLTSKFQPLQVGFGSKGGCEAAVHAARSFVVHHGGDVMLKVDVKNAFNSVDRGVMLDQVKQQTPEIFSYIWQCYSTPSKLIYKNNSLLSAVGCQQGDPLGPAIFSLAIHNIISSLNSKFNIWYLDDGTIGGNADTVLGDLQKLIYDFGTIGLELNFSKCELYLSNLLTHGKQIEIISKFNSLAPNIKILNNESLRLLGSPILDESIQIYVQEQLTKFNSTSERLFQIQPHMALFIIRFCLFAPKFTYVLRCSQLWKFSEELFLLDKQLQNSLTEILNCPMNDRTWAQASLPIRFGGLGTRKISSVALPAFLSSVHSTVELYGRITNPSLGSVEPSYLSDARDAWSVACPNVSVPNLPKIQRLWDEPLCKLVQEDILSASNMKERARLMAVSTRESGLWLQAFPSASVGTLLDRNTLTMAVCLRLGARTVHPHQCRCGEPVDHLGHHGLSCARSAGRIPRHAALNDIIRRALVTAGVPAILEPSGIVRSDGKRPDGMTVGPWKLGKSLVWDATCVDTLAPSHIQATSSGAGKAAFSAENLKLRKYANLGIGYEFVPFGVETMGPWGPSARRLAKELSRRLTERSGDRKAGNYFCQRISLAIQRGNVASLLGTISDGTSLEDIFYL

SEQ ID NO: 3869 - protein, 956 aa, Tinea semifulvella
MSLDVLPASSDVPSQSSDTSLYVRCEQCSQPRFFRGSRGLKIHIGKAHKQNSIEASSNTLSDQLDFSQVLGRYKNSLPLIKRIPRGARITVAKSLTKLINNVVNENSKKCWELLLTFAYRTLYVKRGEGHSSLTQKIKDNCTQMSELEDIIATPPLKHHTNNFRFKNIETKMNDGDLKGAADLLFSNDVITPDSSETLAALQRKHPPPAATLLLPDPPGQNEPCLQITSTEVQNAILSFKNGSAGGLDGLTPQHYKDLISGTAGDAAEPLLAALTSLVNIMLSGKVSISITDILYGANICALEKKDGGIRPIAVGCTLRRIVSKICSKKVLPTLTSKFQPLQVGFGSKGGCEASVHAARSFVVNHGGDVLLKVDVKNAFNSVDRGAMLEQIKQHTPEIYSYLWQNYSTPSKLIYKNNTLLSAVGCQQGDPLGPAIFSLAIHKIISSLNSKFNIWYLDDGTIGGNVDTVLGDLQKLIKDFGTIGLELNFSKCELYISNLLTSGKQSEIISLFNSLAPNIKILNNETLRLLGSPILDESIQIYVQEQLNKFNSTSERLFQIQPHMALFIIRFCLFAPKFIYVLRCSQLWKFPDELLLLDKLLQNLLIKILNCPMNDRTWAQASLPIRFGGLGTRKISSVALPAFLSSVHSTVELYGKITNPSLGSVEPSYLSDARDAWSVACPNKSVPNLTKFQRLWDEPLCKLVLDDILSSSNTRERARLMAVSTRESGLWLQAFPSASVGTLLDRNTLTMAVCLRLGARTVHPHQCRCGEPVEHLGHHGLSCARSAGRIPRHAALNDIIRRAFVTAGVPAILEPSGIARSDGKRPDGMTVGPWKLGRSLVWDATCVDTLAPSHIQATSSSAGSAAVSADNLKLRKYANLSTGYEFAPFGVETMGPWGHSAKRLAKELSKRLTEKSGDRKAGNYFCQRISLAIQRGNVASLLGTITEGSSLEDIFYL

SEQ ID NO: 3870 - protein, 956 aa, Tinea semifulvella
MSVDDVSASSDVPDHFSDTLYVKCEQCSQPRFFRGSRGLKIHIGKTHKQNSIQASSNTCPDQSDFSNILGHYKNSLPLIKRIPRGARITVAKALTKLINKVVAENSKISWEFLLTFAYRTLYVKRGEGHSVSLTQKIKDNCDQISDGLNIITPPPFKNHSKNYSIKKIEDKINDGDLKGAADLLFSHDVVAPDSPETLAALQNKHPPPATTLLLPDPPGQNEPCLQITSSEVQNAILSFKNGSAGGLDGLTPQHYKDLIGGTAGDAAEPLLVALTSLVNIMLSGQVPISITDILYGANICALKKKDGGIRPIAVGCTLRRIVSKICSKIILPTLTSKFQPLQVGFGSKGGCEAAVHAARSFVVHHGGDVMLKVDVKNAFNSVDRGVMLDQVKQQTPEIFSYLWQCYSTSSKLIYKNNTILSAVGCQQGDPLGPAIFSLAIHNIISSLNSKFNIWYLDDGTIGGNADTVLDDLQKLIYDFGTIGLELNFSKCELYLSNLLTHDKQIEIISKFNSLAPNIKILNNETLRLLGSPILDESIQIYVQEQLTKFNLTSERLFKIQPHMALFIIRYCLFAPKFMYVLRCSQLWKFSEELVLLDKQLQNSLTEILNCPMNDRTWAQASLPIRFGGLGTRKISSVALPAFLSSVHSTVELYGRITNPSLGSVEPSYLSDARDAWSVACPNVSVPISPKIQRLWDEPLCKLVQEDILSASNIKERARLMAVSTRESGLWLQAFPSASVGTLLDRHTLTMAVCLRLGARTVHPHQCRCGEPVDHLGHHGLSCARSAGRIPRHAALNDIIRRALVTAGVPAILEPSGIVRSDGKRPDGMTVGPWKLGRSLVWDATCVDTLAPSHIQATSSGAGRAAFSAENLKLRKYANLSSGYEFAPFGVETMGPWGPSARRLAKELSKRLTERSGDRKAGNYFCQRISLAIQRGNVASLLGTISDGTSLEDIFYL

SEQ ID NO: 3871 - protein, 948 aa, Tinea semifulvella
MSLDVLPASSDVPSQSSDTSLYVRCEQCSQPRFFRGSRGLKIHIGKAHKQNSIEASSNTLSDQLDFSQVLGRYKNSLPLIKRIPRGARITVAKSLTKLINNVVNENSKKCWELLLTFAYRTLYVKRGEGHSSLTQKIKDNCTQMSELEDIIAPPPLKHHTNNIRFKKIETKMNDGDLKGAADLLFSNDVIAPDSSETLAALQRKHPPPAATLLLPDPPITSTEVQNAILSFKNGSAGGLNGLTPQHYKDLISGTAGDAAEPLLAALTSLVNIMLSGKVSISITDILYGANICALEKKDGGIRPIAVGCTLRRIVSKICSKKVLPTLTSKFQPLQVGFGSKGGCEAAVHAARSFVVNHGGDVLLKVDVKNAFNSVDRGAMLEQIKQHTPEIYSYLWQNYSTPSKLIYKNNTLLSAVGCQQGDPLGPAIFSLAIHKIISSLNSKFNIWYLDDGTIGGNVDTVLGDLQKLIKDFGTIGLELNFSKCELYISNLLTSGKQSEIISLFNSLAPNIKILNNETLRLLGSPILDESIQIYVQEQLNKFNSTSERLFQIQPHMALFIIRFCLFAPKFTYVLRCSQLWKFPDELLLLDKLLQNSLIKILNCPMNDRTWAQASLVIRFGGLGTRKISSVALPAFLSSVHSTVELYGKITNPSLGSVEPSYLSDARDAWSVACPNKSVPNLTKFQRLWDEPLCKLVLDDILSSSNTRERARLMAVSTRESGLWLQAFPSASVGTLLDRNTLTMAVCLRLGARTVHPHQCRCGEPVEHLGHHGLSCARSAGRIPRHAALNDIIRRAFVTAGVPAILEPSGIARSDGKRPDGMTVGPWKLGRSLVWDATCVDTLAPSHIQATSSSAGSAAVSAENLKLRKYANLSTGYEFAPFGVETMGPWGHSAKRLAKELSKRLTEKSGDRKAGNYFCQRISLAIQRGNVASLLGTITEGSSLEDIFYL

SEQ ID NO: 3872 - protein, 813 aa, Tinea semifulvella
MSELEDIIAPPPLKHHTNNIRFKKIETKMNDGDLKGAADLLFSNDVIAPDSSETLAALQRKHPPPAATLLLPDPPGQNEPCLQITSTEVQNAILSFKNGSAGGLDGLTPQHYKDLISGTAGDAAEPLLAALTSLVNIMLSGKVSISITDILYGANICALEKKDGGIRPIAVGCTLRRIVSKICSKKVLPTLTSKCQPLQVGFGSKGGCEAAVHAARSFVVNHGGDVLLKVDVKNAFNSVDRGAMLEQIKQHTPEIYSYLWQNYSTPSKLIYKNNTLLSAVGCQQGDPLGPAIFNLAIHKIISSLNSKFNIWYLDDGTIGGNVDTVLGDLQKLIKDFGTIGLELNFSKCELYISNLLTSGKQSEIISLFNSLAPNIKILNNETLRLLGSPILDESIQIYVQEQLNKFNSTSERLFQIQPHMALFIIRFCLFAPKFTYVLRCSQLWKFPDELLLLDKLLQNSLIKILNCPMNDRTWAQASLPIRFGGLGTRKISSVALPAFLSSVHSTVELYGKITNPSLGSVEPSYLSDARDAWSVACPNKSVPNLTKFQRLWDEPLCKLVLDDILSSSNARERARLMAVSTRESGLWLQAFPSASVGTLLDRNTLTMAVCLRLGARTVHPHQCRCGEPVEHLGHHGLSCARSAGRIPRHAALNDIIRRAFVTAGVPAILEPSGIARSDGKRPDGMTVGPWKLGRSLVWDATCVDTLAPSHIQATSSSAGSAAVSAENLKLRKYANLSTGYEFAPFGVETMGPWGHSAKRLAKELSKRLTEKSGDRKAGNYFCQRISLAIQRGNVASLLGTITEGSSLEDIFYL

SEQ ID NO: 3873 - protein, 924 aa, Tinea semifulvella
MSLDVLPASSDVPSQSSDTSLYVRCEQCSQPRFFRGSRGLKIHIGKAHKQNSIEASSNTLSDQLDFSQVLGRYKNLLPLIKRIPRGARITVAKSLTKLINNVVNENSKKCWELLLTFAYRTLYVKRGEGHSSLTQKIKDNCTQMSELEDIIATPPLKHHTNNFRFKKIETKMNDGDLKGAADLLFSNDVIAPDSSETLAALQRKHPPPAATLLLPDPPGQNEPCLQITSTEVQNAILSFKNGSAGGLDGLTPQHYKDLISGTAGDAAEPLLAALTSLVNIMLSGKVSISITDILYGANICALEKKDGGIRPIAVGCTLRRIVSKICSKKVLPTLTSKFQPLQVGFGSKGGCEAAVHAARSFVVNHGGDVLLKVDVKNAFNSVDRGAMLKQIKQHTPEIYSYLWQNYSTPSKLIYKNNTLLSAVGCQQGDPLGPAIFSLAIHKIISSLNSKFNIWYLDDGTIGGNVDTVLGDLQKLIKDFGTIGLELNFSKCELYISNLLTSGKQSEIISLFNSLAPNIKILNNETLRLLGSPILDQSIQIYVQEQLNKFNSTSERLFQIQPHMALFIIRFCLFAPKFIYVLRCSQLWKFPDELLLLDKLLQNSLIKILNCPMNDRTWAQASLPIRFGGLGTRKISSVALPAFLSSVHSTVELYGKITNPSLGSVEPSYLSDARDAWSVACPNKSVPNLTKFQRLWDEPLCKLVLDDILSSSNTRERARLMAVSTRESGLWLQAFPSASVGTLLDRNTLTMAVCLRLGARTVHPHQCRCGEPVEHLGHHGLSCARSAGRIPRHAALNDIIRRAFVTAGVPAILEPSGIARSDGKRPDGMTVGPWKLGRSLVWDATCVDTLAPSHIQATSSSAGSAAVSAENLKLRKYANLSTGYEFAPFGVETMGPWGHSAKRLAKELSKRLTEKSGDRKAGNYF

SEQ ID NO: 3874 - protein, 956 aa, Tinea semifulvella
MSVDAVSASSDVPDHFSDTLYVKCEQCSQPRFFRGSRGLKIHIGKTHKQNSIQASSNTCPDQSDFSNILGHYKNSLPLIKRIPRGARITVAKALTKLINKVVAENSKISWEFLLTFAYRTLYVKRGEGHSVSLTQKIKDNCDQISDGLNIITPPPFKNHSKNYSIKKIEDKINDGDLKGAADLLFSHDVVAPDSPETLAALQNKHPPPATTLLLPDPPGQNEPCLQITSSEVQNAILSFKNGSAGGLDGLTPQHYKDLIGGTAGDAAEPLLVALTSLVNIMLSGQVPISITDILYGANICALKKKDGGIRPIAVGCTLRRIVSKICSKIILPTLTSKFQPLQVGFGSKGGCEAAVHAARSFVVHHGGDVMLKVDVKNAFNSVDRGVMLDQVKQQTPEIFSYLWQCYSTSSKLIYKNNTILSAVGCQQGDPLGPAIFSLAIHNIISSLNSKFNIWYLDDGTIGGNADTVLDDLQKLIYDFGTIGLELNFSKCELYLSNLLTHDKQIEIISKFNSLAPNIKILNNETLRLLGSPILDESIQIYVQEQLTKFNLTSERLFKIQPHMALFIIRYCLFAPKFMYVLRCSQLWKFSEELVLLDKQLQNSLTEILNCPMNDRTWAQASLPIRFGGLGTRKISSVALPAFLSSVHSTVELYGRITNPSLGSVEPSYLSDARDAWSVACPNVSVPISPKIQRLWDEPLCKLVQEDILSASNIKERARLMAVSTRESGLWLQAFPSASVGTLLDRHTLTMAVCLRLGARTVHPHQCRCGEPVDHLGHHGLSCARSAGRIPRHAALNDIIRRALVTAGVPAILEPSGIVRSDGKRPDGMTVGPWKLGRSLVWDATCVDTLAPSHIQATSSGAGRAAFSAENLKLRKYANLSSGYEFAPFGVETMGPWVPSARRLAKELSKRLTERSGDRKAGNYFCQRISLAIQRGNVASLLGTISDGTSLEDIFYL

SEQ ID NO: 3875 - protein, 961 aa, Chrysoteuchia culmella
MLSQSTSSSSVPLLVCPICADHKLYKGERGLAIHSSRRHVPRTTLAIPLSPSQPPTLSQQLAIGTDGAHSTNLCKRLAHLKHTVKIVRRIPRGARASVAHSLSECIARVVAENTADSWERLLTFSYSTLHVDNSSNKSLTAKLKQNTVDNSSPIFYPIPHPRIQESAFNFNLIERKVSDGNIKSAAKLLITSDTLATDSPDTLAALKDKHPLPLTTSQLPGPCTQPALAVDEETTLDGINSFPNGSAGGLDGLTPQHLKDLTGPFVGAEGNRLVSNLTALINLMLSGKVPADITPVVYGANLVALTKKDGGIRPIAVGSTVRRLASKLCCRELHEEFQKRFRPHQLGFGVRGGCEAAVHAARTFLHTKNYDVFVKIDVKNAFNSVDRGALLRQIEKEVPSIYQYIWQCYGFPSKLMFGQNEIDSCVGCQQGDPLGPAIFSLAIQPIISTLKSKFNLWYLDDGTLGGDLSSVLHDMDYIKQHFLNIGLCLNFNKCELFVSDGMSPNIIPQVIKQFESIAPNISVQTKVSLTLLGAPLFVEAIPSLVNSKLDNFSKFASRLHGLKPHIAFYILRLCLFTPKFLYILRFSPLWKFPLITKSIDEVLKITICKILNLQLEDRQWEQATLPIRYGGLGLRTTSSVALPAFLSSAYSTFSLISELLNCPTLVDGEVSCLSEARSAWSATFPEEDCPLELGHQSTWESPALTKTHAELLATCPDATDRARFLAVSEKESGHWLHALPSHNLGTILDPATLRISICLRLGAKLCEPHHCPCGKDVDQFGRHGLTCVKSAGRAYRHGAINDLIKRALGTASIPSSLEPCGLFRDDGKRPDGATLVPWCLGRTLMWDATCVDTLGPSHIRGTSSRAGAAAEQAQFLKRRKYSSLSVSHEFAALAVETMGPWSSDTKKFIKDLSIKLVHSSGDLRAGAYLAQRLSLCIQRGNSASVLGTMPRGCELDGVFLL

SEQ ID NO: 3876 - protein, 962 aa, Chrysoteuchia culmella
MLSQSTSSSSVPLLGCPICADHKLYKGERGLAIHSSRRHVPRTTLAIPLSPSQPPTLSQQLAIGTDGAHSTNLCKRLAHLKHSVKIVRRIPRGARASVAHSLSECIAKVVAENTADSWERLLTFSYSTLHVDNSSNKSLTAKLKQNTVDNNSSPIFNPIPHPRIQESAFNFNLIERKVSDGNIKSAAKLLFTSDTLATDSPDTLAALKDKHPLPLTTSQLPGPCTQPALAVDEETTLHGINSFPNGSAGGLDGLTPQHLKDLTGPFVGAEGNRLVSNLTALINLMLSGKVPADITPVVYGANLVALTKKDGGIRPIAVGSTVRRLASKLCCRELHEEFQKRFRPHQLGFGVRGGCEAAVHAARTFLHTKNYDVFVKIDVKNAFNSVDRGTLLREIEKEVPSIYQYIWQCYGSTSKLMFGQNEIDSCVGCQQGDPLGPAIFSLAIQPIISTLKSKFNLWYLDDGTLGGDLSSVLHDMDHIKQHFFNIGLCLNFNKCELFVSDGMSPNRIPQVIKQFESIAPNISVQTKASLTLLGAPLFEEAIPSLVNSKLDNYSKFASRLHGLKPHIAFYILRLCLFTPKFLYILRCSPLWKFPLITKSIDAELKSTICKILNLQLEDRHWEQATLPIRYGGLGLRTTSRVALPAFLSSAYSTFSLISELLNCPTLVDAEVSCLSEARSAWSATFPEEDCPLELEHQSAWESPALSSTHAELLATCPDDTDRARLLAVSEKESGHWLHALPSHNLGTILDPATLRISICLRLGAKLCEPHHCPCGKDVDQFRRHGLTCVKSAGRAYRHGAINDLVKRALGTASIPSSLEPCGLFRDDGKRPDGATLVPWCLGRTLVWDATSVDTLGPSHIRGTSSRAGAAAEQAQFLKRRKYASLSVSHEFAALAVETMGPWSSDTKKFIKDLFIRLVHASGDLRAGAYLAQRLSLCIQRGNSTSVLGTMPRGCELDGVFLL

SEQ ID NO: 3877 - protein, 962 aa, Chrysoteuchia culmella
MLSQSTSSSSVPLLVCPICADHKLYKGERGLAIHSSRRHVPRTTLAIPLSPSQPPTLSQQLAIGTDGAHSTNLCKRLAHLKHSVKIVRRIPRGARASVAHSLSECIARVVAENTADSWERLLTFSYSTLHVDKSSNKSLTAKLKQNTVDNNSSPIFNPIPHPRIQESAFNLNLIERKVSDGNIKSAAKLLFTSDTLATDSPDTLAALKDKHPLPLTTSQLPGPCTQPALAVDEETTLHGINSFPNGSAGGLDGLTPQHLKDLTGPFVGAEGNRLVSNLTALINLMLSGKVPADITPVVYGANLIALTKKDGGIRPIAVGSTVRRLASKLCCRELHEEFQKRFRPHQLGFGVRGGCEAAVHAARTFLHTKNYDVFVKIDVKNAFNSVDRGALLREIEKEVPSIYQYMWQCYGSPSKLMFGQNEIDSCVGCQQGDPLGPAIFSLAIQPIISTLKSKFNLWYLDDGTLGGDLSSVLHDMDHIKQHFFNIGLCLNLNKCELFVSDGMSPNRIPQVIKQFESIAPNISVQTKASLTLLGAPLFEEAIPSLVNSKLDNYSKFASRLHGLKPHIAFYILRLCLFTPKFLYILRCSPLWKFPLITKSIDAVLKSTICKILNLQLEDRHWEQATLPIRYGGLGLRTTSSVALPAFLSSAYSTFSLISELLNCPTLVDAEVSCLSEARSAWSATFPEEDCPLELGHQSAWESPALSSTHAELLATCPDDTDRARLLAVSEKESGHWLHALPSHNLGTILDPATLRISICLRLGAKLCEPHHCPCGKDVDQFGRHGLTCVKSAGRAYRHGAINDLVKRALCTASIPSSLEPCGLFRDDGKRPDGATLVPWCLGRTLVWDATCVDTLGPSHIRGTSSRAGAAAEQAQFLKRRKYASLSVSHEFAALAVETMGPWSSDTKKFIKDLSIRLVHASGDLRAGAYLAQRLSLCIQRGNSASVLGTMPRGCELDGVFLL

SEQ ID NO: 3878 - protein, 961 aa, Chrysoteuchia culmella
MFSQSTSSNNVSLLVCPICDDHKHYKGERGLAIHCSRRHVPRTTLASPLASLQPPTLPQQSALGADGAHNTSLCKRLAHLKHTLKIVRRIPRGARSSVAHSLSECIAKVVTENTADSWESLLTFSYSTLHVDNSTNQSLTTKIKQNTVGNTSSIFNPIYHPRIPESSFNLNLIERKVSDGNIKGAAKLLFTSDTLATDSPDTLAALKDKHPLPLTTSQLPGPCAEPALTVNEEATLLGINSFPNGSAGGLDGLTPQHLKDLTGPIVGVEGNRLIRNLTALINLMLSGNVPVDITPVLYGANLVALSKKDGGIRPIAVGSTLRRLASKLCCRELHDQFQDKFRPHQLGFGVRGGCEAAVHAARTFLHTTNYDVFVKIDVKNAFNSVDRGALLREIKKEVPSIYQYMWQCYGSPSKLMFGQNELDSCVGCQQGDPLGPAIFSLAIQPTISSLTSKFNLWYLDDGTLAGDLSSVLHDLEYIKQHFSNIGLFLNFNKCEIFVSDGLPSNRIPEIIKKFESIGPNISAQTKASLTLLGAPLFDDAIPSIVNSKLDNFGKNLPRLHGLKPHIAFYILRLCLFTPKFLYILRCSPLWKFPLITKSIDTVLKSTICKILNLQLEDRSWEQATLPIRYGGLGLRTTSSVALPAFLSSAYSTFSLISELLNYPTLVDGEVSCLSDARSAWSASFPEEDCPLDLKHQSAWESPALIAAHAELLAACPDDTDRARLLAVSEKESGHWLHALPSHNLGTILDPATLRISICLRLGAKLCEPHHCPCGKHVDQFGRHGLTCVKSAGRAYRHGTMNDIVKRALGTVSIPSSLEPCGLFRDDGKRPDGATLVPWCLGRTLVWDATCVDTLGPSHIRGTSSRAGAAAEQAQFLKRRKYASLSVSHEFAALAVETMGPWSSDTKKFMKDISTRLFHASGDPRAGAYLAQRLSLCIQRGNSASVLGTMPRGCELDDVFLL

SEQ ID NO: 3879 - protein, 961 aa, Chrysoteuchia culmella
MLSRSTSSSSVPLLVCPICADHKLYKGERGLAIHSSRRHVPRTTLAIPLSPSQPPTLSQQLAIGTDGAHSTNLCKRLAHLKHTVKIVRRIPRGARASVAHSLSECIARVVAENTADSWERLLTFSYSTLHVDNSSNKSLTAKLKQNTVDNSSPIFYPIPHPRIQESAFNFNLIERKVSDGNIKSAAKLLFTSDTLATDSPDTLAALKDKHPLPLTTSQLPGPCTQPALAVDEETTLDGINSFPNGSAGGLDGLTPQHLKDLTGPFVGAEGNRLVSNLTALINLMLSGKVPADITPVLYGANLVALTKKDGGIRPIAVGSTVRRLASKLCCRELHEEFQKRFRPHQLGFGVRGGCEAAVHAARTFLHTKNYDVFVKIDVKNAFNSVDRGALLRQIEKEVPSIYQYMWQCYGSPSKLMFGQNEIDSCVGCQQGDPLGPAIFSLAIQPIISTLKSKFNLWYLDDGTLGGDLSSVLHDMDYIKQHFLNIGLCLNFNKCELFVSDGMSPNIIPQVIKQFESIAPNISVQTKVSLTLLGAPLFVEAIPSLVNSKLDNFSKFASRLHGLKPHIAFYILRLCLFTPKFLYILRCSPLWKFPLITKSIDEVLKITICKILNLQLEDRQWEQATLPIRYGGLGLRTTSSVALPAFLSSAYSTFSLISELLNCPTLVDGEVSCLSEARSAWSATFPEEDCPLELGHQSAWESPALTKTHAELLATCPDDTDRARFLAVSEKESGHWLHALPSHNLGTILDPATLRISICLRLGAKLCEPHHCPCGKDVDQFGRHGLTCVKSAGRAYRHGAINDLIKRALGTASIPSSLEPCGLFRDDGKRPDGATLVPWCLGRTLMWDATCVDTLGPSHIRGTSSRAGAAAEQAQFLKRRKYSSLSVSHEFAALAVETMGPWSSDTKKFIKDLSIKLVHASGDLRAGAYLAQRLSLCIQRGNSASVLGTMPRGCELDGVFLL

SEQ ID NO: 3880 - protein, 961 aa, Chrysoteuchia culmella
MLSRSTSSSSVPLLVCPICADHKLYKGERGLAIHSSRRHVPRTTLAIPLSPSQPPTLSQQLAIGTDGAHSTNLCKRLAHLKHTVKIVCRIPRGARASVAHSLSECIARVVAENTADSWERLLTFSYSTLHVDNSSNKSLTAKLKQNTVDNSSPIFYPIPHPRIQESAFNFNLIERKVSDGNIKSAAKLLFTSDTLATDSPDTLAALKYKHPLPLTTSQLPGPCTQSALAVDEETTLDGINSFPNGSAGGLDGLTPQHLKDLTGPFVGAEGNRLVSNLTALINLMLSGKVPADITPVVYGANLVALTKKDGGIRPIAVGSTVRRLASKLCCRELHEEFQKRFRPHQLGFGVRGGCEAAVHAARTFLHTKNYDVFVKIDVKNAFNSVDRGALLRQIEKEVPSIYQYMWQCYGSPSKLMFGQNEIDSCVGCQQGDPLGPAIFSLAIQPIISTLKSKFNLWYLDDGTLGGDLSSVLHDMDYIKQHFLNIGLCLNFNKCELFVSDGMSPNIIPQVIKQFEFIAPNISVQTKVSLTLLGAPLFVEAIPSLVNSKLDNFSKFASRLHGLKPHIAFYILRLCLFTPKFLYILRCSPLWKFPLITKSIDEVLKITICKILNLQLEDRQWEQATLPIRYGGLGLRTTSSVALPAFLSSAYSTFSLISELLNCPTLVDGEVSCLSEARSAWSATFPEEDCPLELGHQSAWESPALTKTHAELLATCPDDTDRARFLAVSEKESGHWLHALPSHNLGTILDPATLRISICLRLGAKLCEPHHCPCGKDVDQFGRHGLTCVKSAGRAYRHGAINDLIKRALGTASIPSSLEPCGLFRDDGKRPDGATLVPWCLGRTLMWDATCVDTLGHSHIRGTSSRAGAAAEQAQFLKRRKYSSLSVSHEFAALAVETMGPWSSDTKKFIKDLSIKLVHASRDLRAGAYLAQRLSLCIQRGNSVSVLGTMPRGCELDGVFLL

SEQ ID NO: 3881 - protein, 1124 aa, Andrena haemorrhoa
MLGDNHDEASDTEAHGPGSSVAELPAGRQGTIDDNYGETHGHEWSQIIGIPLSGPIQCEICLNQNKNMQFLTEGNFETHVRKSHPTDGFKWKCAKCGKLYDKIHAVKCHIPKCKGPVEPQHLEFQCTLCEASFASQRGLSTHERVRHPELRNEKRQVALGVGKAPKKKGVKATVWSEEETALLKELDPKFRDLTQANVALREYFPNKSLKQISDKRRQLKPPEIVTVELSDSDPEPDSYPPREEIIPTIGGNENQASEEADAWKETLKEKIAIGVVDANEWADILCRIRTLAESNDAHEAEIDALVGDIIQNLLGAEAPRPQNRRNKKRNKGGDMNDREARHSRRTKKKRYTFYKYQEMYKECPRKLANMAMLGKIMDDDEEGVSHPETAQIRELYASLWGVAGPQEIDMPARHDRENTQTSQVWTPIEADEIIKRIAKMKNNTAAGLDGVKKVHLKRRGAVQVLATLFNLLLLKGHYPTQWKANRTTLIPKPGKNTKDAKNWRPITIGSLVSRLLSNMIDSRLRSKIELSERQKGFVSENGCKHNVAILGTLLAEMKQNKGGIFTIVDIAKAFDTVPHASLNEALATQGLPGPVRSYIMKMYDRCHTSIKTNDGENINITLQRGVKQGDPLSPLLFNAVMDPIIRKINDSTKGIQLNGTNVAALAFADDLVLLGKEPGDARKQIATLANFMEGLGMDLSIPKCASVEIVAKNKTWFLQDPKLKIGEETIPTIKPNEVVRYLGIALDPWVGLKASKDKLREIIEAVKTVGRMGLKPHQKIDLIKIHLLPKSIYELVASPPPTKTLRELDHEVKQAVKGILKLHPSTADGVIYSDKSHGGIGLQRVENIVKLAVLRGGIKMLNSNDDAVQVALHEQKATLEKYAISIGLQWPTTLDNVEEARKRLKRNETDKWRQLVSQGHGVSDFCNDRIGNAWLYNPTLLKPSRYLDALKLRTNSCGTKVALRRANKEREANCRRCKVQAETLGHVLGNCIHTKPSRIRRHDEIKDLIKEQASMKWAVFDEPSVNVLGDIRKPDLVIKDLRKAAQEKIGKYKETTEFIRLRTHSSTAKILPIVVGARGAMPKETQANLKLLGFKNKDLVTVSMIALRSSLEIVNAFMDYDRIE

SEQ ID NO: 3882 - protein, 1142 aa, Andrena haemorrhoa
MLGDNHDEASDTEAHGPGSSVAELPAGRQGTIDDNYGETHGHEWSQIIGIPLSGPIQCEICLNQNKNMQFLTEGNFETHVRKSHPTDGFKWKCAKCGKLYDKIHAVKCHIPKCKGPVEPQHLEFQCTLCEASFASQRGLSTHERVRHPELRNEKRQVALGVGKAPKKKGVKATVWSEEETALLKELDPKFRDLTQANVALREYFPNKSLKQISDKRRQLKPPEIVTVELSDSDPEPDSYPPREEIIPTIGGNENQASEEADAWKETLKEKIAIGVVDANEWADILCRIRTLAESNDAHEAEIDALVGDIIQNLLGAEAPRPQNRRNKKRNKGGDMNDREARHSRRTKKKRYTFYKYQEMYKECPRKLANMAMLGKIMDDDEEGVSHPETAQIRELYASLWGVAGPQEIDMPARHDRENTQTSQVWTPIEADEIIKRIAKMKNNTAAGLDGVKKVHLKRRGAVQVLATLFNLLLLKGHYPTQWKANRTTLIPKPGKNTKDAKNWRPITIGSLVSRLLSNMIDSRLRSKIELSERQKGFVSENGCKHNVAILGTLLAEMKQNKGGIFTIVDIAKAFDTVPHASLNEALATQGLPGPVRSYIMKMYDRCHTSIKTNDGENINITLQRGVKQGDPLSPLLFNAVMDPIIRKINDSTKGIQLNGTNVAALAFADDLVLLGKEPGDARKQIATLANFMEGLGMDLSIPKCASVEIVAKNKTWFLQDPKLKIGEETIPTIKPNEVVRYLGIALDPWVGLKASKDKLREIIEAVTTVGRMGLKPHQKIDLIKIHLLPKSIYELVASPPPTKTLRELDHEVKQAVKGILKLHPSTADGVIYSDKSHGGIGLQRVENIVKLAVLRGGIKMLNSNDDAVQVALHEQKATLEKYAISIGLQWPTTLDNVEEARKRLKRNETDKWRQLVSQGHGVSDFCNDRIGNAWLYNPTLLKPSRYLDALKLRTNSCGTKVALRRANKEREANCRRCKVQAETLGHVLGNCIHTKPSRIRRHDEIKDLIKEQASMKWAVFDEPSVNVLGDIRKPDLVIKDHDRLYVVDVTVRYEDKDNLRKAAQEKIGKYKETTEFIRLRTHSSTAKILPIVVGARGAMPKETQANLKLLGFKNKDLVTVSMIALRSSLEIVNAFMDYDRIE

SEQ ID NO: 3883 - protein, 1142 aa, Andrena haemorrhoa
MLGDNHDEASDTEAHGPGSSVAELPAGRQGTIDDNYGETHGHEWSQIIGIPLSGPIQCEICLNQNKNMQFLTEGNFETHVRKSHPTDGFKWKCAKCGKLYDKIHAVKCHIPKCKGPVEPQHLEFQCTLCEASFASQRGLSTHERVRHPELRNEKRQVALGIGKAPKKKGVKATVWSEEETALLKELDPKFRDLTQANVALREYFPNKSLKQISDKRRQLKPPEIVTVELSDSDPEPDSYPPREEIIPTIGGNENQASEEADAWKETLKEKIAIGVVDANEWADILCRIRMLAESNDAHEAEIDALVGDIIQNLLGAEAPRPQNRRNKKRNKGGDMNDREARHSRRTKKKRYTFYKYQEMYKECPRKLVNMAMLGKIMDDDEEGVSHPETAQIRELYASLWGVAGPQEIDMPARHDRENTQTSQVWTPIEADEIIKRIAKMKNNTAAGLDGVKKVHLKRRGAVQVLATLFNLLLLKGHYPTQWKANRTTLIPKPGKNTKDAKNWRPITIGSLVSRLLSNMIDSRLRSKIELSERQKGFVSENGCKHNVAILGTLLAEMKQNKGGIFTIVDIAKAFDTVPHASLNEALATQGLPGPVRSYIMKMYDRCHTSIKTNDGENINITLQRGVKQGDPLSPLLFNAVMDPIIRKINDSTKGIQLNGTNVAALAFADDLVLLGKEPGDARKQIATLANFMEGLGMDLSIPKCASVEIVAKNKTWFLQDPKLKIGEETIPTIKPNEVVRYLGIALDPWVGLKASKDKLREIIEAVKTVGRMGLKPHQKIDLIKIHLLPKSIYELVASPPPTKTLRELDHEVKQAVKGILKLHPSTADGVIYSDKSHGGIGLQRVENIVKLAVLRGGIKMLNSNDDAVQIALHEQKATLEKYAISIGLQWPTTLDNVEEARKRLKRNETDKWRQLVSQGHGVSDFCNDRIGNAWLYNPTLLKPSRYLDALKLRTNSCGTKVALRRANKEREANCRRCKVQAETLGHVLGNCIHTKPSRIRRHDEIKDLIKEQASMKWAVFDEPSVNVLGDIRKPDLVIKDHDRLYVVDVTVRYEDKDNLRKAAQEKIGKYKETTEFIRLRTHSSTAKILPIVVGARGAMPKETQANLKLLGFKNKDLVTVSMIALRSSLEIVNAFMDYDRIE

SEQ ID NO: 3884 - protein, 1100 aa, Adalia bipunctata
MNLSLINAYFQVTEGETKTKKYAAKLTEKWLEQYPDKPFNGKHLVAQVRNIKTRKLLAPDELNSIRNAKLIQSPTHRMRHIRRSIQATANTPRRELILEEQEIQTEQVHNESSLQILEIYEELNIKWRGIPLERRPKIQRIQLNMEAKNTIIAIDTAMRDNIENTIEFEDLCHKIYCAAIAANLIQQIEEKEERQKKQPQKPPWEERLEKRITTLRKEIGIIHQYINNEKVSKKVQTKLREYTRKMKLKERDAHYKTKLRIHHEKLKQKIAALGNRLRRYHKRTQRYQQNNQFTNNQKMFFRKIDQQNDNKKEKPPNPNNMKEHWSSLWSTEKEHNKTAPWIESERKAQQNLREMPRVTVSEEDVKETTRRMKNWVSPGIDGIHNYWWKALTSAHKVMARLIEKALENPESIPTYFTKGKTYMVPKKGDLAQPENYRPITCLPSAYKILTSTLAHKINTHLKSNNIMAWEQNGCKSKSRGSKELLVIDRAITRQAKKKNKNIAVAWIDYQKAYDSVPHSWLIEILEIYKIDNRVINTLKFLMSTWRTTLSVSQGTETYETPEIRIRRGIFQGDGLSPPWFCLALNILSRMLNRSAYGYAIDVRTKLTHLFYMDDLKLYARGRTQLEGELELVRSFSEDIGMTLGLEKCATITVKRGKIVEEENVMLRDGREINSLNTEESYKYLGIQQTFEIRLAENREQAKTELLRRVKLILKSQLSSKNKIMAINIWAIPSFTYTVGTVSWSKTDLQLLDRKIRTTMTQFGLLHPNSAIERIYLPRKEGGRGLRSIEDTCEQEKINIENYFRNTNLPIHQWVTVQESLTQRRNEDGQDRRNPAEQLRQSWQSKRLHGRFYASLHQEDVDMAASTSYLTQGYLFPQTEGTIFAIQDQVVPTRNYLKHIIKQQVENTKCRLCNNAEETTQHLLSGCSIIASTKYLSRHDNMGKVVHQLMCLKRNLLKHFTPHHLYVPEAVVENEETKIYWDLTILTDLSTEHNRPDMVVWNKKAKTATIIDFAVPMDQNMGKTYAEKIRKYEGLSRQIRDMWALKKVEIIPLIISANGLVLKKTVQHLRALEMHPNTISWMQKAVLLGTVNIIRQVIFPH

SEQ ID NO: 3885 - protein, 1119 aa, Coccinella septempunctata
MFFVRCRRARYQVCYASPLDPSLKWSPNIVCSVHSVVEVLGHICKMVALPGVNPASTQPVGGRSSPWSYASPGNLLAKNEEFFLNSPYKSSRYTLIHNYIYIYIYIYIYIYIYIYIYIYIYIYIYIYIYISSLQILEVYEEINIKWRGLPLEKRPKIQKIQLNTAAKNSIRAIDSALREIIQNAMDFEDLCHKVYCAAITANLIVQTEKKGGEQNQQPRKPPWEERLEKRIASLRKEISIIHLYMNNEKVSNRVHRKLREYIRKIKLKERDAHYKTKLRTHLEKLKQKIAALGNRLRRYHKRTQRYQQNNQFTNNQKMFFRKIDQKNNGKNEKPPNPKKMKEHWSSLWSAEKEHNRTAPWIEIERKAQQHLQEMPKVTVSENDVKETTRRMKNWVSPGIDGIHNYWFKALTSAHKAMARLIEEALENPEIIPSYFTKGKTFMVPKKGDLAQPENYRPITCLPSAYKILTSTLAHKISTHLKSNNIMAWEQNGCKSKSRGSKELLVIDRAITKQAKKKNKNIAVAWIDYQKAYDSVPHSWLIEILEIYKIERRVINTLKFLMNTWRTTLSVSEGKETYETSEILIRRGIFQGDGLSPPWFCLALNILSSMLNRSAYGYAIDARTKLTHLFYMDDLKLYARGRTQLEGELELVRSFSEDIGMTLGLEKCATITVKRGKMVEEENMRLRDGREINNLSTEETYKYLGIQQSFEIRQTENKEQAKTELLRRVKLILKTQLSSKNKIMAINIWAIPSFTYTVGTLAWSKTDLQLIDRKIRTTLTQFGLLHPNSAVERIYLPRKEGGRGLCSIEDTCKQEKINIKNYFNNTNLPIHQWVAAQESMTQETNDDEQDRENHAEQLRQSWQSKQLHGRFYANLHQEDVDIAASNTYLTQGYLFPQTEGTIFAIQDQVIPTRNYSKHIMKQQVENTKCRLCNNAEETTQHLLAGCSAVASTRYLTRHDNMGKVVHQLMCLKKNLIQHFTPHHLYVPEAVVENDEAKIYWDLTILTDLGAEHNRPDMVVMNKKTKTATIIDFAVPLDQNMGKTYAEKIRKYEMLARQIRDMWRLKKVEIIPLIISANGLVLKRTVQHLKELELHPNTISWMQKAVLLGTVNIIRQVIFPH

SEQ ID NO: 3886 - protein, 1100 aa, Coccinella septempunctata
MNLSLINAYFQVTEGETKTRKYVAKLAEKWFELHPDKPFSGKHLVAQVRNIKIRKLLAPDELNAIKAETLIQSPANRLRNIRKSIQATTNTPRRELNMEEQETQTEPQQNESSLQILEVYEEINIKWRGLPLEKRPKIQKIQLNTAAKNSIRAIDSALREIIQNAMDFEDLCHKVYCAAITANLIVQTEKKGGEQNQQPRKPPWEERLEKRIASLRKEISIIHLYMNNEKVSNRVHRKLGEYIRKIKLKERDAHYKTKLRTHLEKLKQKIAALGNRLRRYHKRTQRYQQNNQFTNNQKMFFRKIDQKNNGKNEKPPNPKKMKEHWSSLWSAEKEHNRTAPWIEIERKAQQHLQEMPKVTVSENDVKETTRRMKNWVSPGIDGIHNYWFKALTSAHKAMARLIEEALENPEIIPSYFTKGKTFMVPKKGDLAQPENYRPITCLPSAYKILTSTLAHKISTHLKSNNIMAWEQNGCKSKSRGSKELLVIDRAITKQAKKKNKNIAVAWIDYQKAYDSVPHSWLIEILEIYKIERRVINTLKFLMNTWRTTLSVSEGKETYETSEILIRRGIFQGDGLSPPWFCLALNILSSMLNRSAYGYAIDARTKLTHLFYMDDLKLYARGRTQLEGELELVRSFSEDIGMTLGLEKCATITVKRGKMVEEENMRLRDGREINNLSTEETYKYLGIQQSFEIRQTENKEQAKTELLRRVKLILKTQLSSKNKIMAINIWAIPSFTYTVGTLAWSKTDLQLIDRKIRTTLTQFGLLHPNSAVERIYLPRKEGGRGLCSIEDTCKQEKINIKNYFNNTNLPIHQWVAAQESMTQETNDDEQDRENHAEQLRQSWQSKQLHGRFYANLHQEDVDIAASNTYLTQGYLFPQTEGTIFAIQDQVIPTRNYSKHIMKQQVENTKCRLCNNAEETTQHLLAGCSAVASTRYLTRHDNMGKVVHQLMCLKKNLIQHFTPHHLYVPEAVVENDEAKIYWDLTILTDLGAEHNRPDMVVMNKKTKTATIIDFAVPLDQNMGKTYAEKIRKYEMLARQIRDMWRLKKVEIIPLIISANGLVLKRTVQHLKELELHPNTISWMQKAVLLGTVNIIRQVIFPH

SEQ ID NO: 3887 - protein, 1077 aa, Coccinella septempunctata
MHPDKAFNGKHLIAQIRNIKTRKLLSHDELNTIRLESLNKSPTTRLRSIRRSIRISLGAPCRELNTGEQETTTEQEHYEPSPEILEVYEELNTKWMGIPLERRPKIQRIQLNMEAKTTINAIDAALRQTIHRTAEFEDLCHKVYCAAITANLILQTKTHKARNEKQLRKPPWEQRLEKRITTLRKQVGILHLYLNNERVSRKVHKKLRQYAKRIKLKERDEHFKRKLLEHHEKLKQKIAALGNRLRRYHKRTQRYQQNNQFTSNQKMFFRKIDHEDHNKDQKPPNPNNMKEHWSSLWSVEKEHNRNAPWIEAEREAQRDLQEMPRVIVSEEVIRMTTRRMKNWVSPSIDGIHNYWWKALTSTHKAMARLVEESLENPENIPAYFTRGKTIMIPKKGDLSQAENYRPITCLPSAYKILTSTIAHKINAHLKNNNLMCWEQNGCKSKSRGSKELLVIDRAVTKQAKKRNKNITVAWIDYLKAYDSVPHSWLIEVLEIYKIEKRVIKMLKRLMATWRTTLTVNEGNHSYETPEIRIRRGIFQGDGLSPPWFCLALNILSRILNRSAYGYTIDARTKLTHLFYMDDLKLYARGREQLEGELELVRNFSEDVGMALGMEKCATVIVKRGKVVEEENMQLKDGRQIKNLSTEETYKYLGIEQTFEIRQKENKERAKMELFRRLKLILKTQLSSKNKMTAINIWAIPSFTYTAGTVAWSRTDLQLIDRKIRTTLTQFGLLHPNSAIERLYLPRKEGGRGLCSIEDVCEKEKINIKNYFRNINLPVHQWVTTQDIITQEVSEDQQDRANSAEQLKHRWKSKQLHGRFYTSMHQEEIDTAASNTYLTQGYLFPQTEGTIFAIQDQVVPTRNYTKIIMKQQVENTKCRLCNKAEETIQHLLSGCSVIASTKYLSRHNNMGKVVHQGICLEKNLLKNFTPHHLYVPEPVLENNEMKVYWDLTVITDLGTEHNRPDMVVWDKIHKTATIIDFAVPLDHNLSKTYAEKIGKYERLSRQIRDMWKLKRVDIIPLIISANGLVLKKTVQHLKELGMHPNTMSWMQKAVLLGQSTSSDRFSSLTEEQWSRILS

SEQ ID NO: 3888 - protein, 1100 aa, Coccinella septempunctata
MNLSLINAYFQGTEGETKTQKYVAKLAEKWFELHPDKPFSGKHLVAQVRNIKIRKLLAPDELNVIKAETLIQSPANRLRNIRKSIQATTNTPRRELNMEEQETQTEPQQNESSLQILEVYEEINIKWRGLPLEKRPKIQKIQLNTAAKNSIRAIDSALREIIQNAINFEDLCHKVYCAAITANLILQTEKKGREQNQQPRKPPWEERLEKRIASLRKEISIIHLYMNNEKVSNRVHRKLREYIRKIKLKERDAHYKTKLRTHLEKLKQKIAALGNRLRRYHKRTQRYQQNNQFTNNQKMFFRKIDQKNYGKNEKLPNPKKMKEHWSSLWSAEKEHNRTAPWIEIERKAQQHLQEMPKVTVSENDVKETTRRMKNWVSPGIDGIHNYWFKALTSAHKAMARLIEEALENPEIIPSYFTKGKTFMVPKKGDLAQPENYRPITCLPSAYKILTSTLAHKINTHLKSNNIMAWEQNGCKSKSRGSKELLVIDRAITKQAKKKNKNIAVAWIDYQKAYDSVPHSWLIEILEIYKIDRRVINMLKFLMNTWRTTLSVSEGKETYETSEILIRRGIFQGDGLSPPWFCLALNILSSMLNRSAYGYAIDARTKLTHLFYMDDLKLYARGRTQLEGELELVRSFSEDIGMTLGLEKCATITVKRGKMVVEENMRLRDGREINNLSTEETYKYLGIQQSFEIRQTENKEQAKTELLRRVKLILKTQLSSKNKIRAINIWTIPSFTYTVGTLAWSKTDLQLIDRKIRTTLTQFGLLHPNSAVERIYLPRKEGGRGLCSIEDTCKQEKNNIKNYFNNTNLPIHQWVAAQESMTQETNDDEQDRENHAEQLRQSWQSKQLHGRFYANLHQEDVDIAASNTYLTQGYLFPQTEGTIFAIQDQVIPTRNYSKHIMKQQVENTKCRLCNNAEETTQHLLAGCSAVASTRYLTRHDNMGKVVHQLMCLKKNLIQHFTPHHLYVPEAVVENDEAKIYWDLTILTDLGAEHNRPDMVVMNKKTKTATIIDFAVPLDQNMGKTYAEKIRKYEMLARQIRDMWRLKKVEIIPLIISANGLVLKRTVQHLKELELHPNTISWMQKAVLLGTVNIIRQVIFPH

SEQ ID NO: 3889 - protein, 1124 aa, Coccinella septempunctata
MEILFFLNQTRGRQRWTREMNLSLISAYFKVTEGERKKVKYAAKLAEEWNELYPDKPFTGKHLLAQIKNIKTRKLLAPDELDKLKSEALVQSPTSRLINIRRSIQGSASTPRLSIRSLAREDEHQEPVTPLDESTREILNLFEEISMKWTGIPIDKRPRIERIKLNPETKRTMEAVDRALEETIAKSGELEELCHKVYCAATVANLILQTPTRQQTHRGPYQKPPWEKRMETRIATLRKEIGIIHVALNQQMSKKVRKKLKKYLQRINLKESDHHYKLKLQTHVEKLKQKLAALGNRLRRYHKRTLRYQQNNLFANNQKMFFRKLDERSSIEKSAPPNQEEMRQYWSSIWSHTVSHNTQANWIATERHIHQNLQEMSAVAFIEEDITNSVRRMKNWASPGIDGIHNYWWKSLTSTHKIMATLMQKALVNPNTIPKYFTKGITIMLPKKGDLSKPENYRPITCLPSAYKIITSRLAHKINTHLNINKIMAWEQNGCKSKSRGCKELLVIDNAVTKQAKKRQKNLAMAWIDYQKAYDSVPHSWLLEILEIYKVEPRVIEMLRVLMTTWRTTLTLGETSTPYETAEIEIRRGIFQGDSLSPSWFCLALNILSSMLNRSTYGYSITDRARLSHLFYMDDLKLYARGRAQLEGLLELVRTFSEDIRMKFGLEKCASLIIRRGKMVEEENIRMRSGEEIKSLNTEDRYKYLGIQQTFEIKQSENKEHAKIELMRRTKLILKTQLSSKNKIMAINIWAIPSFTYTAGVLSWSKTDLQQIDRKIRTTFTQFGLLHPNSAIERVYLPRKEGGRGLSSVENACWKEGRNIRKSFNKTYLPVHQWIAYQEGIPPVEEAISGNRPEKENVLDELRQRWQAKQLHGRFYTSLHQDDVDIPASNTYLTQGYLFPQTEGTIFAIQDQVVPTRNYTHHIMKKQLETTKCRLCNAAEETVQHLSAGCSTIAGTQYLSRHDNMGKVVHQLLCLNKQLIQHFTPHHLYTPVPVLEDDNTKVYWDLTVITDVGVEHNRPDMVVWNKNEKTATIIDFAVPQDYNMMKTYGEKISKYAPLAWQMKDLWKLKKVDIVPLIMSVNGLVLKKTITHLEELQLPHSAITWMQKAVILGTVGIIRRVVSPH

SEQ ID NO: 3890 - protein, 973 aa, Propylea japonica
MKWKGVPLERRPKIQRTQLNTEAKNTIKAIETAITETIKDTTDFENLCHKVYCAAITTNLILSTKQSEQDQRRQPQKPPWEERLERRISTLRKEIGIIHQYINNDKVSNKVRKKLKEYTNRIKLKERETQFKTKLRIHHEKLKQKIAALGNRLRRYHKRTQRYQQNNQFANNQRIFFRNLDQQSSLQKEKPPNPNKMRAYWASIWSVEEEHNTNSSWIKAEREAQKNLQEMPGVEVTEEDIRETTKRMKNWASPGIDGIHCYWWKALRSTHGVLARLMEGALENPEIIPRYFTKGKTFMIPKKGDLAQPENYRPITCLSSAYKIVTSTLAHKINTHLKNNNVMAWEQNGGKNKSRGSKELLVIDREITRQAKKKNKNIALAWIDYQKAYDSVPHSWLIEVLEIYKVDRKVINMLKFLMTTWRTSLTFSHGTDSYETSEIKIARGIFQGDGLSPPWFCLALNILSRMLNRSAYGYKIDMEKTITHLFYMDDLKLYARGRAQLEGLLELVRNFSVDIGMTLGLEKCAAIIVKRGKIVEEENVRLRDGKEINTLSTEEKYKYLGIQQTFEILQQENKEHAKTELLRRVKLILKSQLSSKNKIMAINIWAIPSFTYTVGALTWSRTDLQLIDRKIRTTMTQFGLLHPNSAIERLYLPRKEGGRGLSSLEDTCKKEIVNIKKYFKNTYLPIHQWVTAQEGMALDDGDDRENSAEMLKQSWQTKQLHGRFYASLHLEEVDVAASNIYLTQGYLFPQTEGTIFAIQDQVVPTRNYTKYIMKKQIEITKCRLCNNAEETTQHLVSGCSVIASTRYLARHDNMGKVVHQLLCLNKKLIQHFTPHHLYVPEAVVENDETKIYWDLTILTDIGTEHNRPDMVVWNKKDRTAVIIDFAVPQDQNMMKTYAEKIRKYEPLSRQMRDMWKLRTVEIVPLIVSVNGLVLKKTVQHIKDLEMQNNTIAWMQKAVLLGTVNIIRQVIYPH

SEQ ID NO: 3891 - protein, 973 aa, Harmonia axyridis
MKWKGVPLEIRPRIQRTQLDTEAKNTIKAIDTTIKETIKDTTEFEDLCHKVYCAAITTNLILSTNPIEQDQKKQPQKPPWEERLERRISTLRKEIGIIHQYINNDKVSNKVRKKLREYTNRIKLKEREAQFKTKLRIHHEKLKHKIAALGNRLGRYHKRTQRYQQNNQFANNQRIFFRNLDHQNDIQKEKPSNPNKMLEHWTSIWSVEDTHNKNSSWIKVEKEAQEKLREMPRVEVNEEDIRETTKRIKNWASPGVDGIHGYWWKALTSTHSVLARLMEDALENPEFIPRYFTKGKTFMVPKKGDLAQPENYRPITCLSSAYKIITSTLAHKINTHLKSNNVIAWEQNGCKNKSRRSKELLVIDREITRQAKKKNKNIALAWIDYQKAFDSVPHSWLIEVLKIYKVDRKVINMLKFLMTTWRTSLTVSQGTDSYETPEIKIRRGIFQGDGLSPPWFCLALNILSKMLNRSAYGYNVDTEKKITHLFYMDDLELYARGRAQLEGLLELVRNFSVDIGMTLGLEKCAAIIVKRGKIVEEENVRLRDGKEINTLSTEEKYKYLGIQQTFEIRQQENKEHAKTELLRRVKLILKSQLSSKNKIMAINIWAIPSFTYTVGALTWSRTDLQLIDRKIRTTMTQFGLLHPNSAIERIYLPRKEGGRGLSSLEDTCKKEIVNIKKYFKNTYLPIHQWVTAQESMAHEDGEDRENSAEMLRQSWQTKQLHGRFYASLHMGEVDVAASNIYLTQGYLFPQTEGTIFAIQDQVVPTRNYSKHIMKKQIESTKCRLCNNAEETTQHLVSGCSVIASTKYLSRHDNMGKVVHQLLCLNKNLIQHFTPHHLYVPAAVMENNETKIYWDLTMLTDIGTEHNRPDMVVWDKKNRTAVIIDFAVPQDQNMMKTYAEKIRKYEPLSRQMRDMWKLRRVEIIPLIISVNGLVLKKTVQHIKDLEMQNNTITWMQKAVLLGTVNIIRQVIYPH

SEQ ID NO: 3892 - protein, 1101 aa, Coccinella septempunctata
MNLSLISAYFQVTEGEKNTKKYAAKLAEKWLELYPDKEFSGKHLIAQIKNIKSRKLLSPDELESMRVESQTQSPTSRMRNIRRSIREMTTAPRHSLLRQEEVENNTQQVTELEQDESATEIKALFEETNLKWIGIPMKCRPYISRIKLNPEAKSTIRAIDTALRSTLQESEELEELCHKVHCAAIVANLILETTAKQAKNIKEPSNKPPWEERLEKRITTLRKEIGIYHLYLNKDNLSRKVRKKMRAYAGRINLKESDTGFKMKIRKHAEKLQQKIAALGNRLRRYHKRSMRYQQNNLFQNNQKVFFRSVDGQKRIENQKPPCAEEMRQYWSSIWSQERKHKAHAPWIEAERENSQSLPEMPTVNVTEVDVRDTIKRMKNWAAPGIDGIHSYWWKALTSTHKVLARLIGGALKNPQKIPHYFTEGKTYLLPKKEDLDHPENYRPITCLSSIYKIITSLLANKINTHLKHCNVMAWEQNGCRSKSRGSKELLVIDNELTKLARRRNKNIAIAWIDYQKAYDTVPHSWLIEVLVIYKIERRVIEVLKTLMATWRTTLSLCEGGISYETSEIQIKRGIFQGDGLSPPWFCLALNALSGMLNRSAYGYAVDERTKITHLFYMDDLKLYARGRAQLEGELEMVRMFSADIGMNLGLEKCATIIVRRGKLSEEENVRLKDGKEINNLTNEDKYKYLGIQQTFEIRHKENKDHTKEELLRRIRLILKSQLSAKNKIMAINIWAIPPLTYTAGVLSWSKTELQQIDQKIRTTLTQFGLHHPNSAIERLYLPRKEGGRGLCSVEATCGKEMHNIRNHFLNSHLPIHRWIAQGTRSMILQPDEDHLEMLRQRWSAKELHGRFYSNIHQEEVDITASNTYLIQGYMFPQTEGTIFAIQDQVVPTRNYIKHIIKKQIENTKCRLCNKAEETVLHLTSGCSSIAGTKYLSRHDNMGKVVHQLIAQREELIRQFTPHHIYMPASILENERTKIYWDFNITTDIGTEHNRPDMVVWNKKEMRATIIDFAVPQDGNLVKTYTEKISKYSLLAWQMRDMWQLRKVDIIPLIISVNGIVPRKTVQHLQELGLPPNTVTWMQKAVLLGTVNIIRQVLFPH

SEQ ID NO: 3893 - protein, 1107 aa, Coccinella septempunctata
MNLSLINAYFQVTEGEKNTRKYATRLAERWAQLYPDKVFTGKHLVAQVKNIKTRKLLSPDELDALRAEVLAQSPTARLRSIRRSIQGSATPPRRVLEPVEEEEIQGTSEPETEQPALEIREIFEEISLKWEGISLNRRPKISRIKLSTEAKNIMRTINAAVREPINRSTGFEELCHRVYCAAIVANLILQTKPKQENQGKQTQKKPPWEERLEKRIATIRREIGIIHLTLNNGKISRKTNKKLRTFTQKINLKETDKQYKIKLQSHVEKLKQKIAALGNRLRRYHKRTQRFQQNNLFTNNQRMFFRTINTQKDMKATQPPSPDTMKQYWSSLWSTEVKHNTEAPWINVEKGHLEDIQGMPRTKVSEEDVRNTIKRMKNWASPGVDGIHAYWWKTLTSTHGVFARLMEEALDNPQSIPEYFTSGMTYMLFKRGDPTRPDNYRPITCLPTAYKIITSTLAHKINNHLLRNNIMAWEQNGCRERSRASKEVLMIDNAITRQAKKRRKNIAVAWIDYQKAYDSVPHSWLIEVLKIYGVERRVIEMLKFVMNTWRTTLILNEGTTHYETSEINIRRGIFQGDSLSPPWFCLALNILSSMLNRSAYGYSINDTTQITHLFYMDDLKLFARGRAQLEGELELVRKFSADIGMTLGVEKCATVTVRRGKIVDEGDLRMRDGTEIKSLSNEETYKYLGIQQTFDIRTEENKQQAKTELLRRTKLIFKSQLSAKNKILAINIWAIPSFTYTSGVLSWSKTDLQLIDRKIRTEMTASGLLHPNSAVERLYLPRKEGGRGLTSIEDACWKNKLDLKKYFASKHLPLHQWIATQGDLPAIAETFSEDIPATENTLENLRQGWQTKQLHGRFYASLHQDEVDLTASNTYLTQGYLFPQTEGTLFAIQDQVVPTRNYVKHIMKKSIDNTRCRLCNSAEETVQHLSAGCPTIAGTRYLSRHDGMGKVVHQLLCINKKLLQHFTPHHLYVPSPIEENETFKIYWDFAITTDRGVEHNRPDMVVWDKKDKTATIIDFAVPQDYNILKTYADKISKYEALARQMRDMWQLKRVEIIPLIVSVNGLVPKKTSQHLQELQLPRNTITWMQKAVILGTVSIVRQVIFPH

SEQ ID NO: 3894 - protein, 953 aa, Coccinella septempunctata
MRTINAAVREPINRSTGFEELCHRVYCAAIVANLILQTKPKQENQGKQTQKKPPWEERLEKRIATIRREIGIIHLTLNNGKISRKTNKKLRTFTQKINLKETDKQYKIKLQSHVEKLKQKIAALGNRLRRYHKRTQRFQQNNLFTNNQRMFFRTINTQKDMKATQPPSPDTMKQYWSSLWSTEVKHNTEAPWINVEKGHLEDIQGMPRTKVSEEDVRNTIKRMKNWASPGVDGIHAYWWKTLTSTHGVFARLMEEALDNPQSIPEYFTSGMTYMLFKRGDPTRPDNYRPITCLPTAYKIITSTLAHKINNHLLRNNIMAWEQNGCRERSRASKEVLMIDNAITRQAKKRRKNIAVAWIDHQKAYDSVPHSWLIEVLKIYGVERRVIEMLKFVMNTWRTTLILNEGTTHYETSEINIRRGIFQGDSLSPPWFCLALNILSSMLNRSAYGYSINDTTQITHLFYMDDLKLFARGRAQFEGELDLVRKFSADIGMTLGVEKCATVTVRRGKIVDEGDLRMRDGTEIKSLSNEETYKYLGIQQTFDIRTEENKQQAKTELLRRTKLIFKSQLSAKSKILAINIWAIPSFTYTSAVLSWSKTDLQLIDRKIRTEMTASGLLHPNSAVERLYLPRKEGGRGLTSIEDACWKNKLDLKKYFASKHLPLHQWIATQGDLPAIAETFSEDIPATENTLENLRQGWQTKQLHGRFYASLHQDEVDLTASNTYLTQGYLFPQTEGTLFAIQDQVVPTRNYVKHIMKKSIDNTRCRLCNSAEETVQHLSAGCPIAGTRYLSRHDGMGKVVHQLLCINKKLLQHFTPHHLYVPSPIEENETFKIYWDFAITTDRGVEHNRPDMVVWDKKDKTATIIDFAVPQDYNILKTYADKISKYEALARQMRDMWQLKRVEIIPLIVSVNGLVPKKTSQHVQELQLPPNTITWMQKAVILGTVSIVRQVIFPH

SEQ ID NO: 3895 - protein, 1108 aa, Adalia bipunctata
MNLSLINAYFQVTEGGTNTRKYATRLAERWAQLYPDKVFTGKHLVAQVKNIKTRKLLAPDELDTMRTEVLTQSPTARLRIIRRSIQGGATPPVREMGSIEEREIQGTAEAEEEESAPEIRLIFEEINVKWEGIPLDRRPKISRIKLTAEAKNIMRAINVALKELINRSAGFEDLCHRVYCAAVVANLILQTKPKQENHGNRIQKKPPWEERIEKRIATIRKEIGIIHLTLNNGRISRKAHKKLRTFTQRINLKEGDAQYKIKLLTHVEQLKQKIAALGNRLRRYHKRTQRYQQNNLFTNNQKLFFRKINTQKETETMIPPSPEVMKQYWSSLWSREVKHNAGTPWIGVEKKNLENIQGMPRARVSEEDVRNTTKKMKNWASPGVDGIHAYWWKTLTSTHDVFAQLVEKALDSPQSMPKYFTRGMTYMLLKKGDPARPENYRPITCLPSAYKIITSTLAHKINNHLRINNIMAWEQNGCKEKSRASKEVLVIDNAITRQAKKRNKNIAMAWIDYQKAYDSVPHSWLIEVMEIYGVERRMIEMLKVVMNTWRTTLIVNEGTTHYETTEIHIRRGIFQGDGLSPSWFCLALNILSSMLNRSAYGYSINDHTKITHLFYMDDLKLFARGRAQLEGELELVRRFSADVGMTLGLEKCAAVIVRRGKIVDEGDLRLRDGTEIRSLNTEETYKYLGIQQTFDIRKAENKQQVKTELFRRTKLVFKSQLSAKNKILAVNIWAIPSFTYSSAVLSWSKTDLQQIDRKIRTEMTAFGLLHPNSAIERLYLPRKEGGRGLTSVEEACRKEEHNMKNYFASRNLPLHQWIAALGDIPAMVDTESEVGSVTENTIENLRRRWQTKQLHGRFYANLHQDEVDLTLSNTYLTQGYLFPQTEGTLFAIQDQVVPTRNYVRHIMKQPTDNTRCRLCNSAEETVQHLSAGCSTIAGTRYLSRHDNMGKVVHQMLCMNNKLLQHFTPHHLYVPLPIQENETSKIYWDFTIITDRGVEHNRPDMVVWNKKEKTATIIDFAVPQDHNIQKTYGDKINKYEALARQMRDMWQLKKKVEIIPLIVSVNGLVPKKTSQHLQELQLPSNTISWMQKAAILGTVSIIREVIFPH

SEQ ID NO: 3896 - protein, 1107 aa, Coccinella septempunctata
MNLSLINAYFQVTEGEKNTRKYATRLAERWAQLYPDKVFTGKHLVAQVKNIKTRKLLSPDELDALRAEVLAQSPTARLRSIRRSIQGSATPPRRVLEPVEEEEIQGTSEPETEQPALEIREIFEEISLKWEGISLNRRPKISRIKLSTEAKKIMRTINAAVREPINRSTGFEELCHRVYCAAIVANLLLQTKPKQENQGKQTQKKPPWEERLEKRIATIRREIGIIHLTLNNGKISRKTNKKLRTFTQKINLKETDKQYKIKLQSHVEKLKQKIAALGNRLRRYHKRTQRFQQNNLFTNNQRMFFRTINTQKDMKATQPPSPDTMKQYWSSLWSTEVKHNTEAPWINVEKGHLEDIQGMPRTKVSEEDVRNTIKRMKNWASPGVDGIHAYWWKTLTSTHGVFARLMEEALDNPQSIPEYFTSGMTYMLFKRGDPTRPDNYRPITCLPTAYKIITSTLAHKINNHLLRNNIMAWEQNGCRERSRASKEVLMIDNAITRQAKKRRKNIAVAWIDYQKAYDSVPHSWLIEVLKIYGVERRVIEMLKFVMNTWRTTLILNEGTTHYETSEINIRRGIFQGDSLSPPWFCLALNILSSMLNRSAYGYYINDTTQITHLFYMDDLKLFARGRAQLEGELELVRKFSADIGMTLGVEKCATVTVRRGKIVDEGDLRMRDGTEIKSLSNEETYKYLGIQQTFDIRTEENKQQAKTELLRRTKLIFKSQLSAKNKILAINIWAIPSFTYTSAVLSWSKTDLQLIDRKIRTEMTASGLLHPNSAVERLYLPRKEGGRGLTSIEDACWKNKLDLKKYFASKHLPLHQWIATQGDLPAIAETFSEDIPATENTLENLRQGWQTKQLHGRFYASLHQDEVDLTASNTYLTQGYLFPQTEGTLFAIQDQVVPTRNYVKHIMKKSIDNTRCRLCNSAEETVQHLSAGCPTIAGTRYLSRHDGMGKVVHQLLCINKKLLQHFTPHHLYVPSPIEENETFKIYWDFAITTDRGVEHNRPDMVVWDKKDKTATIIDFAVPQDYNILKTYADKISKYEALARQMRDMWQLKRVEIIPLIVSVNGLVPKKTSQHLQELQLPPNTITWMQKAVILGTVSIVRQVIFPH

SEQ ID NO: 3897 - protein, 1040 aa, Harmonia axyridis
METRRRPRNRTDFGRSADRATPVEAQTNISRTTGMVDIQAQTSGTTQEPPELPSTSMFACREPQCPRSFQTLTGRGVHERRAHPDWYCQQQLTERPNIKERWNVEELTMMARKEAEATRRGVRFINQELLKGSSRTLESIKGARRRLDYKKKVEEFLQEVENVRDQEVEAGEDNEEVRDLRTYLIEAEPLVGDEYNARWLNDICSMVHSSSKERVGIELASYLNETFPPAKKNEVFNRHVANTEVAQGRKVRRREEYARVQDLWKRKPGECVKRILEDRLNQEPFMSKGQMEPYWRTIITRPKTMSPKLARQTECHDDLWRPIEAQEIKDALPRKKSAPGPDGVLAEKIWKAPRDMMARVFTLLMWMEKLPESLCQSRTVLLPKTKNASEPGLFRPITMSSVIIRTFHKILANRLKKIELDPRQRAFREGDGCAENIVLLDMVLKYHHRENKKMFMAVLDMAKAFDSVSFPALMASLRSKGLPESMVRYIANVYEHGKTILQHGDWRSEKIHPTCGVKQGDPLSPIMFNFVMDGMLKNLKSGIGVNVDGAHLNVLAFADDIVLLASTKEGLQSLIDRVVDFLGDCGLDANAGKCVTLAVKTIPKQKKTVIDSSCKFKINNIQIPTLTATSEWTYLGVTFGADGVRCHDVMNSLEQKLARLTKAPLKPQQRLWAIRSVLIPGVMYQLVHCRVKFGYLKTLDKKIRMTLRKWLHLPKDCPNAYFHTNIRDGGLGVPSLRWWAPLQRLKALKRLGKNHFLQAKRTTTYLNSMISEAEKRLNNNGEVVEKAKDMEKLWSDLLYSSVDGGPLRSSAEVKGQHGWIGEPTRFLSGRDFVNCNKVRINALPTSSRTSRGRPGDRSCRAGCGLPETSNHIIQVCHRTNKLRIKRHNAVANYITRSLEGKGYLVEQEPTFSTAEGNRKPDVVATLGKTTLVIDAQVVNDQMNLEEANQNKINYYKNNSTLAQKIKEKYGSDTILTLAATLTWRGIWSKTSAEELLRLGAIRKRDLPVISTRALVGSVAAWNIFNKVTSYRRRGNRQGIG

SEQ ID NO: 3898 - protein, 1040 aa, Harmonia axyridis
METRRRPRNRTDFGRSADRATPVEAQTNISRTTGMVDIQAQTSGTTQEPPELPSTSMFACREPQCPRSFQTLTGRGVHERRAHPDWYCQQQLTERPNIKERWNVEELTMMARKEAEATRRGVRFINQELLKGSSRTLESIKGARRRLDYKKKVEEFLQEVENVRDQEVEAGEDNEEVRDLRTYLIEAEPLVGDEYNARWLNDICSMVHSSSKERVGIELASYLNETFPPAKKNEVFNRHVANTEVAQGRKVRRREEYARVQDLWKRKPGECVKRILEDRLNQEPFMSKGQMEPYWRTIMTRPKTMSPKLARQTECHDDLWRPIEAQEIKDALPRKKSAPGPDGVLAEKIWKAPRDMMARVFTLLMWMEKLPESLCQSRTVLLPKTKNASEPGLFRPITMSSVIIRTFHKILANRLKKIELDPRQRAFREGDGCAENIVLLDMVLKYHHRENKKMFMAVLDMAKAFDSVSFPALMASLRSKGLPESMVRYIANVYEHGKTILQHGDWRSEKIHPTCGVKQGDPLSPIMFNFVMDGMLKNLKSGIGVNVDGAHLNVLAFADDIVLLASTKEGLQSLIDRVVDFLGDCGLDANAGKCVTLAVKTIPKQKKTVIDSSCKFKINNIQIPTLTATSEWTYLGVTFGADGVRCHDVMNSLEQKLARLTKAPLKPQQRLWAIRSVLIPGVMYQLVHCRVKFGYLKTLDKKIRMTLRKWLHLPKDCPNAYFHTNIRDGGLGVPSLRWWAPLQRLKALKRLGKNHFLQAKRTTTYLNSMISEAEKRLNNNGEVVEKAKDMEKLWSDLLYSSVDGGPLRSSAEVKGQHGWIGEPTRFLSGRDFVNCNKVRINALPTSSRTSRGRPGDRSCRAGCGLPETSNHIIQVCHRTNKLRIKRHNAVANYITRSLEGKGYLVEQEPTFSTAEGNRKPDVVATLGKTTLVIDAQVVNDQMNLEEANQNKINYYKNNSTLAQKIKEKYGSDTILTLAATLTWRGIWSKTSAEELLRLGAIRKRDLPVISTRALVGSVAAWNIFNKVTSYRRRGNRQGIG

SEQ ID NO: 3899 - protein, 1040 aa, Harmonia axyridis
METRRRPRNRTDFGRSADRATPVEAQTNISRTTGMVDIQAQTSGTTQEPPELPSTSMFACREPQCRRSFQTLTGRGVHERRAHPDWYCQQQLTERPNIKERWNVEELTMMARKEAEATRRGVRFINQELLKGSSRTLESIKGARRRLDYKKKVEEFLQEVENVRDQEVEAGEDNEEVRDLRTYLIEAEPLVGDEYNARWLNDICSMVHSSSKERVGIELASYLNETFPPAKKNEVFNRHVANTEVAQGRKVRRREEYARVQDLWKRKPGECVKRILEDRLNQEPFMSKGQMEPYWRTIMTRPKTMSPKLARQTECHDDLWRPIEAQEIKDALPRKKSAPGPDGVLAEKIWKAPRDMMARVFTLLMWMEKLPESLCQSRTVLLPKTKNASEPGLFRPITMSSVIIRTFHKILANRLKKIELDPRQRAFREGDGCAENIVLLDMVLKYHHRENKKMFMAVLDMAKAFDSVSFPALMASLRSKGLPESMVRYIANVYEHGKTILQHGDWRSEKIHPTCGVKQGDPLSPIMFNFVMDGMLENLKSGIGVNVDGAHLNVLAFADDIVLLASTKEGLQSLIDRVVDFLGDCGLDANAGKCVTLAVKTIPKQKKTVIDSSCKFKINNIQIPTLTATSEWTYLGVTFGADGVRCHDVMNSLEQKLARLTKAPLKPQQRLWAIRSVLIPGVMYQLVHCRVKFGYLKTLDKKIRMTLRKWLHLPKDCPNAYFHTNIRDGGLGVPSLRWWAPLQRLKALKRLGKNHFLQAKRTTTYLNSMISEAEKRLNNNGEVVEKAKDMEKLWSDLLYSSVDGGPLRSSAEVKGQHGWIGEPTRFLSGRDFVNCNKVRINALPTSSRTSRGRPGDRSCRAGCGLPETSNHIIQVCHRTNKLRIKRHNAVANYITRSLEGKGYLVEQEPTFSTAEGNRKPDVVATLGKTTLVIDAQVVNDQMNLEEANQNKINYYKNNSTLAQKIKEKYGSDTIPTLAATLTWRGIWSKTSAEELLRLGAIRKRDLPVISTRALVGSVAAWNIFNKVTSYRRRGNRQGIG

SEQ ID NO: 3900 - protein, 1040 aa, Harmonia axyridis
METRRRPRNRTDFGRSADRATPVEAQTNISRTTGMVDIQAQTSGTTQEPPELPSTSMFACREPQCPRSFQTLTGRGVHERRAHPDWYCQQQLTERPNIKERWNVEELTMMARKEAEATRRGVRFINQELLKGSSRTLESIKGARRRLDYKKKVEEFLQEVENVRDQEVEAGEDNEEVRDLRTYLIEAEPLVGDEYNARWLNDICSMVHSSSKERVGIELASYLNETFPPAKKNEVFNRHVANTEVAQGRKVRRREEYARVQDLWKRKPGECVKRILEDRLNQEPFMSKGQMEPYWRTIMTRPKTMSPKLARQTECHDDLWRPIEAQEIKDALPRKKSAPGPDGVLAEKIWKAPRDMMARVFTLLMWMEKLPESLCQSRTVLLPKTKNASEPGLFRPITMSSVIIRTFHKILANRLKKIELDPRQRAFREGDGCAENIVLLDMVLKYHHRENKKMFMALLDMAKAFDSVSFPALMASLRSKGLPESMVRYIANVYEHGKTILQHGDWRSEKIHPTCGVKQGDPLSPIMFNFVMDGMLKNLKSGIGVNVDGAHLNVLAFADDIVLLASTKEGLQSLIDRVVDFLGDCGLDANAGKCVTLAVKTIPKQKKTVIDSSCKFKINNIQIPTLTATSEWTYLGVTFGADGVRCHDVMNSLEQKLARLTKAPLKPQQRLWAIRSVLIPGVMYQLVHCRVKFGYLKTLDKKIRMTLRKWLHLPKDCPNAYFHTNIRDGGLGVPSLRWWAPLQRLKALKRLGKNHFLQAKRTTTYLNSMISEAEKRLNNNGEVVEKAKDMEKLWSDLLYSSVDGGPLRSSAEVKGQHGWIGEPTRFLSGRDFVNCNKVRINALPTSSRTSRGRPGDRSCRAGCGLPETSNHIIQVCHRTNKLRIKRHNAVANYITRSLEGKGYLVEQEPTFSTAEGNRKPDVVATLGKTTLVIDAQVVNDQMNLEEANQNKINYYKNNSTLAQKIKEKYGSDTILTLAATLTWRGIWSKTSAEELLRLGAIRKRDLPVISTRALVGSVAAWNIFNKVTSYRRRGNRQGIG

SEQ ID NO: 3901 - protein, 966 aa, Leptidea sinapis
MLARTEAGLIVETGKCTNITLAARLSGSGRTVEAIKGQRRSAAYKSKVLEYVEEMRIAATVREVELSREATTPVEDQPTTDSRVQTTDLDDPFAELTSDRPDASELLAKLLCEREAARKMRMSLESRGRGRRKKTHKSGNATGLKMTSRKRRREEYAKIQEIFKKSRRRAAAEVIDGATRGVKHSLGDMVSYWQPILEAVSTAAGPTPEALKALRLKERHGGTRDYSQLWAPFSAQEIRKARIDLRTAPGPDGITPDDWRSIPLQSKADLFNEWMRIGEIPELLRQSRTIFVPKKEEPAGPGDYRPISIASIPLRHMHSLLARRILNCCPPDYRQRGFVHADGCLENTAVLDTVLGDSRSKLRECHVAVLDFSKAFDTVSHEALVKLLVERGLPMAFCDYVARLYRTALTTLATSEGTSDPVKVGKGVRQGDPLSPILFNMAMDIILASLPPGVGYRLGTEIISALAYADDLVLIASTKAGLQESIDVVHRVGMMMGLHLNRSKSAVLSLVPDGHTKKIHYIAENTFKVGAKWIRQATCVERWRYLGVDFTPAGSVMLEQDIKKALKNITKAPLKPQQRLEILRGHLLPRFLQGLVLGKVTDDRLRMLDIEIRKAIRSWLRLPLDTAVGYYHASVNDGGLGVPSFRSAIPDLIVRRYGRLGASDWGAAAAAAKSKRIINKMRWAKKMLSKLSTVCPKTGQRSISLYWKEKLHGSVDGYELRESSRVKGSTRWIRAKCHQITGRDYVDFVKCHINALPSRIRTTRGRRSEISEPESNCRAGCMVRETTAHIIQKCFRTHGGRIERHNRVVKILASALSEQGWTVELEPHVQTGDKGLRKPDIICKRDGEGVIVDAQVVSGQRPLDQAHREKRNKYAEHGDLIERVRSRLGLHGAAKISVTSCTISWRGVWSRASYMDLKKLLRLKELFFDSVSIVALRGSCMNWTRFNQMTENRLSDRPESGPGLLR

SEQ ID NO: 3902 - protein, 966 aa, Leptidea sinapis
MLARTEAGLIVETGKCTNITLAARLSGSGRTVEAIKGQRRSAAYKSKVLEYVEEMRIAATVREVELSREATTPVEDQPTTDSRVQTTDLDDPFAELTSDRPDASELLAKLLCEREAARKMRMSLESRGRGRRKKTHKSGNATGLKMTSRKRRREEYAKIQEIFKKSRRRAAAEVIDGATRGVKHSLGDMVSYWQPILEAVSTAAGPTPEALKAVRLKERHGGTRDYSQLWAPFSAQEIRKARIDLRTAPGPDGITPDDWRSIPLQSKADLFNEWMRIGEIPELLRQSRTIFVPKKEEPAGPGDYRPISIASIPLRHMHSLLARRILNCCPPDYRQRGFVHADGCLENTAVLDTVLGDSRSKLRECHVAVLDFSKAFDTVSHEALVKLLVERGLPMAFCDYVARLYRTALTTLATSEGTSDPVKVGKGVRQGDPLSPILFNMAMDIILASLPPGVGYRLGTEIISALAYADDLVLIASTKAGLQESIDVVHRVGMMMGLHLNRSKSAVLSLVPDGHTKKIHYIAENTFKVGAKWIRQATCVERWRYLGVDFTPAGSVMLEQDIKKALKNITKAPLKPQQRLEILRGHLLPRFLQGLVLGKVTDDRLRMLDIEIRKAIRSWLRLPLDTAVGYYHASVNDGGLGVPSFRSAIPDLIVRRYGRLGASDWGAAAAAAKSKRIINKMRWAKKMLSKLSTVCPKTGQRSISLYWKEKLHGSVDGYELRESSRVKGSTRWIRAKCHQITGRDYVDFVKCHINALPSRIRTTRGRRSEISEPESNCRAGCMVRETTAHIIQKCFRTHGGRIERHNRVVKILASALSEQGWTVELEPHVQTGDKGLRKPDIICKRDGEGVIVDAQVVSGQRPLDQAHREKRNKYAEHGDLIERVRSRLGLHGAAKISVTSCTISWRGVWSRASYMDLKKLLRLKELFFDSVSIVALRGSCMNWTRFNQMTENRLSDRPESGPGLLR

SEQ ID NO: 3903 - protein, 966 aa, Leptidea sinapis
MLARTEAGLIVETGKCTNITLAARLSGSGRTVEAIKGQRRSAAYKSKVLEYVEEMRIAATVREVELSREATTPVEDQPTTDSRVQTTDLDDPFAELTSDRPDASELLAKLLCEREAARKMRMSLESRGRGRRKKTHKSGNATGLKMTSRKRRREEYAKIQEIFKKSRRRAAAEVIDGATRGVKHSLGDMVSYWQPILEAVSTAAGPTPEALKALRLKERHGGTRDYSQLWAPFSAQEIRKARIDLRTAPGPDGITPDDWRSIPLQSKADLFNEWMRIGEIPELLRQSRTIFVPKKEEPAGPGDYRPISIASIPLRHMHSLLARRILNCCPPDYRQRGFVHADGCLENTAVLDTVLGDSRSKLRECHVAVLDFSKAFDTVSHEALVKLLVERGLPMAFCDYVARLYRTALTTLATSEGTSDPVKVGKGVRQGDPLSPILFNMAMDIILASLPPGVGYRLGTEIISALAYADDLVLIASTKAGLQESIDVVHRVGMMMGLHLNRSKSAVLSLVPDGHSKKIHYIAENTFKVGAKWIRQATCVERWRYLGVDFTPAGSVMLEQDIKKALKNITKAPLKPQQRLEILRGHLLPRFLQGLVLGKVTDDRLRMLDIEIRKAIRSWLRLPLDTAVGYYHASVNDGGLGVPSFRSAIPDLIVRRYGRLGASDWGAAAAAAKSKRIINKMRWAKKMLSKLSTVCPKTGQRSISLYWKEKLHGSVDGYELRESSRVKGSTRWIRAKCHQITGRDYVDFVKCHINALPSRIRTTRGRRSEISEPESNCRAGCMVRETTAHIIQKCFRTHGGRIERHNRVVKILASALSEQGWTVELEPHVQTGDKGLRKPDIICKRDGEGVIVDAQVVSGQRPLDQAHREKRNKYAEHGDLIERVRSRLGLHGAAKISVTSCTISWRGVWSRASYMDLKKLLLLKELFFDSVSIVALRGSCMNWTRFNQMTENRLSDRPESGPGLLR

SEQ ID NO: 3904 - protein, 1098 aa, Leptidea sinapis
MSSDGVPVYGCSSTAALREEPSESRVRIGCEGLAAPTADNLREAMSNYVSRTTAVDLTSDLPQESESISILNPDAESGRSPSGGHLQFTCPICTRPFNTAIGLGVHKRRAHPVHSNAEAAPTDRVKRRWSDEELTMLARTEAGLIVETGKCTNITLAARLSGSGRTVEAIKGQRRSAAYQSKVLEYVEEMRIAATVREVELSREATTPVEDQPTTDSRVQTTDLDDPFAELTSDRPDASELLAKLLCEREAARKMRMSLESRGRGRRKKTHKSGNATGLKMTSRKRRREEYAKIQEIFKKSRRRAAAEVIDGATRGVKHSLGDMVSYWQPILEAVSTAAGPTPEALQALRLKERHGGTRDYSQLWAPFSAQEIRKARIDLRTAPGPDGITPDDWRSIPLQSKADLFNEWMRIGEIPELLRQSRTIFVPKKEEPAGPGDYRPISIASIPLRHMHSLLARRILNCCPPDYRQRGFVHADGCLENTAVLDTVLGDSRSKLRECHVAVLDFSKAFDTVSHEALVKLLVERGLPIAFCDYVARLYRTARTTLAASEGTSDPVKVGKGVRQGDPLSPILFNMAMDIILASLPPGVGYRLGTEIISALAYADDLVLIASTKAGLQESIDVVHRVGMMMSLHLNRSKSAVLSLVPDGHSKKIYYIAENTFKVFAKWIRQATCVERWRYLGVDFTPAGSVMLEQDIKKALKNITKAPLKPQQRLEILRGHLLPRFLQGLVLGKVTDDRLRMLDIEIRKAIRSWLRLPLDTAVGYYHASVNDGGLGVPSFRSAIPDLIVRRYGRLGASDWGAAAAAAKSKRIINKMRWAKKMLSKLSTVCPKTGQRSISLYWKEKLHGSVDGYELRESSRVKGSTRWIRAKCHQITGRDYVDFVKCHINALPSRIRTTRGRRSEISEPESNCRAGCMVRETTAHIIQKCFRTHGGRIERHNRVVKILASALSEQGWTVELEPHVQTGDKGLRKPDIICKRDGEGVIVDAQVVSGQRPLDQAHREKRNKYAEHGDLIERVRSRLGLHGAAKTSCTISWRGVWSRASYMDLKKLLRLKELFFDSVSIVALRGSCMNWTRFNQMTENRLSDRPESGPGLLR

SEQ ID NO: 3905 - protein, 2037 aa, Enchytraeus crypticus
MSRQKWSLSQTAGKESGICRVCLALRQVHLRDGLIHRHGPRKSPCPGSGQPPLDKNLSLNTRNATSTSHQPIPNQSVTHTDGSCVHFEHVDGYFSDSSHPANCMPKNSSTSKNSAASINSIVTIVDSSRESNVNVCSISHNLAVQHPTLTDPIIKHIPRSARAPCARALTTLLNKISNNSEELTYWIELLNFAPATLTVPVKLGKKVSVVGIIRNRLSKVSNSENLETSNKAKSVSKRHIPKSSIPSLVQSKLEEGNIRAAVRILCSDEYLAENNEKTFKQLQDKHPIAVESPDNQVHNSSPAVQVQEDVVLKALHSFISGTAGGPDGLRPQHLKDLIKCKEAGAQLLTAITGFINCLIRGDCPIQVRPILFGGNLIAIKKKNDDVRPIAIGYTWRRLAAKCLNMYAMPLVSDYLSPIQLGVGGSGGCEAAVHATRQFATRMPSGSSLVKLDFANAFNSIRRVKMLRAVHSFLPEIYDFCSSAYCQSSLLKYGERVILSSEGVQQGDPLGPLLFSLTLQPLLKDLISSFRISYLDDLTIGGLDAAVANDVRMVIDKGSELGLKINVNKCEIISSALSHDDPILNSFQKKNSSDADLLGAPLVVGGAMDSKLEKLIADLRRAATRLRDISRHDALILIRHSLSAPKVMHTLRSSPCSQHPLLQTYDKILRECLCSLLNVDLTERQWLQAILPIRNGGLGIRSTSQLAPSAFLASYNSTRALQLEILGNVTSPIDPEFVKAKALWSSKFDVIAPIGEAACFQKNWDNPIVEESFAQLLNSTSEPLEKARLLAVSAPNSSDWLHALPIASCGLRLEDEAVRIAVGLRLGTKLCEPHKCMCGSIVDARGYHGLSCRKSAGRTLRHHNLNDIVWHALNKAGCPAIKEPTGLSRSDGKRPDGLSLIPWAEGKSLLWDVTVIDSLAKSYLNLSSMSAGEVAELAADRKTAKYSELCTSYCFIPLAFETLGPMNVEGNKFISSLGKKLSSLTGEKRETCFLRQRLSICVQRFNTICVIGTFNSQGEYYGPRDAATTAGFNVQDSKALPLSLLTMKPGSSSSSQGSSVSPVDVPDSPSLLSSYEPILSPGLPYQSCFRPYSPPSSDEIMSSRSNILHESPSRISTSLPMNSQIFAHSPSLLLGEFENLGATGLPSYSGERPFLFSIETEQALINSEIFNTNSGLPFPGPKAPSGSSNPAPIHVTSESGSEGLQVVGDCSRVIEGLKKAQNEQSRTEGLQVVGDSSRVMEGLRKAQDEESGSEGLQVVGDSSRVMEGLRKALNEEDAVSRKKLHLVVQSVDTEKSPIREIVLNLTPPGCRTSDFSRESSNGAAGVSTNLPKTESYQEDYPKNVFVKDSEICYVVQASVVVNSALTFVSNADLEVASPSRSFDHQFNQLILQESLSDKRKSGFAGSIPVNQSNSNCISLFFDNSSEVKVGRDTPISIFEQSPLFGTPTVLGASGVEIGMKPMLRESELSLIYPFKDNLTASQAAVTCIKSVLGESQGSNLTYLTPGSAVSVSDEKIKGSTKFCIEQSDKLLAFKRKVRVKQLTETHESVPNQYGAIEHLEQYSADVHHEHRCAVHVQQGEDLHEQIGAEDHHEQLDFEYHHEQHGAEVHHEQHSAVDHHEKLGVEDRLDQLGAEGYHEQHDAGSHHVQNSAEDHLEQLDFEDYHEQLGAEVHHEQLDFEDHHEQLGAEVHHEQHSAIDHHEKLGAVDHHKQLGAEYHHEQHCAGGHYEQFSAEVHHEQLGAESYYEPLGAGKHHDLQCDENHHEHHGAENHRQQYETHDRIVNRRRQTLHKIQKKKLQSSCLQIQPVLHFNLLKQQHLNQGFDRQRIVLTVSPPGSSGSLPPPHSSTHIPLQGAGPQLSSLATVRGDSAVRQSTWMFMGRVRQNPIGSPAGFTSPVHLRPVSATAQPPQVGFAQPPADLLSPFHVYRPSSLKFNALIQPLGRAQSAPTRSDLQQLGPPLLHQLQPGATGMKQERISQLIGGEQFSLLSDSEMCEMGGESERTSTSPGGEESHLHQPSSTAYPTADQCVRGSSPGLSRH

SEQ ID NO: 3906 - protein, 2036 aa, Enchytraeus crypticus
MSRQKWSLSQTAGKESGICRVCLALRQVHLRDGLIHRHGPRKSPCPGSGQPPLDKNLSLNTRNATSTSHQPIPNQSVTHTDGSCVHFEHVDGYFSDSSHPANCKPKNSSTSKNSAASINSIVTIVDSSRESNVNVCSISHNLAVQHPTLTDPIIKHIPRSARAPCARALTTVLNKISNNSEELTYWIELLNFAPATLTVPVKLGKKVSVVGIIRNRLSKVSNSENLETSNKAKSVSKRHIPKSSIPSLVQSKLEEGNIRAAVRILCSDEYLAENNEKTFKQLQDKHPIAVESPDNQVHNSSPAVQVQEDVVLKALHSFISGTAGGPDGLRPQHLKDLIKCKEAGAQLLTAITGFINCLIRGDCPIQVRPILFGGNLIAIKKKNDDVRPIAIGYTWRRLAAKCLNMYAMPLVSDYLSPIQLGVGVSGGCEAAVHATRQFATRMPSGSSLVKLDFANAFNSISRVKMLRAVHSFLPEIYDFCSSAYCQSSLLKYGERVILSSEGVQQGDPLGPLLFSLTLQPLLKDLISSFRISYLDDLTIGGLDAAVANDVRMVIDKGSELGLKINVNKCEIISSALSHDDPILNSFQKKNSSDADLLGAPLVVGGAMDSKLEKLIADLRRAATRLRDISRHDALILIRHSLSAPKVMHTLRSSPCSQHPLLQTYDKILRECLCSLLNVDLTERQWLQAILPIRNGGLGIRSTSQLAPSAFLASYNSTRALQLEILGNVTSPIDPEFVKAKALWSSKFDVIAPIGEAACFQKNWDNPIVEESFALLLNSTSEPLEKARLLAVSAPNSSDWLHALPIASCGLRLEDEAVRIAVGLRLGTKLCEPHKCKCGSIVDARGYHGLSCRKSAGRTLRHHNLNDIVWHALNKAGCPAIKEPSGLSRSDGKRPDGLSLIPWAEGKSLLWDVTVIDSLAKSYLNLSSMSAGEVAELAADRKTAKYSELCTSYCFIPLAFETLGPMNVEGNKFISSLGKKLSSLTGEKRETCFLRQRLSICVQRFNTICVIGTFNSQGEYYGPRDAATTAGFNVQDSKALPLSLLTMKPGSSSSSQGSSVSPVDVPDSPSLLSSYEPILSPGLPYQSCFRPYSPPSSDEIMSSRSNILHESPSRISTSLPMNSQIFAHSPSLLLGEFENLGATGLPSYSGERPFLFSIEAEQALINSEIFNTNSGLPFPGPKAPSGSSNPAPIHVTSESGSEGLQVVGDCSRVIEGLKKAQNEQSRTEGLQVVGDSSRVMEGLRKAQDEESGSEGLQVVGDSSRVMEGLRKALNEEDAVSRKKLHLVVQSVDTEKSPIREIVLNLTPPGCRTSDFSRESSNGAAGVSTNIPKTESYQEDYPKNVFVKDSEICYVVQASVVVNSALTFVSNADLEVDSPSRSFDHQFNQLILQESLSDKRKSGFAGSIPVNQSNSNCISLFIDDSSEVKVGRDTPISIFEQTPLFCTPTVLGASGLEIGMKPMLRESELSLIYPFKDNLTASQAAVTCIKSVLGESQGSNLTYRTPGSAVSVSDEKIKGSTKFCIEQSDKLLAFKRKVRVKQLTETHESVPNQYGAIEHLEQYSADVHHEHRCAVHVKQGEDLHEQIGAEDHHEQLDFEYHHEQHGAEVHHEQHSAVDHHEKLGVEDHLDQLGAEGYHEQHDAGSHHEQNSAEDHLEQLDFEDYHEQLGAEVHHEQLDFEDHHEQLGAEVHHEQHSAIDHHEQLGAVDHHKQLGAEYHHEQHCAGGHYEQFSAEVHHEQLGAESYYEPLGAGKHHDLQCDENHHEHHGAENHRQQYETHDRIVNRRRQTLHKIQKKKLQSSCLQIQPVLHFNLLKQQHLNQGFDRQRIVLTVSPPGSSGSLPPPYSSTHIPLQGAGPQLSSLATVSGDSAVRQSTWMFMGRVRQTPIGSPAGFTSPVHLRPVSATAQPPQVGFAQPTADLLSLFHVYRPSSLKFNALIQPLGRAQSAPTRSDLQQLGPPLLHQLQPGATGMKQARISQLIGGEQFSLLSDSEMCEMGGESERTSTSPGGEESHLHQPSSTAYPTADQCVRGSSPGLSR

SEQ ID NO: 3907 - protein, 1704 aa, Enchytraeus crypticus
MSRQKWSLSQTAGKESGICRVCLAFRQVHLRDGLIHRHGPRKSPCPGSGQPPLDKNLSLNTRNATSTSHQPIPNQSVTHTDGSCVHFEHVDGYFSDSSHPANCKPKNSRTSKNSAASINSIVTIVDSSRESNVNVCSISHNLAVQHPTLTVPIIKHIPRSARAPCARALTTVLNKISNNSEELTYWIELLNFAPATLTVPVKLGKKVSVVGIIRNRLSKVSNSENLETSNKAKYVSKRHIPKSSIPSLVQSKLEEGNIRAAVRILCSDEYLAENNEKTFKQLQDKHPIAVESPDNQVHNSSPAVQVQEDVVLKALHSFISGTAGGPDGLRPQHLKDLIKCKEAGAQLLTAITGFINCLIRGDCPIQVRPILFGGNLIAIKKKNDDVRPIAIGYTWRRLAAKCLNMYAMPLVSDYLSPIQLGVGVSGGCEAAVHATRQFATRMPSGSSLIKLDFANAFNSISRVKMLRAVHSFLPEIYDFCSSAYCQSTLLKYGERVILSSEGVQQGDPLGPLLFSLTLQPLLKDLLSSFRISYLDDLTIGGLDAAVANDVRMVIDKGSELGLKINVNKCEIISSALSHDDPILNSFQKKNISDADLLGAPIVVGGAMDSKLEKLIADLRRAATRLRDISRHDALILIRHSLSAPKVMHTLRSSPCSQHPLLQTYDKILRECLCSLLNVDLTERQWLQAILPIRNGGLGIRSTLQLAPSAFLASYNSTRALQLEILGNVTSPIDPEFVKAKALWSSKFDVIAPIGEAACFQKNWDNPIVEESFALLLNSTSEPLEKARLLAVSAPNSSDWLHALPIASCGLRLEDEAVRIAVGLRLGTKLCEPHKCMCGSIVDARGYHGLSCRKSAGRTLRHHNLNDIVWHALNKAGCPAIKEPTGLSRSDGKRPDGLSLIPWAEGKSLLWDVTVIDSLAKSYLNLSSMSAGEVAELAADRKTAKYSELCTSYCFIPLAFETLGPVNVEGNKFISSLGKKLSSLTGEKRETCFLRQRLSICVQRFNTICVIGTFNSQGEYYGPGDAATTAGFNVQDSKALPLSLLTMKPGSSSSSQGSSVSPVDVPDSPSLLSSYEPILSPGLLYQSCFRPYSPPSSDEIMSSSSNILHESPSRISTSLPMNSQIFAHSPSLLLGEFENLGATGLPSYSGERPFLFSIEAEQALINSEIFNTNSGLPFPGPKAPSGSSNPAPIHVTSESGSEGLQVVGDCSRVIEGLKKAQNEQSRTEGLQVVGDSSRVMVGLRKAQDEESGSEGLQVVEDSSRVMEGLRKALNEEDAVSRKKLHLVVQSVDTEKSPIREIVLNQTPPGCRTSDLSRESSNGAAGDSTNIPKTESYQEDYPKNVVVKDSEICYVVQASVVVNSALTFVSNADLEVDSPSRSSKHQFNQLILQESLSDKRKSGFAGSIPVNQSNSNCISLFIDNSSEVKVGRDTPISIFEQSPLFGTPTVLGASGLEIGMKPMLRESEVSLIYPFNDNLTASQAAVTCIKSVLGESQGSNLTYLTPGSAVSVSDEKIKGSTKFCIEQSDKLLAFKRKERVKQLTEAHESVPNQYGAKDHLEQYSADVHHEHRCAVHVQQGEDLHEQIGAEGYHEQHGAEDHHEQLDFEYHHEQHGAEVHHEQHSAEDHHELLGVKITMNSSVLKVIMNSTVLEVIMNRIVLKIILNSSILKIIMNSSVLKIFMNSSILKIIMNSSVLKFIMNNIVL

SEQ ID NO: 3908 - protein, 1811 aa, Enchytraeus crypticus
MSRQKWSLSQTAGKESGICRVCLALRQVHLRDGLIHRHGPRKSPCPGSGQPPLDKNLSLNTRNATSTSHQPIPNQSVTHTDGSCVHFEHVDGYFSDSSHPANCKPKNSSTSKNSAASINSIVTIVDSSRESNVNVCSISHNLAVQHPTLTDPIIKHIPRSARAPCARALTTVLNKISNNSEELTYWIELLNFAPATLTVPVKLGKKVSVVGIIRNRLSKVSNSENLETSNKAKSVSKRHIPKSSIPSLVQSKLEEGNIRAAVRILCSDEYLAENNEKTFKQLQDKHPIAAESPDNQVHNSSPAVQVQEDVVLKALHSFISGTAGGPDGLRPQHLKDLIKCKEAGAQLLTAITGFINCLIRGDCPIQVRPILFGGNLIAIKKKNDDVRPIAIGYTWRRLAAKCLNMYAMPLVSDYLSPIQLGVGGSGGCEAAVHATRQFATRMPSGSSLVKLDFANAFNSISRVKMLRAVHSFLPEIYDFCSSAYCQSSLLKYGERVILSSEGVQQGDPLGPLLFSLTLQPLLKDLISSFRISYLDDLTIGGLDAAVANDVRMVIDKGSELGLKNNVNKCEIISSALSHDDPILNSFQKKNSSDADLLGAPLVVGGAMDSKLEKLIADLRRAATRLRDISRHDALILIRHSLSAPKVMHTLRSSPCSQHPLLQTYDKILRECLCSLLNVDLTERQWLQAILPIRNGGLGIRSTSQLAPSAFLASYHSTRALQLEILGNVTSPIDPEFVKAKALWSSKFDVIAPIGEAACFQKNWDNPIVEESFAQLLNSTSEPLEKARLLAVSAPNSSDWLHALPIASCGLRLEDEAVRIAVGLRLGTKLCEPHKCKCGSIVDARGYHGLSCRKSAGRTLRHHNLNDIVWHALNKAGCPAIKEPTGLSRSDGKRPDGLSLIPWAEGKSLLWDVTVIDSLAKSYLNLSSMSAGEVAELAADRKTAKYSELCTSYCFIPLAFETLGPMNVEGNKFISSLGKKLSSLTGEKRETCFLRQRLSICVQRFNTICVIGTFNSQGEYYGPRDAATTAGFNVQDSKALPLSLLTMKPGSSSSSQGSSVSPVDVPDSPSLLSSYEPILSPGVPYQSCFRPYSPPSSDEIMSSRSNILHESPSRISTSLPMNSQIFAHSPSLLLGEFENLGATGLPSYSGERPFLFSIETEQALINSEIFNTNSGLPFPGPKAPSGSSNPAPIHVPSESGSEGLQVVGDCSRVIEGLKKAQNEQSRTEGLQVVGDSSRVMEGLRKAQDEESGSEGLQVVGDSSRVMEGLRKALNEEDAVSRKKLHLVVQSVDTEKSPIREIVLNLTPPGCRTSDFSRESSNGAAGVSTNIPKTESYQEDYPKNVFVKDSEICYVVQASVVVNSALTFVSNADLEVDSPSRSFDHQFNQLILQESLSDKRKSGFAGSIPVNQSNSNCISLFFDNSSEVKVGRDTPISIFEQSPLFGTPTVLGASGLEIGMKPMLRESELSLIYPFKDNLTASQAAVTCIKSVLGESQGSNLTYLTPGSAVSVSDEKIKGSTKFCIEQSDKLLAFKRKVRVKQLTETHESVPNQYGAIEHLEQYSADVHHEHRCAVHVQQGEDLHEQIGAEDHHEQLDFEYHHEQHGAEVHHEQHSAVDHHEKLGVEDRLDQLGAEGYHEQHDAGSHHVQNSAEDHLEQLDFEDYHEQLGAEVHHEQLDFEDHHEQLGAEVHHEQHSAIDHHEKLGAVDHHKQLGAEYHHEQHCAGGHYEQFSAEVHHEQLGAESYYEPLGAGNIMICSVMKIIMNITVLKIIVNSMRRMTELLTAAVRHFIRYRRRSCSRRAFRFSRCFISIS

SEQ ID NO: 3909 - protein, 2037 aa, Enchytraeus crypticus
MSRQKWSLSQTAGKESGICRVCLALRQVHLRDGLIHRHGPRKSPCPGSGQPPLDKNLSLNTRNATSTSHQPIPNQSVTHTDGSCVHFEHVDGYFSDSSHPANCKPKNSSTSKNSAASINSIVTIVDSSRESNVNVCSISHNLAVQHPTLTDPIIKHIPRSARAPCARALTTVLNKISNNSEELTYWIELLNFAPATLTVPVKLGKKVSVVGIIRNRLSKVSNSENLETSNKAKSVSKRHIPKSSIPSLVQSKLEEGNIRAAVRILCSDEYLAENNEKTFKQLQDKHPIAVESPDNQVHNSSPAVQVQEDVVLKALHSFISGTAGGPDGLRPQHLKDLIKCKEAGAQLLTAITGFINCLIRGDCPIQVRPILFGGNLIAIKKKNDDVRPIAIGYTWRRLAAKCLNMYAMPLVSDYLSPIQLGVGVSGGCEAAVHATRQFATRMPSGSSLVKLDFANAFNSISRVKMLRAVHSFLPEIYDFCSSAYCQSTLLKYGERVILSSEGVQQGDPLGPLLFSLTLQPLLKDLISSFRISYLDDLTIGGLDAAVANDVRMVIDKGSELGLKINVNKCEIISSALSHDDPILNSFQKKNISDADLLGAPLVVGGAMDSKLEKLIANLRRAATRLRDISRHDALILIRHSLSAPKVMHTLRSSPCSQHPLLQTYDKILRECLCSLLNVDLTERQWLQAILPIRNGGLGIRSTSQLAPSAFLASYNSTRALQLEILGNVTSPIDPEFVKAKALWSSKFDVIAPIGEAACFQKNWDNPIVEESFALLLNSTSEPLEKARLLAVSAPNSSDWLHALPIASCGLRLEDEAVRIAVGLRLGTKLCEPHKCKCGSIVDARGYHGLSCRKSAGRTLRHHNLNDIVWHALNKAGCPAIKEPTGLSRSDGKRPDGLSLIPWAEGKSLLWDVTVIDSLAKSYLNLSSMSAGEVAELAADRKTAKYSELCTSYCFIPLAFETLGPMNVEGNKFISSLGKKLSSLTGEKRETCFLRQRLSICVQRFNTICVIGTFNSQGEYYGPRDAATTAGFNVQDSKALPLSLLTLKPGSSSSSQGSSVSPVDVPDSPSLLSSYEPILSPGVPYQSCFRPYSPPSSDEIMSSRSNILHESPSRISTSLPMNSQIFAHSPSLLLGEFENLGATGLPSYSGERPFLFSIETEQALINSEIFNTNSGLPFPGPKAPSGSSNPAPIHVTSESGSEGLQVVGACSRVIEGLKKAQNEQSRTEGLQVVGDSSRVMEGLRKAQDEESGSEGLQVVGDSSRVMEGLRKALNEEDAVSRKKLHLVVQSVDTEKSPIREIVLNLTPPGCRTSDFSRESSNGAAGVSTNIPKTESYQEDYPKNVFVKDSEICYVVQASVVVNSALTFVSNADLEVASPSRSFDHQFNQLILQESLSDKRKSGFAGSIPVNQSNSNCISLFFDNSSEVKVGRDTPISIFEQSPLFGTPTVLGASGLEIGMKPMLRESELSLIYPFKDNLTASQAAVTCIKSVLGESQGSNLTYLTPGSAVSVSDEKIKGSTKFCIEQSDKLLAFKRKVRVKQLTETHESVPNQYGAIEHLEQYSADVHHEHRCAVHVKQGEDLHEQIGAEDHHEQLDFEYHHEQHGAEVHHEQYSAVDHHEKLGVEDRLDQLGAEGYHEQHDAGSHHVQNSAEDHLEQLDFEDYHEQLGAEVHHEQLDFEDHHEQLGAEVHHEQHSAIDHHEKLGAVDHHKQLGAEYHHEQHCAGGHYEQFSAEVHHEQLGAESYYEPLGAGKHHDLQCDENHHEHHGAENHRQQYETHDRIVNRRRQTLHKIQKKKLQSSCLQIQPVLHFNLLKQQHLNQGFDRQRIVLTVSPPGSSGSLPPPHSSTHIPLQGAGPQLSSLATVRGDSAVRQSTWMFMGRVRQNPIGSPAGFTSPVHLRPVSATAQPPQDGFAQPTADLLSPFHVYRPSSLKFNALIQPLGRAQSAPTRSDQQQLGPPLLHQQQPGATGMKQERISQLIGGEQFSLISDLEMCEMGGESERTSTSPGGEESHLHQPSSTAYPTADQCVRGSSPGLSRH

SEQ ID NO: 3910 - protein, 2037 aa, Enchytraeus crypticus
MSRQKWSLSQTAGKESGICRVCLALRQVHLRDGLIHRHGPRKSPCPGSGQPPLDKNLSLNTRNATSTSHQPIPNQSVTHTDGSCVHFEHVDGYFSDSSHPANCKPKNSSTSKNSAASINSIVTIVDSSRESNVNVCSISHNLAVQHPTLTDPIIKHIPRSARAPCARALTTVLNKISNNSEELTYWIELLNFAPATLTVPVKLGKKVSVVGIIRNRLSKVSNSENLETSNKAKSVSKRHIPKSSIPSLVQSKLEEGNIRAAVRILCSDEYLAENNEKTFKQLQDKHPIAVESPDNQVHNSSPAVQVQEDVVLKALHSFISGTAGGPDGLRPQHLKDLIKCKEAGAQLLTAITGFINCLIRGDCPIQVRPILFGGNLIAIKKKNDDVRPIAIGYTWRRLAAKCLNMYAMPLVSDYLSPIQLGVGVSGGCEAAVHATRQFATRMPSGSSLVKLDFANAFNSISRVKMLRAVHSFLPEIYDFCSSAYCQSTLLKYGERVILSSEGVQQGDPLGPLLFSLTLQPLLKDLISSFRISYLDDLTIGGLDAAVANDVRMVIDKGSELGLKINVNKCEIISSALSHDDPILNSFQKKNISDADLLGAPLVVGGAMDSKLEKLIADLRRAATRLRDISRHDALILIRHSLSAPKVMHTLRSSPCSQHPLLQTYDKILRECLCSLLNVDLTERQWLQAILPIRNGGLGIRSTSQLAPSAFLASYNSTRALQLEILGNVTSPIDPEFVKAKALWSSKFDVIAPIGEAACFQKNWDNPIVEESFALLLNSTSEPLEKARLLAVSAPNSSDWLHALPIASCGLRLEDEAVRIAVGLRLGTKLCEPHKCKCGSIVDARGYHGLSCRKSAGRTLRHHNLNDIVWHALNKAGCPAIKEPTGLSRSDGKRPDGLSLIPWAEGKSLLWDVTVIDSLAKSYLNLSSMSAGEVAELAADRKTAKYSELCTSYCFIPLAFETLGPMNVEGNKFISSLGKKLSSLTGEKRETCFLRQRLSICVQRFNTICVIGTFNSQGEYYGPRDAATTAGFNVQDSKALPLSLLTMKPGSSSSSQGSSVSPVDVPDSPSLLSSYEPILSPGVPYQSCFRPYSPPSSDEIMSSRSNILHESPSRISTSLPMNSQIFAHSPSLLLGEFENLGATGLPSYSGERPFLFSIETEQALINSEIFNTNSGLPFPGPKAPSGSSNPAPIHVTSESGSEGLQVVGDCSRVIEGLKKAQNEQSRTEGLQVVGDSSRVMEGLRKAQDEESGSEGLQVVGDSSRVMEGLRKALNEEDAVSRKKLHLVVQSVDTEKSPIREIVLNLTPPGCRTSDFSRESSNGAAGVSTNIPKTESYQEDYPKNVFVKDSEICYVVQASVVVNSALTFVSNADLEVDSPSRSFDHQFNQLILQESLSDKRKSGFAGSIPVNQSNSNCISLFFDNSSEVKVGRDTPISIFEQSPLFGTPTVLGASGLEIGMKPMLRESELSLIYPFKDNLTASQAAVTCIKSVLGESQGSNLTYLTPGSAVSVSDEKIKGSTKFCIEQSDKLLAFKRKVRVKQLTETHESVPNQYGAIEHLEQYSADVHHEHRCAVHVQQGEDLHEQIGAEDHHEQLDFEYHHEQHGAEVHHEQHSAVDHHEKLGVEDRLDQLGAEGYHEQHDAGSHHVQNSAEDHLEQLDFEDYHEQLGAEVHHEQLDFEDHHEQLGAEVHHEQHSAIDHHEKLGAVDHHKQLGAEYHHEQHCAGGHYEQFSAEVHHEQLGAESYYEPLGAGKHHDLQCDENHHEHHGAENHRQQYETHDRIVNRRRQTLHKIQKKKLQSSCLQIQPVLHFNLLKQQHLNQGFDRQRIVLTVSPPGSSGSLPPPHSSTHIPLQGAGPQLSSLATVRGDSAVRQSTWMFMGRVRQNPIGSPAGFTSPVLLRPVSATSQPPQVGFAQPTADLLSPFHVYRPSSLKFNALIQPLGRAQSAPTRSDLQQLGPPLLHQLQPGATGMKQERISQLIGGEQFSLLSDSEMCEMGGESERTSTSPGGEESHLHQPSSTAYPTADQCVRGSSPGLSRH

SEQ ID NO: 3911 - protein, 2052 aa, Enchytraeus crypticus
MLMSGMLRRNIMDYILTAGKESGICRVCLALRQVHLRDGLIHRHGPRKSPCPGSGQPPLDKNLSLNTRNATSTSHQPIPNQSVTHTDGSCVHFEHVDGYFSDSSHPANCKPKNSRTSKNSAASINSIVTIVDSSRESNVNVCSISHNLAVQHPTLTVPIIKHIPRSARAPCARALTTVLNKISNNSEELTYWIELLNFAPATLTVPVKLGKKVSVVGIIRNRLSKVSNSENLETSNKAKYVSKRHIPKSSIPSLVQSKLEEGNIRAAVRILCSDEYLAENNEKTFKQLQDKHPIAVESPDNQVHNSSPAVQVQEDVVLKALHSFISGTAGGPDGLRPQHLKDLIKCKEAGAQLLTAITGFINCLIRGDCPIQVRPILFGGNLIAIKKKNDDVRPIAIGYTWRRLAAKCLNMYAMPLVSDYLSPIQLGVGVSGGCEAAVHATRQFATRMPSGSSLVKLDFANAFNSISRVKMLRAVHSFLPEIYDFCSSAYCQSTLLKYGERVILSSEGVQQGDPLGPILFSLTLQPLLKDLISSFRISYLDDLTIGGLDAAVANDVRMVIDKGSELGLKINVNKCEIISSALSHDDPILNSFQKKNISDADLLGAPIVVGGAMDSKLEKLIADLRRAATRLRDISRHDALILIRHSLSAPKVMHTLRSSPCSQHPLLQTYDKILRECLCSLLNVDLTERQWLQAILPIRNGGLGIRSTSQLAPSAFLASYNSTRALQLEILGNVTSPIDPEFVKAKALWSSKFDVIAPIGEAACFQKNWDNPIVEESFAQLLNSTSEPLEKARLLAVSAPNSSDWLHALPIASCGLRLEDEAVRIAVGLRLGTKLCEPHKCMCGSIVDARGYHGLSCRKSAGRTLRHHNLNDIVWHALNKAGCPAIKEPTGLSRSDGKRPDGLSLIPWAEGKSLLWDVTVIDSLAKSYLNLSSMSAGEVAELAADRKTAKYSELCTSYCFIPLAFETLGPVNVEGNKFISSLGKKLSSLTGEKRETCFLRQRLSICVQRFNTICVIGTFNSQGEYYGPGDAATTAGFNVQDSKALPLSLLTMKPGSSSSSQGSSVSPVDVPDSPSLLSSYEPILSPGLLYQSCFRPYSPPSSDEIMSSSSNILHESPSRISTSLPMNSQIFAHSPSLLLGEFENLGATGLPSYSGERPFLFSIEAEQALINSEIFNTNSGLPFPGPKAPSGSSNPAPIHVTSESGSEGLQVVGDCSRVIEGLKKAQNEQSRTEGLQVVGDSSRVMEGLRKAQDEESGSEGLQVVEDSSRVMEGLRKALNEEDAVSRKKLHLVVQSVDTEKSPIREIVLNQTPPGCRTSDFSRESSNGAAGDSTNIPKTESYQEDYPKNVVVKDSEICYVVQASVVVNSALTFVSNADLEVDSPSRSSKHQFNQLILQESLSDKRKSGFAGSIPVNQSNSNCISLFIDNSSEVKVGRDTPISIFEQSPLFGTPTVLGASGLEIGMKPMLRESEVSLIYPFKDNLTASQAAVTCIKSVLGESQGSNLTYLTPGSAVSVSDEKIKGSTKFCIEQSDKLLAFKRKERVKQLTEAHESVPNQYGAIDHLEQYSADVHHEHRCAVHVQQGEDLHEQIGAEGYHEQHGAEDHHEQLDFEYHHEQHGAEVHHEQHSAVDHHEKLGVEDHLDQLGAEGYHEQHDAGSHHEQNSAEVHLEQLDFEDYHEQLGAEDLHEQLDFEDHHEQLGAEVHHEQHSAVDHHEKLGAVDHHKQLGAEYHHEQHCAGGHYEQFSAEVHHEQLGAESYYEPLGAGKHHDLQCDENHHEHHGAENHRQQYETLDRIVNRRRQTLHKIQKKKLQSSCLQIQPVLHFNLLKQQHLNQGFDRQRIVLNVSPPGSSGSLPPPHSSTHIPLQGAGPQLSSLATVRGDSAVRQSTWMFMGRVRQNPIGSPAGFTSPVHLRPVSATAQPPQDGFAQPTADLLSPFHVYRPSSLKFNALIQPLGRAQSAPTRSDQQQLGPPLLHQQQPGATGMKQERISQLIGGEQFSLISDLEMCEMGGESERTSTSPGGEESHLHQPSSTAYPTADQCVRGSSPGLSRH

SEQ ID NO: 3912 - protein, 1160 aa, Thyatira batis
MNWTNEHNEFIAKTYLIITELETNKTAYRQILHSKFTERFPQFSNVTEQRVADQKRMIFKNKYIQPNVLDRIRQEVVDELNTTHIAEAIISNDSIPTANIHTQIQENQESYETDTPQLHTTQHQNTAPIHSHSHPEIDQLFEQAIQYYQNTHPTERDFIPKQKTSKNLSKIVTYINDVILKKYVDIDSDFNTLQTVLYCAAWTTAKSNGSKLFIPSTYRTVNNSNRAFKPKWQVRLERKIENLRANIGRLTHYINGDRSQKIRDKVEKIFRQYKIHSTYEQTNTQVTHFLDTLKQKLSVAVNRLTRYTTCTKRKTENAQFSNNEKLFYRNLRSPSNAIANNSPSSESIVPEELHKFWANIWESPVVHNTEAEWIAEEYRSYSLTQQMEFDSVPIDTFHNIIKHLHNWKAPGSDQIHNYWYKKFTYIHPFLYNHINNFIQNPSTLPNYITAGLTYMIPKDLNDRKNPAKYRPITCLQTIYKIITSCLAQSIYQHVIDSNILNEEQKGCRKFSQGCKEQLTIDAVILNQVLKQKRDLFSMYIDYKKAYDSVPHSWLLKILDIYKVHPKIVSFLNNTLHNWTTQIKLNSIVDEPIRIQRGIFQGDALSPLWFCLALNPLSNLLNKSNVGYPLKYFNRTDGHEVTLNHLLYMDDIKLYATSEPELHRLADITENFSLDIKMEFGIDKCKVNTIKSGNHHHLNYEMLSGVLIESLDENSAYKYLGYNQIKQILHKETKASLIQQFKQRLNTILKSNLYSRNLIKAINSYAIPILTYSFGIIKWTKTELKNLQRSINTTMTKHRKHHPRSCVQRMTLPRKDGGRGIIDIINLHNSQITNLRTYFYSKTESSNLHNAIVQNDIKYTPLNLHDTCTQQNENIVSRRNKIEEWTQKSLHGRHRKDLCQPNVDIDASNAWLRRGDLFPETEGFMIAIQDQVIETRNYQRHIMKIHISTDTCRKCNSGSETIQHVTGACKAIVQTDYKHRHDQVANIIHQKIAHKYKLIITPPVPYYKYSPETVLENTTHRLYFDRAILTDRTVHYNRPDITLVDKANKTAFLIDIAVPNTHNVQNTISQKLTKYTELKDEIIRMWHLQKVTIVPIVLSTTGVIPKQLHQSLKTLDLPPFIFYLLQKAVILNSCRIVRKFMQTPEDMPPISTTDSRDHDLA

SEQ ID NO: 3913 - protein, 1252 aa, Thyatira batis
MEKMNKRRYNLRSLPGGRRGASGADAGCSSIRTIGDAELSRRVPVEQTTTADDEELSRRTLRENATADDLSTTSPSLVTNVTSGSSYRTLASPSTSSTASNHLLVDVAQEAHPAEYPVPTTNKPKRRRWSQEQNKFILRTYLQLTSLDRDTKDYLTPLYSKFKEKFPEIDTTRQRLGDQRRAIIRNRLLPQQIINNIYQDVDTQIQSFNINIDNYNQQINSQLNSATTAHNSPFPRSNTRMNWTNEHNEFIAKTYLIITELETNKTAYRQILHSKFTERFPQFSNVTEQRVADQKRMIFKNKYIQPNVLDRIRQEVVDELNTTHIAEAIISNDSIPTANIHTQIQENQESYETDTPQLHTTQHQNTAPIHSHSHPEIDQLFEQAIQYYQNTHPTERDFIPKQKTSKNLSKIVTYINDVILKKYVDIDSDFNTLQTVLYCAAWTTAKSNGSKLFIPSTYRTLNNNNRAFKPKWQVRLERKIENLRANIGRLTHYINGDRSQKIRDKVEKIFRQYKIHSTYEQTNTQVTHFLDTLKQKLSVAVNRLTRYTTCTKRKTENAQFSNNEKLFYRNLRSPSNAIANNSPSSESIVPEELHKFWANIWESPVVHNTEAEWIAEEYRSYSLTQQMEFDSVPIDTFHNIIKHLHNWKAPGSDQIHNYWYKKFTYIHPFLYNHINNFIQNPSTLPNYITAGLTYMIPKDLNDRKNPAKYRPITCLQTIYKIITSCLAQSIYQHVIDSNILNEEQKGCRKFSQGCKEQLTIDAVILNQVLKQKRDLFSMYIDYKKAYDSVPHSWLLKILDIYKVHPKIVSFLNNTLHNWTTQIKLNSIVDEPIRIQRGIFQGDALSPLWFCLALNPLSNLLNKSNVGYPLKYFNRTDGHEVTLNHLLYMDDIKLYATSEPELHRLADITENFSLDIKMEFGIDKCKVNTIKSGNHHHLNYEMLSGVLIESLDENSAYKYLGYNQIKQILHKETKASLIQQFKQRLNTILKSNLYSRNLIKAINSYAIPILTYSFGIIKWTKTELKNLQRSINTTMTKHRKHHPRSCVQRMTLPRKDGGRGIIDIINLHNSQITNLRTYFYSKTESSNLHNAIVQNDIKYTPLNLHDTCTQQNENIVSRRNKIEEWTQKSLHGRHRKDLCQPNVDIDASNAWLRRGDLFPETEGFMIAIQDQVIETRNYQRHIMKIHISTDTCRKCNSGSETIQHVTGACKAIVQTDYKHRHDQVANIIHQKIAHKYKLIITPPVPYYKYSPFI

SEQ ID NO: 3914 - protein, 1400 aa, Thyatira batis
MEKMNKRRYNLRSLPGGRRGASGADAGCSSIRTIGDAELSRRVPVEQTTTADDEELSRRTLRENATADDLSTTSPSLVTNVTSGSSYRTLASPSTSSTASNHLLVDVAQEAHPAEYPVPTTNKPKRRRWSQEQNEFILRTYLQLTSLDRDTKDYLTPLYSKFKEKFPEIDTTRQRLGDQRRAIIRNRLLPQQIINNIYQDVDTQIQSFNINIDNYNQQINSQLNSATTAHNSPFPRSNTRMNWTNEHNEFIAKTYLIITELETNKTAYRQILHSKFTERFPQFSNVTEQRVADQKRMIFKNKYIQPNVLDRIRQEVVDELNTTHIAEAIISNDSIPTANIHTQIQENQESYETDTPQLHTTQHQNTAPIHSHSHPEIDQLFEQAIQYYQNTHPTERDFIPKQKTSKNLSKIVTYINDVILKKYVDIDSDFNTLQTVLYCAAWTTAKSNGSKLFIPSTYRTLNNNNRAFKPKWQVRLERKIESLRANIGRLTHYINGDRSQKIRDKVEKIFRQYKIHSTYEQTNTQVTHFLDTLKQKLSVAVNRLTRYTTCTKRKTENAQFSNNEKLFYRNLRSPSNAIANNSPSSESIVPEELHKFWANIWESPVVHNTEAEWIAEEYRSYSLTQQMEFDSVPIDTFHNIIKHLHNWKAPGSDQIHNYWYKKFTYTHPFLYNHINNFIQNPSTLPNYITAGLTYMIPKDLNDRKNPAKYRPITCLQTIYKIITSCLAQSIYQHVIDSNILNEEQKGCRKFSQGCKEQLTIDAVILNQVLKQKRDLFSMYIDYKKAYDSVPHSWLLKILDIYKVHPKIVSFLNNTLHNWTTQIKLNSIVDEPIRIQRGIFQGDALSPLWFCLALNPLSNLLNKSNVGYPLKYFNRTDGHEVTLNHLLYMDDIKLYATSEPELHRLADITENFSLDIKMEFGIDKCKVNTIKSGNHHHLNYEMLSGVLIESLDENSAYKYLGYNQIKQILHKETKASLIQQFKQRLNTILKSNLYSRNLIKAINSYAIPILTYSFGIIKWTKTELKNLQRSINTTMTKHRKHHPRSCVQRMTLPRKDGGRGIIDIINLHNSQITNLRTYFYSKTESSNLHNAIVQNDIKYTPLNLHDTCTQQNENIVSRRNKIEEWTQKSLHGRHRKDLCQPNVDIDASNAWLRRGDLFPETEGFMIAIQDQVIETRNYQRHIMKIHISTDTCRKCNSGSETIQHVTGACKAIVQTDYKHRHDQVANIIHQKIAHKYKLIITPPVPYYKYSPETVLENTTHRLYFDRAILTDRTVHYNRPDITLVDKVNKTAFLIDIAVPNTHNVQNTISQKLTKYTELKDEIIRMWHLQKVTIVPIVLSTTGVIPKQLHQSLKTLDLPPFIFYLLQKAVILNSCRIVRKFMQTPENMPPTSTTDSRDHDLA

SEQ ID NO: 3915 - protein, 1400 aa, Thyatira batis
MEKMNKRRYNLRSLPGGRRGASGADAGCSSIRTIGDAELSRRVPVEQTTTADDEELSRRTLRGNATADDLSTTTPSLVTNITSGSSYRTLASPSTSSTASNHLLVDVAQEAHPAEYPVPTTNKPKRRRWSQEQNEFILRTYLQLTSLDRDTKDYLTPLYSKFKEKFPEIDTTRQRLGDQRRAIIRNRLLPQQIINNIYQDVDTQIQSFNINIDNYNQQINSQLNSATTVHNSPFPRSNTRMNWTNEHNEFIAKTYLIITELETNKTAYRQILHSKFTERFPQFSNVTEQRVADQKRMIFKNKYIQPNVLDRIRQEVVDELNTTHIAEAIISNDSIPTANIHTQIQENQESYETDTPQLHTTQHQNTAPIHSHSHPEIDQLFEQAIQYYQNTHPTERDFIPKQKTSKNLSKIVTYINDVILKKYVDIDSDFNTLQTVLYCAAWTTAKSNGSKLFIPSTYRTFNNNNRAFKPKWQVRLERKIENLRANIGRLTHYINGDRSQKIRDKVEKIFRQYKIHSTYEQTNTQVTHFLDTLKQKLSVAVNRLTRYTTCTKRKTENAQFSNNEKLFYRNLRSPSNAIANNSPSSESIVPEELHKFWANIWESPVVHNTEAEWIAEEYRSYSLKQQMEFDSVPIDTFHNIIKHLHNWKAPGSDQIHNYWYKKFTYIHPFLYNHINNFIQNPSTLPNYITAGLTYMIPKDLNDRKNPAKYRPITCLQTIYKIITSCLAQSIYQHVIDSNILNEEQKGCRKFSQGCKEQLTIDAVILNQVLKQKRDLFSMYIDYKKAYDSVPHSWLLKILDIYKVHPKIVSFLNNTLHNWTTQIKLNSIVDEPIRIQRGIFQGDALSPLWFCLALNPLSNLLNKSNVGYPLKYFNRTDGHEVTLNHLLYMDDIKLYATSEPELHRLADITENFSLDIKMEFGIDKCKVNTIKSGNHHHLNYEMLSGVLIESLDENSAYKYLGYNQIKQILHKETKASLIQQFKQRLNTILKSNLYSRNLIKAINSYAIPILTYSFGIIKWTKTELKNLQRSINTTMTKHRKHHPRSCVQRMTLPRKDGGRGIIDIINLHNSQITNLRTYFYSKTESSNLHNAIVQNDIKHTPLNLHDTCTQQNENIVSRRNKIEEWTQKSLHGRHRKDLCQPNVDIEASNAWLRRGDLFPETEGFMIAIQDQVIETRNYQRHIMKIHISTDTCRKCNSGSETIQHVTGACKAIVQTDYKHRHDQVANIIHQKIAHKYKLIITPPVPYYKYSPETVLENATHRLYFDRAILTDRTVHYNRPDITLVDKVNKTAFLIDIAVPNTHNVQNTISQKLTKYTELKDEIIRMWHLQKVTIVPIVLSTTGVIPKQLHQSLKTLDLPPFIFYLLQKAVILNSCRIVRKFMQTSENMPPISTTDSRDHDLA

SEQ ID NO: 3916 - protein, 1400 aa, Thyatira batis
MEKMNKRRYNLRSLPGGRRGASGADAGCSSIRTIGDAELSRRVPVEQTTTADDEELSRRTLRENATADDLSTTSPSLVTNVTSGSSYRTLASPSTSSTASNHLLVDVAQEAHPAEYPVPTTNKPKRRRWSQEQNEFILRTYLQLTSLDRDTKDYLTPLYSKFKEKFPEIDTTRQRLGDQRRAIIRNRLLPQQIINNIYQVVDTQIQSFNINIDNYNQQINSQLNSATTAHNSPFPRSNTRMNWTNEHNEFIAKTYLIITELETNKTAYRQILHSKFTERFPQFSNVTEQRVADQKRMIFKNKYIQPNVLDRIRQEVVDELNTTHIAEAIISNDSIPMANIHTQIQENQESYETDTPQLHTTQHQNTAPIHSHSHPEIDQLFEQAIQYYQNTHPTERDFIPKQKTSKNLSKIVTYINDVILKKYVDIDSDFNTLQTVLYCAAWTTAKSNGSKLFIPSTYRTLNNNNRAFKPKWQVRLERKIENLRANIGRLTHYINGDRSQKIRDKVEKIFRQYKIHSTYEQTNTQVTHFLDTLKQKLSVAVNRLTRYTTCTKRKTENAQFSNNEKLFYRNLRSPSNAIANNSPSSESIVPEELHKFWANIWESPVVHNTEAEWIAEEYRSYSLTQQMEFDSVPIDTFHNIIKHLHNWKAPGSDQIHNYWYKKFTYIHPFLYNHINNFIQNPSTLPNYITAGLTYMIPKDLNVRKNPAKYRPITCLQTIYKIITSCLAQSIYQHVIDSNILNEEQKGCRKFSQGCKEQLTIDAVILNQVLKQKRDLFSMYIDYKKAYDSVPHSWLLKILDIYKVHPKIVSFLNNTLHNWTTQIKLNSIVDEPIRIQRGIFQGDALSPLWFCLALNPLSNLLNKSNVGYPLKYFKRTDGHEVTLNHLLYMDDIKLYATSEPELHRLADITENFSLDIKMEFGIDKCKVNTIKSGNHHHLNYEMLSGVLIESLDENSAYKYLGYNQIKQILHKETKASLIQQFKQRLNTILKSNLYSRNLIKAINSYAIPILTYSFGIIKWTKTELKNLQRSINTTMTKHRKHHPRSCVQRMTLPRKDGGRGIIDIINLHNSQITNLRTYFYSKTESSNLHNAIVQNDIKYTPLNLHDTCTQQNENIVSRRNKIEEWTQKSLHGRHRKDLCQPNVDIDASNAWLRRGDLFPETEGFMIAIQDQVIETRNYQRHIMKIHTSTDTCRKCNSGSETIQHVTGACKAIVQTDYKHRHDQVANIIHQKIAHKYKLIITPPVPYYKYSPETVLENTTHRLYFDRAILTDRTVHYNRPDITLVDKVNKTAFLIDIAVPNTHNVQNTISQKLTKYTELKDEIIRMWHLQKVTIVPIVLSTTGVIPKQLHQSLKTLDLPPFIFYLLQKAVILNSCRIVRKFMQTPENMPPISTTDSRDHDLA

SEQ ID NO: 3917 - protein, 706 aa, Thyatira batis
MIPKDLNDRKNPAKYRPITCLQTIYKIITSCLAQSIYQHVIDSNILNEEQKGCRKFSQGCKEQLTIDAVILNQVLKQKRDLFSMYIDYKKAYDSVPHSWLLKILDIYKVHPKIVSFLNNTLHNWTTQIKLNSIVDEPIRIQRGIFQGDALSPLWFCLALNPLSNLLNKSNVGYPLKYFNRTDGHEVTLNHLLYMDDIKLYATSEPELHRLADITENFSLDIKMEFGIDKCKVNTIKSGNHHHLNYEMLSGVLIESLDENSAYKYLGYNQIKQILHKETKASLIQQFKQRLNTILKSNLYSRNLIKAINSYAIPILTYSFGIIKWTKTELKNLQRSINTTMTKHRKHHPRSCVQRMTLPRKDGGRGIIDIINLHNSQITNLRTYFYSKTESSNLHNAIVQNDIKYTPLNLHDTCTQQNENIVSRRNKIEEWTQKSLHGRHRKDLCQPNVDIDASNAWLRRGDLFPETEGFMIAIQDQVIETRNYQRHIMKIHISTDTCRKCNSGSETIQHVTGACKAIVQTDYKHRHDQVANIIHQKIAHKYKLIITPPVPYYKYSPETVLENTTHRLYFDRAILTDRTVHYNRPDITLVDKVNKTAFLIDIAVPNTHNVQNTISQKLTKYTELKDEIIRMWHLQKVTIVPIVLSTTGVIPKQLHQSLKTLDLPPFIFYLLQKAVILNSCRIVRKFMQTPENMPPTSTTDSRDHDLA

SEQ ID NO: 3918 - protein, 1400 aa, Thyatira batis
MEKMNKRRYNLRSLPGGRRGASGADAGCSSIRTIGDAELSRRVPVEQTTTADDEELSRRTLRENATADDLSTTSPSLVTNVTSGSSYRTLASPSTSSTASNHLLVDVAQEAHPAEYPVPTTNKPKRRRWSQEQNEFILRTYLQLTSLDRDTKDYLTPLYSKFKEKFPEIDTTRQRLGDQRRAIIRNRLLPQQIINNIYQDVDTQIQSFNINIDNYNQQINSQLNSATTVHNSPFPRSNTRMNWTNEHNEFIAKTYLIITELETNKTAYRQILHSKFTERFPQFSNVTEQRVADQKRMIFKNKYIQPNVLDRIRQEVVDELNTTHIAEAIISNDSIPTANIHTQIQENQESYETDTPQLHTTQHQNTAPIHSHSHPEIDQLFEQAIQYYQNTHPTERDFIPKQKTSKNLSKIVTYINDVILKKYVDIDSDFNTLQTVLYCAAWTTAKSNGSKLFIPSTYRTLNNNNRAFKPKWQVRLERKIENLRANIGRLTHYINGDRSQKIRGKVEKIFRQYKVHSTYEQTNTQVTHFLDTLKQKLSVAVNRLTRYTTCTKRKTENAQFSNNEKLFYRNLRSPSNAIANNSPSSESIVPEELHKFWANIWESSVVHNTEAEWIAEEYRSYSLTQQMEFDSVPIDTFHNIIKHLHNWKAPGSDQIHNYWYKKFTYIHPFLYNHINNFIQNPSTLPNYITAGLTYMIPKDLNDRKNPAKYRPITCLQTIYKIITSCLAQSIYQHVIDSNILNEEQKGCRKFSQGCKEQLTIDAVILNQVLKQKRDLFSMYIDYKKAYDSVPHSWLLKILDIYKVHPKIVSFLNNTLHNWTTQIKLNSIVDEPIRIQRGIFQGDALSPLWFCLALNPLSNLLNKSNVGYPLKYFNRTDGHEVTLNHLLYMDDIKLYATSEPELHRLADITENFSLDIKMEFGIDKCKVNTIKSGNHHHLNYEMLSGVLIESLDENSAYKYLGYNQIKQILHKETKASLIQQFKQRLNTILKSNLYSRNLIKAINSYAIPILTYSFGIIKWTKTELKNLQRSINTTMTKHRKHHPRSCVQRMTLPRKDGGRGIIDIINLHNSQITNLRTYFYSKTESSNLHNAIVQNDIKYTPLNLHDTCTQQNENIVSRRNKIEEWTQKSLHGRHRKDLCQPNVDIDASNAWLRRGDLFPETEGFMIAIQDQVIETRNYQRHIMKIHISTDTCRKCNSGSETIQHVTGACKAIVQTDYKHRHDQVANIIHQKIAHKYKLIITPPVPYYKYSPETVLENTTHRLYFDRAILTDRTVHYNRPDITLVDKVNKTAFLIDIAVPNTHNVQNTISQKLTKYTELKDEILRMWHLQKVTIVPIVLSTTGVIPKQLHQSLKTLDLPPFIFYLLQKAVILNSCRIVRKFMQTPENMPPISTTDSRDHDLA

SEQ ID NO: 3919 - protein, 1175 aa, Habrosyne pyritoides
MNEYNIPLSHSNTRMNWSNEHNEFIARTYLLTTELETNKTAYRKILHIKFTEKFPNFSKVTEQRVADQRRIIFKNGYIETHVLDRIRQEVIAELNAKHQTQDSINNDTMTNQRLQIETPECQEVISTALIDTTQRDLLQEQNAPHQSDSDKRPEIDQLFVQALQYHQNTNPTERDYIPKQKSSTKLSQIVTYINDVVLREHVNIDSDFNTLQTIIYCAAWTAAKQNGAKLFIPPRNRILNNINILKPKWQIRLERKIETLRANIGRLSHYINGDRGKKLCKKVEAIFRQYRVHSTHEQYNSQMPHFLDTLKQKLSVAVNRLNRYTMCTKRKTENAQFTNSEKSFYRNLRKSNNVITDNSSIEETPSPEQLRQFWANIWESPVDHNSEAEWIAEEDNNNRLTQQMEYNTIPIDTFHNVIKQLHNWKAPGSDQIHNYWYKKFTYIQPFLYNHINNFIQNPTRLPNYITSGITYMIPKDLSDRKNPAKYRPITCLQTIYKIITSCLAKSIYKHVIDNNMLNEEQKGCRKFSQGCKEQLTIDAVILSQVLKQKRDLFSMYIDYQKAYDSVPHSWLLKVLQIYKIHPTIISFLQNTVSSWTTQIKLNTNDKSLDIEPIKIQRGIFQGDALSPLWFCLAINPLSNQLNKSNIGYPLKYVNRTDDQEVRLNHLLYMDDIKLYASSEPELYRLAEITETFSLDIKMEFGIDKCKVNTIKSGHHHQLNYEMLTGETIESIDENSAYKYLGYNQLKQILQKETKASLTQQFKRRLDTILKSDLYSRNLIKAINSYAIPILTYSFGIIKWTKTELKKIQRLINTTMTKHRKHHPRSCVQRTTLPRTDGGRGIIDIVNLHNSQITTMRSYFYSKAEFSNLHRAITQNDIKYTPLNLHDTCTQQNEYIVTRQNKIDDWNQKSLHGRHRKDLCQPNVDLDASNAWLHRGDLFPETEGFMIAIQDQVIETRNYQKYIMKTQIETDNCRKCNSGSETIQHITGACKAIVQTDYKHRHDQVANIIHQNIAHKLKLISLPPIPYYKYTAETILENPTHKLYFDRAILTDRTVHFNRPDITVIDKVNKTAFLIDIGIPNTHNLQNTIAQKLTKYTELKDEITRMWRLQRVTIVPIILSTTGVIPKQLHHSLKTLDLPPFMYSLLQKAVILNTCRIVRKFLQTPENTPNLDHDLA

SEQ ID NO: 3920 - protein, 1401 aa, Habrosyne pyritoides
MENMNEKRYNLRSLPGGRRGASGADAGCHRMRTIGDAESNRRVPVEQSTTADDGELSRRALRENATADDNATALPSAVITSSGSSFRTPVSPTTSSTMSDYLLVDVAQEAHPAEFLVPPTNKPTRRRWSSEQNEFILRTYLQLTSLERDTKDYLTPLYSKFKEKFPQIDVTRQRLGDQRRAITRNNLLSIEKINTIYQEVNTEIQSLNTAINNHKLNDAKNTTMNEYNIPLSHSNSRMNWSKEHNEFIARTYLLTTELETNKTAYSKILHIKFTEKFPNFSKVTEQRVADQRRIIFKNGYIETHVLDRIRQEVIAELNAKHQTQDSINNDTMTNQRIQIETPECQEVISTALIDTTQRDLLQEQNALHQSDSDKRPEIDQLFVQALQYHQNTNPTERDHIPKQKSSTKLSQIVTYINDVVLREHVNIDSDFNTLQTIIYCAAWTAAKQNGAKLFIPPRNRILNNKLKPKWQIRLERKIETLRANIGRLSHYINGDRGKKLSKKVEAIFRQYRVHSTHEQYNSQMPHFLDTLKQKLSVAVNRLNRYTMCTKRKTENAQFTNSEKSFYRNLRKSNNVITDNSSIEETPSPEQLRQFWANIWESPVDHNSEAEWIAEEDNNNRLTQQMEYNKIPIDTFHNVIKQLHNWKAPGSDQIHNYWYKKFTYIQPFLYNHINNFIQNPTTLPYYITSGITYMIPKDLSDRKNPAKYRPITCLQTIYKIITSCLAKSIFKHVIDNNMLNEEQKGCRKFSQGCKEQLTIDAVILSQVLKQKRDLFSMYIDYKKAYDSVPHSWLLKILQIYKIHPTIISFLENTVSSWTTQIKLNTNDKSLHIEPIKIQRGIFQGDALSPLWFCLAINPLSNQLNKSNIGYPLKYVNRTDDQEVRLNHLLYMDDIKLYASSEPELYRLAEITETFSLDIKMEFGIDKCKVNTIKSGHHHQLNYEMLTGETVESIDENSAYKYLGYNQLKQILHKETKASLTQQFKRRLDTILKSDLYSRNLIKAINSYAIPILTYSFGIIKWTKTELKKLQRLINTTMTKHRKHHPRSCVQRTTLPRTDGGRGIIDIVNLHNSQITTMRSYFYSKADFSNLHRAITQNDIKYTPLNLHDTCTQQNEYIVTRQNKIDDWNQKSLHGRHRKDLCQPNVDLDASNAWLHRGDLFPETEGFMIAIQDQIIETRNYQKYIMKTQIETDNCRKCNSGSETIQHITGACKAIIQTDYKHRHDQVANIIHQNIAHKLKLISLPPIPYYKYTAETILENPTHKLYFDRAILTDRTVHFNRPDITVIDKVNKTAFLIDIGIPNTHNLQNTIAQKLTKYTELKDEITRMWRLQRVTIVPIILSTTGVIPKQLHHSLKTLDLPPFMYSLLQKAVILNTCRIVRKFLQTPENTPPISTPNLDHDLA

SEQ ID NO: 3921 - protein, 1319 aa, Trachurus trachurus
MNKPSNPPSNAVTNTFVNNSNSNDTITIDKENVNPDELAGSSISTFTLQKRRRPSPTNTTTFNPLRIRDASELTSTDDEDPFSSFPPPQQSKFAEQTDNDVIIVNLNSNSTPTVELHVTSQEVNDFVAEARDFCLSPTEETTITPTTTTLNIPNTPTPFQFTPTSNADPITIPQAEIEDGMNVPLSPTLNNENIVPNSTLTVNPTNSNSNPNSNSNSNSNEDRYARNRAERERLKNYASTSLQRILSINNHLPAAEIYDLFINEATEAAKSLNQYYVIPEGPIPRKDPPPRVDQLNSDEIKRLRGLYRTNQKRCFREITEPTPVWCEASAKEVKAHFTTTTVTTTVTTTATNSTNSNVTTTPTLNANPTLNANANPTLIPNPTLIPNLDDNSIITPNTQEEDQTTTNQRENTQVLDDIYNSGNSYSDFSINPEEISVALYRAKKDTSPGTDGIQMGFWKSLTNAEFILRPLFNKLLTTNTIPSSWRESRLVLIPKSKNPNPRSVGDYRPISITQTLYRLFMSVLNRKLRSMISLSPSQKGFLEGNGCVEHSFTLQEVLDDARRTRKSLQVAWIDLKSAFDSIPHQVLFNELQKQDLPLSIKNFVSNLYSDCYNISRDRSGAKESIPLNGRGVRQGCPLSPLLFNLVVDPFLKDVDESTLGFQLRGEKVGALAYADDIVLISRQKDQMMQLIAKLEAFITSTNLQINPSKCSTLSVCYRRNRRLVNPPEDPPLRVCGHDLPRLTDYYKYLGTTANLQSFKQLPPAFAKFEEKLKLLSSSPLFPFMKLELLRVYLFPLLEYTMKTSCLRIEDLKKMDSLIVANVRKWLQLLPSSTKAFLYVPIPLGGLGLRYLHKDYANLRLAAGLDILNSRDERIQNIAVNAMKEIVRHRTEDHSTPIVTYLNQEFESTHTRDIRSLLSSIRLNRKALGVKLVDNPENPVIVDLDRQSIHDPSYLHPNKTVSATRTRRLRWHCSEVWRHMWSSQRDQGRSVDCLSGLTSSNNWIRKCDMRISTYEFAVKGRINVLPVKYVLMKIKRSPDMKCRRCPCDSESLGHVLNGCSFGNGGIVGRHDAIVQLVGDSLKCRAPWTMRLGRQVPIISSPRKPDIVLINEEAREVRIIEVAVCYEQCADRMSEIRGRKLSKYEREKTELEQLGYKCDLFALVYGSLGSHHSRNTEVYPQLKLSNKNRTRLTNKITYTLLEHSHNIYKRHVNRSRPPGFSRPSNISNPPSTFFQHTLRPRTDPTSVTTTTTTSITNTTTTTIPDQDPPPTTNPDQDHDPPPLPTTTEEPPTEVPPIPAQPETSPTTLGHPTGEEAPLNEE

SEQ ID NO: 3922 - protein, 1149 aa, Macrobrachium nipponense
MSRVNSCNYELELLAIHLFEVPLEIQKVIFLMELTDCEEDPTCPVSPLGEAVGRTTLVGETRRERQPENASSSAPNQSEAVAGSHEGDMTTVAPEPQMYACPMCQRTFTTYNGRRLHERRAHPVEFHSQNVIRLDNKKNKPWVVEDLRRMANYELENDHEPFINQKINQHLFPSRSVNSITGKRKSKEYKLILEKMREEKNLYFEETQCYVYPKPGRAEWSEEEMVCLARAESLLKNDPHINKRIQNEFFSYRTLDSLRSRRRSKEYLRILGKYNEIKARMINSDGAGLSKAEIHLQRCDDPHPPTIPEDGMNDYLSMMTGSGNGGSPPSSPDPNSSSSGTSVNSESEITSEMLDNIRIEVFGQREQQVPPRYSGENQRSLSRRIRRRREFAVTQRGWKKNRGRTAQNAILGRDPLARPSLPQGTTEFWCSLFSRESLPPEEDNDEQRMDGISIMEPIEMEEIEWMKRRMKLSSAPGPDGVKPSDIRAADNRKIKDFYDLVLNSKISTAEWAKGRTTLLPKTDSPEDPGDFRPITITSGVTRGLHKILAKRLSERLPTSQRQKGFKPEEGVSANILILKELMKRAKEDHTSLYIAFIDFKKAFDSISHPALLRALEKAGLNDESVSYLRNFYQEINTNINGVAVKIKRGVMQGDPMSPLLFNIALDQVLKKIPEGVGATLQGERIKYLAFADDIVVVATTRDGLTTAIGTLLDEAAKLGLEPGIGKCATTGIKADPGRRTWYHDDRGFVYKETALPKLSATNFYKYLGVQVGVMKTPNGPQAIRRIQVELGNLQKAMLKPQQKLWALKNVLIPRYHHVLHQDEIKLYQLKKLDLETRYFVRKALHLPKDTPLGVFYAKTADGGLGIESMTDSTPVAKRNLLKRLEKSEDRVVSMIAKKHLEGYPPLALTNWKNKLYASMDGTGLKEASHSIKPKWIDAGNRLMRGGTFVNAIKLRMGILTTPARSARGRDTSSRCDLGCNSPGTLHHILQVCPAVQPWRIRRHDGIVKYIKTKAEEEGYRTRLEPRMTTREGLRKPDLLVWKETGSMIIDAQVVADANVNSIDVFHQNKVSKYNTPDIKEKTREITETVPSIEAVTGNWRGVLSRESIRVCQSLGMRAPDIELLSIKIIEGGLSIYANYMGMSGGGDIT

SEQ ID NO: 3923 - protein, 1002 aa, Sinella curviseta
MMDGSQDLCPCGRSDSPSELWILCDSCKKWFHSLCAGLTDEQVRTLGQDNSTWNCFNCEDETQGTSQTTSTSKIPCPFCDQCFNNERGKKIHVGKKHKDLLHTISFQTIPGTPSIEEAGRQLANNKKKIKVLKRIPKGARYAAANKLSKTLDACVQNNDVPSWISLFMFAFSCLCVPQKSKKSLATLVKANIHGQNPNYSATQNKLTSISKRVDSKVAEGDITGAVKILSSLETLAPLTWDTYTKLLSKHPVPSEPIDFIPPSSLDPLTIGEKDIRQAILSFPNGSSAGIDGLRAQHLKDMISPGNGEASARVIASLVKFCNFVLSGKVNAEVLPLFFGANLCALIKKDGGIRPIAVGMTLRRLISKLASFSVREPMGEYLRPKQLGFATKGGCEAAVHATRTFINQNPMSRKVVLIIDYANAFNSINRSNMLSEVLDLAPKIFPFLWQAYAFNSHLFFGDWIIPSSSGCQQGDPAGPLLFCLAIHPIISSLISELVCFYLDDGLIAGEPEKVLKDFSSIIEKCKNIGLTINSSKCEIYSCGNVEDSMLQAFDELSPGIKVKSSLSLLGAPVTEDEVESAFKMKFEEISTLFSRIKQLKSFHTAYFLLRHCFAVPKLTYLLRTTATWKHKDILTSFDNKIKETLEYIINSELRCNQYFKSSLPVCFGGLGIRKCIDLSIPAFMSSVYSVSKLVNLMLTQDESVKPKITCADECMNEWNIITDNFGAPPAPAYQKSWDYTYIRHVTENNQPHSEEEKAIFLALRKPESNAWLNALPSRSIGTLLENNVFRISVALRLGCKICEKHTCICGEEVDVNGHHGLHCAKSLGRYSRHQELNNIICRSLTSARIPCRLEPTGLARDDGKRVDGMTLIPWEKGQSLVWDATCSDTLAPTYISHSAKEAGYCAKMAASAKVKKYSTVLDQNLSFLPFAVETIGPWCDEAIEFVNKLGGLLALHSGEPRSRLYLTQRIGIAIQRGNAISVMGTFPPSDNLNELFYILNPRN

SEQ ID NO: 3924 - protein, 956 aa, Tuta absoluta
MSNPSQRTSVCPHCPAPASKLFTPHGLLVHIGRMHKGVQRTGVNSRSVTEQSSSGASAVLSGIQPQVTYPHNFDNLAALRSQIRILKHIPKGARCVVAGRLCELIDNCLRNNALEDWYALLTFAFTGLMIPDTGGTTSLTTLVKNNVVSPSPVPRINSSSHARSATSIVKSIEAKVHGGDLRGAARLLLSEDSFAGASPDTLASLQTKHPIPSRPLSLPPAPEGQTSPAVVKCEDVATALGSFFNSSAAGLDGIRPSHLKELTDSSAGDNGPRLLERLTKLCNFLLSGQVNPAVCPYLYGATLCALQKKDGGIRPIAIGSVFRRLTAKVACRSVRTEMASYLGPHQLGFGTELGCEAAIHAVRAFAMNPDNADCIVVKFDIKNAFNSIERDVLLKEVADKIPSLYPFLYQVYCSPSNLFYNQSPILSQVGVQQGDPLGPLVFSLGIQKVIEELRSPLNVWYLDDGTIGGKPEDLERDLEVLLPRLKEMGLEVNTTKCEFFACGPESSQVFPQLERLVPGLKELDINSFSLLGSPIFSSSIPEAILSRQRLLEIAQGRLLNLSAHVALTLLRVCFAVPKLMYLLRTSPTWLYPGSLSAFDGVLRDCLEATLNVSLSDSQWVQASLPIRHGGLGVRRAEDVSLLAFLASVHGVAKLVTTILPDGDRVSIPHGSDALNAWLGLYPAAAVPVGPHCQRSWDEIGCKASASQLLVDAVGSDVARLKAVSRSESGAWLHALPSPNLGTHLDNDTLRVAVALCLGCNVCEPHRCICGTMVEANGHHGLSCCRCAGRFPRHHALNDIVRRALVSANVPCVLEPPGLSLTDGKRPDGLTLVPWHKGRCLLWDATCVSTFAACHLGQTIQAAGAAAESAATKKRAKYADLAQRYQFVPLAVETAGSWCVEAKDFVRQIGRRLKERGHDPRSGSFLVQRLAIAIQRGNASSVMGTFGPATSWSGIFS

SEQ ID NO: 3925 - protein, 956 aa, Tuta absoluta
MSNPSQRTSVCPHCPAPASKLFTPHGLLVHIGRMHKGVQRTGVNSRSVTEQSSSGASAVLSGIQPQVTYPHNFDNLAALRSQIRILKHIPKGARCVVAGRLCELIDNCLRNNALEDWYALLTFAFTGLMIPDTGGTTSLTTLVKNNVVSPSPVPRINSSSHARSATSIVKSIEAKVHGGDLRGAARLLLSEDSFAGASPDTLASLQTKHPIPSRPLSLPPAPEGQTSPAVVKCEDVATALGSFFNSSAAGLDGIRPSHLKELTDSSAGDNGPRLLERLTKLCNFLLSGQVNPAVCPYLYGATLCALQKKDGGIRPIAIGSVFRRLTAKVACRSVRTEMASYLGPHQLGFGTELGCEAAIHAVRAFAMNPDNADCIVVKFDIKNAFNSIERDVLLKEVADKIPSLYPFLYQVYCSPSNLFYNQSPILSQVGVQQGDPLGPLVFSLGIQKVIEELRSPLNVWYLDDGTIGGKPEDLERDLEVLLPRLKEMGLEVNTTKCEFFACGPESSQVFPQLERLVPGLKELDINSFSLLGSPIFSSSIPEAILSRQRLLEIAQGRLLNLSAHVALTLLRVCFAVPKLMYLLRTSPTWLYPGSLSAFDGVLRDCLEATLNVSLSDSQWVQASLPIRHGGLGVRRAEDVSLPAFLALVHGVAKLVTTILPDGDRVSIPHGSDALNAWLALYPAAAVPVGPHCQRSWDEIGCKASASQLLVDAVGSDVARLKAVSRSESGAWLHALPSPNLGTHLDNDTLRVAVALRLGCNVCEPHRCICGTMVEANGHHGLSCCRCAGRFPRHHALNDIVRRALVSANVPCVLEPPGLSRTDGKRPDGLTLVPWHKGRCLLWDATCVSTFAACHLGQTIQAAGAAAESAATKKRAKYADLAQRYQFVPLAVETAGSWCVEAKDFVRQIGRRLKERGHDPRSGSFLVQRLAIAIQRGNASSVMGTFGPGTSWSGIFS

SEQ ID NO: 3926 - protein, 957 aa, Tuta absoluta
MTTPQSAVCPYCPANSPKLFTPHGLRVHIGRMHKDVPRGTAVAASVSSNSSAPQPCPDGQRQVDTPPVQILSSNFEDLANFRSNVRVLKHIPKGARCLAAGRLCDLISSAIRSNSLEDWYALLTFAYTSLKIPESSGSSSLTTLVKRNIVSPGSVAPDDFSTSRPLPSVVKSIEAKVHGGDLRGAARLLLSDDSFACAGPDTLNSLQSKHPAPSRPLSFPLAPERSTPALVAKEEAVALALGSFFNSSAAGLDGIRPSHLKELTDGSAGDNGPRLLEHLTKLVNFLLSGLVNSAVCPYLYGATLCALEKKDGGIRPIAIGSVFRRLTAKVGCRAVRPELVSYLSPHQLGFGTELGCEAAIHAVRAFAVEPANAECVILKFDIRNAFNSLERDVLLNEAFAKIPSLYPFLHQLYSSPSNLFYGQNPILSQVGVQQGDPLGPLVFSLGIQKVIEDLQSPLNVWYLDDGTIGGKPDVVERDLQVLLPRLKELGLEVNTAKCEFFPCGPHSRCVFPHFENLVPGLTELNTNSFSLLGSPIFSSSIPEAILARERLLLDAQERLSKLSAHIALFLLRVCFAVPKLMYLLRTAPTWMYPDSLSAFDDVLKNSIESILNVGMSEDQWAQASLPIRHGGLGVRRATEVSLPAFLASVHAVSSLVTTILPNGDRVSIPHGSDAIRAWTSRYQGESLPSDPHCQRAWDEVGCKATSSQLVSGAAGSDLARLRAVSRSESGAWLHALPSPNLGTHLDNDSLRVAVALRLGCNVCEPHRCICGSMVEANGHHGLSCCRCAGRFPRHHALNDIVRRALISANVPCVLEPPGLSRTDGKRPDGLTLVPWHKGRCLLWDATCVSTFAACHLGQTTQAAGAAAESAATKKKAKYADLAQGYEFVPLAVETAGSWCSEAKVFVGQIGRRMREKGMDPRSGSFLVQRLSIAIQRGNACSVMGTFGPGASWGGIFK

SEQ ID NO: 3927 - protein, 957 aa, Tuta absoluta
MTTPQSAVCPYCPANSPKLFTPHGLRVHIGRMHKDVPRGAAVAASVSSNSSAPQPCPDGLRQVDTPPVQILSSNFEDLANFRSNVRVLKHIPKGARCLAAGRLCDLISSAIRSNSLEDWYALLTFAYTSLKIPESSGSSSLTTLVKRNIVSPGSVAPDDFSTSRPLPSVVKSIEAKVHGGDLRGAARLLLSDDSFACAGPDTLNSLQSKHPAPSRPLSFPLAPERSTPALVAKEEAVALALGSFFNSSAAGLDGIRPSHLKELTDGSAGDNGPRLLEHLTKLVNFLLSGLVNSAVCPYLYGATLCALEKKDGGIRPIAIGSVFRRLTAKVGCRAVRPELVSYLSPHQLGFGTELGCEAAIHAVRAFAVEPANAECVILKFDIRNAFNSLERDVLLNEAFAKIPSLYPFLHQLYSSPSNLFYGQNPILSQVGVQQGDPLGPLVFSLGIQKVIEDLQSPLNVWYLDDGTIGGKPDVVERDLQVLLPRLKELGLEVNTAKCEFFPCGPDSRCVFPHFENLVPGLTELNTNSFSLLGSPIFSSSIPEAILARERLLLDAQERLSKLSAHIALTLLRVCFAVPKLMYLLRTAPTWMYPDSLSAFDDVLKNSIESILNVGMSEDQWAQASLPIRHGGLGVRRATEVSLPAFLASVHAVSSLVTTILPNGDRVSIPHGSDAIRAWTSRYQGESLPSDPHCQRAWDEVGCKATSSQLVSGAAGSDLARLRAVSRSESGAWLHALPSPNLGTHLDNDSLRVAVALRLGCKVCEPHRCICGSMVEANGHHGLSCCRCAGRFPRHHALNDIVRRALISANVPCVLEPPGLSRTDGKRPDGLTLVPWHKGRCLLWDATCVSTFAACHLGQTTQAAGAAAESAATKKKAKYADLAQGYEFVPLAVETAGSWCSEAKVFVGQIGRRMREKGMDPRSGSFLVQRLSIAIQRGNACSVMGTFGPGASWGGIFK

SEQ ID NO: 3928 - protein, 925 aa, Tuta absoluta
MHKDVPRGTAVAASVSSNSSAPQPCPDGLQQVDTPPVQILSSNFEDLANFRSNVRVLKHIPKGARCLAAGRLCDLISSAIRSNSLEDWYALLTFAYTSLKMPESSGSSSLTTLVKRNIVSPGSVAPDDFSTSRPLPSVVKSIEAKVHGGDLRGAARLLLSDDSFACAGPDTLNSLQSKHPAPSRPLSFPLAPERSTPALVAKEEAVALALGSFFNSSAAGLDGIRPSHLKELTDGSAGDNGPRLLEHLTKLVNFLLSGLVNSAVCPYLYGATLCALEKKDGGIRPIAIGSVFRRLTAKVGCRAVRPELVSYLSPHQLGFGTELGCEAAIHAVRAFAMEPANAECVILKFDIRNAFNSLERDVLLNEAFAKIPSLYPFLHQLYSSPSNLFYGQNPILSQVGVQQGDPLGPLVFSLGIQKVIEDLQSPLNVWYLDDGTIGGKPDVVERDLQVLLPRLKELGLEVNTAKCEFLPCGPDSRCVFPHFENLVPGLTELNTNSFSLLGSPIFSSSIPEAILARERLLLDAQERLSKLSAHIALTLLRVCFAVPKLMYLLRTAPTWMYPDSLSAIDDVLKNSIESILNVGMSEDQWAQASLPIRHGGLGVRRATEVSLPAFLASVHAVSSLVTTILPNGDRVSIPHGSDAIRAWTSRYQGESLPSDPHCQRAWDEVGCKATSSQLVSGAAGSDLARLRAVSRSESGAWLHALPSPNLGTHLDNDSLRVAVALRLGCNVCEPHRCICGSMVEANGHHGLSCCRCAGRFPRHHALNDIVRRALISANVPCVLEPPGLSRTDGKRPDGLTLVPWHKGRCLLWDATCVSTFAACHLGQTTQAAGAAAESAATKKKAKYADLAQGYEFVPLAVETAGSWCSEAKVFVRQIGRRMREKGMDPRSGSFLVQRLSIAIQRGNACSVMGTFGPGASWGGFF

SEQ ID NO: 3929 - protein, 949 aa, Tuta absoluta
MDGTANTKTPCPHCPGPADPNKDKLFTARGLKLHIRSKHKDVQATANSSTQQSTFLPSPAAGTSMGLDSLSSLKTNVRVLKHIPKGARYAAAGKLCAVIDNCILLNSEDAWFSLLSFPFFGLKIPERNDTRTLTSKVKDNVDRLCPFLPPPENTQPLSFFKRIEGKVHEGDLRGAVRLLVSDDSIAPTDDSTLSTLKDKHPCPSRQLLLPAEPDGTSPFLTVKSDDVASAIASFYNSSASGLDGLRPQHLKELTSSAAGDNGGRLLESLTRLCNFLLKGMVNPRVCPYVYGASLIALKKKDGGLRPIAIGNTIRRLTAKLCCRAVKDQMASFLQPHQLGFGTALGCEGAIHATRTFALDPSNSDKIVVKLDIKNAFNSVERDVILTEVKNKIPVLFPFMFQCYASPSNLFHSNSLIPSQVGAQQGDPLGPLIFSLAIHSAIVSLKSPLNIWYLDDGTIGGTADEVEDDIQNLFPKLKDMGLTVNFEKCEVFPCSAAAPAKCKRFETLIPGIKILNRDTFSLLGSPIHPDGIPMFLQSKKTTLCKAHDRLKGLSSHVALTLLRNCLSLPKLTYAIRTCPTWLFPQQVTELDDVLKNTLEDILNINLGEREWQQASLPIRHGGLGVRRVQDTGPSAFLASANGVLKLAALILSSQGGCLEIPFAKEALAAWTAACPNLFPPAKPHIQRAWDDLWAKSVINALTETATGADLARLKAVSCRETGAWLHALPSPHIGTLLDNNSVRTAVALRLGCKICEAHICRCGVQVDATGRHGLSCRLSAGRHSRHHAINDLIRRALSTANVPCVLEPPGLSRADGKRPDGLTLIPWARGRCLLWDATCACTFAASHLPKTTRTAGSAAEHLATLKLEKYSDLQLNYEFVPFAVETTGVWCTAAKAFIRDIQKRLRARGGCDPRSGSYLVQQISLAIQRGNAVSAMGTFGPGTVQTGLHL

SEQ ID NO: 3930 - protein, 885 aa, Tuta absoluta
MGLDSLSSLKTNVRVLKHIPKGARYAAAGKLCAVIDNCILLNSEDAWFSLLSFPFFGLKIPERNDTRTLTSKVKDNVDRLCPFLPPPKNTQPLSFFKRIEGKVHEGDLRGAVRLLVSDDSIAPTDDSTLSTLKDKHPCPSRQLLLPAEPDGTSPFLTVKSDDVASAIASFYNSSASGLDGLRPQHLKELTSSAAGDNGGRLLESLTRLCNFLLKGMVNPRVCPYVYGASLIALKKKDGGLRPIAIGNTIRRLTAKLCCRAVKDQMASFLQPHQLGFGTALGCEGAIHATRTFALDTSNSDKIVVKLDIKNAFNSVERDVIPTEVKNKIPILFPFMFQCYASPSNLFHSNSLIPSQVGAQQGDPLGPLIFSLAIHSAIVSLKSPLNIWYLDDGTIGGTADEVEDDIQNLFPKLKDMGLTVNFEKCEVFPCSAAAPAKCKRFETLIPGIKILNRDTFSLLGSPIHPDGIPMFLQSKKTTLCKAHDRLKGLSSHVALTLLRNCLSLPKLTYAIRTCPTWLFPQQVTELDDVLKNTLEDILNINLGEREWQQASLPIRHGGLGVRRVQDTGPSAFLASANGVLKLAALILSSQGGCLEIPFAREALAAWTAACPNLFPPAKPHIQRAWDDLWAKSVINALTETATGADLARLKAVSCRETGAWLHALPSPHIGTLLDNNSVRTAVALRLGCKICEPHICRCGVQVDATGRHGLSCRLSAGRHSRHHAINDLIRRALSTANVPCVLEPPGLSRADGKRPDGLTLIPWARGRCLLWDATCACTFAASHLPKTTRTAGSAAEHLATLKLEKYSDLQLNYEFVPFAVETTGVWCTAAKAFIRDIQKRLRARGGCDPRSGSYLVQQISLAIQRGNAVSSMGTFGPGTVQTGLHL

SEQ ID NO: 3931 - protein, 949 aa, Tuta absoluta
MDGTANTKTPCPHCPGPADPNKDKLFTARGLKLHIRSKHKDVQATANSSTQQSTFLPSPAAGTSMGLDSLSSLKTNVRVLKHIPKGARYAAAGKLCAVIDNCILLNSEDAWFSLLSFPFFGLKIPERNDTRTLTSKVKDNVDRLCPFLPPPENTQPLSFFKRIEGKVHEGDLRGAVRLLVSDDSIAPTDDSTLSTLKDKHPCPSRQLLLPAEPDGTSPFLTVKSDDVASAIASFYNSSASGLDGLRPQHLKELTSSAAGDNGGRLLESLTRLCNFLLKGMVNPRVCPYVYGASLIALKKKDGGLRPIAIGNTIRRLTAKLCCRAVKDQMASFLQPHQLGFGTALGCEGAIHATRTFALDTSNSDKIVVKLDIKNAFNSVERDVILTEVKNKIPILFPFMLQCYASPSNLFHSNSLIPSQVGAQQGDPLGPLIFSLAIHSAIVSLKSPLNIWYLDDGTIGGTADEVEDDIQNLFPKLKDMGLTVNFEKCEVFPCSAAAPAKCKRFETLIPGIKILNRDTFSLLGSPIHPDGIPMFLQSKKTILCKAHDRLKGLSSHVALTLLRNCLSLPKLTYAIRTCPTWLFPQQVTELDDVLKNTLEDILNINLGEREWQQASLPIRHGGLGVRRVQDTGPSAFLASANGVLKLAALILSSQGGCLEIPFAKEALAAWTAACPNLFPPAKPHIQRAWDDLWAKSVINALTETATGADLARLKAVSCRETGAWLHALPSPHIGTLLDNNSVRTAVALRLGCKICEPHICRCGVQVDATGRHGLSCRLSAGRHSRHHAINDLIRRALSTANVPCVLEPPGLSRADGKRPDGLTLIPWARGRCLLWDATCACTFAASHLPKTTRTAGSAAEHLATLKLEKYSDLQLNYEFVPFAVETTGVWCTAAKAFIRDIQKRLRARGGCDPRSGSYLVQQISLAIQRGNAVSAMGTFGPGTVQTGLHL

SEQ ID NO: 3932 - protein, 949 aa, Tuta absoluta
MDGTANTKTPCPHCPGPADPNKDKLFTARGLKLHIRSKHKDVQATANSSTQQSTFLPSPAAGTSMGLDSLSSLKTNVRVLKHIPKGARYAAAGKLCAVIDNCILLNSEDAWFSLLSFPFFGLKIPERNDTRTLTSKVKDNVDRLCPFLPPPENTQPLSFFKRIEGKVHEGDLRGAVRLLVSDDSIAPTDDSTLSTLKDKHPCPSRQLLLPAEPDGTSPFLTVKSDDVASAIASFYNSSASGLDGLRPQHLKELTSSAAGDNGGRLLESLTRLCNFLLKGMVNPRVCPYVYGASLIALKKKDGGLRPIAIGNTIRRLTAKLCCRAVKDQMASFLQPHQLGFGTALGCEGAIHATRTFALDTSNSDKIVVKLDIKNAFNSVERDVILTEVKNKIPVLFPFMFQCYASPSNLFHSNSLIPSQVGAQQGDPLGPLIFSLAIHSAIVSLKSPLNIWYLDDGTIGGTADEVEDDIQNLFPKLKDMGLTVNFEKCEVFPCSAAAPAKCKRFETLIPGIKILNRDTFSLLGSPIHPDGIPMFLQSKKTTLCKAHDRLKGLSSHVALTLLRNCLSLPKLTYAIRTCPTWLFPQQVTELDDVLKNTLEDILNINLGEREWQQASLPIRHGGLGVRRVQDTGPSAFLASANGVLKLAALILSSQGGCLEIPFAKEALAAWTAACPNLFPPAKPHIQRAWDDLWAKSVINALTETATGADLARLKAVSCRETGAWLHALPSPHIGTLLDNNSVRTAVALRLGCKICEPHICRCGVQVDATGRHGLSCRLSAGRHSRHHAINDLIRRALSTANVPCVLEPPGLSRADGKRPDGLTLIPWARGRCLLWDATCACTFAASHLPKTTRTAGSAAEHLATLKLEKYSDLQLNYEFVPFAVETTGVWCTAAKAFIRDIQKRLRARGGCDPRSGSYLVQQISLAIQRGNAVSAMGTFGPGTVQTGLHL

SEQ ID NO: 3933 - protein, 949 aa, Tuta absoluta
MDGTANTKTPCPHCPGPADPNKDKLFTARGLKLHIRSKHKDVQATANSSTQQSTFLSSPAAGTSMGLDSLSSLKTNVRVLKHIPKGARYAAAGKLCAVIDNCILLNSEDAWFSLLSFPFFGLKIPERNDTRTLTSKVKDNVDRLCPFLPPPENTQPLSFLKRIEGKVHEGDLRGAVRLLVSDDSIAPTDDSTLSTLKDKHPCPSRQLLLPAEPDGTSPFLTVKSDDVASAIASFYNSSASGLDGLRPQHLKELTSSAAGDNGGRLLESLTRLCNFLLKGMVNPRVCPYVYGASLIALKKKDGGLRPIAIGNTIRRLTAKLCCRAVKDQMASFLQPHQLGFGTALGCEGAIHATRTFALDTSNSDKIVVKLDIKNAFNSVERDVILTEVKNKIPILFPFMFQCYASPSNLFHSNSLIPSQVGAQQGDPLGPLIFSLAIHSAIVSLKSPLNIWYLDDGTIGGTADEVEDDIQNLFPKLKDMGLTVNFEKCEVFPCSAAAPAKCKRFETLIPGIKILNRDTFSLLGSPIHPDGIPMFLQSKKTTLCKAHDRLKGLSSHVALTLLRNCLSLPKLTYAIRTCPTWLFPQQVTELDDVLKNTLEDILNINLGEREWQQASLPIRHGGLGVRRVQDTGPSAFLASANGVLKLAALILSSQGGCLEIPFAKEALAAWTAACPNLFPPAKPHIQRAWDDLWAKSVINALTETATGADLARLKAVSCRETGAWLHALPSPHIGTLLDNNSVRTAVALRLGCKICEPHICRCGVQVDATGRHGLSCRLSAGRHSRHHAINDLIRRALSTANVPCVLEPPGLSRADGKRPDGLTLIPWARGRCLLWDATCACTFAASHLPKTTRTAGSAAEHLATLKLEKYSDLQLNYEFVPFAVETTGVWCTAAKAFIRDIQKRLRARGGCDPRSGSYLVQQISLAIQRGNAVSAMGTFGPGTVQTGLHL

SEQ ID NO: 3934 - protein, 967 aa, Tuta absoluta
MQTMKLNNNNTEAATAVPSTMDGTANTKTPCPHCPGPADPNKDKLFTARGLKLHIRSKHKDVQATANSSTQQSTFLPSPAAGTSMGLDSLSSLKTNVRVLKHIPKGARYAAAGKLCAVIDNCILLNSEDAWFSLLSFPFFGLKIPERNDTRTLTSKVKDNVDRLCPFLPPPENTQPLSFFKRIEGKVHEGDLRGAVRLLVSDDSIAPTDDSTLSTLKDKHPCPSRQLLLPAEPDGTSPFLTVKSDDVASAIASFYNSSASGLDGLRPQHLKELTSSAAGDNGGRLLESLTRLCNFLLKGMVNPRVCPYVYGASLIELKKKDGGLRPIAIGNTIRRLTAKLCCRAVKDQMASFLQPHQLGFGTALGCEGAIHATRTFALDTSNSDKIVVKLDIKNAFNSVERDVILTEVKNKIPILFPFMFQCYASPSNLFHSNSLIPSQVGAQQGDPLGPLIFSLAIHSAIVSLKSPLNIWYLDDGTIGGTADEVEDDIQNLFPKLKDMGLTVNFEKCEVFPCSAAAPAKCKRFETLIPGIKILNRDTFSLLGSPIHPDGIPMFLQSKKTTLCKAHDRLKGLSSHVALTLLRNCLSLPKLTYTIRTCPTWLFPQQVTELDDVLKNTLEDILNINLGEREWQQASLPIRHGGLGVRRVQDTGPSAFLASANGVLKLAALILSSQGGCLEIPFAKEALAAWTAACPNLFPPAKPHIQRAWDDLWAKSVINALTETATGADLARLKAVSCRETGAWLHALPSPHIGTLLDNNSVRTAVALRLGCKICEPHICRCGVQVDATGRHGLSCRLSAGRHSRHHAINDLIRRALSTANVPCVLEPPGLSRADGKRPDGLTLIPWARGRCLLWDATCACTFAASHLPKTTRTAGSAAEHLATLKLEKYSDLQLNYEFVPFAVETTGVWCTAAKAFIRDIQKRLRARGGCDPRSGLVQQISLAIQRGNAVSAMGTFGPGTVQTGLHL

SEQ ID NO: 3935 - protein, 949 aa, Tuta absoluta
MDGTANTKTPCPHCPGPADPNKDKLFTARGLKLHIRSKHKDVQATANSSTQQSTFLPSPAAGTSMGLDSLSSLKTNVRVLKHIPKGARYAAAGKLCAVIDNCILLNSEDAWFSLLSFPFFGLKIPERNDTRTLTSKVKDNVDRLCPFLPPPENTQPLSFFKRIEGKVHEGDLRGAVRLLVSDDSIAPTDDSTLSTLKDKHPCPSRQLLLPAEPDGTSPFLTVKSDNVASAIASFYNSSASGLDGLRPQHLKELTSSAAGDNGGCLLESLTRLCNFLLKGMVNPRVCPYVYGASLIALKKKDGGLRPIAIGNTIRRLTAKLCCRAVKDQMASFLQPHQLGFGTALGCEGAIHATRTFALDTSNSDKIVVKLDIKNAFNSVERDVILTEVKNKIPILFPFMFQCYASPSNLFHSNSLIPSQVGAQQGDPLGPLIFSLAIHSAIVSLKSPLNIWYLDDGTIGGTADEVEDDIQNLFPKLKDMGLTVNFEKCEVFPCSAAAPAKCKRFETLIPGIKILNRDTFSLLGSPIHPDGIPMFLQSKKTTLCKAHDRLKGLSSHVALTLLRNCLSLPKLTYAIRTCPTWLFPQQVTELDDVLKNTLEDILNINLGEREWQQASLPIRHGGLGVRRVQDTGPSAFLASANGVLKLAALILSSQGGCLEIPFAKEALAAWTAACPNLFPPAKPHIQRAWDDLWAKSVINALTETATGADLARLKAVSCRETGAWLHALPSPHIGTLLDNNSVRTAVALRLGCKICEPHICRCGVQVDATGRHGLSCRLSAGRHSRHHAINDLIRRALSTANVPCVLEPPGLSRADGKRPDGLTLIPWARGRCLLWDATCACTFAASHLPKTTRTAGSAAEHLATLKLEKYSDLQLNYEFVPFAVETTGVWCTAAKAFIRDIQKRRRARGGCDPRSGSYLVQQISLAIQRGNAVSAMGTFGPGTVQTGLHL

SEQ ID NO: 3936 - protein, 949 aa, Tuta absoluta
MDGTANTKTPCPHCPSPADPNKDKLFTARGLKLHIRSKHKDVQATANSSTQQSTFLPSPAAGTSMGLDSLSSLKTNVRVLKHIPKGARYAAAGKLCAVIDNCILLNSEDAWFSLLSFPFFGLKIPERNDTRTLTSKVKDNVDRLCPFLPPPENTQPLSLFKRIEGKVHEGDLRGAVRLLVSDDSIAPTDDSTLSTLKDKHPCPSRQLLLPAEPDGTSPFLTVESDDVASAIASFYNSSASGLDGLRPQHLKELTSSAAGDNGGRLLESLTRLCNFLLKGMVNPRVCPYVYGASLIALKKKDGGLRPIAIGNTIRRLTAKLCCRAVKDQMASFLQPHQLGFGTALGCEGAIHATRTFALDTSNSDKIVVKLDIKNAFNSVERDVILTEVKNKIPILFPFMFQCYASPSNLFHSNSLIPSQVGAQQGDPLGPLIFSLAIHSAIVSLKSPLNIWYLDDGTIGGTADEVEDDIQNLFPKLKDMGLTVNFEKCEVFPCSAAAPAKCKRFETLIPGIKILNRDTFSLLGSPIHPDGIPMFLQSKKTTLCKAHDRLKGLSSHVALTLLRNCLSLPKLTYAIRTCPTWLFPQQVTELDDVLKNTLEDILNINLGEREWQQASLPIRHGGLGVRRVQDTGPSAFLASANGVLKLAALILSSQGGCLEIPFAKEALAAWTAACPNLFPPAKPHIQRAWDDLWAKSVINALTETATGADLARLKAVSCRETGAWLHALPSPHIGTLLDNNSVRTAVALRLGCKICEPHICRCGLQVDATGRHGLSCRLSAGRHSRHHAINDLIRRALSTANVPCVLEPPGLSRADGKRPDGLTLIPWARGRCLLWDATCACTFAASHLPKTTRTAGSAAEHLATLKLEKYSDLQLNYEFVPFAVETTGVWCTAAKAFIRDIQKRLRARGGCDPRSGSYLVQQISLAIQRGNAVSAMGTFGPGTVQTGLHL

SEQ ID NO: 3937 - protein, 952 aa, Chilo suppressalis
MSAIIIPGSDDVQLIQCPKCIQPRFFKGNRGLKIHIGRSHKSSASVPAVSPPPSLNSGNQSLWQILGNLKNSLPVLKRIPVLHGLQVSLSQCIEHVLRVNTSESWVELLTFSFRILHINQNSTCTSLTQKIKENCRLNPSVYSLVIPPSRPPNSNKSVKLIESKISDGDLRGAANLLFSNDVVAVNCQETLSALEDKHPPPAQNLVLPSPPDSTQNAPLISKEADISAAIFSFKSGSASGLDGLSPQHLKDLISVSVGNAGRALLHDITLLVNLMLSGEVPEDIVEIFYGANLIALKKKDGGIRPIAVGSTFRRIASKICCNHILPTVTAKFQPVQLGFGVKGGCEAAVHALRTYLSLDAAEVVLKVDVKNAFNSVDRGALLSAIQQKTPSIYNYLWQCYSKSTKLLFKNNLLHSSVGCQQGDPLGPAIFSLAIQPIIESLNSKFNVWYLDDGTISGDISTVLSDFQLIIDKFKSIGLDLNYSKCELFIPESKFSPEHLQHIIKKFSTLAPNIKILDTNSLRLLGSPIFDDAIPIFINEQISKFQQSSEKTLKINPHMALYLIRFCAFAPKFIYFLRSTHFWLFPGQLSIIDNSLRETLSKILNCSFTDNAWKASLPVRFGGLGTRHISHITLPAFLSTAYGTAELFNKILCPSLGVVELTYLAEARSAWSRVCPGVDPPSSLSSQRQWDEPLCLRIQSDLLASSEGATERARLLAVFQAESGYWLQALPSANIGTLLDKSTLSLAISLRLGVKTNHPHRCRCGSRVGELGHHGLSCQMSAGRVSRHACINDVIRRALVAVNVPAVLEPNGIFRDGGKRPDGMTLIPWKQGRSLVWDATCVDTLAPCHTGSTSLAAGAAVASAKCSKRRKYSALIENYIFVPFGVETMGPWGPSARSLFKELSKRLTEVTGDQKAGSYLGQRISLAIQRGNAACLLGTISDGGAGGDMFFIL

SEQ ID NO: 3938 - protein, 950 aa, Chilo suppressalis
MSANSINGSDDVQLVQCTKCSQPRFFKGNRGLNIHIGRVHKSPASVPAVSLNSGNQPLWQILGNLKSSLPVLKRIPRSARLSVAISLSQCIEHVVRVNTSESWAELLTFSYRILHVNQNSICTSLTQKVKENCRLNPSVYSLVIPPSRPPNSNKSVKLIESKISDGDLRGAANLLFSNDVVAVNCQETLSALEDKHPPPAPNLLLPTPPDLTHAHFITKDKQILDSIFSFKSGSASGLDGLSPQHLKDLLCVSVGDAGRVLLHNITLLVNLMLSGEVPEDIADIFYGANLIALKKKDGGIRPIAVGSTFRRLASKICCQHILPTVSAEFQPVQLGFGVKGGCEAAVHALRTFLSLDAAEVVLKVDVKNAFNSVDRGALLSVIQQKIPSIYNYLWQCYSKPTKLIFKNSLLYSSVGCQQGDPLGPAIFSLAIQPIIDSLNSKFNVWYLDDGTIAGDISTVLSDFHVIIDKFKSIGLDLNFPKCELFIPESKFSPEQLKHIVTKFSALAPNIKILDNKSLRLLGSPIFDDAIPIFINEQISKFQHSSEKMLKINPHMALYLIRFCAFAPKFIYFLRSTHFWLFPGQLAIIDNSLRETLSKILNCSFSDNAWKQASLPVRFGGLGTRHISHIALPAFLSSAYGTAELFSKILCPSLGVVELAHLAEARNAWSRACPGVDPPTSLSSQRQWDEPLCLRFQSDLLASSENATERARLLAVFQAESGYWLQALPSASIGTLLDKSTLSLAISLRLGVKTNHPHRCRCGARVGELGHHGLSCQMSAGRVSRHACINDVIRRALVAVNVPAVLEPSGIFRDDGKRPDGMTLIPWKQGRPLVWDPTCADTLAPCHTESTSLAAGAAADSAECSKRRKYSALNENYIFVPFGVETMGPWGPSARSFFREISKRLTEVTGDQKAGSYLGQRISLAIQRGNAASLLGTIPDGGDGGDLFFIL

SEQ ID NO: 3939 - protein, 952 aa, Chilo suppressalis
MSANPVPGSDDAQLIQCPKCPQPRFFKGNRGLNIHIGRLHKSSASVPAVSQSLNSGNEPLCKTLGNLKNTLPVIKRIPRSARPSVAVSLSQCIERVLRVNTPESWAELLTFSYRILHINANSTSSSLTQKIKENCRLNPSVNSLVFPPSRPPKCNSSIKLIESKISDGDLRGAANLLFSHDVVAVNCQETLSALEDKHPPPAPTLLLPSPPETTLAYLISKDSDVSAAIYSFKSGSASGLDGLSPQHLKDLLSISVGDAGRVLLHNITLLVNLMLSGEVPKDIVEILYGANLIALKKKDGGIRPIAVGSTLRRIASKICCQHILPTVSAVFQPVQLGFGVKGGCEAAVHALRTFLSLDAAEVVLKVDVKNAFNSVDRGALLTVIKEKTPTIYKYLWQCYSEPTKLIFKNNLLHSSVGCQQGDPLGPAIFSLAIQPIIDSLNSKFNVWYLDDGTIAGDISTVLSDFHIIIDKFKNIGLDLNYSKCELFIPESKFSQDQLQRIITEFSALAPNIKILDNKSLRLLGSPIFDDAIPIFIDEQISKFQQSSEKMLKINPHMALYLIRFCAFAPKFIYFLRSTHFWLFPGLLSSIDSSLRDTLSKILNCSFSDNAWKQASLPVRFGGLGTRHISHIALPSFLSSANGTAELFNKILCPSLGVVEPAHLAEARNAWCRACPGVDIPSSLFSQRQWDEPLCLRLQSDLLASSENAAERARLLAVFQVESGYWLQALPSANIGTLLDRSSLSLAISLRLGVKTNHPHRCRCGTRVGELGHHGLSCQMSAGRVSRHACINDVIRRALVAVNVPAALEPSGIFRDDGKRPDGMTLIPWKQGRPLVWDATCVDTLAPCHTSSTSLAAGAAAASAECSKRRKYSALNESYIFVPFGVETMGPWGPSARSFFKELSKRLTEVTGDQKAGSYLGQRISLAIQRGNAASLLGTIPDGGAGGDIFYIL

SEQ ID NO: 3940 - protein, 950 aa, Chilo suppressalis
MSANSIPGSDDVQLVQCTKCSQPRFFKGNRGLNIHIGRVHKSPASVPAVSLNSGNQPLWQILGNLKSSLPVLKRIPRSARLSVAISLSQCIEHVVRVNTSESWAELLTFSYRILHVNQNSICTSLTQKVKENCRLNPSVYSLVIPPSRPPNSNKSVKLIESKISDGDLRGAANLLFSNDVVAVYCQETLSALEDKHPPPAPNLLLPTPPDLTHAHFITKDKQILDSIFSFKSGSASGLDGLSPQHLKDLLCVSVGDAGRVLLHNITLLVNLMLSGEVPEDIADIFYGANLIALKKKDGGIRPIAVGSTFRRLASKICCQHILPTVSAEFQPVQLGFGVKGGCEAAVHALRTFLSLDAAEVVLKVDVKNAFNSVDRGALLSVIQQKIPSIYNYLWQCYSKPTKLIFKNSLLYSSVGCQQGDPLGPAIFSLAIQPIIDSLNSKFNVWYLDDGTIAGDISTVLSDFHVIIDKFKSIGLDLNFPKCELFIPESKFSPEQLKHIVTKFSALAPNIKILDNKSLRLLGSPIFDDAIPIFINEQISKFQHSSEKMLKINPHMALYLIRFCAFAPKFIYFLRSTHFWLFPGQLAIIDNSLRETLSKILNCSFSDNAWKQASLPVRFGGLGTRHISHIALPAFLSSAYGTAELFSKILCPSLGVVELAHLAEARNAWSRACPGVDPPTSLSSQRQWDEPLCLRFQSDLLASSENATERARLLAVFQAESGYWLQALPSASIGTLLDKSTLSLAISLRLGVKTNHPHRCRCGARVGELGHHGLSCQMSAGRVSRHACINDVIRRALVAVNVPAVLEPSGIFRDDGKRPDGMTLIPWKQGRPLVWDATCADTLAPCHTESTSLAAGAAADSAECSKRRKYSALNENYIFVPFGVETMGPWGPSARSFFREISKRLTEVTGDQKAGSYLGQRISLAIQRGNAASLLGTIPDGGDGGDLFFIL

SEQ ID NO: 3941 - protein, 1019 aa, Protaetia brevitarsis
MEHRFLDLLMTTRDCQRRRNIHYKQYIALEKIDMLNDLLNKHIPEDASLMEVSNAVYAAAQLVTNNRNNDDRPKRLKRRIEKLNEKIATHRARISQLHSLLQYIQTGKQFTTKIRKIAREVRKEHHTLKGSVIETIKEHMLDKLRALTATRKKITTSLKRITENAAFAKNPSSFLRSKSYTNQELNIDKAETYWKEIYNVRPTVDHDSPLFDRFQNFCERKIDICKTFPPITIDEISSALRNKPNYAAPGPDAINSYWWKKLHITHTYLARIFTDFATERLEIPDWMTEGRTLLIYKKGDNTLPENYRPITCLNAVYKIFTSILHHRLVKRIEPVWTAVTEQRGSKRGMAGVKENLLIDGSVCRDSVVYKRNLSVAWIDYAKAFDSSSHDVIISLLRRMRVQDRLVNTIERLMKKWTTRIVMGPPQKECHSSPITYHRGVFQGDSLSPLLFCITLFPLSLELRNLPGYVAGAPNHRIFKITHLLYMDDLKVYAQNEIQLKKTVQIVQDYTKAIGMSFGLNKCATYHIKRGKGADADDDLQLIDGTIIKYLDLEEPYTYLGVEQRGLHLGTSIKEVARTKYEVTLKKIWNSELTAKNKIVATNILAIPALTNTFGAIRWNRDELLTLDRLTRKIMTHHRSLHPNASVERLYMRRSRGGRGLTNIEDLHDRVVTVTAARVLQAQDSLLELVKHHEEQDRGAFLFKAANRALIKFNLAPEVRRGKPCNILTQMTIGNIAKEVKAASLNRMALNHCAKPLHGVFYKNMEQLQLSEGLSFLFLQSSGLRSETEGFVTACQDGVYHSLQYIRSVLKIPIHSTTCTACGVHPETLMHILSSCPEYAATLYVKRHDNALRVLYYHLRRAHDFDDKLIPPYDVQQVVPVISNENYKILWNFAFSTTSPIEANRPDMVVMEERDKRMFIVEMSCPGEKNVRDKEKEKIKKYKDLLFQLRQTYSEYTITMVPLIIGVLGGIHVSTLRYLQQLGLPPGMAQKILAGMQKQVILGSLHVLRAHEAGHPRPSG

SEQ ID NO: 3942 - protein, 1105 aa, Alatina alata
MFMFKFVLIVGCSFLEISATICDFCGKDFISVNRHSWRCKGKLNFANLRIQDNYVASPSTQQSSSLHISQSIANLDGEIADTNDPPDIRDDEHHPSQRMTVDKHICLCGKECRGLRGLQAHKRACKIIDHLDLKDITNSDTVEPLTEDTQTLETTSDLNMEKIESLCGVKLPKTEEQWILANDYFKINLPHNTDIIDINNTIKFTQEQIYGYFYSNYGPVNTKQQHSFETKYKDMSNRQLRQSLRELKSTNRLHEIQYVSHLLRSKLSKSSQNWTSNFNHEQKIKSNFWTYCKHTLESQTETNLPTFDEQSCHSYFKSKLSAVNVHKSFNIPSWIPQLPNPAHPFDLSPPQFNEVSKIINNMRSSASPCPFDHISVIMLKKCPILRTMLWKIMVRIWFTGEFPAIWKNALTILIHKKGLTSNPENFRPITLQNIMSKVMTSWMRKRLCSYLLKNKYIDQHFQKGFWAGMSGTVEHTALMSEIINHARRYQRSLTISLLDLKNAFGEVHHSLINKVLEYHHIPVEMKSLIRSLYCDFTISIATQNFTTHPIHIQKGVLQGDCLSPTIFNLCFNTLMQVITQEKFKSIGYHYDNKIPSIKWLQFADDTAIISSLPSDNQVLLNLYFKWSVWSNFKFRIDKCQVFGLKKTKTTVEQFEPSLLLNTEKLPTVPIGDSFKYLGKEFSFDMSNNKAKSQILEKLDYYLPQIDKLPLHPKFKIQILQTYVFSKLKWALILHRFDGSWLQASCDNMVSYYIRKWLNLHVGANVTHLSLPKKYLGFKLKTVTDIFSNCQASYRSILRFSQDITSRIIFEKTASMYVNTDSIVLSNVTTESLPHHRTKVIKKSQDNRRIDKIWSEFCELKKQNILVKFLTEKSPVKFIRQWQHVSQSLPANLFTFCRKALILALPTRANLHLWNASGSNLCPLCQDKVQSQHHVLSNCSAAATGGRYSWRHDNILMTISNHLLQVVKEGYKLFVDLPGFNNPSNLFNTLRPDLAMIQNNNLTVVELTVCFETNLEKSRNYKQRKYENLKKDLINKKYKLNLITLEVSTLGFYSANVDHFERFLNELSLDSNRILKKLTEVALRSSYYLFCRRNKEWTNPTNLNYY

SEQ ID NO: 3943 - protein, 877 aa, Alatina alata
MLIPFLTAFQPSSPANIPMDLPCNVIVASYYYYYYYYYYYYYYYYALCGVKLPKTEEQWLLANDYFKLNLPYNTDIIDINNTIKYTQEQIYGYFYSNYGPVNTKQQHAFEIKYKDMSNRQLRQSLRELKCTNRLHEIEYVSHLLRSKLSKSTQNRISNFNHEQKIKSNFWSYCKHTLESQTESNLPSFDEQSCHSYFKSKLSAININKSFSIPSWMPQLPNPVHPFDLSPPQFSEISKIINNMRSSASPCPFDQISVIMLKKCPILRTMLWKIIVRVWSTGEFPSIWKNALTILIHKKGSTSNPENFRPITLQNIMSKVVTSWMRKRLCSYLLKNKYIDQHFQKGFWAGMSGTIEHTALMSEIINHARRYQRSLAISLLDLKNAFGEVHHSLINKVLEYHHVPVEMKSLIRSLYRDFTISIATQNFTTNPIHVHRGVLQGDCLSPTIFNLCFNTLMQVIKQEKFQSIGYHYDSKIPSIKWLQFADDTAIISSLPSDNQVLLNVYFKWSVWSNFKFRIDKCQVFGLKKTKTAVEQFEPCLLLNNEKLPTVPIGNSFKYLGKEFSFTMSNNQAKSQIVEKLDYYLPRIDGLPLHPKFKIKMLQMYVFSKLKWNLTLHKFDRSWLTASCDNMVSYYIRKWLNLHIGANVTHLSLPKKYLGFKLKTVTDIFSNCQASYRSILRYSQDLTSRTVFDKTSSNYVNTDRLVISDLATKSSPQHRKDIIKKTQDKLRIDKIWSEFSELKKQNILVKFLTEKCPVKFIRQWQVISQTLPANLFTFCRKALILALPTGTNLKTWNAVECNLCPLCQQSQQSQHHVLSNCSTAATGGRYLWRHDNLLKTIANHLSQVAMEGFKFLVDLPGFNNTSDLFNTLRPDLANN

SEQ ID NO: 3944 - protein, 884 aa, Alatina alata
MFKKKKNEMKYKDMSNRQIRQSLRDLKCTNRLHEIQYVSHLLRSKLSKSTQNRISNFNHEQKIKSNFWSYCKHTLESQTESNLPSFDEQSCHTYFKSKLSAINVNKSFNIPSWMPQLPNPLHPFDLSPPQFSEISKIINNMRCSASPCPFDQISVIMLKKCPILRTMLWKIIVRIWSTGEFPSIWKNALTILIHKKGSTSNPENFRPITLQNIMSKVVTSWMRKRLYSYLLKNKYIDQNFQKGFWAGMSGTVEHTALMSEIINHARRYQRSLVISLLDLKNAFGEVHHNLINKVLEYHHVPVEMKSLIRSLYRDFTISIATQNFTTSPIPVCRGVLQGDCLSPTIFNLCFNTLMQVITQEKFKSIGYHYDKKIPSIKWLQFADDTAIVSSLPSDNQVLLNLYFKWSVWSNFKFRIDKCQVFGLKKTKTAVEQFEPNLLLNNEKLPTVPIGNSFKYLGKEFSFDMSNNKAKSQILEKLDYYLPKIDNLPLHPKFKIQILQRYLFSKLKWDLTVYRFDGSWLKASCDNMISYYIRKWLKFHPGGNVSHLNLPKKYLGFKLKTISDIFSNCQTSYRTILRFSLDITSRVIFEKTMSKYINTDCTILSNSATESNRQHQTGVIKKSQDKQRVDKIWSEFCELKKQNILIKFLTEKSPMKFIRQWQHVSQSLPANMFTFCRKALILALPTRANLHLWNASGSNLCLLCHDKVQSQHHVLSNCSAAATGGRYSWRHDNILMTISNHLLQVVKEGYKLFVDLPGFNNPSNLFNTLRPDLAMIQNNSLTVVELTVCFETNLEKSRNYKQRKYENLKKDLVNKKHKLKLITLEVSTLGFYSANVDYFKRFLNELSLDSNRILKKLTEVALRSLYYLFCRRNKEWTNPTNLNYY

SEQ ID NO: 3945 - protein, 946 aa, Alatina alata
MEKIQALCGVKLPKTEEQWLLANDYFKLNLPYNTDIIDINNTIKSTQEQIYGYFYSNYGPVNTKQQHEFETKYKDMSNRQLRQSLRELKCTNRLHEIQYVSHLLRYKLSKSTQNRLPNFNHEQKIKSNFWSYCKHTLESQTESNLPSFDEQSCHSYFKSKLSAINVNKSFNIPSWMPQLPNPLHPFDLSPPQFSEISKIINNMRCSASPCPFDQISVIMLKKCPILRTMLWKIIVRVWSTGEFPSIWKNALTILIHKKGSTSNPENFRPITLQNIMSKVVTSWMRKRLCSYLLKNKYIDQNFQKGFLAGMSGTVEHTALMSEIINHAKRYQRSLVISLLDLKNAFGEVHHNLINKVLEYHHVPVEMKSLIRSLYRDFTISIATQNFTTSPIPVRRGVLQGDCLSPTIFNLCFNTLMQVITQEKFKSIGYHYDKKIPSIKWLQFADDTAIVSSLPSDNQVLLNLYFKWSVWSNFKFRIDKCQVFGLKKTKTAVEQFEPNLLLNNEKLPTVLIGNSFKYLGKEFSFDMSNNKAKSQILGKLDYYLPQIDNLPLHPKFKIQILQRYLFSKLKWDLTIYRFDGSWLKASCDNMISYYIRKWLKFHPGGNVSHLNLPKKYLGFKLKTVSDIFSNCQTSYRTILRFSQDITSRVIFQKTTPKHIATDCTILSNSAAESNRQHQTGVIKKTQDKQRLDKIWSEFCELKKQNILIKFLTEKSPVKFIRQWQHVSQSLPANMFTFCRKALILALPTRANLHLWNASGSNLCLLCEDKVQSQHHVLSNCSAAATGGRYSWRHDNILTTISNHLLQVVTEGYKLFVDLPGFNNPSNLFSTLRPDLAMIQNNNLTVVELTVCFETNLEKSRNYKQQKYEHLKKDLINKKYKLNLITLEVSTLGFYSTNVDHFKRFLNELSLDSSRILKKLTEVALRSSYYLFCRRNKEWTNPTSLNYY

SEQ ID NO: 3946 - protein, 936 aa, Alatina alata
MIIITIIIIIIIIIIIIIIIIIIIDINYTIKITQEMIYSYFYSNYGSANKQQRKDFDSKYTDLSNRQLRTALRELKSTNRLHEIQYVSHLLRSRLSNSKQPSMMDFNHEYKIRSNFWKYCTKNLETNIQTDVPTFDEETCHSYFRTKLSSINQNKAFNIPSWIPKLPNPTHQFDLSPPTFMEINKIIRKMRSASSPCPFDQISVLMLKKCPILRTMLWKIIVSIWSSGQFPSVWKNALTVLLHKKGSTSNPENFRPITLQNVMSKVLTSWMRKRVHSYLLKNNYIDQNFQKGFWAGISGTVEHTALMTELINHAKRYQRSLTITLLDLKNAFGEVHHSLINRVLEYHHVPSEMKSLICSLYNNFTISISTSNFTTHPIPVRRGVLQGDCLSPLIFNLCFNTLMQVLKQEKFQSIGYCYDNKIDSIKWLQFADDTAIVSSIPSDTQILLNLYFKWTVWANFKFRIDKCQTFGLKKTKSSVEQFQPYLLLNNEKIPTVSTGGTFKYLGKEFSFSMSTDNIKAQLTEKLDYYLPKIDKLPLHPRFKIQIVQSYVFSKLRWFLSIYKLDTTWIKSSCDNMISYYTRRWFRLHPGCNVSQLQLPKKYLGFKLNTINDLYLSCQTTSRTILRFSRDVTSRCAFKNSTTKYVNTDSVILSAPVNPLLPQQRTKIIKKMQDKNKFDKIWSEFCELKKQNILVKFLTASSPVKYIRMWQDVSCSLPANLFTFCRRGLLLALPTKANLRLWQATDSPLCSLCSAKQQTQHHALSNCSTAVSEGRYTWRHNNVLKVILNHLLTVIGDGRKIFVDLPGFRNPSELFRSLRPDLVFVDRTKLTIIELTVCFETNLYHSRDYKLSKYRQLKEDLVNPNQTIELITVEVSTLGFYSEHVDLFSRFLRSLSLDDKRILRKLMEVSIRSSYYLIGPYSAGPNLTPAPLTPGPY

SEQ ID NO: 3947 - protein, 1111 aa, Alatina alata
MYVLKYIILFGYCSSLFYITSATVCDFCGNDFVSINRHLWRCKGKLQLINTLSPENHHRVTLSFAQPSPSLHILDSFANLNGSIEPTSDPPDIRDDDHHHSQRSSVDNHTCLCGKKCRGLRGLQAHKRACRVLDHTDLRDLLNLAPQDISTENDDPPNQETNDINSDKLETLCGVKLPTTEEQWSLANHYFKTCLSYNSNITDINYTIKITQELIYSYFYSNYGSANKQQRKDFDSKYTDLSNRQLRTALRELKSTNRLHEIQYVSHLLRSRLSNSKQPSMMDFNHEYKIRSNFWKYCTKNLETNIQTDVPTFDEETCHSYFRTKLSSINQNKAFNIPSWIPKLPNPTQQFDLSPPTFMEINKIIRKMRSASSPCPFDQISVLMLKKCPILRTMLWKIIVSIWSSGQFPAVWKNALTVLLHKKGSTSNPENFRPITLQNVMSKVLTSWMRKRVHSYLLKNNYIDQNFQKGFWAGISGTVEHIALMTELINHAKRYQRSLTITLLDLKNAFGEVHHSLINKVLEYHHVPSEMKSLICSLYNNFTISISTSNFTTHPIPVHRGVLQGDCLSPLIFNLCFNTLMQVLKQEKFQSIGYCYDNKIDSIKWLQFADDTAIVSSIPSDNQILINLYFKWTVWANFKFRIDKCQTFGLKKMKASVEQCQPYLLLNNEKIPTVSTGGTFKYLGKEFSFSMSTDNIKAQITEKLDYYLPKVDKLPLHPKYKIKIVQSYLFSKLRWFLTICKLDTTWIKSSCDNMISYYTRRWLRLHPGCNISQLQLPKKYLGFKMNTINDLYLSCQTTSRTILHFSRDVTSRCVFYNSATKNVNTDSIILSAPVNPLLPQQHTRTIKKIQDKNKIDKIWSEFCELKKQNILVKFLTATSPVKFIRMWQSVSCSLPANLFTFCRRGLLLALPTKANLRVWQATDSLLCSLCSEKQQTQHHALSNCSIAASEGRYLWRHNNALKVILNHLLTVIKDGRKIFVDLPGFRNPAEFFRSLRPDVVFMDGRKLTVIELTVCFETNLYHSREYKGRKYRQLKEDLMNPNQTVEVITVEISTLGFYSEHVDHFSRFLSCLSLDDKRILRKMIEVTIRSSYYLFCRRNKTWTNPAELNYF

SEQ ID NO: 3948 - protein, 1087 aa, Oryzias sinensis
MSNMSQNQDVSASDEASENSSLSQHTLTEQTHLTCPLCNRICASKTGLSSHVRAHLRREGTPQPTVSHNCNLCNKVFPSKAGLSHHQRQIHPKEYNYQRLEQLEQQAHHWSSMEDSVLLRAANNLFGECQTKKILHERLREFVPNRSVAAIRLRLRNLDWRPPSTVDDVHNERNEVDPSSNIEIIDLLPLVTADERPAMQLDDWQLTFLEEARKNFSRVNKDCWNIKDLKQMVEDLITRNVDIHTAKSRLEEHAIAAFPHLWKASSRRLTHTEGPLTKKAERRAQYTHIQTLYHHRIKDAAKTVLDGNWQTAYRKTENPVPGFIPYWESIFTSPPVTDRRPIKPVLDIIPDLIEPIQPEEVTESLRSMHGSAPGLDRIRPANLRSMNPNILAGYYNLMLANSYVPNHLNTSRITFVPKVTEPREPSDFRPITVSSCILRCMHKIIAKRWVAHFPQDRNQFGFLERDGCFESTAVLHAVLRHSHSEVKDLALGIVDLSKAFDSVCHQSLIRSAAAFGAPVPLLNYLENTYSSASVSFNGTIIHPERGVRQGDPLSPLLFIMSLDEALNSIETVGFNTPSGQIKHIAYADDLLIFCNNSIELQSSLNSLTQSLRSSGLCINPDKSRSLCIRSSSKPSMTILESKSVSVSGMDLPPIDVDDQFQYLGIGFDWKGKVSADSKTQLIRMLEEVTRAPLKPQQRVSILRNFLIPRLIHKLVLSVIYKQTLKSMDQLVRAAVRKWLRLPKDTPTAFFHAAILDGGLGIPHFSTAVIFHRRARLERALSSRNPDIHWAVREPANLPSLRIASENPTILGTTIDNKTEIKETWSKFLYESHDGCGLKYSKQSPISHEWLKYPQKIAPRLYIRGIHLRAGILNTKVRKSRGGRCQNDLKCRGSCGHHESLSHVIQSCQVTNDARCQRHNFLVSALSKSLAKRGYKVLVEPRIPTNGTFIKPDLVIIKDRIAQVIDVTVTDESKMEFGHQIKIDKYGSEPNHTAIDNYLKQNGFNHDVLQHMPFVVNLRGLIYKKSLSHLHSCGLTNRDMSRLCLMTIVGSLKIYDVYMRGTNQYTHYRQRRHHHHPHQYSNTYHNNN

SEQ ID NO: 3949 - protein, 1019 aa, Rhopilema esculentum
MGLEMHIPKEEPTKYLWDVNCAMYATICGWKLACDHKDGNNNSNSQGKQKGIPVWEKRMNEKMNKIRGKISQIAEEIQRIKNNKKLTRNMRRNRRWMKRELKGRITLNGLLEIREHKISVVKSMKYNKEKKKGQIVRNKINRLYDTDQRKVYNTLREILKNDDSDDVSFKTRSDKTGSQTTLTKEDFEDYWPKIWSEESKVNLEAKWIKDVEQAISQSTAVNDDEIVNITKEKFTNMLKTKKNWSSPGKDKIVNYWLKAFTTTHEGISVAVTELINKQTPIPTWLLEGRCGLHPKKLQPKAPDHRPITCLNTMYKSITSLVGEYLPLKTLQMDQRGGRPGVMGCTDNMLIDKMILEDAKMNKKNLSMVWTDVRKAFDSVTHAWILKVLSMNKTNKRIIKFVENIMKGWKISITVDTVNGKEQLESINVKRGILQGDSFVVRLFVLCLDPIAWTIRGYEGYQLTHDRTMKITHLLFVDDLKLYAKSENKISVVTKKVKEMYEDIGMSWGLEKCASLHVVRGKVSKSEDLPIGAKDSISVMESSDKYKFLGKYENFEQLDKFTFQQAEKEYLRRLNVIWSSPLSVPRKQTACIVFALPTLEYFMGTSNWLIADIQNLDRKSRKVVEMHKGKHISESIAMLYLPQKCGGRGFKSVEDTYKISKIKVAHHINISKDPRIKLVRSFQHYKSKKNFKSTFVEATRYAKEHFKADLSLLEEKSVLSYEQERVELKDDNYIQIQRRLGSIIQRLYEERVRNQPWLGFYTVSILDSDEISKNSRNIFRSWKNIPDIVLSTNESIKQQLLPTKAYSKYKLKMETANTTCSLCKQAEETVVHLLCSCAALAQTLYKARHDRMLRPIYHLIRAKFEFDGNNRGVPWYKQALPLASIENDRAKIMWDIPMHLDKRPSNNAIKPDMLIIDKVGKKVSLIEGTICAPGCIAKREKEKQDKYSEMRKSLERLNRGYEIDQINVVFDFLGCYSKQLECHIKRLCEGEKEAKLVIEQCQKWVLSQNCEIVKTFYERK

SEQ ID NO: 3950 - protein, 1268 aa, Rhopilema esculentum
MRILGKEHVIILLISIYQCIISDLQHFQSQTGVAKAKYRMEDGEQHQSSHARRQSKTNWTAKMNMDLLNCREKAKSTHTRADCPRKPNGRKTGVMELTKIFWEEIGYADLGKTAKNLRDQAARIEKVTITDQQTIQNEIIEQTECQIQDNAALNNVETEQRSIENPPFTPDAELDSHFKGIQEKVKQKYLDVKTIPGDWSRRGLNTYVKKKPTCKELQDLQGILMGLEMHSPKEEPTKYLWDVNCAMYATICGWKLACDHKDGNNNSNSQGKQKGIPVWEKRMNEKMNKIRGKISQIAEEIQRIKNNKKLTRNMRRNRRWMKRELKGRITLNGLLEIREHKISVVKSMKYNKEKKKGQIVRNKINRLYDTDQRKVYNTFREILKNDDSDDVSFKTRRDKTGSQTTLTKEDFEDYWPKIWSEESKVNLEAKWIKDVEQAISQSTAVNDDEIVNITKEKFTNMLKTKKNWSSPGKDKIVNYWLKAFTTTHEGISVAVTELINKQTPIPTWLLEGRCGLHPKKLQPKAPDHRPITCLNTMYKSITSLVGEYLPLKTLQMDQRGGRPGVMGCTDNMLIDKMILEDAKMNKKNLSMVWTDVRKAFDSVTHAWILKVLSMNKTNKRIIKFVENIMKGWKISITVDTVNGKEQLESINVKRGILQGDSFVVRLFVLCLDPIAWTIRGYEGYQLTHDRTMKITHLLFVDDLKLYAKSENKISVVTKKVKEMYEDIGMSWGLEKCASLHVVRGKVSKSEDLPIGAKDSISVMESSDKYKFLGKYENFEQLDKFTFQQAEKEYLRRLNVIWSSPLSVPRKQTACIVFALPTLEYFMGTSNWLIADIQNLDRKSRKVVEMHKGKHISESIAMLYLPQKCGGRGFKSVEDTYKISKIKVAHHINISKDPRIKLVRSFQHYKSKKNFKSTFVEATRYAKEHFKADLSLLEEKSVLSYEQERVELKDDNYIQIQRRLGSIIQRLYEERVRNQPWLGFYTVSILDSDEISKNSRNIFRSWKNIPDIVLSTNESIKQQLLPTKAYSKYKLKMETANTTCSLCKQAEETVVHLLCSCAALAQTLYKARHDRMLRPIYHLIRAKFEFDGNNRGVPWYKQALPLASIENDRAKIMWDIPMHLDKRPSNNAIKPDMLIIDKVGKKVSLIEGTICAPGCIAKREKEKQDKYSEMRKSLERLNRGYEIDQINVVFDFLGCYSKQLECHIKRLCEGEKEAKLVIEQCQKWYSAKTARLLKLFMKENRTTKIVCLGISQQYSGHNKKQQKQF

SEQ ID NO: 3951 - protein, 887 aa, Heliconius hermathena
MITHIHKIKSKYQVHAQHEDLNIDINQFLDTLKQKLNTASSRLKRYLNCTNRKKQNSLFNNNEKGFYRSVSQSSNTFDNKNTPSADNLQEFWTDIWEKPIAHNLDSDWIKNVENTTTDIPDMEFKQISMETLTQVIKRLHNWKSPGTDKIHNFWYKKFTCTHTYIHNHLNSFIQFPETLPEYIAQGVTYMLPKSNDTQNPSSYRPITCLQTIYKIFTACLSEFIYKHLDKHNILAEQQKGCRKNSQGCKEQLIIDSVVLNNAFKKKHNIYSMFIDYRKAFDSVPHSWLLYILQLYKIHPKIISFLKSVMEHWTTVLKLKNSTSTTTTKPIRILRGIFQGDALSPLWFCLALNPLSSLLNKTGIGYHLKTADSEYVLSHLLYMDDIKLFSNNKNNLFYLADVVQKYSNDISMQFGVEKCKILSINKGKIESNSYTLINNEKIESMNEGDIYKYLGFKQSRRIKQTETKFELMQKFRQRLNLILKSHLYSRNMIKAINTFAIPILTYSFGIINWSQTDLKKLQRIINTCMTKHRKHHPKSSIERLTIPRCEGGRGIIDIQSLHNKQITSLIKYFDHKSQISSLHRQVTKIDKHLTPLNLQDTSTQNNDTLTQLHQKISRWQEKSLHGRHRNDLNQTYVDKNASNDWLRRGSLFPETEAFMLAIQDQVIATRNYRKYITKEITEGSDLCRHCNTSPETIQHITGACKTLVQTDYKHRHDHVASIIHQHLAHSYKFVQQKLPYYKYKPNTVHENRHYKLYWDRTILTDKTVYCNRPDITFYDKISNTVYIIDIAVPNSHNIQSTIAEKITKYQELALAIKTQWKAETIHIVPIVISATGLVPKTLHNSLDLLNIPQAIIHTLQRAIILNTCHITRKFLSTSSVHSIASILG

SEQ ID NO: 3952 - protein, 1293 aa, Eueides isabella
MSSNNHCSSSYSPSSTKYSPKSHQTIDVVQGAKPKYLGPTIVKHSARKKWTTEMNIFIWRTYLIKSELETISRGYLNSLHQAFTQKYPEMQATKQRICDQRRAIVKNKLLSEDILSNIRKEVSILLRNNAFTIQTSITENLKEFEGRMNWSNDINETIVRIYFQITNLETNKTAYRKKLHNTFIESFPHLAHISEQRLADQRRVIFNNKMVTDDRIQEIKKEVQIEIQNKLENNSKNNLSPNHLTNTLSISQENINIERTENNERNEDSNQPHLYRLNYMEIEEKFSLTLDKFRNTEPISRPHLPKQKSSRKLAAIVDYLNKNVIPKFISKEQDFLTLQTVIYVAAYTAIISNGAKIKEVKNNEPKHNYKPSWQRRLENKIDKYRREIARLTQYINGNRSKKIITHIHKIKSKYQVHAQHEDLNINIDHFLDTLKQKLNTSSSRLKRYLTCTNRKTQNSQFNNNEKGFYRNLTNKSLFLENQDAPSIENLQKFWAGIWEVPIVHNLESKWLQNIENTIIDIPNMEFQEIPLEILTQVIRRSNSWKSPGTDNIHNFWYKKFTCTHTYIHYHFNSFIQFPNTIPDYITQGVTYMLPKCHDTQNPSSYRPITCLQTVYKFFTACLSESIYSHLDKHNILAEQQKGCRKSSQGCKEQLIIDSVVLSNAFKKKHNICSMFIDYRKAFDSVPHSWLLYVLKLYKIHPNIISFLKSIMKHWTTVLKIRDSNHFTITSEPIRILRGIFQGDALSPLWFCLALNPLSSLLNEATIGYHLKTADSDYILSHLLYMDDIKLFSNNTNNLFNLADITQRFSIDIRMQFGVDKCKILSINKGKIQSSSYTLLNNEKIESMNDGDIYKYLGFKQSRRIKQTETKVELMQKFRQRLNLILKSHLYARNTIKAINTFAIPILTYSFGIINWSQTDLKKIQRIINTSMTKYRKHHPKSSIERLTLPRQEGGRGIIDIQNLHDKQISNLRKYFDHKSQISSLHKQVTEIDKQLTPLNLQNRSIHTNDTFLITELHKKKIARWQEKSLHGRHRNHLNQPYVDKVASNEWLRRGSLFPETEAFMLAIQDQVIPTRNYRKYITKEISDHSDLCRHCNTSSETIQHITGACKTLAQTDYKHRHDQVASIIHQHLAHSFKFIQQKLPYYKYKPNIVHENSNYKLYWDRTILTDKTVYYNRPDITFYNKISNTVYFIDIAVPNSHNIQSSIAEKITKYQELALAIKTQWKVETIHIVPIVISTTGIVPTTLHNSLDMLKIPQTIINTLQKAIVLNTCRITRKFLSTSSVHSIASILG

SEQ ID NO: 3953 - protein, 1369 aa, Fabriciana adippe
MEKRVYNLRPLPGGRRGASGADAGCYSMRSIGGTELNRRAPANEEATAGIINHHTQSTSPSSPKSTSSLNSLFPSSLPSPYSASSESSYSSKSSSYLAIDVVQEARANNLEPAIVQSSARKKWTAEMNMFIWRTYLFITKLETSTRGHLDTLHQYFTEKYPNMNATKQRISDQRRAIVNNKLLSLDVLTDIRNDVSKILQNETPPEIPRQATGRMSWTNHINEAIIRIYFQVTELETNQTAYRKKLHNTFIATFPHLSHISEQRLSDQRRVILRNKMITENRIQEIRQEVEAQIHNHSKSHQSNTNTNINSSIQNIHTNIHNITDITQESRDIIYCTPPSRDQYIESADKQAFNLDCTEIEIQFETAFEKFKNTEPISRPYLPKQKSSKKLAAIIEHLNNNVIPKYLTKNQDFTTFQTIIYSGAYTAVICNGTKINTDRQNNSQNKFKPGWQRRLENKIEKYRSEIARLTQYINGNRSRKIILAFDTIRNKYQTHAQHEDLNTEANHFLDTLKQKLNTTASRLRRYLKCTTRKKQNSQFKNNEKAFYRDLISKSQTINMENQPTPTSEILKQYWSNIWEIPIQHNTEAEWIHNIEKATETIPTMEFEEISIDTLLNVIKRTHNWKSPGTDNIHNFWFKKFTASHTYILDHLNSFIRSPHTMPDYITHGVTYMLPKNNDTQNPANYRPITCLQTIYKIFTACLSESIYNHISKNNILAEQQKGCRKSSQGCKEQLTIDSIIINNAFKKKHNIFSIFIDYQKAFDSVPHSWLLHVLQLYKIHPKIVLFLKTAMEHWSTVLKLKNSSFALATEPIKIRRGIFQGDALSPLWFCLALNPLSNLLNNTNLGYNLKTTDSVFTISHLFYMDDIKLYSNNKHNLFCLADITQIFSSDIKMQFGVDKCKILSIQKGKIEKNVYTLQNNEKIEPMDDCSVYKYLGFKQSRKIQQKESKLELIIKFKQRLNLILKSHLNSKNTVKAINTFAIPILTYSFGVIKWSQTDLKKLQRTINTYMTKYRKHHPKSSIERLTLPRHEGGRGLIDINNLHNKQINTLRNYFHNKSQHSLLHKQASKIDMKLTPLNLQDTNLQPNESLIEPQQKIARWSEKSLHGRHHNDLSQNHVDKKASNEWLRHGVLFPETEAFMLAIQDQVIPTRNYRKYITKETIEEIDTCRHCNSASETIQHITGACKVLVQTDYRHRHDQVASILHQHIAHTFKFIPNKVPYYKYKPNAVHENSHCKLYWDRTILTDKTIHYNRPDITFHNKHTDTVYIIDIAVPNTHNIQSTINEKISKYQELAIEIKTQWKAKTVHIVPIVISTTGIIPKSLQNSLDILNIPKTTINTMQKAIILNTCRITRKFLSSSSTHSITTMLG

SEQ ID NO: 3954 - protein, 1358 aa, Autochton pseudocellus
MSKRVYNLRPLPGGRRGASGADAGCSSMRTIGGEELNRRASTEKNVTADVISHHTNSSNTSPSSSLFASPNSSPNPFQNPSYLESSTSSSSSSLTVDVAQETNVSHHKPTTAKSRARRKWTVEMNMFTWRTYLIISRLETHPRGYLDLLHKAFIEKYPEMNASKQSIGDQRRAIVNNKLLSTIVLREIKDEVTKHLQHNEHPLPTLTQTAVRMRWSDEINETILRIYYEVTELETNMTAHRKKLHDKFIQVYPHLAHLSEQRISDQRRVIVNNKMLPETKILQIRHGVETHLQRSNTLTQFNSNNSQNTSLPIRNITHEDIGSPPSRATVRTNLGRQETHTHINYKYIDCEQIKQHFNLTLDRFKNTDPTSRPYLPRQKPSKKLAFIVDYLNTQILPNILTINQDFIDFQTIIYSAAYTAAICNGTKINHDRKLTRDIRPPWQRRLENKIDIFRAEIARLIQYIRGNRSNRIRIAVEKIRMKYQIHAQYENVNTDLEHFLDTLKQKLNAASSRLRRYVTCTARKKQNAQFINTEKAFYRSLTFNNQNFNKPENRVPTTEKLQKFWGDIWENPVQHNQEAEWINIINESTKHIPDMSFERITTDIFLHVIKSTHNWKSPGTDNIHNYWYKKFTSIHPYLHDHINTFIQSPHLMPQYITHGVTYMLPKENNTEDPAKYRPITCLQTVYKILTACISKTIYNHLSDHNILAEQQKGCRKNSQGCKEQLTIDAIVINEAYIKKQDTHSMFIDYRKAFDSVPHSWLLHILRLYKIDSNIVNFIETSMQNWKTVLKISNHSSTITTDPIRILRGIFQGDALSPLWFCLALNPLSTLLNNSNAGYNLKTYNNQFSLTHLLYMDDIKLYAGNIIDLFTLADIAEQFSTDICMEFGVDKCKILSIQNGQIQSNRYALETGQDIEPMGENSTYKYLGFKQSRKILQRETKVEITNKFKNRLNLVFRTHLNSRNMVKAINTFCIPILTYSFGIINWSQTDLKNLQRTVNTHMTKHRKHHPKSSIERLTLPRKEGGRGIIDIQNLHNKQISTLRHYFHTKSQHSLLHKQITEIDNKLTPLNLKNKNTQPNEALITVDQKVAKWAMKSLHGRHRTDLSENYVDKEKSNDWLMKGELFPETEGFMLAIQDQIITTKNYRKYIIKDTNQLSDLCRHCNSAPETIQHITGACKSLVQSDYKHRHDQVAAIVHQHLAHMYNFIPNKNPYYKYKPVTILENQTSKIYWDRTIITDKTVHYNRPDITLHDKKNNTVYIIDIAIPNSHNIQSTISEKLSKYQDLAIELKTQWKASIVHIVPIVLSSTGIIPKTLTQSLNILNMPSHSHHLLQKATILNTCRITRKFLTSSSVSSTYSI

SEQ ID NO: 3955 - protein, 1356 aa, Cecropterus confusis
MSKRVYNLRPLPGGRRGASGADAGCSSMRTIGGEELNRRTSTGKNVTADIISHHTNSSNTSPLSSLFPSPNSSPNPFQHPSYLEPSSSSSSSSLTVDVAQEANVSHHEPTTAKSRARRKWTVEMNMFIWRTYLITSRLETHTRGYLDSLHKAFTQKYPEMNASRQSIGDQRRAIVNNKLLSTIVLKEIKDEVTKYLQQNEQPLPTLTQTAVRMRWSDEINETILRIYYEVTELETNMTAHRKKLHDKFIQTYPHLAHLSEQRISDQRRVIVNNKMLPDTKILQIRHGVETHLKLSKTQFNSNNSQNTSLPIINITHEDIGSPPSHATVRTNLVRQEIHSHINCKQIDCEQIKQHFNLTLDRFKNTDPTSRPYLPRQKPSKKLAFIVDYLNTQILPNILTINQDFITFQTIIYSAAYTAVICNGTKINHDRKLARDIRPPWQRRLENKIDIFRAEIARLTQYIRGNRSNRIRTAVERIQTKYQIHAQYENVNTDLEHFLDTLKQKLNAASSRLRRYVTCTARKKQNAQFVNTEKAFYRSLTCNNQNFNKSVNRVPTAEKLHKFWGDIWENPVQHNQEAEWINIINETTKHIPDMSFKHITTDIFIHVIKSTHNWKSPGTDNIHNYWYKKFTSIHPYLHDHINTFIQSPHLMPQYITHGVTYMLPKENNTEDPAKYRPITCLQTVYKILTSCISKIIYNHLSDHNILAEQQKGCRKNSQGCKEQLTIDAIVINEAYIKKQDTHSMFIDYRKAFDSVPHSWLLHILRLYKINSNIVNFIKTSMQNWKTVIKISNHSSTISTDPIRILRGIFQGDALSPLWFCLALNPLSTLLNNSNVGYNLKTYNNKFSLTHLLYMDDIKLYAGNIIDLFTLADIAEQFSADICMEFGVDKCKILSIQNGQIQSNRYALETGQDIEPMGENSTYKYLGFKQSRKILQRETKLEITNKFKNRLNLVFKTHLNSRNMVKAINTFCIPILTYSFGIINWSQTDLKNLQRTINTHMTKHRKHHPKSSIERLTLPRKEGGRGIIDIQNLHNKQISTLRHYFHTKSQRSLLHKQVTEIDNKLTPLNLKNKHTQPNEALITIDQKIAKWAVKSLHGRHRTDLSENYVDKERSNDWLMKGELFPETEGFMLAIQDQIITTKNYRKYIIKDTNQLSDLCRRCNSAPETIQHITGACKSLVQSDYKHRHDQVAAIVHQHLAHMYNFIPNKNPYYKYKPVTILENQTSKIYWDRTIITDKTVHFNRPDITLHDKKNNTVYIIDIAIPNSHNIQSTISEKLSKYQDLAIELKTQWKASTVHIVPIVLSSTGIIPKTLTQSLNILNMPSHSHHLLQKATILNTCRITRKFLTSSSFSSTYSI

SEQ ID NO: 3956 - protein, 1369 aa, Fabriciana adippe
MEKRVYNLRPLPGGRRGASGADAGCYSMRSIGGTELNRRAPTNEEATAGIINHHTQSTSPSSPKSTSSLNSLFPSSLPSPYSASSESSYSSKSSSYLAIDVVQEARANNLEPAIVQSSARKKWTAEMNMFIWRTYLFITKLETSTRGHLDTLHQYFTEKYPHMNATKQRISDQRRAIVNNKLLSLDVLTDIRNDVSKILQNETPPEIPRQATGRMSWTNHINEAIIRIYFQVTELETNQTACRKKLHNTFIATFPHLSHISEQRLSDQRRVILRNKMITENRIQEIRQEVEAQIHNHSKSHQSNTNTNINSSVQNIHTNIHNITDITQESRDIIYCTPPRRDQYIESADKQAFNLDCTEIEIQFETVFEKFKNTEPISRPYLPKQKSSKKLAAIIEHLNNNVIPKYLTKNQDFTTFQTIIYSAAYTAVICNGTKINTDRQNNSQNKFKPGWQRRLENKIEKYRSEIAQLTQYINGNRSRKIILAFDTIRNKYQTHAQHEDLNTEANHFLDTLKQKLNTTASRLRRYLKCTTRKKQNSQFKNNEKAFYRDLISKSRTINMENQPTPTSEILKQYWSNIWEIPIQHNTEAEWIHNIEKATETIPTMEFEEISIDTLLNVIKRTHNWKSPGTDNIHNFWFKKFTSSHTYILDHLNSFIRSPHTMPDYITHGVTYMLPKNNDTQNPANYRPITCLQTIYKIFTACLSESIYNHISKNNILAEQQKGCRKSSQGCKEQLTIDSIIINNAFKKKHNIFSIFIDYQKAFDSVPHSWLLHVLQLYKIHPKIVLCLKTAMEHWSTVLKLKNSSFALATEPIKIRRGIFQGDALSPLWFCLALNPLSNLLNNTNLGYNLKTTDSVFTISHLFYMDDIKLYSNNKQNLFCLADITQIFSSDIKMQFGVDKCKILSIQKGKIEKNVYTLQNNEKIEPMDDCSVYKYLGFKQSRKIQQKESKLELIIKFKQRLNLILKSHLNSKNTVKAINTFAIPILTYSFGVIKWSQTDLKKLQRTINTYMTKYRKHHPKSSIERLTLPRHEGGRGLIDINNLHNKQINTLRNYFHNKSQHSLLHKQASKIDMKLTPLNLQDTNLQPNESLIQPQQKIARWSEKSLHGRHHNDLSQNHVDKKASNEWLRQGVLFPETEAFVLAIQDQVIPTRNYRKYITKETIEEIDTCRHCNSASETIQHITGACKVLVQTDYRHRHDQVASILHQHIAHTFKFVPNKVPYYKYKPNAVHENSHYKLYLDRTILTDKTIHYNRPDITFHNKHTDTVYIIDIAVPNTHNIQSTINEKISKYQELSIEIKTQWKAKTVHIVPIVISTTGIIPKSLQNSLDILNIPKTTINTMQKAIILNTCRITRKFLSSSSTHSITTMLG

SEQ ID NO: 3957 - protein, 1364 aa, Deilephila porcellus
MENMSNKRYNLRPLPGGRRGASGADAGCHSMRTIGGEELNRRAPTDKHTTADIITPGSLSSSISSLDSLFPSPNSSSNPLKTRNLSLSPSSSSTLTNLSVDVVQEASAANPGPVTGSKRARKKWTDDMNKFIWRTYLITTQLGSNTRGYLDSLHQAFIEKYPEMDVSKQRVGDQRRAIVNNRLLPTSILNEIQTDVTNFLQNNEQPPNTITQTAGRMRWSNDINESIIRIYFKITELETNLTAYCKKMHDKFIDMYPNLSHISEQRLADQKRAIINNKMISENRMQQIRREVEINLNSHPSIPQDEHTPHIQTHNQINNFEDGIDAIAPHQSPTPIQRNSTDNTITNKYNIDYDKINQQFFETLETYKLTEPTTRPYIPKQRTSKKFACIMEYINKTILPNFFNDEQDFLTFQTIVYSAAYTAATCNGAKITIESGQQRQKYKPPWQKRLENKIGILRAEIARLIQYLQGNRSRRIIKAVEIIKSKYKIHAQYESLNTELEHFLDTIKQKLNAAASRLKRYLTCTARKKQNTQFKNNERIFYRELNKSDHRNSDSDRVPIPTSESLRQYWAGIWENPLQHNSHADWLSSVRESTLNIPLMEFEHISIDIVLRVIKNTHNWKSPGTDNIQNFWYKKFTSTHTHIHRHLNTFLQSPDKMPDYITHGVTYLLPKDNDTENPAKYRPITCLQTIYKILTACINETIYSHISEYNILAEEQKGCRKNSQGCKEQLTIDAITINNACKTNQNIHTTFIDYRKAFDSVPHSWLLEVLHIYKISPTIINFLKSSMANWQTVLKLKLNSIPIITEPIQILRGIFQGDALSPLWFCLALNPLSLLLHKSKAGYGLNSIDSQFIFSHLFYMDDIKLYASSKEDLFHLIDITQQFSNDIYMQFGVDKCKILSINNGKLQNNSYILDTGENIEPMDEYSTYKYLGFQQFRKIQHKDIKQDLTKKFKHRLNLILKTHLSSKNVVKAINTFAIPILTYSFGIINWSQTDLKKLQRIINTLLTKYRKHHPKSAIERLILPRNEGGRGFIDIQNLHNKQITSLRSYFHTKSYQSTLHKHASNIDIKLTPLNLHDTQIQPNERITDMQQKIARWAEKSLHGRHRSHLTQNHVDKEMSNEWLKKGELFPETEGFMLAIQDQIVLTRNYKKFIIKDPSQTTDTCRHCNSASETIQHITGACKSLVQTDYKHRHDQVAAIIHQYLAHQYKFINQRVPYYKYKPETVHENRQCKIYWDRTIITDKTIHYNRPDITLHNKLTNTIYLIDIAIPNTHNIQSTTSDKLTKYQDLAIELKTQWRADTVHIVPIIMSSTAIVPKSLHQSLEILKIPSYVTYLLQKAIILNTCRITRKFLSSSSVSSTYTII

SEQ ID NO: 3958 - protein, 765 aa, Deilephila porcellus
MEFEHISIDIVLRVIKNTHNWKSPGTDNIQNFWYKKFTSTHTHIHRHLNTFLQSPDKMPDYITHGVTYLLPKDNDTENPAKYRPITCLQTIYKILTACINETIYSHISEYNILAEEQKGCRKNSQGCKEQLTIDAITINNACKTNQNIHTTFIDYRKAFDSVPHSWLLEVLHIYKISPTIINFLKSSMANWQTVLKLKLNSIPIITESIQILRGIFQGDALSPLWFCLALNPLSLLLHKSKAGYGLNSIDSQFIFSHLFYMDDIKLYASSKEDLFHLIDITQQFSNDIYMQFGVDKCKILSINNGKLQNNSYILDTGENIEPMDEYSTYKYLGFQQFRKIQHKDIKQDLTKKFKHRLNLILKTHLSSKNVVKAINTFAIPILTYSFGIINWSQTDLKKLQRIINTLLTKYRKHHPKSAIERLILPRNEGGRGFIDIQNLHNKQITSLRSYFHTKSYQSTLHKHASNIDIKLTPLNLHDTQIQPNERITDMQQKIARWAEKSLHGRHRSHLTQNHVDKEMSNEWLKKGELFPETEGFMLAIQDQIVLTRNYKKFIIKDPSQTTDTCRHCNSASETIQHITGACKSLVQTDYKHRHDQVAAIIHQYLAHQYKFINQRVPYYKYKLETVHENRQCKIYWDRTIITDKTIHYNRPDITLHNKLTNTIYLIDIAIPNTHNIQSTTSDKLTKYQDLAIELKTQWRADTVHIVPIIMSSTAIVPKSLHQSLEILKIPSYVTYLLQKAIILNTCRITRKFLSSSSVSSTYTII

SEQ ID NO: 3959 - protein, 1265 aa, Cecropterus bathyllus
MTVDVAQETNVSHHEPTTAKSRARRKWTVEMNMFIWRTYLIITKLETHTRGYLDSLHKAFIEKYPEMNASKQSIGDQRRAIVNNKLLSTIALREIKDEVTKHLQQNEQPLPTITQTAVRMRWSDEINETILRIYYEVTEVETNMTAHRKKLHDKFIQTYPHLAHLSEQRISDQRRVIINNKMLPETKILQIRHGVETQLKISNSLTQFNGNHSQNSSLPITDITHEDIGSSPSHATIRTNLARQEIHTHINCKYIDRDQIKQHFNLTLDRFKNTDPTLRPYLPRQKPSKKLAFIVDYLNTQILPNVLTINQDFIAFQTIIYSAAYTAVICNGTKINHDRKLTKDIRPPWQRRLENKINIFRAEIARLIQYIRGNRSNRIRTAVEKIRTKYQIHAQYENVNTDLEHFLDTLKQKLNAASSRLRRYVTCTARKKQNAQFINTEKAFYRSLTLNNQIFNKPEKRVPTAEKLQKFWGDIWENPVQHNQEAEWINIINETTKHIPDMSFEHITTDIFLHVIKSTHNWKSPGTDNIHNYWYKKFTSIHPYLHDHINTFIQSPHLMPQYITHGVTYMLPKENNTEDPAKYRPITCLQTVYKILTACISKTIYNHLSDHNILAEQQKGCRKNSQGCKEQLTIDAIVINEAYMKKQDTHSMFIDYRKAFDSVPHSWLLHILRLYKINSNLVNFIETSMQNWKTVLKISNHSSTITTDPIRILRGIFQGDALSPLWFCLALNPLSTLLNNSNAGYNLKTYNNQFSLTHLLYMDDIKLYANNIIDLFTLADIAEKFSTDICMEFGVDKCKILSIQNGQIQSNRYALETGQDIEPMGEDSTYKYLGFKQSRKILQRETKVEITNKFKNRLNLVFKTHLNSRNMVKAINTFCIPILTYSFGIINWSQTDLKNLQRTINTHMTKHRKHHPKSSIERLTLPRKEGGRGIIDIQNLHNKQISTLRHYFHTKSQHSLLHKQATEIDNKLTPLNLKNKNTQPNETLITVDQKVAKWAVKSLHGRHRTDLSENYVDKEKSNDWLMKGELFPETEGFMLAIQDQIITTKNYRKYIIKDTNQLSDLCRHCNSAPETIQHITGACKSLVQSDYKHRHDQVAAIVHQHLAHMYNFIPNKNPYYKYKPVTILENETSKIYWDRTIITDKTIHFNRPDITLHDKKNNTVYIIDIAIPNSHNIQSTISEKLSKYQDLAIELKTQWKASIVHIVPIVLSSTGIIPKTLTQSLNILNMPSHSHHLLQKATILNTCRITRKFLTSSSVSSTYSI

SEQ ID NO: 3960 - protein, 1364 aa, Deilephila porcellus
MENMSNKRYNLRPLPGGRRGASGADAGCHSMRTIGGEELNRRAPTDKHTTADIITPGSLSSSISSLDSLFPSPNSSSNPLETRNLSLSPSSSSTLTNLSVDVVQEASAANPGPVTGSKRARKKWTDDMNKFIWRTYLITTQLGSNTRGYLDSLHRAFIEKYPEMDVSKQRVGDQRRAIVNNRLLPTSILNEIQTDVTNFLQNNEQLPNTITQTAGRMRWSNDINESIIRIYFKITELETNLTAYCKKMHDKFIDMYPNLSHISEQRLADQKRAIINNKMISENRMQQIRREVEINLNSHSSIPQDEHTPHIQTHNQINNFEDGIDAIATHQSPTPIQRNSTDNTITNKYNIDYDKINQQFFETLETFKLTEPTTRPYIPKQRTSKKFACIMEYINKTILPNFFNAEQDFLTFQTIVYSAAYTAATCNGAKITIESGQQRQKYKPPWQKRLENKIGILRAEIARLIQYLQGNRSRRIIKAVEIIKSKYKIHAQYESLNTELEHFLDTIKQKLNATASRLKRYLTCTARKKQNTQFKNNERIFYRELNKSDHRNSDSDRVPIPTSESLRQYWAGIWENPLQHNSHADWLSSVRESTINIPLMEFEHISIDIVLRVIKNTHNWKSPGTDNIQNFWYKKFTSTHTHIHRHLNTFLQSPDKMPDYITHGVTYLLPKDNDTENPAKYRPITCLQTIYKILTACINETIYSHISEYNILAEEQKGCRKNSQGCKEQLTIDAITINNACKTNQNIHTTFIDYRKAFDSVPHSWLLEVLHIYKISPTIINFLKSSMANWQTVLKLKLNSIPIITEPIQILRGIFQGDALSPLWFCLALNPLSLLLHKSKAGYDLNSIDSQFIFSHLFYMDDIKLYASSKEDLFHLIDITQQFSNDIYMQFGVDKCKILSINNGKLQNNSYILDTGENIEPMDEYSTYKYLGFQQFRKIQHKDIKQDLTKKFKHRLNLILKTHLSSKNVVKAINTFAIPILTYSFGIINWSQTDLKKLQRIINTLLTKYRKHHPKSAIERLILPRNEGGRGFIDIQNLHNKQITSLRSYFHTKSYQSTLHKHASNIDIKLTPLNLHDTQIQPNERITDMQQKIARWAEKSLHGRHRSHLTQIHVDKEMSNEWLKKGELFPETEGFMLAIQDQIVLTRNYKKFIIKDPSQTTDTCRHCNSASETIQHITGACKSLVQTDYKHRHDQVAAIIHQYLAHQYKFINQRVPYYKYKPETVHENRQCKIYWDRTIITDKTIHYNRPDITLHNKLTNTIYLIDIAIPNTHNIQSTTSDKLTKYQDLAIELKTQWRADTVHIVPIIMSSTAIVPKSLHQSLEILKIPSYVTYLLQKAIILNTCRITRKFLSSSSVSSTYTII

SEQ ID NO: 3961 - protein, 1255 aa, Hycleus cichorii
MIRNVGLMANSAQNNEPYSRRLRARKPPSANAGGTDNSCSSDVSRQVASALLKPNKQSERTGPYHLRSRNTCSGPIKEKQINKCVETSTDSDTSETTDSVPDDADNNIICGKCGKTFVTRSGLYKHQKKPCEPCTTCSYCGRNFSRLAGLHRHLRQQHPLQYTKELQDECNYICTHCDSAYSSLTGLRQHHQKRHAGIVFEGDKSLMRKVAESEIGMYGRVCLERMIRDTHLTYNQLRRIREFDEYKHMLLEMMHSANAGAPLTPPHINLAESMEEPLDLTTEVVKSRRSSNLEHQNFDNSQAASALSESLVEHDEEQLEIISDVIELQKSSRLRLSQSVGADLPVVNNESPLSFHIDVPNHNNTTKFDDTVYDNEDLSDVTRGPVSLEEAIDIITNEATMQRYIARAAVVLKNIETSVSDLATDAMTLTRHQLKPKLDEFISTSFKPARGVGPRNPSKHAPSYGPGLSGRGQRAANYKKAQDLYNKNRRMLVDIILSGRPFEGPTTTPSIESVEGLYGGIFESSSLIDDEEYNLSCSEFVIDHPITPDEVSEAKNGWRCSAPGLDGITVRDVLRHSNLDLSILFNIVIYCNCCPSSWETLRTTLIPKTGDLSQATNWRPITVGSALQRLLHRVLLHRISNAVMLNRNQRGFVDIDGTMANCVILDTFIRERTARGQSFSIVSLDIAKAFDSVSHNSIRRALIGHGLRGFVVDYILGTLNASTIIRVGDAATRPIKINRGVRQGDPLSPLLFNLIVDELFTVLDRQVIGGDVANGSRCSAMAFADDIVLMADTASEMRRSLDITNRFFQSRGMTINPSKSCAISTISAQGRCVPVNGPRFSIGGKSIQNITQLNTFKYLGIEFNSTGSLKPCLPNLPVWLKNLSRAPLKPDQKLVILKQHLIPRLLYGLQSPRIVGKTLSSADRLIKSTAKRFLHLNIHTPDAMLHARIRDGGLGVLELRTLVPKIFVGRLENLLSRAPDDAVLSAVMSSDLIVRLLERLHGMVGAVPPSEKWRNTISHSILSKGLEAASDDVASRRWIDLKPAGWTGRDYVRAVQLRTANLPTKAIPSNPPEQRRCRGGCNADESLAHVLQMCPITHGARVRRHNEIVGKIISYCRRGRLRVEDEPHVRHEDGTLFKPDMAVHLPDGRIVICDVQVTWASNVTLEFVWNMKRQVYDCPKFLQAASKRWPGGEIVFAPIILEARGIWSKSNKVAQDLLKLPGVLKHSCVHSVLKWGSSIHRMFNRSVWQRGPRRV

SEQ ID NO: 3962 - protein, 936 aa, Monomorium pharaonis
MNVYLISRFPRGRSLEAVKGIRKRREYKDLVAEYKNQIIAQDMESQADLETRDVDAEEGNGSARGSMSIIEWLESNLEEIIPEMHGGIWIRAAIKSVLDGHSPRDHMEQWWSGMFPDLARGREESNINNPRERKVLSKRKERRREYKRMQMLWRKNMSKAARKVLDGDANNMPHPSMAEQVKYWRPIFEMSSAQMDNAALPAQEKAPVLSDVWIPVSVADVTTIKLSMASSPGMDGLSVRRWMGVPPIMRAAILNIVMAVEFMPELFSGSRTVLLPKAGDLMTPSNYRPISVASVILRHFHKILAKRLARHKIFDVRQRGFIAADGCAENISVLSALLFDAKTNRKQVHVITLDVKKAFDTVNHSGIYRVLASYGIPVGMIAYIRSLYETATLRIEVDRAYSESIRPGRGVRQGDPLSPLIFNLVVNEVLKAVPDQVGYNMNGCNINALAFADDLVIVGSTKEGVQLTLDKIVKVLECFSLELSPTKCAAFSLVPAGKMKKIKVVMEPQFTIGNQLVPQAGVIKEVKYLGILFTEDGPCRGTAEMTSFLERIRRAPLKPQQRMTVLRTYLLPRFTHGLVLGRTSHGELRKLDRQVRAEIRRWLCLPGDVPMAFIHSPIRGGGLGVTSFETTIPRLVKERLERLQSTDYELAKMAGQSAWAERKKRWCHLSKRKDCDWTRELYRSVDGFELREAGEVPASTKWLDDPMVFIPPADWLQYIKVWINALPTRIRTTRGIRRNREDVQCRAGCSVQETAAHVIQQCFRTHGGRIMRHDAVAATVALELQQRGYTVRRERIFRTQAGVRKPDILVAKDGRATVLDAQIISGAGSLAEGHKRKKAYYANNGELLGGISNLLQVSSNNLEVSTVTLTWRGVWAKDSAAMLEDLGISRATMRGITTRVLKGSYMNFRRFNQMTTMFGGRRYTRMSGWGPPRTQP

SEQ ID NO: 3963 - protein, 1221 aa, Dermacentor silvarum
MDPTSCSPDVPPPPSRIPVRSPPASPPQRDFAHAQPGSQPMRHETELIVFFPLPSTFKCTEKGCSTSYSPAVWTSRRQSLQRHLEQQHGCRIVTTTHFCTLCRTILGYRPTSHGCLTKGQHEFSTPTQNQHKCTECPYSFPSRKGLDNHLKAHRRRAAAQQASSANQPASPTTSDDTNVDSPISVTNTTPAPSNEPTPASTPGTPRRGSPNVDSPISVTTTTPAPSKEPTPASTPGTPRRGSPPTMTSTPNLTEAASPSLSEGADSNAHLLPSPPLQQTCANEDTAHDISASSTTSSPEAPMSPAVAEHSDAVSEEADLVSLAGTITDDGVLTKHAKQLRQLQREAVSDSGWLQFTEILEDAIQVVSEAVKLPAASANGKPRRPLNPENAQQIQRLYRRNRRRAVRLIVEGETRLCPIPLDELEEHFSETWGPREADTTLLLSKVKRSDMADVSLARFTDGEVVSRLRKCENTAPGSDRLTYQHWRSTDPDAVFLTAVFNVCLRYRRTPAAWKESRTVLIYKKGDPRDAASWRPIALGSTISKLYAGCLASRLQEWIVSQEVLSRCQKGFLPCDGVYEHNFVLQERLDAARAGGGQLCAAFLDFANAFGSVPHNALIDALHGAGAGADFCSIVADLYRDNKTSIIAEAGSTSPIEISAGIRQGCPLSGLLFNLVLDPVVRALQGGDKQHNVLAYADDLTPLADDPGSLQGRINVAATLSSRLGLRLNPAKCKSLHLSGKTPVGTRPTTFTVYGTPISSIGDFEAHAFLGRPVGFSVLPDRATVDEAISVGRRLLTSMLAPWQRLDAVKTFVFPALNFSMRCGSLGKAEWSRLDTTLRPLIKKTLYLPANATNDYLYGSSAAGAIGIPVAAEISDVCRIDNAFKLLSSADKEVRDLALRALTDVTSKRLRRPADPGDMAAYLSGETEGEFRATATQLQSVWTEARKASRRLGVAWELEEEGPRISRGDVTLGPRKRTKVVRTLRMALTHARIHDLHQKPNQGKVMECVAADRSSSHFVRTGQFTRFTDWRFVHRARLNVVPLNAARPWATDVDQRCRVCGSHPETLPHVLCHCMTHSQAYTSRHNQIVNRVKAAASTRFTVTHENRPVGTTNLRPDLVLCRGEEAIIVDVTCPFDNRPAALIEARQKKEEKYKPVREYLQRKYQKVSVEAIVVGALGSWDPRNDRVMRRLCSKKYLRLFKKLAVSETIAASRNVYADHIAAK

SEQ ID NO: 3964 - protein, 1219 aa, Dermacentor silvarum
MAPPSRSPDVPTPPSRIPVRSPPASPSQRDLAHAQPGSQPMRHETELIVFFPLPSTFKCTEKGCSTSYSPAVWTSRRQSLQRHLEQQHGCRIVTTTHFCTLCRKILGYRPTSHGCLTKGQHEFSTPTQNQHKCTECPYSFPSRKGLDNHMKAHRRRAAAQQASSANQPASPTTSDDSNVDAPISVATPAPSNEPTPASTPGTPRRGSPNVDSPISVTTTTPAPSKEPTPASTPGTPRRGSPPTMTSTPNLTEAASPSLSEGGDSNAQLLPSPPLQQACANQDTAHDSSASSTASSPEAPMSPAAAEHSDAVSEEADLLSLAGTITDDGVLAKHAKQLRQLQREAVSDSAWLQFTDILEDAIQVVSEAVKLPAASANGKPRRPLNPENAQQIQALYRRNRRRAVRLIVEGETRLCPIPLGELEEHFSETWGPREADTSLLLSKVKRSDMAEVSLAQFTNGEVVSRLRKCENTAPGSDRLTYQHWRTTDPDAVFLTAVFNVCLRYRRTPAAWKESRTVLIHKKGDPGDAANWRPIALGSTISKLYAGCLASRLQEWIASQEVLSRCQKGFLPYDGVYEHNFVLQERLDAARAGGGQLCAAFLDFANAFGSVPHNALIDALHGAGAGADFCAVVADLYRDNKTSIIAEAGTTSPIEISAGIRQGCPLSGLLFNLVLDPVVRALQGGDKQHNVLAYADDLTPLADDPGLLQSRINVAATLSSQLGLRLNPAKCKSLHLSGQTPVGTRPTTFTVYGTPITSIGDFEAHAFLGRPVGFSVLPDRATVDEAISVGRRLLTSMLAPWQRLDAVKTFVFPALNFSMRCGSLGKAEWSRLDTTLRPLIKKTLYLPANAANDYLYGSSAAGAIGIPVAAEISDVCRIDNAFKLLSSADKEVQDLALQALTNVTSKRLRRPADPGDMAAYLSGETEGDFRATATQLQSVWTEARKASRRLGVAWELEEEGPRISRGDVTLGPRKRTKVVRTLRMALAHARNHDLHQKPNQGKVMECVAADRSSSHFLRTGQFTRFADWRFVHRARLNVVPLNAARPWATAVDQRCRVCGSHPETLPHVLCHCMTHSQAYTSRHNQIVNRVKAAASNRFTVTHENRPVGTTNLRPDLVLCRGEEAIIVDVTCPFDNRPAALIEARQKKEEKYKPVQEYLQRKYQKVSVEAIIVGALGSWDPRNDRVMRRFCSKKYLRLFKKLAVSETIAASRNVYADHIAAK

SEQ ID NO: 3965 - protein, 1207 aa, Rhipicephalus microplus
MPCHHDNKERAGQPHAQTQKQEAQHMNERPTTARTSRAAPTATPTGRPPRAAAGNQATRTMTLRSSQSSNSTTSTGSSPSEDSTTLSATPDSPAPTELALTPSSPLLGDLQEIPDRVSATTGTPSPTPSEAATARSRSSCASLFSQVGNASSITPSPRQHESPHSDTDHDNPRRSRPPSPDRALTPLPPLLGSTACSPSQSSRDATIPSATSEEESPPEGSRFSSRLQQDPDTARATQRTSQQGAPQQSLATAQEDPQASPSARSITHSVDSPTPPTSSEGLSIDDAGGESQDPAPQTVNPGEITLSGPIDDTSVLAEHTQRIRQLLREPATAERWDDFLSILEEAVSAVRREAKIPDNPAGGKPRVPTNPNNAQQIQSLYRRNRRRAVRIIVQGETKLCEIPLDRLEQHFAETWAPKEGNTHLLLNKARPDDMTEICLARFTSDEVAARLRRCENTAPGSDRITYRHWKEHDPEGLFLSAAFNVCLQYKQVPDAWKETRTILIHKKGDPSEVTNWRPIALGNTISKLYAGCLASRMQQWVCDHDVLSRCQKGFLPHDGVFEHNFVLQERLDAARAGGGDLCVAFLDFANAFGSVPHNALIDSLRGAGAGEDFCAIIADLYRDNATRIVAEAGTTAPVTISAGIRQGCPLSGLLFNLVLDPVIRAVQGGERQHNVLAYADDLTPLADSPKKLQDRINVVAALAGQLGLRLNPKKCRSLHLSGRTPVGTRDTKFFVDGEEIPRISDYESQSFLGRPVGFSLLQDRSKVDEAISVGRTLLESMLAPWQRIDALKTFVFPALNFAMRCGQVGKAEWARLDDALRPLIKKTLYLPGNAANNYLYGSAAAGAAGIPLAADTSDACRVDNAFKLLTSADLEVRELAFEALTKIVSKRIRRQATNEELACYLSGETEGIFQARPTQLQSVWTEARKASRRLHVTWEIFEDGGTSITCDGEETLTSKKRRKVVKTLRFRMMRARDRFLQEMPNQGKAMECVAADPSSSHFMRSGKFTRFCDWRFIHRARLNLLPVNGANPWTTSADKRCRVCGYAVETLPHVLGHCMRHSMAYTSRHNKIVARVKQAASKKFTVTHENRAVGTTNLRPDLVLARGEEAIIVDVTCPFDNRLKALEAARLEKERKYEPVRDFLLRRYQRVTIEAVVVGMLGSWDPANDRVFKKLCSRRYLRLLKKLAVSETIAASREVYCAHVAIK

SEQ ID NO: 3966 - protein, 1287 aa, Ixodes scapularis
MADPAACSPTMPPNQMSGTRRRSSGIPVPSPRTPTAPNPPGPPQSVLSEGQQPRRDGEMLFVSFPAPHVFKCPEEGCSAAYTAAAWTAKRQSLQRHLEGDHGMRIRRTVNLCTLCGATLGTRPTSHPCLANGRAAAQATQQRYQCNKCPQSFPSRKGLHNHLQWHGKEEAKQLRAASSQASTTPTEEAQQPPATPAASAVSSEPGELDQQPPPCTSPVHGADSEQSRRLATPTPEDQSTKGTLASSPIIQATGETPSALAESPSASSQASTTPMEEAQQPPATPAASPVSGEPKTLEQQPLPCTSPVRGDGSEESRLLGTPTPEDYNTRATLASTPITQATGETPSTLAESPMDAMATPSRLFTQDCPSQGGSLQNSDQQEDTVETAPAKLEDDSSVLAEHTKKLRRLLTRAPNADNWAEFGSILDDAISVIATTVKLPDATADGRPRREVNPQNAQQIQSLYRRNRRRAVRLIAEGPSTLCPIPPDELEAYFSTVWAPKQADTTLLTRRMPAPGELSLAAFTEDEVAARLRRCENTAPGGDRLTYHHWRTVDPEGSFLAAVFNCCLRHRRVPACWKASRTVLIHKKGEKRDPTNWRPISLGNTIAKLYAGCLASRLQGWLCDHGILSQCQKGFLPHDGVFEHNFVLQERLDAARTGGGDLCVAFLDYANAFGSVAHNALVDSVRGAGTGDAFASIIQDLYEDNTTAIISEGGTTEPVAIKAGIRQGCPLSGLLFNLVLDPVIRAVQGGQRQHKILAYADDLTPMGGSPAELQTRINVVTALSSGLGLQLNPSKCRTLHLTGRQPVGTRPTTFCIGEAEIPHMTDFEAHTFLGRPVGYRVLPDTACVDDAIALGRCLLSSMLAPWQRLDAIKTFLYPALNFAMRVGAVGKEEWRRLDDTLRPLIKRTLYLPANSSNKYLYGSAGAGVAGIPEAADISDACRIDGAFKLLSSPDSEVRDLALQAVTRVTEKRLRRPVAAEDVAAYLSGDTEGDFRATSTQLQSVWTEARKASRRAGVTWELVPEGARIACGGTTISPKHRHKVIRTLRGISTAANDRALHQQPSQGKAMECVAADRASSHFMRSGRYTRFTDWRFIHRARLNLLPLNGARPWASAVDQRCRACGYQQETLPHVVCHCMVQSQALTRRHNNIVNRIKAAATPKFTVTHENQPVGESSLRPDLVLARGEEAIIIDVTCPFDNRRAALLEARQQKIEKYEAIKQYLCRRYQRVTVAAVIVGALGSWDPDNDATLRRLCSRSYLRLMKKLIVSETIASSRDIYASHIAGKRL

SEQ ID NO: 3967 - protein, 1285 aa, Ixodes persulcatus
MADPTACSPTVPPDRTSGTRRRSSGIPVPSPPTPRASNPPAPPQSALGEGQQPRRDGDMLFVSFPAPHVFKCPEEGCSAAYTATAWTAKRQSLQRHLEGDHGMRIRRTVNLCTLCGATLGTRPTSHPCLANGRAAAAPTQQRHQCTKCPHSFPSRKGLHNHLQWHSKEEAKQLRAASSQASTTPMEEAQQPPATLAACNTPMLGTDMSLAHTRAPTPGPACSSMPDPVTSTPESNRQPTPMALLDTGPEQRLEAEAPPTESTSITTMSQGTSQDPDPPDTSLGPTAHEPAVESSDPKAAEVAQEEVLLEIGDRDHTSTPGSPTANDQTQAGDTTIEADVAHEDVPTSTGVRDPTSTPESSTLTDQTEAGSMTETGDITHDEDPTGTTTEWEPTDDSCILQEHTRRLRRLLGEPVSPAGWSSFTTTLEDAIEAVTTAVKLPSVTSGGRPRREVNPNCPQQIQSLYRRNRRRAVRLIVEGPSTQCPVPLDELQAHFTTTWAPREVDTDLLMARVPAAGEISMAAFTDDEVATRLRRCESTAPGGDRLTYQHWRTVDPEASFLAAAFNICLRHRRVPDTWRESRTILIYKKGGRQDPTNWRPISLGCTIAKLYAGCFAARLQQWLSDHRVLSRCQKGFMPHDGVFEHNFVLQERLDAARTGGGDLCVAFLDYANAFGSVAHNALVDAVRGAGCGEAFASIVEDLYCGNTTSIVGEAGITEPINISSGIRQGCPLSGLLFNLVLDPVIRAVQGGEGQHNILAYADDLTPLADNPEALQQRINIVAALSSRLGLRLNPAKCRTLHLSGQHPVGTRPTRFLIEREPVPTIGDFVGHAFLGKPVGYRVLHDDATISDAVDLGKRLLNSVLAPWQRLDAVKTFLFPALNFAMRAGVLGKVEWRRLDDALRPLLKRTLYLPSNACNEYLYGSAAAGAAGIPVAADTSDACRVDGAFKLLSSADAEIRDMALRAVTQVVSKRLRRVASAEDVERYLTGETEGDFRATPTQVQSVWTEARKASRRLEVGWELQPDGARITCGDVSISAKHRHRVMRTLRLSLTAARDTALQQKPNQGKVMECVASDPTSSHFMRSGRHTRFADWRFVHRARLNLLPLNGARPWAAAADQRCRACGYPRETLPHVLCHCMVQSPALTDRHDQVVSRIRAAAAGRFTITHENQPVGGTSLRPDLVLVRGEEALIIDVCCPFENRRAALEEARLEKISKYEPVRQLLLRRFQRVVVEAVVVGALGSWDPANDRVMRRLCSRPHARTLKRLIVSETIAKSRDIYVKHVGK

SEQ ID NO: 3968 - protein, 1052 aa, Ixodes scapularis
MQLTPMALPSPNPQLPPEAEVPLGETTRDTTPTQSTPKDRDTFAARPLLGLTANDPAKDGSDTEAAEAAHEEAPSNTRDQDPTSTPMGATSNDQTEAGSVTVGADAADEEVPTNTGDRDITSTPRSSTPNDQTDAGNVTETGDVGHCEDPAGTSAPWEPTDESCVLYEHTKRLRRLLREPVSAAGWSSFTTTLEAAIEAVTTAVKLPSATSGGRPRREVNPNCPQQIQSLYRRNRRRAVRLIVEGPSTQCPVPLDELQAHFTTTWAPREVDTDLLMARVPAAGEVSMAAFTDDEVATRLRRCESTAPGGDRLTYQHWRTVDPEASFLAAAFNICLRHRRVPDTWRESRTILIYKKGDRQDPTNWRPISLGCTVAKLYAGCFAARLQQWLSDHRVLSRCQKGFMPHDGVFEHNFVLQERLDAARTGGGDLCVAFLDYANAFGSVAHNALVDAVRGAGAGEAFASIVEDLYSGNTTSIVGEAGITEPINISAGIRQGCPLSGLLFNLVLDPVIRAVQGGEGQHNILAYADDLTPLADDPGTLQQRINIVAALSSRIGLRLNPAKCRTLHLSGQHPVGTRPTRFLIEREPVPAIGDFVGHAFLGRPVGYRVLHDDATISDAVDLGKRLLNSVLAPWQRLDAVKTFLFPALNFAMRAGTLGKVEWRRLDDALRPLLKRTLYLPSNACNEYLYGSAAAGAAGIPVAADTSDACRVDGAFKLLSSADAEIRDMALRAVTQVVSKRLRRVAAAEDVERYLTGETEGDFRATSTQVQSVWTEARKASRRLEVGWELQPDGARITCGDVSVSAKHRHRVIRTLRLILTAARDTALQQKPNQGKVMECVASDPTSSHFMRSGRHTRFADWRFVHRARLNLLPLNGARPWAGAADQRCRACGYPRETLPHVLCHCMVQSRALTDRHDQVVSRIRAAAAGRFTITHENQPVGGTSLRPDLVLVRGEEALIIDVCCPFENRRAALEEARLQKITKYEPVRQLLLRRFQRVAVEAVVVGALGSWDPANDRVMRRLCSKPHARTLKRLIVSETIAKSRDMYVKHVGK

SEQ ID NO: 3969 - protein, 1286 aa, Ixodes scapularis
MADPAACSPTMPPNQMSGTRRRSSGIPVPSPRTPTAPNPPGPPQSVLSEGQQPRRDGEMLFVSFPAPHVFKCPEEGCSAAYTAAAWTAKRQSLQRHLEGDHGMRIRRTVNLCTLCGATLGTRPTSHPCLANGRAAAQPTQQRYQCNKCPQSFPSRKGLHNHLQWHGKEEAKQLRAASSQASTTPTEEAQQPPATPAASAVSSEPGELNQQPPPCTSPVHGADSEQSRRLATPTPEDQSTKGTLASSPIIQATGETPSALAESPSASSQASTTPMEEAQQPPATPAASAVSGEPKTLEQPLPCTSPVRGDGSEESRLLGTPTPEDYNTRATLVSTPITQATGETPSTLAESPMDAMATPSRLFTQDCPSQGGSLQNSDQQEDAVETAPAKLEDDSSVLAEHTKKLRRLLTRAPNADNWAEFGSILDDAISVIATTVKLPGATADGRPRREVNPQNAQQIQSLYRRNRRRAVRLIAEGPSTLCPIPPDELEAYFSTVWAPKEADTTLLTRRMPAPGELSLAAFTEDEVAARLRRCENTAPGGDRLTYHHWRTVDPEGSFLAAVFNCCLRHRRVPACWKASRTVLIHKKGEKRDPTNWRPISLGNTIAKLYAGCLASRLQGWLCDHGILSQCQKGFLPHDGVFEHNFVLQERLDAARTGGGDLCVAFLDYANAFGSVAHNALVDSVRGAGTGDAFASIIQDLYEDNTTAIISEGGTTEPVAIKAGIRQGCPLSGLLFNLVLDPVIRAVQGGQRQHKILAYADDLTPMGGSPAELQTRINVVTALSSGLGLQLNPSKCRTLHLTGRQPVGTRPTTFCIGEAEIPHMTDFEAHTFLGRPVGYRVLPDTACVDDAIALGRCLLSSMLAPWQRLDAIKTFLYPALNFAMRVGAVGKEEWRRLDDTLRPLIKRTLYLPANSSNKYLYGSAGAGVAGIPEAADISDACRIDGAFKLLSSPDSEVRDLALQAVTRVTEKRLRRPVAAEDVAAYLSGDTEGDFRATSTQLQSVWTEARKASRRAGVTWELVPEGARIACGGTTISPKHRHKVIRTLRGISTAANDRALHQQPSQGKAMECVAADRASSHFMRSGRYTRFTDWRFIHRARLNLLPLNGARPWASAVDQRCRACGYQQETLPHVVCHCMVQSQALTRRHNNIVNRIKAAATPKFTVTHENQPVGESSLRPDLVLARGEEAIIIDVTCPFDNRRAALLEARQQKIEKYEAIKQYLCRRYQRVTVAAVIVGALGSWDPDNDATLRRLCSKSYLRLMKKLIVSETIASSRDIYASHIAGKRL

SEQ ID NO: 3970 - protein, 1023 aa, Ixodes scapularis
MKLKDNWVLSLLGLLAKIKVLGSAASGEPKTLEQQPLPCTSPVRGDGSEESRLLGTPTPEDYNTRATLASTPITQATGETPSTLAESPMDAMATPSRLFTQDCPSQGGSLQNSDQQEDAVETAPAKLEDDSSVLAEHTKKLRRLLTRAPNADNWAEFGSILDDAISVIATTVKLPDATADGRPRREVNPQNAQQIQSLYRRNRRRAVRLIAEGPSTLCPIPPDELEAYFSTVWAPKQADTTLLTRRMPAPGELSLAAFTEDEVAARLRRCENTAPGGDRLTYHHWRTVDPEGSFLAAVFNCCLRHRRVPACWKASRTVLIHKKGEKRDPTNWRPISLGNTIAKLYAGCLASRLQGWLCDHGILSQCQKGFLPHDGVFEHNFVLQERLDAARTGGGDLCVAFLDYANAFGSVAHNALVDSVRGAGTGDAFASIIQDLYEDNTTAIISEGGTTEPVAIKAGIRQGCPLSGLLFNLVLDPVIRAVQGGQRQHKILAYADDLTPMGGSPAELQTRINVVTALSSGLGLQLNPSKCRTLHLTGRQPVGTRPTTFCIGEAEIPHMTDFEAHTFLGRPVGYRVLPDTACVDDAIALGRCLLSSMLAPWQRLDAIKTFLYPALNFAMRVGAVGKEEWRRLDDTLRPLIKRTLYLPANSSNKYLYGSAGAGVAGIPEAADISDACRIDGAFKLLSSPDSEVRDLALQAVTRVTEKRLRRPVAAEDVAAYLSGDTEGDFRATSTQLQSVWTEARKASRRAGVTWELVPEGARIACGGTTISPKHRHKVIRTLRGISTAANDRALHQQPSQGKAMECVAADRASSHFMRSGRYTRFTDWRFIHRARLNLLPLNGARPWASAVDQRCRACGYQQETLPHVVCHCMVQSQALTRRHNNIVNRIKAAATPKFTVTHENQPVGESSLRPDLVLARGEEAIIIDVTCPFDNRRAALLEARQQKIEKYEAIKQYLCRRYQRVTVAAVIVGALGSWDPDNDATLRRLCSRSYLRLMKKLIVSETIASSRDIYASHIAGKRL

SEQ ID NO: 3971 - protein, 1157 aa, Haemaphysalis longicornis
MVTEETAESRRRSSGIPVPSPRTAGTPPAPPQDEGVQPRREGDTLFVSFPAPNVFKCTEGSCSSAYTATAWTAKRQSLQRHLEGDHGMRIRRTVNLCAVCGATLGAKPTLHPCLANGRAVAAPTQQRYQCSECPQSFPSKKGLNNHLQWHSKEEAKRLRAESSRPVTDQLPATPATAAEVDNVEGQQNETTPHSNSPQSSSTPNTTFRGETGESPQATGVSSQDASATPTRLFSQESSGQGEDDQPENTEQEGTPETSPAALDDSSLVLAEHTKRLRQLLKSPPDDNNWAEFETTLEDAINVVSATVKLPEATSEGRPRREINPENAQQIQSLYRRNRRRAVRLITEGQSSMCPIPPGELEAHFRTVWGPKEADTSLLTQRMPAPGEMNLATFTEDEVAGRLRRCENTAPGCDRLTYQHWRTVDPEGHFLAAAFNCCLRHQRVPACWKASRTVLIYKKGEPGDPTNWRPISLGNTIAKLYAGCLASRLQGWLCEHGILSQCQKGFLPHDGVFEHNFVLQERLDAARSGGGDLCVAFLDYANAFGSVAHNALIDAVRGAGAGDAFANIIRDLYEDNTTEIICTGGATEPIAIQAGIRQGCPLSGLLFNMVLDPVVRAVQGGERQHKILAYADDLTPLGNSPTELQVRVNVVAALSSRLGLKLNPAKCRTLHMSGQQPVGTRPTTFHIGESAIPNMKDLESHNFLGRPVGYRLLSDTACVDDAIALGKRLLTSMLAPWQRLDAIKTFLYPALNFAMRVGAVGKEEWRRLDDTLRPLIKHTLYLPANSSNKYLYGSAGAGAAGIPEAADISDACRIDGAFKLLSSPDPEVRDLALQAVSKVTEKRLRRPATTEDVESYLSGDTEGDFRATSTQLQSVWTEARKASRRSGVTWELVPEGARITCGGTTLSPKQRHKVIRTLRGITTAAQDAALHQQPSQGKAMECVAADRASSHFMRSGRYTRFADWRFVHRARLNLLPLNGARPWASAADQRCRACGYQQETLPHVVCHCMVQSQALTRRHNAIVNRLKAAATPKFTVTHENRPVGDSNLRPDLVLVRGEEAIILDVACPFENRRAALREARQQKLSKYEPIRQYLCRRYQRVTVAAVIVGALGSWDPDNDAILRRLCSRSYLRLMKKLIVSETIAHSRDIYAKHIAGKR

SEQ ID NO: 3972 - protein, 1014 aa, Ixodes persulcatus
MEEVQEPPATPAASAASGEPEELEQQPPRYTSPVHGDDSEESRRPATPTPEDYNTRATLASTPITQVTGETPSALAESPMDGAATPSRLFTQDCPSQGGSLQDGDQQEDAAEAAPAKLEDDSSVLSEHTKKLRRLLTSAPNADNWAEFGSILDDAISVVATTVKLPAATAEGRPRREVNPQNAQQIQSLYRRNRRRAVRLIAEGPSTLCPIPPDELEAYFTTVWAPKEADTTLLTRRMPAPGELSLAAFTEDEVAARLRRCENTAPGGDRLTYHHWRAVDPEGSFLAAVFNCCLRHRRVPACWKASRTVLIYKKGEKRDPTNWRPISLGNTIAKLYAGCLASRLQGWLCDHGILSQCQKGFLPHDGVFEHNFVLQERLDAARTGGGDLCVAFLDYANAFGSVAHNALVDSVRGAGTGDAFASIIQDLYEDNTTAIISEGGTTEPITIQAGIRQGCPLSGLLFNLVLDPVIRAVQGGQRQHKILAYADDLTPMGSSPAELQARINVVAALSSGLGLQLNPSKCRTLHLTGQHPVGTRPTTFCVGETEIPHMADFEAHTFLGRPVGYRVLPDTACVDDAIALGRCLLSSMLAPWQRLDAVKTFLYPALNFAMRVGAVGKEEWRRLDDTLRPLIKRTLYLPANSSNKYLYGSAGAGVAGIPEAADISDACRIDGAFKLLSSPDGEVRDLALQAVIRVTEKRLRRPVAAEDVAAYLSGDTEGDFRATSTQLQSVWTEARKASRRAGVTWELVPEGARIACGGTTISPKHRRKVIRTLRGITTAANDRALHQQPSQGKAMECVAADRASSHFMRSGRYTRFTDWRFIHRARLNLLPLNGARPWASAADQRCRACGYQQETLPHVVCHCMVQSQALTRRHNNIVNRIKAAATPKFTVTHENQPVGESSLRPDLVLARGEEAIIIDVACPFDNRRAALLEARQQKIEKYEPIKQYLCRRYQRVTVAAVIVGALGSWDPDNDATLRRLCSKSYLRLMKKLVVSETIACSRDIYASHIAGKRL

SEQ ID NO: 3973 - protein, 1225 aa, Rangifer tarandus
MSSPPTSSAFTASRSRIPVRSPSTSPSPANNQEPPQPGSQPRRDGNSLTLFFPLARTFRCTEEGCATAYSPVLWTSRRQSLTRHLESEHGVRISQVTHFCTLCHREVGPRPKAHPCLTGEKLEVASTDLHSHKCGDCQLSFPSKRGLENHHMWHRKQTAMQGLPPRPVPPLAATRRLRRTPSRDARPPDLEPPQAEDISQDARTPPATPQQDTNVEEAGQEEPRTLTPISPPPESSTTRAATPALIFPTSPSQQDDQGIPVPASSTPNSSREMENSQDSPSLQAGDGLQAHLSTISEESNTSQLQDDDGGGHHDATATQGALTDSLSDELECEGILVDHTRRLRCLLREPASAEGWDGFLSILEEAITEVGKAVKLPKAPAGGKPRRPTNPDNAQQIQSLYRRNRRRAVRLIVDGESPMCTVPLQDLEDHFTATWGPKEVDTSLLLNKAKSSDLTEFPLDKFTEEEVLTKLRKCENTAPGNDRITYQHWKTTDPEAAFLTAAFNACLKFKRVPPAWKESRTILIHKKGPVEDVTNWRPIALGSTISKLYAGCLATRLQRWIAEHELLSRCQKGFLPHDGVFEHNFVLQERLDAARGGGGELCVAFLDFSNAFGSVAHNALIDALRGAGAGSDFCSIVADLYRDNTTTIIGQEGSTRPIDISAGIRQGCPLSGLLFNFVIDPVLRAVQGGERQHNILAYADDLTPLANDPEMLQARINTVESLSSRLGLQLNPAKCRTLHLSGKTPVGTRLTPFFIAGAEIPIIQDFESQTFLGRPVGFNVFPDRATVDQAINTGRRLLSSMLAPWQRLDAVKTFVYPALNFSMRCGVLGKSEWARLDDALRPLIKKSLYLPGTAANEYLYGSAASGSVGIPLAAELSDICRIDNAFKLLSSLDLEVRDLALHAVTAITTKRLRRPATDEDIAAYLTGETEGDFRARATQLQSVWTEARKASRRLAVTWEMQEGGPSITRADVTVTQKQRTKVVRTLRSIAMRARDHNLHEKPNQGKVMECVAADRSSSHFMRTGRFTRFCDWRFVHRARLNLLPLNGARPWDVAADQRCRRCGQDKESLPHVLCHCMRQSVAYTSRHNRIVDRLKTAAEKRFTVTHENRPVGDTNLRPDLVLARGETAIVIDVTCPFDNRKTAFDAARESKVAKYEPVRQYLLRKFQRVSIEAVVVGALGSWDPNNDKVMRRLCSKRYMRLFKKLAVSDTIAASREVYAKHVAAN

SEQ ID NO: 3974 - protein, 1338 aa, Emmelina monodactyla
MEKTLKKYNLRSRLSSNATSVDSEEPFSDTDSAYRPPSRSSITTVSSLGDVVQVAPVVDEPVPNSKTRARRKWTFDMNQFILRTYLQLTSLDTDTKQYVTPLHTLFMQQFPDVTVSPQQLANQRRAIVRSGLLTEDVIHSIYNEVQSELANGTETIIPSQSSYYENSSLINSNTKTKWSLSEQLELLYCFYQSRIRGGGYIKYLEKLFKERNANNLKVQMFDGNKLATQARSIISRKVISDSTLAELKRRAETDYNLSETPIVNTTVSTHILNSTNNTLNTIPEELSNTTDTALFSSNSNNNFNEAIQNQPNASLGSSSQESIVDIPNNFLDNIKSQFESALQRFRNSNPTTRPQIPKQNSSTKLSNIIHCLNNHILPLYVNPDIDFQTLHSLIYSAAYTAALANGSKIKCLNHERADRRDRHKPAWQKRLEKRIVKLRFYIGHTTQFIAGNQNPKILATVREVQQKYTIHATHENNNLQIMDYLDTLKQKLNTLASRLKRYLKCTKRKSENLLFNIAEKQFYRKLSSNNENQSNDLPSPDALKDFWASIWDVPVTHNENAEWIHNIKQDHIPEQKFDFISPEIFHYVLNRSHNWKSPGTDNIQIYWYKKLTCLHPYIYTHINKFIESPDTLPEFITQGITYMIPKSAETINPSQYRPITCLQTIYKLITSCISESIYKHLDDNQILCEAQKGCIKASKGCKEQLVIDSVLTNQVYKTKGSIHSMFIDYQKAFDSIPHSWLIYVLKLYKVNPLLITFLESVMKTWTTKIKIKTDSTTIATESINIKRGIFQGDALSPLWFCMALNPLSQLLNETMLGFKLKNNNEHHIISHLLYMDDIKLFANTKDNLFKLADVTQNFSRDINMSFGVDKCKTQSINKGEIDQQSYPLATGKEIESLGENQYKYLGFNQCRIINHKETKQEITKQFNKRLIKILKTTLNSRNLVKAINTYVIPILTYSFGIIKWTNTDLLKLQTKINTMMTKHRKHHPKSCSQRLTLSRKDGGRGLVHIKNLHNKQITNLRHYFHLKSSKSELHKFINVTDRKLTPLNLCATEVQTNESQISREQRVTEWRQKSLHGRHIADLEEAHVDKDASNAWLRRGEMFPETEAFMLSIQDQVVRTKNYRKFIMKEPDLVDVCRRCNAGSETIQHITGSCRALVQTDYKHRHDQVAAVLHQHLAHKFKFVAKKEPYYKYCPQTVLDNSSIKIYWDRTIITDRTVSSNRPDITLYNKTNKTIYLIDIAVPNTNNLQKTINDKLAKYQDLGIEIKRQWKADTVHIVPIVISSTGVVPKSLKHNLTTLGLPHQIINTIQKAVILNTCRITRKFLTPLSQLTNSTLVH

SEQ ID NO: 3975 - protein, 1135 aa, Emmelina monodactyla
MYCFYQSRIRSGGYIKHLEQLYKERNPNNLKAQIFDGNKLATQARSVISRNVISDSTLAEIKRRAEIDYSVLDIQITISDSNTQLSIDPNIASNTISDEPPESSSQFSSFSPISALIEPLVNANTDLTKNIKEQFENSFRQFSNSNPITRPRIPKQNPSKRLSEIIQFLNNNVLPLYVQQDIDFNTLHTLIYSAAYTTVICNGGKIANITPNTENHKKSYKPPWQKRLEKRILKLRYYIGHTTQYISGNRNPKILATVHLIKEQFHKHSTYETNNTQIQHFLDTLKQKLNTLASRLKRYLKCTNRKKENAVFTHAEKQFYRKIASKNVNLNINSTYPQPDELKNYWAQIWENPVAHNDSSNLCSKIKQDNIPEQVFEHITPELFHQVLNKSHNWKAPGSDNIHNFWYKKLTYLHPYIHNHINTFIKSPNTLPDFVTRGITYMIPKDTDTNDPSKYRPITCLQTIYKLTTACISESIYKHLDTHKIIHEEQKGCIKASRGCKEQLIIDSVATKHAHKTKNNIHTMFIDYRKAFDSVPHTWLIYVLKLYKINPAIITFLESAMRSWKTELKLKTENETFTTQLIKIQRGIFQGDALSPLWFCLALNPLSHLLKAENIGYKLQHNRTYHILSHLLYMDDIKLFANSKHNLFKLADITQEFSENIKMTFGIEKCKTQSINKGTIENNPYLLNCGEVIDPLGENAYKYLGFNQSRLINHKESKQELSKEFNKRLNKILKSSLNSRNIVKAVNTFVIPILTYSFGVIKWTRTDLLNFQRKINTSMTKERKHHPKSCTQRLTLSRKDGGRGITHITNLHNKQISNLRNYFKSKSTASHLHTYINKLDINLTPLNLSNTEIQPNESQVSREQRISEWKQKTLHGRHPADLDEAHVDKDASNAWLQRGELFPETEAFMLGIQDQVIKTKNYRKFILKEPHLVDLCRRCNSGNETIQHVTGSCKALVQNDYKHRHDQVAAIIHQHLAHRHKFIKNKIPYYKYSPETVLDNSTIKIYWDRTIITDRTVAANRPDITVHDKIKKIIYLIDIAVPNTNNLQKTTNEKLAKYQDLGIELKKQWRADTVHIVPIVISSTGVVPRSLKLNLNTLGLPHNTAYTIQKAVILNTCRITRKFLTPLAQINTTDI

SEQ ID NO: 3976 - protein, 1239 aa, Emmelina monodactyla
MENNKTNYNLRSRLNSIATSVSSREQDFSETDSVYRPPSTSSFTSVSSLGDVVQETDNVNTPAPNSKSRATRRKWTNVMNRFILRAYLQLTSLDTDTKNYVTPLHSLFMQKFPEVTVSPQQLANQRRAIVRNKLLTDEEINAIYNEIQTESTNNQHSQLEPRSHNNTCNKSKWTVSEQLELLYCFYRSRIRGGGYVKYLEQLFKERNPNSSKSLVFDGNKLATQARSVISRKAISETTLAELKRRAEADFSALETPVIPSEPQINTATDIHLTLNSIPEEPLHLSDVNVSPVNNPIISDSRQMLPEQLNKDYAENIKTQFDSVFQQFRHTDPINRPLIPKLNCSKRLANIIKCLNEIVLPLYVTPDIDFLSLHTLIYSAAYTTSVCNGNKIKTTNTEQRKPKNKPPWQKRLEKRVTKLRYYIGHTTQYVAGNHKPKILSTIQEIRQKFTIHATHENNNDDIKDYLDTLKQKLSTLASRLKRYLKCTERKKENSLFNSAEKQFYRNISSKYTNTSKNGFPTAQALKDYWANIWENPVAHNENAEWVEKIEENQTLTEQQFDFISPEVFHKVLQRSHSWKSPGTDNIHIFWYKKLTFLHPYIHTSINTFIKSPDTLPSFITQGITYMIPKDSDTLDPSKYRPITCLQTIYKLTTACISETIYKHLDTNKIIHEEQKGCIKASRGCKEQLVIDSIVTKHAHKTKNNIHTMFIDYRKAFDSVPHTWLIYVLKLYKINPSIIAFLDSTMKTWSTNLKIKSDCETVTTESISIRRGIFQGDALSPLWFCMALNPLSQLLNDTDTGYTLKHNNNHRVLSHLLYMDDIKLFANNKNGLFKLADVTQKFSHDIKMSFGIDKCKTQSINRGILEKNSYILNTGDKIESLGEDTYKYLGFHQSRMLNHKEIKQDITKQFTSRLNKILKTTLNSRNIVKAINTFVTPILTYSFGIIRWTKSDLIKLQRKINTTLTKQRKHHPKSCIQRLTLSRKDGGRGLIHIQNLHNKQVSNLRQYFHSKSPTSLLHSLINQLDNNLTPLNLSHSEPQQNENQVSREQRFTEWRQKSLHGRHLADLNEAHVDKDASNAWLRLGELFPETEAFMLGIQDQVIKTKNYRKFILKEPNLVDLCRRCSSGSETIQHITGSCKALVQTDYKHRHDQVAAVLHQHLAHRYKFVDKKVPYYKYCPETVLDNNSIKIYWDRTIITDRTVSANRPDITLYDKISKSIYLIDIAVPNTNNVQKTVHEKLT

SEQ ID NO: 3977 - protein, 1262 aa, Emmelina monodactyla
MEKTKKKYNLRSRLSSNATSVDSEEPFSDTDSAYRPPSRSSITTVSSLGDVVQVAPVVDEPVPNSKTRARRKWTFDMNQFILRTYLQLTSLDTDTKQYVTPLHTLFMQQFPDVTVSPQQLANQRRAIVRSGLLTEDVIHSIYNEVQSELANGTETIIPSQSSYSENSSLINSNTKTKWSLSEQLELLYCFYQSRIRGGGYIKYLEKLFKERNANNPKVQMFDGNKLATQARSIISRKVISDSTLAELKRRAEIDYNLSETPIANTTVSTHILNSTNNTLNTIPEELSNATETSLLSSNSNNNFNEAIQNQPNVSLGSSSQESIVDIPNNFLDNIKSQFESALQRFRYSNPTTRPQIPKQNSSKKLSNIIHCLNNHILPLYVNPDIDFQTLHSLIYSAAYTAALANGSKIKCLNHERADRRDRHKPAWQKRLEKRIVKLRFYIGHTTQFIAGNQNPKILATVREVQQKYSIHATHENNNLQIMDYLDTLKQKLNTLASRLKRYLKCTKRKSENLLFNIAEKQFYRKLSSNNDNQSNDLPSPDALKDFWASIWDLPVTHNENAEWIHNIKQDHIPEQKFDFISPEIFHYVLNRSHNWKSPGTDNIQIYWYKKLTYLHPYIYTHINKFIESPDTLPEFITQGITYMIPKSAETINPSQYRPITCLQTIYKLITSCISESIYKHLDDNQILCEAQKGCIKASKGCKEQLVIDSVLTNQVHKTKGSIHSMFIDYQKAFDSIPHSWLIYVLKLYKVNPLLITFLESVMKTWTTKIKIKTDSTTIATESINIKRGIFQGDALSPLWFCMALNPLSQLLNDTMLGFKLKNNNEQHTISHLLYMDDIKLFANTKDNLFKLADVTENFSRDINMSFGVDKCKTQSINKGKIDQQSYPLATGKEIESLGENQYKYLGFNQCRIINHKETKQEITKQFNKRLIKILKTTLNSRNLVKAINTYVIPILTYSFGIIKWTNTDLLKLQTKINTMMTKHRKHHPKSCSQRLTLSRKDGGRGLVHIKNLHNKQITNLRHYFHLKSSKSELHKFINVTDRKLTPLNLCATEVQTNESQISKEQRVTEWRQKSLHGRHIADLEEAHVDKDASNAWLRRGEMFPETEAFMLSIQDQVVRTKNYRKFIMKEPDLVDVCRRCNAGSETIQHITGSCRALVQTDYKHRHDQVAAVLHQHLAHKFKFVAKKEPYYKYCPETVLDNSSIKIYWDRTIITDRTVSSNRPDITLYNKTDKTIYLIDIAVPNTNNLQKTINDKLAKYQDL

SEQ ID NO: 3978 - protein, 1322 aa, Emmelina monodactyla
MEKTKKTYNLRSRLNSIASSTYNREQDFSDNESVYRPPSSLSTNSVSTLGDAVQEANEVNLPALNSGSTKRRKWTNEMNRFILRAYLQITSLDTDTKNYVTPLHTLFIEKFPQVTVTPQQLANQRRAIVRNKLLTDDEVKIIYSEIQSNSIDLSLPKPNENSRSQTVNESTYTNTKVKWSISEQLELMYCFYQSRIRSGGYIKHLEQLYKERNPNNPKAQIFDGNKLATQARSVISRNVISDSTLAEIKRRAEIDYSVLDIQNTISNSNTQLSIDPNIASNTISDEPPESSSQFSSFSPISAPIEPLVNANTDLTKNIKEQFENSFRQFSNSNPITRPRIPKQNPSKRLSEIIQFLNNNVLPLYVQQDIDFNTLHTLIYSAAYTTVICNGGKIANITPNTENHKKSYKPPWQKRLEKRILKLRYYIGHTTQYISGNRNPKILATVHLIKEQFHKHSTYETNNTQIQHFLDTLKQKLNTLASRLKRYLKCTVRKKENAVFTHAEKQFYRKIASKNVNLNINSTYPQPDELKNYWAQIWENPVAHNDSSNLCSKIKQDNIPEQVFEHITPELFHQVLNKSHNWKAPGSDNIHNFWYKKLTYLHPYIHNHINTFIKSPNTLPDFVTRGITYMIPKDTDTNDPSKYRPITCLQTIYKLTTACISESIYKHLDTHKIIHEEQKGCIKASRGCKEQLIIDSVATKHAHKTKNNIHTMFIDYRKAFDSVPHTWLIYVLKLYKINPAIITFLESAMRSWKTELKLKTENETFTTQLIKIQRGIFQGDALSPLWFCLALNPLSHLLKAENIGYKLQHNRTYHILSHLLYMDDIKLFANSKHNLFKLADITQEFSENIKMTFGIEKCKTQSINKGTIENNPYLLNCGEVIDPLGENAYKYLGFNQSRLINHKESKQELSKEFNKRLNKILKSSLNSRNIVKAVNTFVIPILTYSFGVIKWTRTDLLNFQRKINTSMTKERKHHPKSCTQRLTLSRKDGGRGITHITNLHNKQISNLRNYFQSKSTASHLHTYINKLDINLTPLNLSNTEIQPNESQVSREQRISEWKQKTLHGRHLADLDEAHVDKDASNAWLQRGELFPETEAFMLGIQDQVIKTKNYRKFILKEPHLVDLCRRCNSGSETIQHVTGSCKALVQNDYKHRHDQVAAIIHQHLAHRHKFIKNKIPYYKYSPETVLDNSTIKIYWDRTIITDRTVAANRPDITVHDKIKKIIYLIDIAVPNTNNLQKTTNEKLAKYQDLGIELKKQWRADTVHIVPIVISSTGVVPRSLKLNLNTLGLPHNTAYTIQKAVILNTCRITRKFLTPLAQINTTDI

SEQ ID NO: 3979 - protein, 1119 aa, Emmelina monodactyla
MFDGNKLATQARSIISRKVISDSTLAELKRRAEIDYNLSETPIVNTTVSTHILNSTNNTLNTIPEELSNATETSLLSSNSNNNFNEAIQNQPNVSLGSSSQETIVDIPNNFLDNIKSQFESALQRFRNSNPTTRPQIPKQNSSKKLSNIIHCLNNYILPLYVNPDIDFQTLHSLIYSAAYTAALANGSKIKCLNHERADRRNRHKPAWQKRLEKRIVKLRFYIGHTTQFIAGNQNPKILATVREVQQKYTIHATHETNNLQIMDYLDTLKQKLNTLASRLKRYLKCTKRKSENLLFNIAEKQFYRKLSSNNDNQSNDLPSPDALKDFWASIWDLPVTHNENAEWIHNIKQDHIPEQKFDFISPEIFHYVLNRSHNWKSPGSDNIQIYWYKKLTYLHPYIYTHINKFIESPDTLPEFITQGITYMIPKSAETINPSQYRPITCLQTIYKLITSCISESIYKHLDDNQILCEAQKGCIKASKGCKEQLVIDSVLTNQVHKTKGSIHSMFIDYQKAFDSIPHSWLIYVLKLYKVNPLLITFLESVMKTWTTKIKIKTDSTTIATESINIKRGIFQGDALSPLWFCMALNPLSQLLNDTMLGFKLKNNNEQHIISHLLYMDDIKLFANTKDNLFKLADVTQNFSRDINMSFGVDKCKTQSINKGKIDQQSYPLATGKEIESLGENQYKYLGFNQCRIINHKETKQEITKQFNKRLIKILKTTLNSRNLIKAINTYVIPILTYSFGIIKWTNTDLLKLQTKINTMMTKHRKHHPKSCSQRLTLSRKDGGRGLVHIKNLHNKQITNLRHYFHLKSSKSELHKFINVTDRKLTPLNLCATEVQTNESQISKEQRVTEWRQKSLHGRHIADLEEAHVDKDASNAWLRRGEMFPETEAFMLSIQDQVVRTKNYRKFIMKEPDLVDVCRRCNAGSETIQHITGSCRALVQTDYKHRHDQVAAVLHQHLAHKFKFVAKKEPYYKYCPETVLDNSSIKIYWDRTIITDRTVSSNRPDITLYNKTDKTIYLIDIAVPNTNNLQKTINDKLAKYQDLGIEIKRQWKADTVHIVPIVISSTGVVSKSLKHNLTTLGLPHQIINTIQKAVILNTCRITRKFLTPLSQLTNSTLVH

SEQ ID NO: 3980 - protein, 892 aa, Emmelina monodactyla
MLQETTNLKSFTIQEIRQKFTIHATHENNNDDIKDYLDTLKQKLSTLASRLKRYLKCTERKKENSLFNSAEKQFYRNISSKYTNTSKNGFPTAQALKDYWANIWENPVVHNENAEWVEKIEENQTLTEQQFEFISPEVFHKVLQRSHSWKSPGTDNIHIFWYKKLTFLHPYIHTSINTFVKSPDTLPSFITQGITYMIPKDSDTLDPSKYRPITCLQTIYKLITACISETIYKHLDTNKIIHEEQKGCIKASRGCKEQLVIDSIVTKHAHKTKNNIHTMFIDYRKAFDSVPHTWLIYVLKLYKINPSIIAFLDSTMKTWSTNLKIKSDCETVTTESISIRRGIFQGDALSPLWFCMALNPLSQLLNDTDTGYTLKHNNNHRVLSHLLYMDDIKLFANNKNGLFKLADVTQKFSHDIKMSFGIDKCKTQSINRGILEKNSYILNTGDKIESLGEDTYKYLGFHQSRMLNYKEIKQDITKQFTNRLNKILKTSLNSRNIVKAINTFVTPILTYSFGIIRWTKSDLIKLQRKINTTLTKQRKHHPKSCIQRLTLSRKDGGRGLIHIQNLHNKQVSNLRQYFYSKSPTSLLHSLINQLDNNLTPLNLSHSGPQQNENQVSREQRFTEWRQKSLHGRHLADLNEAHVDKDASNAWLRRGELFPETEAFMLGIQDQVIKTKNYRKFILKEPNLVDLCRRCSSGSETIQHITGSCKALVQTDYKHRHDQVAAVLHQHLAHRYKFVDKKVPYYKYCPETVLDNNSIKIYWDRTIITDRTVSANRPDITLYDKISKTIYLIDIAVPNTNNVQKTVHEKLTKYQDLGIEIKRQWRADTVHIIPVVISSTGVVPKSLKDSLTTLGLPHHITDTIQKAVILNTCRIARKFLTPLSQITNTTPTQ

SEQ ID NO: 3981 - protein, 1018 aa, Emmelina monodactyla
MLPEQLNNDYAENIKTQFDSVFQQFRHSDPINRPLIPKLNCSKRLANIIKCLNEIVLPLYVTPDIDFLSLHTLIYSAAYTTSVCNGIKIKTTNTEQRKPKNKPPWQKRLEKRVTKLRYYIGHTTQYVAGNHNPKILSTIQEIRQKFTIHATHESNNDDIKDYLDTLKQKLSTLASRLKRNLKCTERKKENSLFNSAEKQFYRNISSKYTNTSKNGFPTAQALKDYWANIWENPVVHNENAEWVEKIEENQTLTEQQFDFISPEVFHKVLQRSHSWKSPGTDNIHIFWYKKLTFLHPYIHTSINTFIKSPDTLPSFITQGITYMVPKDSDTLDPSKYRPITCLQTIYKLTTACISETIYKHLDTNKIIHEEQKGCIKASRGCKEQLVIDSIVTKHAHKTKNNIHTMFIDYRKAFDSVPHTWLIYVLKLYKINPSIIAFLDSTMKTWSTNLKIKSDCETVTTESISIRRGIFQGDALSPLWFCMALNPLSQLLNDTDTGYTLKHNNNHRVLSHLLYMDDIKLFANNKNGLFKLADVTQKFSHDIKMSFGIDKCKTQSNNRGILEKNSYILNTGDKIESLGEDTYKYLGFHQSRMLNHKEIKQDITKQFTNRLNKILKTTLNSRNIVKAINTFVTPILTYSFGIIRWTKSDLIKLQRKINTTLTKQRKHHPKSCIQRLTLSRKDGGRGLIHIQNLHNKQVSNLRQYFHSKSPTSLLHSLINQLDNNLTPLNLSHSEPQQNENQVSREQRFTEWRQKSLHGRHLADLNEAHVDKDASNAWLRRGELFPETEAFMLGIQDQVIKTKNYRKFILKEPNLVDLCRRCSSGSETIQHITGSCKALVQTDYKHRHDQVAAVLHQHLAHRYKFVDKKVPYYKYCPETVLDNNSIKIYWDRTIITDRTVSANRPDITLYDKISKTIYLIDIAVPNTNNVQKTVHEKLTKYQDLGIEIKRQWRADTVHIIPVVISSTGVVPKSLKDSLTTLGLPHHITDTIQKAVILNTCRITRKFLTPLSHITNTTPTQ

SEQ ID NO: 3982 - protein, 1338 aa, Emmelina monodactyla
MEKTNKKYNLRSRLSSNATSVDSEEPFSDTDSAYRPPSRSSITTVSSLGDVVQVAPVVDEPVPNSKTRARRKWTFDMNQFILRTYLQLTSLDTDTKQYVTPLHTLFMQQFPDVTVSPQQLANQRRAIVRSGLLTEDVIHSIYNEVQSELANGTETIIPSQSSYSENSSLINSNIKTKWLLSEQLELLYCFYQSRIRGGGYIKYLEQLFKERNANNPKVQMFDGNKLATQARSIISRKVISDSTLAELKRRAETDYNLSETPIVNTTVSTHILNSTNNTLNTIPEELSNATETSLFSSNSNNNFNDAIQNQLNASLGSSSQESIVDIPNNFLDNIKSQFESALQRFRNSNPTTRPQIPKQNSSKKLSNIIHCLNNHILPLYVNPDIDFQTLHSLMYSAAYTAALANGSKIKCLNHERADRRDRHKPAWQKRLEKRIVKLRLYIGHTTQFIAGNQNPKILATVREVQQKYTIHATHENNNLQIMDYLDTLKQKLNTLASRLKRYLKCTKRKSENLLFNIAEKQFYRKLSSNNDNQSNDLPSPDALKDFWASIWDLPVTHNENAEWIHNIKQDHIPEQKFDFISPEIFHYVLNRSHNWKSPGTDNIQIYWYKKLTYLHPYIYTHINKFIESPDTLPEFITQGITYMIPKSAETINPSQYRPITCLQTIYKLITSCISESIYKHLDDNQILCEAQKGCIKASKGCKEQLVIDSVLTNQVHKTKGSIHSMFIDYQKAFDSIPHSWLIYVLKLYKVNPLLITFLESVMKTWTTKIKIKTDSTTIATESINIKRGIFQGDALSPLWFCMALNPLSQLLNDTMLGFKLKNNNEQHIISHLLYMDDIKLFANTKDNLFKLADVTQNFSRDINMNFGVDKCKTQSINKGKIDQQSYPLATGKDIESLGENQYKYLGFNQCRIINHKETKQEITKQFNKRLIKILKTTLSSRNLVKAINTYVIPILTYSFGIIKWTNTDLLKLQTKINTMMTKHRKHHPKSCSQRLTLSRKDGGRGLVHIKNLHNKQIANLRHYFHLKSSKSELHKFINVTDRKLTPLNLCATEVQTNESQISREQRVTEWRQKSLHGRHIADLEQAHVDKDASNAWLRRGEMFPETEAFMLSIQDQVVRTKNYRKFIMKEPDLVDVCRRCNAGSETIQHITGSCRALVQTDYKHRHDQVAAVLHQHLAHKFKFVAKKEPYYKYCPETVLDNSSIKIYWDRTILTDRTISSNRPDITLYNKTDKTIYLVDIAVPNTNNLQKTINDKLAKYQDLGIEIKRQWKADTVHIVPIVISSTGVVPKSLKHNLTTLGLPHQIINTIQKAVILNTCRITRKFLTPLSQLTNSTLVN

SEQ ID NO: 3983 - protein, 1320 aa, Emmelina monodactyla
MENNKTNYNLRSRLNSIATSVSSREQDFSETDSVYRPPSTSSFTSVSSLGDVVQETDNVNTPAPNSKSRATRRKWTNVMNRFILRAYLQLTSLDTDTKNYVTPLHSLFMQKFPEVTVSPQQLANQRRAIVRNKLLTDEEINAIYNEIQTESTNNQHSQLEPRSHNNTCNKSKWTVSEQLELLYCFYRSRIRGGGYVKYLEQLFKERNPNSSKSLVFDGNKLATQARSVISRKAISETTLAELKRRAEADFSALETPVIPSEPQINTATDIHLTLNSIPEEPLHLSDVNVSPVNNPIISDSRQMLPEQLNNDYAENIKTQFDSVFQQFRHSDPINRPLIPKLNCSKRLANIIKCLNEIVLPLYVTPDIDFLSLHTLIYSAAYTTSVCNGNKIKTTNTEQRKPKNKPPWQKRLEKRVTKLRYYIGHTTQYVAGNHNPKILSTIQEIRQKFTIHATHENNNDDIKDYLDTLKQKLSTLASRLKRYLKCTERKKENSLFNSAEKQFYRNISSKYTNTSKNGFPTAQALKDYWANIWENPVVHNENAEWVEKIEENQTLTEQQFDFISPEVFHKVLQRSHSWKSPGTDNIHIFWYKKLTFLHPYIHTSINTFIKSPDTLPSFITQGITYMVPKDSDTLDPSKYRPITCLQTIYKLTTACISETIYKHLDTNKIIHEEQKGCIKASRGCKEQLVIDSIVTKHAHKTKNNIHTMFIDYRKAFDSVPHTWLIYVLKLYKINPSIIAFLDSTMKTWSTNLKIKSDCETVTTESISIRRGIFQGDALSPLWFCMALNPLSQLLNDTDTGYTLKHNNNHRVLSHLLYMDDIKLFANNKNGLFKLADVTQKFSHDIKMSFGIDKCKTQSINRGILEKNSYILNTGDKIESLGEDTYKYLGFHQSRMLNHKEIKQDITKQFTNRLNKILKTTLNSRNIVKAINTFVTPILTYSFGIIRWTKSDLIKLQRKINTTLTKQRKHHPKSCIQRLTLSRKDGGRGLIHIQNLHNKQVSNLRQYFHSKSPTSLLHSLINQLDNNLTPLNLSHSEPQQNENQVSREQRFTEWRQKSLHGRHLADLNEAHVDKDASNAWLRRGELFPETEAFMLGIQDQVIKTKNYRKFILKEPNLVDLCRRCSSGSETIQHITGSCKALVQTDYKHRHDQVAAVLHQHLAHRYKFVDKKIPYYKYCPETVLDNNSIKIYWDRTIITDRTVSANRPDITLYDKISKTIYLIDIAVPNTNNVQKTVHEKLTKYQDLGIEIKRQWRADTVHIIPVVISSTGVVPKSLKDSLTTLGLPHHITDTIQKAVILNTCRITRKFLTPLSHITNTTPTQ

SEQ ID NO: 3984 - protein, 1338 aa, Emmelina monodactyla
MEKTKKKYNLRSRLSSNATSVDSEEPFSDTDSAYRPPSRSSITTVSSLGDVVQVAPVVDEPVPNSKTRARRKWTFDMNQFILRTYLQLTSLDTDTKQYVTPLHTLFMQQFPDVTVSPQQLANQRRAIVRSGLLTEDVIHSIYNEVQSELANGTETIIPSQSSYSENSSLINSNTKTKWSLSEQLELLYCFYQSRIRGGGYIKYLEKLFKERNANNPKVQMFDGNKLATQARSIISRKVISDSTLAELKRRAEIDYNLSETPIANTTVSTHILNSTNNTLNTIPEELSNATETSLLSSNSNNNFNEAIQNQPNVSLGSSSQESIVDIPNNFLDNIKSQFESALQRFRYSNPTTRPQIPKQNSSKKLSNIIHCLNNHILPLYVNPDIDFQTLHSLIYSAAYTAALANGSKIKCLNHERADRRDRHKPAWQKRLEKRIVKLRFYIGHTTQFIAGNQNPKILATVREVQQKYSIHATHENNNLQIMDYLDTLKQKLNTLASRLKRYLKCTKRKSENLLFNIAEKQFYRKLSSNNDNQSNDLPSPDALKDFWASIWDLPVTHNENAEWIHNIKQDHIPEQKFDFISPEIFHYVLNRSHNWKSPGTDNIQIYWYKKLTYLHPYIYTHINKFIESPDTLPEFITQGITYMIPKSAETINPSQYRPITCLQTIYKLITSCISESIYKHLDDNQILCEAQKGCIKASKGCKEQLVIDSVLTNQVHKTKGSIHSMFIDYQKAFDSIPHSWLIYVLKLYKVNPLLITFLESVMKTWTTKIKIKTDSTTIATEPINIKRGIFQGDALSPLWFCMALNPLSQLLNDTMLGFKLKNNNEQHIISHLLYMDDIKLFANTKDNLFKLADVTENFSRDINMSFGVDKCKTQSINKGKIDQQSYPLATGKEIESLGENQYKYLGFNQCRIINHKETKQEITKQFNKRLIKILKTTLNSRNLVKAINTYVIPILTYSFGIIKWTNTDLLKLQTKINTMMTKHRKHHPKSCSQRLTLSRKDGGRGLVHIKNLHNKQITNLRHYFHLKSSKSELHKFINVTDRKLTPLNLCATEVQTNESQISKEQRVTEWRQKSLHGRHIADLEEAHVDKDASNAWLRRGEMFPETEAFMLSIQDQVVRTKNYRKFIMKEPDLVDVCRRCNAGSETIQHITGSCRALVQTDYKHRHDQVAAVLHQHLAHKFKFVAKKEPYYKYCPETVLDNSSIKIYWDRTIITDRTVSSNRPDITLYNKTDKTIYLIDIAVPNTNNLQKTINDKLAKYQDLGIEIKRQWKADTVHIVPIVISSTGVVPKSLKHNLTTLGLPHQIINTIQKAVILNTCRITRKFLTPLSQLTNSTLEH

SEQ ID NO: 3985 - protein, 1338 aa, Emmelina monodactyla
MEKTKKKYNLRSRLSSNATSVDSEEPFSDTDSAYRPPSRSSITTVSSLGDVVQVAPVVDEPVPNSKTRARRKWTFDMNQFILRTYLQLTSLDTDTKQYVTPLHTLFMQQFPDVTVSPQQLANQRRAIVRSGLLTEDVIHSIYNEVQSELANGTETIIPSQSSYSENSSLINSNTKTKWSLSEQLELLYCFYQSRIRGGGYIKYLEKLFKERNANNPKVQMFDGNKLATQARSIISRKVISDSTLAELKRRAEIDYNLSETPIANTTVSTHILNSTNNTLNTIPEELSNATETSLLSSNSNNNFNEAIQNQPNVSLGSSSQESIVDIPNNFLDNIKSQFESALQRFRYSNPTTRPQIPKQNSSKKLSNIIHCLNNHILPLYVNPDIDFQTLHSLIYSAAYTAALANGSKIKCLNHERADRRDRHKPAWQKRLEKRIVKLRFYIGHTTQFIAGNQNPKILATVREVQQKYSIHATHENNNLQIMDYLDTLKQKLNTLASRLKRYLKCTKRKSENLLFNIAEKQFYRKLSSNNDNQSNDLPSPDALKDFWASIWDLPVTHNENAEWIHNIKQDHIPEQKFDFISPEIFHYVLNRSHNWKSPGTDNIQIYWYKKLTYLHPYIYTHINKFIESPDTLPEFITQGITYMIPKSAETINPSQYRPITCLQTIYKLITSCISESIYKHLDDNQILCEAQKGCIKASKGCKEQLVIDSVLTNQVHKTKGSIHSMFIDYQKAFDSIPYSWLIYVLKLYKVNPLLITFLESVMKTWTTKIKIKTDSTTIATESINIKRGIFQGDALSPLWFCMALNPLSQLLNDTILGFKLKNNNEQYIISHLLYMDDIKLFANTKDNLFKLADVTENFSRDINMSFGVDKCKTQSINKGKIDQQSYPLATGKEIESLGENQYKYLGFNQCRIINHKETKQEITKQFNKRLIKNLKTTLNSRNLVKAINTYVIPILTYSFGIIKWTNTDLLKLQTKINTMMTKHRKHHPKSCSQRLTLSRKDGGRGLVHIKNLHNKQITNLRHYFHLKSSKSELHKFINVTDRKLTPLNLCATEVQTNESQISKEQRVTEWRQKSLHGRHIADLEEAHVDKDASNAWLRRGEMFPETEAFMLSIQDQVVRTKNYRKFIMKEPDLVDVCRRCNAGSETIQHITGSCRALVQTDYKHRHDQVAAVLHQHLAHKFKFVAKKEPYYKYCPETVLDNSSIKIYWDRTIITDRTVSSNRPDITLYNKTDKTIYLIDIAVPNTNNLQKTINDKLAKYQDLGIEIKRQWKADTVHIVPIVISSTGVVPKSLKHNLTTLGLPHQIINTIQKAVILNTCRITRKFLTPLSQLTNSTLEH

SEQ ID NO: 3986 - protein, 1339 aa, Allancastria cerisyi
MENISNKKYNLRRRLHSIAPSVDKIPEQACQDFSDTESVYRPSSTSSFTSISTLGDAVQEADQANVPALISRPRIRRKWTNDMNQFLLRTYLQLTSLDTDTKQYVKPLHTLFTEKFPDISITPQQLANQRRSIIRNKLLTDSEISTIYSELQLESNNEKNAPPMQPLNTQKRLQDNNSYTRDKWTTSEQHELVYCFYLSRTRGGGYIKHLEHIYKERNSNNPKSAKFDGNKLATQARSIITRKVLCEKTILEIKQRAEHDFTTADTPTTNTVLNNDQRIFTQHTSGTLNTIPEDPVVSPGNILTFSEFFDSPIVEISQEQTSYNGFAENIKTQFELALIKFSNSNPCNRPVVPKQKSSKQLAKIIDCINDYVLPLHVKPDIDFITLHTIIYVAAYTIAICNGSKIKNNDENNFNRRILYKPPWQKRLEKRIMKLRFYIGHTTQYIAGNRNPKIMFTIQEIKNRFVTHAKHENNNAQIEDYLDTLKQKLNTLASRLKRYLKCTERKKQNALFSNAEKQFYRNITQKNIDTNDRNSSSSPEQLREFWAQIWDNPVDHNCEAEWIGKIKQNHIPNQIFDFISPEVFHLVLKRSHNWKTPGADNIQNFWYKKLTYLHPHIHTHINTFIKSPDTLPEFITHGITYMIPKDGDKNNPSNFRPITCLQTFYKLTTACISEIINKHMEDNNIISEEQKGCTKASRGCKEQLIIDSIAIKQAHNLKNSIYTMFVDYRKAFDSVPHTWLIYVLRLYKINPSIVSFLEHVMKTWKTELKIKTDNRTITTKPINIKRGIFQGDALSPLWFCIALNPLSHLLQEAKAGYILKNSSSHHVLSHLLYMDDIKLFANNKNDLFQLADITQVFSQDIKMKFGIDKCKMQSINKGKIENNNIYYTLNTGETIDSLGENTYRYLGFNQSRYINHKNVRQELTNQFNQRLNRVLKTTLNSRNLVKAINTYVIPVLTYSFGVIKWTNTDLMNLQRKINTIMTKQRKHHPKSCIQRLTLPRKDGGRGIIDIKNLHSKQITNLRQYFHSKSAKSLLHAHINVIDINLTPLNLHFTEEQPNEHQVTREQKLTEWRQKSLHGRHLADLDQAHVDKDASNAWLKRGELFPETEAFMLGIQDQVIKTKNYRKFILKEHNVVDNCRRCNSGSETIQHVTGSCKALVQTDYKHRHDQVAAIVHQHLAHRFKFVEKKIPYYKYRPETVLNNSKFKVYWDRTIITDKTVAANRPDITLHDKTSKTIYLIDIAVPNTNNLQKTVHEKLCKYQELGIEIKRQWRADIVHIVPIVVSSTGVIPTSCKNSLTTLGLPHQILNTIQKAVILNTCRITRKFLTPLSQIDNTQLLHN

SEQ ID NO: 3987 - protein, 915 aa, Emmelina monodactyla
MEYKIENYRKQIGRLTQYILGNRNRRVCKAVEEIKTKYHRHAQYESFNNNLTDFLDTLKQKLNAKATRLRRYLTCTERKKQNFTFKNNEKQFYRSISKKHEDSNSNNNSELPATSDLEHFWAGIWQNPKQHNDQATWLNQLSSTTHIDQMRFETIPIDLLAQVINRTHNWKAPGSDHLHNFWFKKFTCLYPFIHNHICQFIISPEIMPSFITHGTTYLLPKNRDTNNPASYRPITCLQSFYKIMTACISEIIYQHLEKHNILAEQQKGCRKNSQGCKEQLTIDAVTMKHALTKNKNLHTMFIDYKKAFDSIPHSWLIYVLQHYKIHPTLVIFLENIMKLWQTKLKINCYTNTLVTEPIKIQRGIFQGDSLSPLWFCLALNPLSELLNDSKLGFKLKTDSSTHTLSHLLYMDDIKLYANCKSDLSKLADITQEFSTDIHMQFGVEKCKINSINRGKIEHNTYTLDSGEIIEPMDENSTYKYLGFNQSRQINQKQTKSELIKKFKYRINLILKSHLHARNTTKALNTFAIPLLTYSFGIIKWSKTDLLKLQRQINVHMTKHRKHHPKSCSQRQTLPRKEGGIGLVDIQNLHNKQITTLRKYFHNRCNDSPLHKHISEIDTKLTPLNLHNTLQQPNENIITNESKLEAWTQKSLHGRHRTDLCQTHVDKDASNAWLRQGELFPETEAFMIAIQDQVIDTRNYQKYIIRRPNLQTDLCRRCHSASETIQHITGACKSIVQTDYKHRHDQVAAIVHQNLAYKFKMIPKSIAYYKYQPSAVLEDNKYRIYWDRTIITDKTIHFNRPDITLLDKQNKTVFIIDIAVCNTHNLLSTHSEKMAKYTDLAIELKTQWQVNTVKIIPIILSTTGVIPTTLISNISLLELPSFTVPLMQKAVILNTCRITRKFLSTSSSSALTFNHT

SEQ ID NO: 3988 - protein, 1391 aa, Emmelina monodactyla
MSNLNLKTNTRYNLRRRPLPIASFVAGTERNRLHVFPETFDSSNVSRSPSPSSHIRNNISPNSSLHSLFSNIPSPSSTNSLFRPNSSLSSKSVSSNMSTDVVQTASATNSVHTVNTTSARKKWSKEHNRYIWRTYLLVTQCETTAMNNYLQPLHAAFIQEFPDMNVSRQRVGDQRRQIIRRNFLSQHEMSIIRTEVEEIIQNNHNQTQQTNTQSQHTNDTQVNDTQTATSSGLSRMKWSDDINEAIVWSYFRATEAGRNKTAYRKKMHDLFTQKYPQLAHLSEQRIADQRRVIFNNHMISNDKINNIRTEVEQQMLYDTSYLQSNTQPSLLDSTQFNSTATNINTSIDIDTQTTFDNNLTLPSDVGTCIQTGIEPPENTDEIEATFNTALQQFLNTDAESRPYIPKQKTSKRFSCIVQHLNNHILPKHLNHDLEFTYLHTIIYAAAYTAAVCNGTKFYDGSNLCERRRKKPAWQKRMEYKIENYRKQIGRLTQYILGNRNRRVCKAVEEIKTKYHRHAQYESFNNNLTDFLDTLKQKLNAKATRLRRYLTCTERKKQNFTFKNNEKQFYRSISKKHEDSNSNNNSELPATSDLEHFWAGIWQNPKQHNDQATWLNQLSSTTHIDQMRFETIPIDLLTQVINRTHNWKAPGSDHLHNFWFKKFTCLYPFIHNHICQFIISPEIMPSFITHGTTYLLPKNRDTNNPASYRPITCLQSFYKIMTACISEIIYQHLEKHNILAEQQKGCRKNSQGCKEQLTIDAVTIKNALTKNKNLHTMFIDYKKAFDSIPHSWLIYVLQHYKIHPTLVIFLENMMKLWQTKLKINCNTNTLVTEPIKIQRGIFQGDSLSPLWFCLALNPLSELLNDSKLGFKLKTDSSTHTLSHLLYMDDIKLYANCKSDLSKLADITQEFSTDIHMQFGVEKCKINSINRGKIEHNTYTLDSGEIIEPMDENSTYKYLGFNQSRQINQKQTKSELIKKFKYRINLILKSHLHARNTTKALNTFAIPLLTYSFGVIKWSKTDILKLQRQINVHMTKHRKHHPKSCSQRQTLPRKEGGIGLVDIQNLHNKQITTLRKYFHNRCNDSPLHKHISEIDTKLTPLNLHNTLQQPNENIITNESKLEAWTQKSLHGRHRTDLCQTHVDKDASNAWLRQGELFPETEAFMIAIQDQVIDTRNYQKYIIRRPNLQTDLCRRCHSASETIQHITGACKSIVQTDYKHRHDQVAAIVHQNLAYKFKMIPKSIAYYKYQPSAVLEDNKYRIYWDRTIITDKTIHFNRPDITLLDKQNKTVFIIDIAVCNTHNLLSTHSEKMAKYTDLAIELKTQWQVNTVKIIPIILSTTGVIPTTLISNISLLELPSFTVPLMQKAVILNTCRITRKFLSTSSTSALTFNHT

SEQ ID NO: 3989 - protein, 1389 aa, Emmelina monodactyla
MSNLNLKTNTRYNLRRRPLPIASFVAGTERNRLHAFPETFDSSNVSRSPSPSSHFRNNISPNSSLHSLFSNIPSPSSTNSLFRPNSSLSSKSVSTNMSTDVVQTASATSSVHTVNTTSARKKWSKEHNRYIWRTYLLVTQCETTAMNNYLQPLHAAFIQEFPDMNVSRQRVGDQRRQIIRRNFLSQHEMSIIRTEVEKIIQNNHNQTQQTNTQSQHTDDTQVNDTQTATSSGRSRMKWSDDINEAIVWSYFRATEAGRNKTAYRKKMHDLFTQKYPQLAHLSEQRIADQRRVIFNNHMISNDKINNIRTEVEQQMLYDTSYLQSNTQPSLLDSTQFNSTATNINTSIDSQTTFDNNLTLPSDVGTCIQTGIEPPENTDEIEATFNTALQQFLNTDAESRPYIPKQKTSKRFSCIVQHLNNHILPKHLNHDLEFTYLHTIIYAAAYTAAVCNGTKFYDGSNLCERRRKKPAWQKRMEYKIENYRKQIGRLTQYILGNRNRRVCKAVEEIKTKYHRHAQYESLNNNLTDFLDTLKQKLNAKATRLRRYLTCTERKKQNFTFKNNEKQFYRSISKKHEDSNSNNNSELPATSDLEQFWAGIWQNPKQHNDQATWLNQLSSTTHIDQMRFETIPIDLLTQVINRTHNWKAPGSDHLHNFWFKKFTCLYPFIHNHICQFIISPEIMPSFITHGTTYLLPKNRDTNNPASYRPITCLQSFYKIMTACISEIIYQHLEKHNILAEQQKGCRKNSQGCKEQLTIDAVTMKHALTKNKNLHTMFIDYKKAFDSIPHSWLIYVLQHYKIHPTLVIFLENMMKLWQTKLKINCNTNTLVTEPIKIQRGIFQGDSLSPLWFCLALNPLSELLNDSKLGFKLKTDSSTHTLSHLLYMDDIKLYANCKSDLSKLADITQEFSTDIHMQFGVEKCKINSINRGKIEHNTYTLDSREIIEPMDENSTYKYLGFNQSRQINQKQTKSELIKKFKYRINLILKSHLHARNTTKALNTFAIPLLTYSFGIIKWSKTDLLKLQRQINVHMTKHRKHHPKSCSQRQTLPRKEGGIGLVDIQNLHNKQITTLRKYFHNRCNDSPLHKHISEIDTKLTPLNLHNTLQQPNENIITNESKLEAWTQKSLHGRHRTDLCQTHVDKDASNAWLRQGELFPETEAFMIAIQDQVIDTRNYQKYIIRRPNLQTDLCRRCHSASETIQHITGACKSIVQTDYKHRHDQVAAIVHQNLAYKFKMIPKSIAYYKYQPSAVLEDNKYRIYWDRTIITDKTIHFNRPDITLLDKQNKTVFIIDIAVCNTHNLLSTHSEKMAKYTDLAIELKTQWQVNTVKIIPIILSTTGVIPTTLISNISLLELPSFTVPLLQKAVILNTCRITRKFLSTSSTSALTFNHT

SEQ ID NO: 3990 - protein, 1386 aa, Emmelina monodactyla
MSNLNLKTNIRYNLRRRPLPNASFVTGTERNRFLTSPETIDSSNVSRSPSPSSHVRNNISPNSSLHSLFSNIPSPSSTNSSFRPNSSLSSKSLSISMSTDVVQTASATSSVHTVNTTSARKKWSKEHNRYIWRTYLLVTQCETTAMNNYLQPLHTSFVQKFPDMNVSRQRVGDQRRQIIRRNFLSQHEMNLIRTEVEEIIHNSHTQIQQSNTLSRHTEDTQVNDTQTATGSGLSRMKWSDDINEAIVWSYFRATEAGRNKTAYRKKMHDLFIQKYPQLAHLSEQRIADQRRVIFNNHMVSNDKIDYIRTEVEQEILYDAPYSQSNTQQSSQFNSTDININTSSIDTQTDLDTNLTLLDEDTHIQTAITPPENTNDEIETTFNTALQQFLNSDAESGPYIPKQKTSKRFSYIVHHLNNIILPKHLYHDIEFTYLHTIIYAAAYTAAVCNGTKFYEISNSCERRRKKPAWQKRMEYKIENYRKQIGRLTQYILGNRNRSVCKSVEEIKTKYQRHAQYESLNNNLTDFLDTLKQKLNAKATRLRRYLTCTDRKKQNFTFKNNEKQFYRNISKKHEDSNSNNNFELPSTSDLKQFWAGIWENPKQHNNQATWLKQLSSTTHIDQMRFETIPIDLLTQVINRTHNWKAPGSDHLHNFWFKKFTCLHPFIHNHICQFIVSPEIMPPFITHGTTYLLPKNRDTNNPASYRPITCLQSFYKIMTACISEIIYQHLEKYKILAEQQKGCRKNAQGCKEQLTIDSVIMKHALNKNKNLHTMFVDYKKAFDSIPHSWLIYVLQHYKIHPTLVIFLENLMKQWQTKLKLNCNSTNLVTEPIKIQRGIFQGDSLSPLWFCLALNPLSELLNDSKIGFQLTADYSTHKLSHLLYMDDIKLYANCKSDLSKLADITQEFSTDIHMQFGVDKCKINSINQGKIEHNTYTLDSGEIIEPMDENSTYKYLGFHQSRQINQKQTKSELINKFKFRINLILKSHLHARNTTKALNTFAIPLLTYSFGIIKWSKTDLLKLQRQINVHMTKHRKHHPKSCSQRQTLPRKEGGIGLVDIQNLHNKQIATLRKYFHNRCNDSPLHKHISEIDTKLTPLNLHNTLQQPNENVITNESKLEAWAQKSLHGRHRTDLCQTHVDKEASNAWLRQGELFPETEAFMIAIQDQVIDTRNYQKYIIRRQNLQTDLCRRCHSASETIQHITGACKSIVQTDYKHRHDQVAAIIHQNLAYKFKMIPKSIAYYKYQPSAVLENNKYRIYWDRTIITDKTIHFNRPDITLLDKQNKTVYIIDIAVCNTHNLLSTQTEKMAKYTDLAIELKTQWQVNTVKIIPIILSTTGVIPKTLISNISLLELPPFTVPLMQKAVILNTCRITRKFLSTSSTSTLTFNHT

SEQ ID NO: 3991 - protein, 1393 aa, Acronicta aceris
MSNFNCRYNLRRRLPTITSSTLRGNKVQTGPPHGDTVSETTSPPSLSPILNSHIPLQSSSSSPHSLFSNIPSPSSTHSLFRSPNSLNTSSSPELQSSPKTPTRVVQAANANNPAPTVGKTIARKKWSQEMNRFIWRTYLIITKCETTQLNNYLGPLHSEFTQKYPEMQVTRQRIGDQRRQIIRANLLSTNIREEIRAEVAHTMQSETTQTEYQTNTPSLAHTTITNTQHNHGNSRMKWSNDINEDIIRCYFEATDLERNQTAYRKKLYELFINKNPSLSHLTEQRIADQRRAIFRGKMVTNSRIEEIRSEMNNLLQNTELPQNTTQQNNTQMPLSSSPDENSLVISTQDISEDLSTDTPTRAQTFLDNHYNLMLPLDTSTEHSYIEIEFNKTLEQFNNTDPETRPYIVKQKSSRNFAQIVQYLNNKILPKHLSHDITFAELHTIIYSAAYTAATCNGYKPLECRAKGSNIKPTWQIRMEKRIENYRKEIGRLTQFIAGNRNRRVCATVEYIKRKYYKHSTHEDNNTELTDFLDTIKQKLNVTATRLKRYLTCTERKKQNLTFVNNEKLFYRSLDNKQQSHSQTEQPDNTLPQNLHQFWSGIWEQPIEHNKNATWLDNVDTTHIDQMQFESVPIDTFIQVIKRTHNWKAPGSDNIHNYWYKKFPCTHPYIHTHICQFIQSPHTLPSFITHGITYMLPKSSDTTNPANYRPITCLQTIYKIITGCISEMIYKHIEQFNILAEQQKGCRKNSKGCKEQLIIDNVTMKQALTRNRNIHTMFIDYKKAFDSVPHSWLLYILELYKIHPSIISFLQAAILQWQTQLKLNNNNTTLISEPIKIQRGIFQGDSLSPLWFCLALNPLSHLLNASKLGFQLKHNNTSHKLSHLMYMDDIKIYASNNTELSSLVDITQTFSQDIHMQFGVDKCKIQSIKRGKFQHNTYTLNTGQTIEPMDEDTTYKYLGFQQTRQIRQKETKIELTKNFKHRLNLILKSHLNARNTVKAINTYAIPILTYSFGIINWSQTDLKKLQCTINTHMTTHRKHHPKSCTQRLTLPRKEGGIGLIDIQNLHNSQISSLRKYLSYKSTHSQLHKYITSIDNKMTPLNLSDTNTQRNEIIATPQSKIEMWSQKSLHGRHRADLCQPYVDKVASNAWLQRGELFPETEAFMIAIQDQVMNTRNYQKYILRVPNLPTDLCRRCHSSSETIQHITGGCKAIVQTDYKYRHNQVASIVHQNLAYRNKFINEKLPYYKYQPNTVLENNNVKIYWDRTIVTDKTIHFNRPDITILDKLNKIVYIIDIAVCNTHNLTTTHAEKMAKYTDLSIELRTQWRVDTVKIIPIVISTTGVIPTTLKPNLDLLNMPSSTIFLLQKAAILNTCRITRKFLATSSSSSLTFTGLTA

SEQ ID NO: 3992 - protein, 1379 aa, Emmelina monodactyla
MKQQNFKKQYNLRKRLDTNALSLTSENRVQVRSSPENEFNSTSIPSSPVSSPSNVYIQTPNSSPHSLFASITSPSSTHSLFRSHNSSPLSASSISETTADVVQSANANLTVHTVETNRARKKWTLEHNCFIWRTYLILTKCETTQMNNYLKQLHLEFIQKFPEMNVTRQRIGDQRRQIVKRNFVPADVRNEIRIDVATQLETNPISSQSDNSNASSNLTLLGTQANTTGNTRMKWSYEINEDIVRCYLEVTDLEQNKTAYRQKLHQQFINKYPHLAHISEQRIADQRRIIYKNNMVDKNRIEQIKLDIQNKLNMNNDGSSTQPPDISLNEPILNVNNVLDDTETIRLNSVEQLSTSTETPHITCNYDENFDENIEVQFHLAFEKFKDTNPETRPFIPKQKTSSKFIRTIQYINNVIIPKLLNQNLTFIELHTIIYTAAYTAALVNGTKFIESIGSNKRNRKPMWQKRLEKKVELYRKEIGRLTQFIAGNRNSRVCATVNYITRKYQIHSTHENPNTQLPEFLDTLKQKLNVTATRLKRYMTCTDRKKQNSQFKNNEKQFYRNIRSPLSQNISTQLPSSEDLQYFWANIWQNPVQHNEQAEWMNKMPDTSHIQEMQFDYIPLETFTNIVYRSHNWKTPGSDNIQNFWYKKFSCVHPYIHYHICQFIQSPDTIPQFITHGTTYMLPKGQDTSNPANFRPITCLQTIYKILTGCISDLIYKHLEKFNILTEQQKGCRKNSQGCKEQLTIDNIVMKQALTKKSNIHTMYVDYKKAFDSVPHSWLIFVLKHYKINPSLINFLQSAIKFWQTKLHLKHNDLLITTEPISIQRGIFQGDSLSPLWFCLALNPLSELLNKTKLGVQLKLNNTYHTLSHLMYMDDIKIYSNNKTELIDLANTTETFSLDIHMQFGVDKCKINSFNRGKLQHDTYTLVSGEVIEPIDEHSTYKYLGFHQTRQIQQKETKTDLIKNFKRRLNTILKTHLNSRNIIKAINTFAVPILTYSFGIIKWSQTDLIKLQRIVNTHLTKHRKHHPRSCTQRLTLPRKEGGVGLIDIKNLHNNQITSLRKYFHTKTEQSELHRYIVNIDTKLTPLNLHNRNTQNNESIISIQTKIDTWAQKSLHGRHRADLCQPHVDKDASNAWLRRGELFPETEAFMVAIQDQVIDTRNYQKYIIRRPNLPTDLCRRCQSSSETIQHITGACKSIVQTDYKHRHDQVAAIVHQNLAFQFKLIPQKVSYYKYQPSTILENNLYRIYWDRTIITDKTIHFNRPDITVLDKINNTAYIIDIAVCNTHNLLSTHTEKMSKYTDLSIELRTQWRVDRVHIVPVIISTTGVVPKTLLTNLNVLNMPKFTLELLQKATILNTCRITRKFLATSSTSSLTYTHM

SEQ ID NO: 3993 - protein, 917 aa, Emmelina monodactyla
MWQKRLEKKVELYRKEIGRLTQFIAGNRNSRVCATVNYITRKYQIHSTHENPNTQLPEFLDTLKQKLNVTATRLKRYMTCTDRKKQNSQFKNNEKQFYRNIRSPLSQNISTQLPSSEDLQYFWANIWQNPVQHNEQAEWMNKMPDTSHIQEMQFDYIPLETFTNIVYRSHNWKTPGSDNIQNFWYKKFSCVHPYIHYHICQFIQSPDTIPQFITHGTTYMLPKGQDTSNPANFRPITCLQTIYKILTGCISDLIYKHLEKFNILTEQQKGCRKNSQGCKEQLTIDNIVMKQALTKKSNIHTMYVDYKKAFDSVPHSWLIFVLKHYKINPSLINFLQSAMKFWQTKLHLKHNDLLITTEPISIQRGIFQGDSLSPLWFCLALNPLSELLNKTKLGVQLKLNNTYHTLSHLMYMDDIKIYSNNKTELIDLANTTETFSLDIHMQFGVDKCKINSFNRGKLQHDTYTLVSGEVIEPIDEHSTYKYLGFHQTRQIQQKETKTDLIKNFKRRLNTILKTHLNSRNIIKAINTFAVPILTYSFGIIKWSQTDLIKLQRIVNTHLTKHRKHHPRSCTQRLTLPRKEGGVGLIDIKNLHNNQITSLRKYFHTKTEQSELHRYIVNIDTKLTPLNLHNRNTQNNESIISIQTKIDTWAQKSLHGRHRADLCQPHVDKDASNAWLRRGELFPETEAFMVAIQDQVIDTRNYQKYIIRRPNLPTDLCRRCQSSSETIQHITGACKSIVQTDYKHRHDQVAAIVHQNLAFQFKLIPQKVSYYKYQPSTILENNLYRIYWDRTIITDKTIHFNRPDITVLDKINNTAYIIDIAVCNTHNLLSTHTEKMSKYTDLSIELRTQWRVDRVHIVPVIISTTGVVPKTLLTNLNVLNMPKFTLELLQKATILNTCRITRKFLATSSTSSLTYTHM

SEQ ID NO: 3994 - protein, 1393 aa, Acronicta aceris
MSNFNCRYNLRRRLPTITSSTLRGNKVQTGPPHGDTVSETTSPPSLSPILNSHIPLQSSSSSPHSLFSNIPSPSSTHSLFRSPNSLNTSSSPELQSSPKTPTRVVQAANATNPAPTVGKTIARKKWSQEMNRFIWRTYLMITKCETTQLNNYLGPLHSEFTQKYPEMQVTRQRIGDQRRQIIRANLLSTNIREEIRAEVAHTMQSETTQSEYQTNTPSLAHTTITNTQHNHGNNRMKWSNDINEDIIRCYFETTDLERNQTAYRKKLYELFINKNPSLSHLTEQRIADQRRAIFRGKMVTNSRIEEIRSEMNNLLQNTELPQNTTQQNNTQMPLSSSPDENSLVISTQDISEDLSTDTPTRAQTFLDNHYNLMLPLDTSTEYSYIEIEFNKTLEQFNNTDPETRPYIVKQKSSRNFAQIVQYLNNKILPKHLSHNITFAELHTIIYSAAYTAATCNGYKPLQCRAKGSNTKPTWQIRMEKRIENYRKEIGRLTQFIAGNRNRRVCATVEYIKRKYYKHSTHEDNNTELTDFLDTIKQKLNVTATRLKRYLTCTERKKQNLTFVNNEKLFYRSLDNKQQSHTQTEQPDNTLPQNLHQFWSGIWEQPIEHNKNATWLDNVDTTHIDQMQFESVPIDTFIQVIKRTHNWKAPGSDNIHNYWYKKFPCTHPYIHTHICQFIQSPHTVPSFITHGITYMLPKSSDTTNPANYRPITCLQTIYKIITGCISEMIYKHIEQFNILAEQQKGCRKNSKGCKEQLIIDNVTMKQALTRNRNIHTMFIDYKKAFDSVPHSWLLYILELYKIHPSIISFLQAAILQWQTQLKLNNNNTTLISEPIKIQRGIFQGDSLSPLWFCLALNPLSHLLNASKLGFQLKHNNTSHKLSHLMYMDDIKIYASNNTELSSLVDITQTFSQDIHMQFGVDKCKIQSIKRGKFQHNTYTLNTGQTIEPMDEDTTYKYLGFQQTRQIRQKETKIELTKNFKHRLNLILKSHLNARNTVKAINTYAIPILTYSFGIINWSQTDLKKLQCTINTHMTTHRKHHPKSCTQRLTLPRKEGGIGLIDIQNLHNSQISSLRKYLSYKSTHSQLHKYITSIDNKMTPLNLSDTNTQRNEIIATPQSKIEMWSQKSLHGRHRADLCQPYVDKVASNAWLQRGELFPETEAFMIAIQDQVMNTRNYQKYILRVPNLPTDLCRRCHRSSETIQHITGGCKAIVQTDYKYRHNQVASIVHQNLAYRNKFINEKLPYYKYQPNTVLENNNVKIYWDRTIVTDKTIHFNRPDITILDKLNKIVYIIDIAVCNTHNLTTTHAEKMAKYTDLSIELRTQWRVDTVKIIPIVISTTGVIPTTLKPNLDLLNMPSSTIFLLQKAAILNTCRITRKFLATSSSSSLTFTGLTA

SEQ ID NO: 3995 - protein, 1393 aa, Acronicta aceris
MSNFNCRYNLRRRLPTITSSTLRGNKVQTGPPHGDTVSETTSPLSLSPILNSHIPLQSSSSSPHSLFSNIPSPSSTHSLFRSPNSLNTSSSPELQSSPKTPTRVVQAANATNPAPTVGKTIARKKWSQEMNRFIWRTYLIITKCETTQLNNYLGPLHSEFTQKYPEMQVTRQRIGDQRRQIIRASLLSTNIREEIRAEVAHTMQSETTQTEYQTNTPSLAHTTITNTQHNHGNSRMKWSNDINEDIIRCYFEATDLERNQTAYRKKLYELFINKNPSLSHLTEQRIADQRRAIFRGKMVTNSRIEEIRSEMNNLLQNTELPQNTTQQNNTQMPLSSSPDENLLVISTQDISEDLSTDTPTRAQTILDNHYNLMLPLDTSTEYSYIEIEFNKTLEQFNNTDPETRPYIPKQKSSRNFAQIVQYLNNKILPKHLSHNITFAELHTIIYSAAYTAATCNGYKPLECRAKGSNIKPTWQIRMEKRIENYRKEIGRLTQFIAGNRNRRVCATVEYIKRKYYKHSTHEDNNTELTDFLDTIKQKLNVTATRLKRYLTCTERKKQNLTFVNNEKLFYRSLDNKQQSHTQTEQPDNTLPQSLHQFWSGIWEQPIEHNKNATWLDNVDTTHIDQMQFESVPIDTFIQVIKRTHNWKAPGSDNIHNYWYKKFPCTHPYIHTHICQFIQSPHTLPSFITHGITYMLPKSSDTTNPANYRPITCLQTIYKIITGCISEMIYKHIEQFNILAEQQKGCRKNSKGCKEQLIIDNVTMKQALTRNRNIHTMFIDYKKAFDSVPHSWLLYILELYKIHPSIISFLQAAILQWQTQLKLNNNNTTLISEPIKIQRGIFQGDSLSPLWFCLALNPLSHLLNASKLGFQLKHNNTSHKLSHLMYMDDIKIYASNNTELSSLVDITQTFSQDIHMQFGVDKCKIQSIKRGKFQHNTYTLNTGQTIEPMDEDTTYKYLGFQQTRQIRQKETKIELTKNFKHRLNLILKSHLNARNTVKAINTYAIPILTYSFGIINWSQTDLKKLQCTINTHMTTHRKHHPKSCTQRLTLPRKEGGIGLIDIQNLHNSQISSLRKYLSYKSTHSQLHKYITSIDNKMTPLNLSDTNTQRNEIIATPQSKIEMWSQKSLHGRHRADLCQPYVDKVASNAWLQRGELFPETEAFMIAIQDQVMNTRNYQKYILRVPNLPTDLCRRCHSSSETIQHITGGCKAIVQTDYKYRHNQVASIVHQNLAYRNKFINEKLPYYKYQPNTVLENNNVKIYWDRTIVTDKTIHFNRPDITILDKLNKIVYIIDIAVCNTHNLTTTHAEKMAKYTDLSIELRTQWRVDTVKIIPIVISTTGVIPTTLKPNLDLLNMPPSTIFLLQKAAILNTCRITRKFLATSSSSSLTFTGLTA

SEQ ID NO: 3996 - protein, 1143 aa, Emmelina monodactyla
MKWSHEINEDIVRCYLEVTDLEQNKTSYRTKLHQQFTNKYPHLAHISEQRIADQRRIIYKNNMVDKNRIEQIKLDIQNKLNMNNEGSSPQPPDISLNEPILNVNNVLDDTETIRLNSVEQFSTSMETPHITCDYDENIEVQFHLAFEKFKDTNPETRPFIPQQKTSSKFTRTILYLNNVIIPKLLNQNLTFIELHTIIYTAAYTAALVNGTKFMESIGSNKRNRKPMWQKRLEKKVELYRKEIGRLTQFIAGNRNSRVCATVNYITRKYQIHSTHENLNTQLPEFLDTLKQKLNVTATRLKRYMTCTDRKKQNTQFKNNEKQFYRNIRSPLSQNISSQLPSSEDLQYFWANIWQNPVLHNEQAEWMNKMPGTSHIQEMQYDYIPLETFTNIVYRSHNWKTPGSDNIQNFWYKKFSCVHPYIHYHICQFIQSPDTIPQFITHGTTYMLPKGQDTSNPANFRPITCLQTIYKILTGCISDLIYKHLEKFNILTEQQKGCRKNSQGCKEQLTIDNIVMKQALTKKSNIHTMYVDYKKAFDSVPHSWLIFVLKHYKINPLLINFLQSAMKFWQTKLHLKHNDLLITTEPISIQRGIFQGDSLSPLWFCLALNPLSELLNTTELGVQLKVNNTYHTLSHLMYMDDIKIYSNNKTELIDLANTTETFSLDIHMQFGVDKCKINSFNRGKLQHDTYTLVSGEVIEPIDEHSTYKYLGFHQTRQIQQKETKTDLIKKFKRRLNTILKTHLNSRNIIKAINTFAVPILTYSFGIIKWSQTDLIKLQRIVNTHLTKHRKHHPRSCTQRLTLPRKEGGVGLIDIKNLHNNQITSLRKYFHTKAEQSELHRYIVNIDTKLTPLNLLNRNTQNNESITSIQTKINTWAQKSLHGRHRADLCQPHVDKDASNAWLRRGELFPETEAFMVAIQDQVIDTRNYQKYIIRRPNLPTDLCRRCHSSSETIQHITGACKSIVQTDYKHRHDQVAAIVHQNLAFQFKLIPQKVSYYKYQPSTILENNLYRIYWDRTIITDKTIHFNRPDITVLDKINKTVYIIDIAVCNTHNLLSTHTEKMSKYTDLSIELRTQWRVDRVHIVPVIISTTGVVPKTLLTNLNVLNMPKFTLELLQKATILNTCRITRKFLATSSTSSLTYTHM

SEQ ID NO: 3997 - protein, 1393 aa, Acronicta aceris
MSNFNCRYNLRRRLPTITSSTLRGNKVQTGPPHGDTVSETTSPPSLSPILNSHIPLQSSSSSPHSLFSNIPSPSSTHSLFRSPNSLNTSSSPELQSSPKTPTRVVQAANATNPAPTVGKTIARKKWSQEMNRFIWRTYLIITKCETTQLNNYLGPLHSEFTQKYPEMQVTRQRIGDQRRQIIRANLLSTNIREEIRAEVAHTMQSETTQTEYQTNTPSLAHTTITNTQHNHGNSRMKWSNDINEDIIRCYFEATDLERNQTAYRKKLYELFINKNPSLSHLTEQRIADQRRAIFRGKMVTNSRIEEIRSEMNNLLQNTELPQNTTQQNNTQMPLSSSPDENSLVISTQDISEDLSTDTPTRAQTFLDNHYNLMLPLDTSTEHSYIEIEFNKTLEQFNNTDPETRPYIVKQKSSRNFAQIVQYLNNKILPKHLSHDITFAELHTIIYSAAYTAATCNGYKPLECRAKGSNIKPTWQIRMEKRIENYRKEIGRLTQFIAGNRNRRVCATVEYIKRKYYKHLTHEDNNTELTDFLDTIKQKLNVTATRLKRYLTCTERKKQNLTFVNNEKLFYRSLDNKQQSHSQTEQPDNTLPQNLHQFWSGIWEQPIEHNKNATWLDNVDTTHIDQMQFESVPIDTFIQVIKRTHNWKAPGSDNIHNYWYKKFPCTHPYIHTHICQFIQSPHTLPSFITHGITYMLPKSSDTTNPANYRPITCLQTIYKIITGCISEMIYKHIEQFNILAEQQKGCRKNSKGCKEQLIIDNVTMKQALTRNRNIHTMFIDYKKAFDSVPHSWLLYILELYKIHPSIISFLQAAILQWQTQLKLNNNNTTLISEPIKIQRGIFQGDSLSPLWFCLALNPLSHLLNASKLGFQLKHNNTSHKLSHLMYMDDIKIYASNNTELSSLVDITQTFSQDIHMQFGVDKCKIQSIKRGKFQHNTYTLNTGQTIEPMDEDTTYKYLGFQQTRQIRQKETKIELTKNFKHRLNLILKSHLNARNTVKAINTYAIPILTYSFGIINWSQTDLKKLQCTINTHMTTHRKHHPKSCTQRLTLPRKEGGIGLIDIQNLHNSQISSLRKYLSYKSTHSQLHKYITSIDNKMTPLNLSDTNTQRNEIIATPQSKIEMWSQKSLHGRHRADLCQPYVDKVASNAWLQRGELFPETEAFMIAIQDQVMNTRNYQKYILRVPNLPTDLCRRCHSSSETIQHITGGCKAIVQTDYKYRHNQVASIVHQNLAYRNKFINEKLPYYKYQPNTVLENNNVKIYWDRTIVTDKTIHFNRPDITILDKLNKIVYIIDIAVCNTHNLTTTHAEKMAKYTDLSIELRTQWRVDTVKIIPIVISTTGVIPTTLKPNLDLLNMPSSTIFLLQKAAILNTCRITRKFLATSSSSSLTFTGLTA

SEQ ID NO: 3998 - protein, 916 aa, Amphipyra berbera
MEKRITKFRKEIGRLTQFIAGNRNLSVCETVEYIKKNYYKHSTHEDHNTELTEFLDTLKQKLNVTATRLKRYLTCTERKKQNTTFVNNEKLFYRNLTNKQQSHTSPTELETTLPQNLHQFWSGIWEQPLEHNKNATWLENIDTTHIDEMQFETIPINTFIQVIIRTHNWKAPGSDNIHNYWYKKFTCTHPYIYTHICKFIQSPQTLPPFITHGITFMLPKGSETANPANYRPITCLQTIYKIITGCISEIIYKHIEQFNILAEQQKGCRKNSKGCKEQLIIDNITMKQALTRNRNIYTMFIDYKKAFDSVPHSWLLYILELYKIHPSVISFLQTAILQWQTQLKLNHNNTTLTTEPIKIQRGIFQGDSLSPLWFCLALNPLSHLLNTSKLGFKLKHNNTDQKISRLMYMDDIKIYASNNTELSNLADITQTFSEDIHMQFGVDKCKIQSVHRGKLQHNTYTLNTGQEIEAMDEHTTYKYLGFQQSRQIHQKETKIELTKKFKHRLNLILKSHLNSRNTVKAINTYAIPILTYSFGVINWSQTDLKKLQRTINTHMTTYRKHHPKSCIQRLTLSRKEGGIGLIDIQNLHNSQISSLRKYLFYKSAHSELHKYITAIDNKMTPLNLSNTITQHNESIATSQSKIDTWSQKSLHGRHRTDLCQPHVDKDASNAWLQRGELFPETEAFMIAIQDQVMNTRNYQKYILRVPNLPTDLCRRCHSSSETIQHITGGCKAIVQTDYKYRHDQVASIVHQNLAYRHKFINEKLPYYKYQPSTVLENSDIKIYWDRTIVTDKTIHFNRPDITILDKLNKIAYIIDIAVCNTHNLVTTHTEKMAKYTDLSIELRTQWRVGTVKIIPIVISTTGVIPKTLKPNLDILNMPPSTFLLLQKAAILNTCRITRKFFATSSSSSLTFTGLTM

SEQ ID NO: 3999 - protein, 1393 aa, Acronicta aceris
MSNFNCRYNLRRRLPTITSSTLRGNKVQTGPPHGDTVSETTSPPSLSPILNSHIPLQSSSSSPHSLFSNIPSPSSTHSLFRSPNSLNTSSSPELQSSPKTPTRVVQAANATNPAPTVGKTIARKKWSQEMNRFIWRTYLIITKCETTQLNNYLGPLHSEFTQKYPEMQVTRQRIGDQRRQIIRANLLSTNIREEIRAEVAHTMQSETTQSEYQTNTPSLAHTTITNTQHNHGNNRMKWSNDINEDIIRCYFEATDLERNQTAYRKKLYELFINKNPSLSHLTEQRIADQRRAIFRGKMVTNSRIEEIRSEMNNLLQNTELPQNTTQQNNTQMPLSSSPDENSLVISTQDISEDLSTDTPTRAQTFLDNHYNLMLPLDTSTEYSYIEIEFNKTLEQFNNTDPETRPYIVKQKSSRNFAQIVQYLNNKILPKHLSHNITFAELHTIIYSAAYTAATCNGYKPLQCRAKGSNTKPTWQIRMEKRIENYRKEIGRLTQFIAGNRNRRVCATVEYIKRKYYKHSTHEDNNTELTDFLDTIKQKLNVTATRLKRYLTCTERKKQNLTFVNNEKLFYRSLDNKQQSHTQTEQPDNTLPQNLHQFWSGIWEQPIEHNKNATWLDNVDTTHIDQMQFESVPIDTFIQVIKRTHNWKAPGSDNIHNYWYKKFPCTHPYIHTHICQFIQSPHTLPSFITHGITYMLPKSSNTTNPANYRPITCLQTIYKIITGCISEMIYKHIEQFNILAEQQKGCRKNSKGCKEQLIIDNVTMKQALTRNRNIHTMFIDYKKAFDSVPHSWLLYILELYKIHPSIISFLQAAILQWQTQLKLNNNNTTLISEPIKIQRGIFQGDSLSPLWFCLALNPLSHLLNASKLGFQLKHNNTSHKLSHLMYMDDIKIYASNNTELSSLVDITQTFSQDIHMQFGVDKCKIQSIKRGKFQHNTYTLNTGQTIEPMDEDTTYKYLGFQQTRQIRQKETKIELTKNFKHRLNLILKSHLNARNTVKAINTYAIPILTYSFGIINWSQTDLKKLQCTINTHMTTHRKHHPKSCTQRLTLPRKEGGIGLIDIQNLHNSQISSLRKYLSYKSTHSQLHKYITSIDNKMTPLNLSDTNTQRNEIIATPQSKIEMWSQKSLHGRHRADLCQPYVDKVASNAWLQRGELFPETEAFMIAIQDQVMNTRNYQKYILRVPNLPTDLCRRCHSSSETIQHITGGCKAIVQTDYKYRHNQVASIVHQNLAYRNKFINEKLPYYKYQPNTVLENNNVKIYWDRTIVTDKTIHFNRPDITILDKLNKIVYIIDIAVCNTHNLTTTHAEKMAKYTDLSIELRTQWRVDTVKIIPIVISTTGVIPTTLKPNLDLLNMPSSTIFLLQKAAILNTCRITRKFLATSSSSSLTFTGLTA

SEQ ID NO: 4000 - protein, 1165 aa, Lasioglossum lativentre
MEMSGNRENVMHQEVSEPPVPADGRGVRAGPHSSLSCGRNNHDEMDERVVVPFERPSPCPVCLRRGRNFIFIKPTELNKHIQEEHVSAKVTWSCRRCSKTFIKLHPLCCHLPKCKGEQANHEHRCSSCEMSFPTLSGLSQHERHRHPVVRNERRAAAANRTPKPKGAPSSVWSDEEVRMLVSLNEIYVGRRNINVLIAQRMPNKTNKQISDKRKQLSINKLRPEAERSTPIDTVIDEQSESGGVSDVSASSVESAQAQGSPEMPIAPLEEDGTWREKLKDAVLQKYELPQAWTEWNDRAEEIASTWPADAAQIETLYEKMEKQLCSSKKKESVPRTRGRKPNGGNVTNNRKNHGRKSKRWKQPSRSERRRFEYARCQELFNNEPKKLADIIASNDMSLVQQHSLPEKAKTEELYEKLWGVEGPTEALPFDGRDSPLMSIKDVLIPISVGEIVAKIKQINNKSAAGPDGLTKSDLRIEGINVILAKFFNILLMNKYYPNQWRKNRTTLIPKVDKDPSDVRNWRPITISSMLSRIFSALVDKRLRRTIEQSDRQKGFKYENGCFANVRILSSALKTLKEAGGVLGIEDVAKAFDTVPHAAIRPALERKGVHPEVAAYIASMYNNCETSIKTKEGSVPITLKRGVKQGDPLSPLIFNLCIEPIIEQLQSTTDGIKIEGRNLTAMAFADDLVLIGKNREMAEKQMRMLVKYLGAMGMELSVSKCTAMEFVCANKSWFVRDPGIKINGVKVPSAQVNDAIRYLGAKITPWKGLIDNFECDAFQELMARLKRVPLKPMQKLELLTTYLLPRYTYGLIMNPPSQNTLKEINQLVRQEVKKMLHISEKTNTAFMYVPKRLGGLGLVNIENMVKIAVLNNSEKARNSSDPITGLAIQCGKIEPRLREYAKALGISWPIAIEDLNLCKVRVKGDFIKQWAQLKVQGQGAHEFKHRESNAWLIRGDMLKHSRIADAIKLRTNTYPTRVCMKQFVADGNPHFDTTCRRCRGPQESLGHILGECCATKPKRIHRHNEIRDLIANKLAVKHQVMLEQSFQSAEGTLKPDLVIKMNEDEAYVVDITVRFERGEYLTKAAEEKKAKYRRLIPQVIRRLGVTTASVLPIVIGSRGALPTATLKELKKLDISKSERITLSMIALRSSIEMVNEFMDYGRVMEN

SEQ ID NO: 4001 - protein, 877 aa, Lasioglossum morio
MASMWPVDTTQIETLYQEIEKQLCGPQKEKKARKVRGKKANGGGVTNNRRNHGNKNKNAKKQPTRSERRRFDYARCQELFNNEPKKLADIIASNDMPLLRRLSLPDKAQTVELYERLWGMEGPKEALPFDERDSPPTNIEDVLTPICAGEIEEKIKHIKNKSAPGPDGITKGDLKGERVSEVLAKFFNILLMSKYYPNQWRKNRTTLIPKVGKDPGDIKNWCPITISSMLSRIFSALVDKRLRRTIEQSNRQKGFKHENGCFANVRILSSALKILKENGGVLGIEDVAKAFDTVPHGAIIPALRRKGMHPEVAAYVANMYNNCETSIKTKEGGVSITLKRGVKQGDPLSPLIFNLCIEPIIERLQATTEGIKIEGRNLTAMAFADDLVLIGSNKETAEKQMRMLVEYLGAMGMELSVGKCTAMEFVRANKSWFIKDPEININGVKVPSAQVGEAIRYLGTKITPWKGLIESFECDAFEELMARLKRVPLKPMQKLELLTMYLLPRYTYCLIMNPPSQNTLKKINRLVREEVKKMLHISEKTNTPFLYVPKRLGGLGLVNIEDMVKIAVLKNAKKAKDSKDPITGLAITYEKIEPRLKEYAKSLGVNWPTTLEDLDICKGRMKNGYIGQWAQLKVQGQGASEYLHRVSKAWLTRNDIFKHSRIADAIKLRTNTYPTRVCMKQFVAKGQPRFDTKCRRCRGPQETLGHILGECCATKPKRIQRHNEIRDLIANKLAANHVVCLEQSFQSETGTLRPDLVIKMNEEEAYVIDITVRFEKGNYLSKAAEEKKTKYRGLVPQVIRQLGVSTESVMPIVIGSRGAIPTATLGAIKKLGLSSKEAVTMSMIAIRSSTEMANEFMDYEELLKEKDRSIKLNKDYA

SEQ ID NO: 4002 - protein, 982 aa, Lasioglossum morio
MPGCGRIFRNARGRGVHEQKAHKNWHDERQVENLDPKKTPWSSEESALLARQEAQLTIDGVRFINQELIPFFPNRTLEAIKGQKKYQKHKQLVLKYIEEMENRNQEVPHNQQVENDNHQSTNQHTELAAEVDKLMRQLKPLSGTDFCVGRLGHICDNIVRFSHTQISEYLESYLLEVFPPPPKRRKPKPPQPLDGITSRRRARRIEYAQTQRAWKKNPCDCLRRILKDKTSASIPPKDVMVPFWNAVMTGGSDRSPGVDSGTRAKDQLWAPIMPEEIKESFPEMTTSPGPDGLSARQLRAIPLGILTRILNIFLLCGRLPKHLLESRTTLIPKKDGASEPGDFRPISVSSVLTRTYHKVLAKRLMRLVTLDERQKAFVPVDGCAENIFDLDLILRHHRQSFKPLYVASVDVAKAFDSVSHNTLKDTMISKGLPHPMVEYIMDVYRRSVTRLVCDGWESDPIHPTCGVKQGDPLSPILFNMVMDRLLQLIPTEVGVEVGAKRFNAFAFADDLVFVATTTKGLQLMLDQSTNYLAQCGMAVNAAKSFTVALRNVPHVKKSVVDGKIQFSCAGRKIPSLRRSDEWRYLGVPFTPEGRLNGHEEDQLKSALERLTKAPLKPQQRLFGLRVMVLPGLYHVLTLGGTTLSKLKKIDRLVRGAVRKWLVLPHDVTNAYIHASVKDGGLSVPSMRWLMPLRRRERLARYIEKDNQSCSYLSLEIQRAQRRLQIDRMDINSAQKLEERWAHLLHSSIDGGGLKESRKVPQQHQWVTDGNRLLSGKDFVFMTKLRINALPTRSRTTRGRPSDRNCRAGCREVETITHILQRCHRTHAARIDRHNAVVAYVKRALSKRFNNIEEEPKFHTSEGIRKPDLLAVCDNKAIVIDAQVVSEHTDLAEAHKRKIDYYKSLEGAIKKERKVESVRFTSATLSSRGVWSKDSVDDLIGGHILRKKELKIVSTRVLVGGLNAFWKFNKMTTNRRVERQGIG

SEQ ID NO: 4003 - protein, 937 aa, Conopomorpha cramerella
MERSVCPHCPQSGRSYVVPHGLKIHIGRMHRGEVVSSQTARADDAPGPLSGSAPMPAVDWSSIPNFKKNIRVLKHIPKGARCAAAGKLSGVIEKCLQTNSCEDWYALFTFSYVALSLPDKQDSRSLTTKVKENVERTMIMESNFSPRSTRPTLHRVIEGKVHDGDLRGAVRLLMSDSSLAPENEETLNALREKHPNPSRPLSFPDEPNAANDVPSISLGSVVQALGSFHRGSAAGLDGLRPSHLMELTSIAAGDCGRQLLETLTRLVNFLLKGLLNREVCPIFYGASLCALEKKDGGVRPIAVGSVLRRLVAKIGCAIVKQEMGGYLRPQQLGFGTPLGCEAVIQATRAFAVAGEGTGDVILKLDIRNAFNCVERDTLLTEVREHIPILYPFLHQCYFSSSRLFYNASTLLSQTGAQQGDPLGPLIFSLAIHKIISQINTKLNIWYLDDGTIGGNPDLVLVCVRQVIEKFKGIGLVVNSNKCEIYFCDGPAQPELQAFQEVLPGIEVLNKSNFMVLGAPIFPEAIPIALESKVQHLQNSRRHLADLSAHVSLTLLRNCLALPKLTFFLRTCPVYRYRHEVSLFDDTLRVILEETLNVGMSESQWTQAALPVRHGGLGVRRVQDVSLPAFLASSHGVMDLVTDILPDQGDSFRLPLLDEALAEWVARSQSLDLPEHPSVQRCWDDILSKNIITALIESSEGVERARLKAATRPESGAWLHALPSPQLGTFLDDDSLRIAVALRLGSDVCEPHRCFCGVQVGANGHHGLSCLRCVGRFPRHHALNDVIRRALVQANIPCVLEPAGLCRTDGKRPDGLTLVPWEKGKCLLWDATCVGTFSASHMPSTVKTAGSAAEAAARQKHLKYAELKRRYLFVPLAFETSGVWGAEAISFIAAIGKRLRDRGHDRKAGTYLTQRLSIAIQRGNAASVLGAFEPSSRL

SEQ ID NO: 4004 - protein, 1131 aa, Bombus superbus
MNKRTIYNASDATLLGPGSVVAESSAQEGTMEIETGASLDYETTYNITVPLIGDSIICPICKEKEAHFSFVSLKDLEKHITKHHTNAPIRWNCYKCQKGFSKLHGTNCHIPKCTGPIEGNQEASFACAGCSMSFSTKRGLSQHERHVHPAERNRKRQKTSSAGFRNTEGRGIWSEEEICRLKELDALYRDYKFPNIEISKHLTSKTSDQIRHKRKDLKRIATETSNSPESAEDSDSSPNLDNPIMMENSYGISDTRDPEERWRNDLRTAIEYSTEVPPRICGIDDKFNKIWADNFNNINKLTSEIELFIENDLYGALRDEAQETPHIPKKKEEKRPRRGTKINRNRKKRFVYARCQEMYKECPKKLAEMIIQDDLGFLNPPTSPPPMNEINQHYKELWGRRGPPNAITTTNIIPPHPIDLVFPPICAEEVSRKVRKLRNKTAAGPDGLQKKHLQVPGLPIVLAKLYNLLCYCSYFPTKWKKNRTTLIPKANKDLSVAQNWRPITIGSILSRIFSSLVDARLRNTINQNKRQKGFTSERGCKHNIELLKAAMERSKKEEGGIFTIIDISKAFDSIPHSVIGPSLRRKGIPAPIIKLIDDMYNGCKTCIRGNKGDGLQIEILRGVKQGDPLSPILFNLCLEPLLEAMEAKFDGIKINEGNKIPVLAFADDIALLAKNKAEAQKQVNLLNKYLNNMDMKVSAEKCLTFQISSKKDTWTLEDPDIKISNTKISSAKPDDIFRYLGAKIGPWKGMHCGIIVPEIIKIIKNVRKLALKPARKIDLLVKYIFSRYVYSMLICPPSVSVLKLLDNEIRQEVKQILHLVPSTATGFFYTPKKNGGFLRYPILLHVQSAVKIQESSDPATSSLIDESYNKKLKKIANSIRINWPASLEEIERSRRRLKRSHIQQWALLRSQGQGVNDFARDNFGNKWIGEHSLLKPSRYIDAIRLRTNTFGTRTVLARADKKINTMCRRCHAQPETLGHILGLCQYTKKLRIKRHDEVKNLLANELRKKNEVFVEPTVKVGDNLLRPDLVVKNEARLLVVDVTVSYENKDYLQKAETEKINKYHECLHYLQKKFNIDEGEVLPIVLGSRGAVTPKTAENLRSMGIKDKDIKTIAINVLRSSIEISNIFLDG

SEQ ID NO: 4005 - protein, 1079 aa, Nilaparvata lugens
MALTKSISYSIPLIENVCSLCNNFFQKANALFLHHKNMHSDIDVYFECNKCNKKFPKPHAAFCHIPKCNPSTSNVLLNFNCTICNNSFATKIGLSQHKRHKHPSERILERTRLAATNNPSNRGAKLSVWSASEIKVLLNFFQTRTTMVDYVNDLSPLLPTKSKIQLREKVRQLKNQNKLILANSTPSIHEIFNDEPILNISPTSEQATINVLTQPQVSWCDSVRDSWLDTEHKSDICKWLFSKWNNNEFLSEETISELVNKVTDEILNGANETSKKKSQNFYSRNSSRHNKSSKRKRYANTQEMYRKCPNRLADLCRKNQMENLLNIPNELPPRLEICKIYNDLWNKESRSSFDFQIGPSPPININFISNREIRTFLKRMKPNGAAGPDGIKRELILKNPTNYENISALFNVLVFHQFYPDQWSLNYTTFIPKEGKDLTKGTNWRPITVGNLLSRLYSGCLDRRLRKMVNLDKAQKGFMKGNGRFENIAAFNSIIKLGKKTNLNFGIVDISKAFDSVSHDAIIGCLSRLGIDNKTRSIIKSMYQNSKTVLKNCGNETVPIKRGVKQGDPLSPFLFNCILDPLIEILNKSDIGFSTTNGNKIPVLAFADDLILLGNDNNELQKLFDLSINYLEKVGLSLSPNKCGSLGFKAWRDTWIQSDSKIKVYDTLIKEYKIDEPFRYLGAYFTGNLGLNNENNYNEILSSVDRASKLCLKPMQKVALISRFILPGYYHLMIDDLPSGNIFSRLDRELRGKIKKILHLPSNTSDGLIYSRKRDGGLGFPRLERIAIPAHLKAMSNLIFSTDQRWENLIEEKIRIKCRNMANNLNIDWPVSLDKLNLAKEKLKNKEHSSWESQTTQGKGVKCFKNNKLSNCWLLDSLLYPGEEIDLLKMRSNVFPLNECMSRVDATVDPLCRHCHHKIESLGHVLGECPFGKGARLSRHNFIVDEVEKLMLNSGFVVAKEELFKSDSGLLRPDLVIKTPGKSLIIDVTVRFEQDNSLIEAFREKKGKYLQISESVKSKFEVNNVEVLPLVFGARGGLPNKTVKNLSLLGITDINIIKNWIVQILHRSISICRMHLDGG

SEQ ID NO: 4006 - protein, 977 aa, Montipora cactus
MWLRQIESKIKDLRKEISQITEEIRRIRKNGKLTTKMRKNRRWMRRQMKANITIARLTQLKERKLNQLRLKKQEKDKKQKASERHQANKQFDEHESQFYERCRNIIRSDPDNTRPLYKKPNHTASQQHDNLATQDFEQFWRPIWETAASENLESKWIKEIRSILQSHAPAQSTKSVVITAELYYNSIKKKKNWSSPGKDKITNFWIKKLTALHPQIATALTEIINKELSLPSWLQEGRCIMIPKKEEPAAKDHRPITCLNTLYKAVTSVIDELLKEHEATHQLMQIDQKGCKQGSMGCIDNLLIDKAMLEDAQFNKKNITCVWVDVKKAFDSVSHKWLELCLEHHGLPTKLTAFIKNIIKKWEITLEVTTKDGKDKIGPISLHRGILQGDSFSVRLFTMCLNPISWSLRNNQGYTLTKLPQHKLTHLLYVDDLKTYHKTPTKAMMETRRMESMFRDVGLEWGLDKCATVTVSKGKIVSAENLILNEDDSINVLQDKDHYKFLGKLENAAQLDDEVFDQVNKEYLKRLSVIWSSNISMPRKIKATNTFALPVIQYHMWTVDWRLNDLRQLDRETRKVIQEHGGMHNSGSSKLLYLPTYQRGQGLIEIETIYKITKIKVSNYLMRSEDPRLQLVRRFEEMKVAKGLKSVLKDAANYAKGLGITITFDKAKTVLTNEDQKTIEVQQSSPKHISNFLTQAKNSIYMKETSEQKWLGAFTTAQSEDKEMATDVCKLLQKWRNIPDIVYSVNTNLRQQLLPTKTYEKTKLHQHVDDLKCRMCSQKQETVTHIMSACPKIAQSLYTSRHDKMLRPYYHYLLSAYGFNEESDHKRPWYQQRPPIPVIENSLAKVNWNIEFHMEKKPENNANKVDIAVMDKEKKVWLLIEGTVCGIGLISDRWKTKQDKYRELRTGIKQQYPDYKVNQVNVVFDFLAEYHQSLKNDLNEHLTGKSEEETQYLIMKSQKWIISQNVEIVKNFYTYKR

SEQ ID NO: 4007 - protein, 737 aa, Astreopora myriophthalma
MIPKKEEPTAKDHRPITCLNTLYKAITSVIDELLREHEATHQLMQIDQKGCKQGSMGCIDNLLIDKAILEDAQFNRKNITCVWVDVKKAFDSVSHKWLELCLEHHGLPTKLTALIKNIIKNWEITLEVTAKDGKDKIGPISLQRGILQGDSFCVRLFTMCLNPISWSLRNNQGYTLTKLLQHKLTHLLYVDDLKTYHRTPTKAMIETRRMESMFSDIGLEWGLDKCATVTVSKGKLVSAENLTLNENDSISVLQDKDHYKFLGKLENFAQLDDEVFDQVSKEYLKRLNVIWSSNISIPRKIKATNTFALPVIQYHMWTVDWRLNDLRQLDRETRKTIQEHGGMHNSESTKMLYLPTYQRGQGLTEIETTYKITKIKVSNYLMRSEDPRLQLVRRFEESKIAKGRKSVLKDATNYAKGLGITITFDKTKTVLTNEDQKTIEVQQASPKHISDFLTQAKNSIYMKETTEQKWLGAFTTAQSKDKEMAADVCKLLQKWRNIPDIVYSVNTNLRQQLLPTKTYEKAKLQQHVDDLNCRMCSQKQETVTHVMSACSKIAQSLYTSRHDKMLRPYYHFLLSVYGFNEESDHKRPWYQQRPPIPVIENSLAKINWNIEFHIEKKPENNANKVDIAVIDKEKKTWLLIEGTVCGTGLISDRWKTKQDNYRELRAGIKHQYPDYKVNQVNVVFDFLAEYHQSQKNDINEHLTGKKEEETQYLIMKSQKWIMLQNVEIVKNFYTYKR

SEQ ID NO: 4008 - protein, 977 aa, Montipora cactus
MWLRQIESKIKDLRKEISQITEEIRRIRKNGKLTTKMRKNRRWMRRQMKANITMARLTQLKERKLNQLRLKKQEKDKKQKASERHQANKQFDEHESQFYERCRNIIRSDPGNTRPLYKKPNHTASQQHDNLATQDFEQFWRPTWETAASENLESKWIKEIRSILQSHAPAQSTESVVITAELYYNSIKKKKNWSSPGKDKITNFWIKKLTALHPQIVRALTEIINKELSLPSWLQEGRCIMIPKKEEPAAKDHRPITCLNTLYKAVTSVIDELLKEHEATHQLLQIDQKGCKQGSMGCIDNLLIDKAMLEDAQFNKKNITCVWVDVKKAFDSVSHKWLELCLEHHGLPTKLTAFIKNIIKKWEITLEVTTKDGKDKIGSISLHRGILQGDSFSVRLFIMCLNPISWSLRNNQGYTLTKLPQHKLTHLLYVDDLKTYHKTPTKAMMETRRMESMFRDIGLEWGLDKCATVTVSKGKIVSAENLILNGNASINVLQDKDHYKFLGKLENAAQLDDEVFDQVNKEYLKRLSVIWSSNISMPRKIKATNTFALPVIQYHMWTADWRLTDLRQLDRETRKVIQEHGGMHNSGSSKLLYLPTYQRGQGLIEIETIYKITKIKVSNYLMRSEDPRLQLVRRFEEMKVAKGLKSVLKDAANYAKDLGITITFDKAKTVLTNEDQKTIEVQQASPKHISNFLTQAKSSIYMKETSEQKWLGAFTTAQSEDKEMATDVCKLLQKWRNIPDIVYSVNTNLRQQLLPTKTYEKTKLHQHVDDLKCRMCSQKQETVTHIMSACPKIAQSLYTSRHDKMLRPYYHYLLSAYGFNEESDHKRPWYQQRPPIPVIENSLAKVNWNIEFHMEKKPENNANKVDIAVMDKEKKVWLLIEGTVCGIGLISDRWKTKQDKYRELRKGIKQQYPDYKVNQVNVVFDFLAEYHQSLKNDLNEHLTGKNEEETQYLIMKSQKWIISQNVEIVKNFYTYKR

SEQ ID NO: 4009 - protein, 1237 aa, Montipora capitata
MRFTSQLLVLWIISTTMQHVRSQKETSKEAGETNVGKTSCKRTKWTAKMNADLVDSRKEANALYSTQDCPRKESGRKIGIMELTKRLWDAKGYAELNKSSQNLRDQYAKIMNAASQPESQFLNNELGNQTMPTTTERSGTIDGNENTTTTEQSCNEPSEEYITMANNAKKWYEITSQVKERIWSERTSSTFCKKVPNNKDIKELGNIASNLITLDPKEHPRDYLWQCNCAIYSVAAAWKEGTEKRKSRQNEGKKTQEYQPMWLRQIESKIKDLRKEISQITEEIRRIRKNGKLTTKMRKNRRWMRRQMKANITIARLTQLKERKLNQLRLKKQEKDKKQKASERHQANKQFDEHESQFYERCRNIIRSDPDNTRPLYKKPNHTASQQHDNLTTQDFEQFWRPIWETAASENLESKWIKEIRSILQSHAPAQSTESVVITAELYYNSIKKKKNWSSPGKDKITNFWIKKLTALHPQIATALTEIINKELSLPSWLQEGRCIMIPKKEEPAAKDHRPITCLNTLYKAVTSVIDELLKEHEATHQLMQIDQKGCKQGSMGCIDNLLIDKAMLEDAQFNKKNITCVWVDVKKAFDSVSHKWLELCLEHHGLPTKLTAFIKNIIKKWEITLEVTTKDGKDKIGPISLHRGILQGDSFSVRLFTMCLNPISWSLRNNQGYTLTKLPQHKLTHLLYVDDLKTYHKTPTKAMMETRRMESMFRDIGLEWGLDKCATVTVSKGKIVSAENLILNENASINVLQDKDHYKFLGKLENAAQLDDEVFDQVNKEYLKRLSVIWSSNISMPRKIKATNTFALPVIQYHMWTVDWRLNDLRQLDRETRKVIQEHGGMHNSGSSKLLYLPTYQRGQGLIEIETIYKITKIKVSNYLMRSEDPRLQLVRRFEEMKVAKGLKSVLKDAANYAKDLGITITFDKAKTVLTNEDQKTIEVQQASPKHISNFLTQAKNSIYMKETSEQKWLGAFTTAQSEDKEMATDVCKLLQKWRNIPDIVYSVNTNLRQQLLPTKTYEKTKLHQHVDDLKCRMCSQKQETVTHIMSACPKIAQSLYTSRHDKMLRPYYHYLLSAYGFNEESDHKRPWYQQRPPIPVIENSLAKVNWNIEFHMEKKPENNANKVDIAVMDKEKKVWLLIEGTVCGIGLISDRWKTKQDKYRELRTGIKQQYPDYKVNQVNVVFDFLAEYHQSLKNDLNEHLTGKNEEETQYLIMKSQKWIISQNVEIVKNFYTYKR

SEQ ID NO: 4010 - protein, 1107 aa, Acropora muricata
MPTTTERSGTINGDENTATIEQSSNEPSEEYNTLANNAKKWYEVISRVKEKNWSERMSNTFCKNVPKNKDIKELGNIASNLITLDPKEHPRDYLWQCNCAIYSVAVAWKENTEKQKIRQNKGKKTQEYQPKWLRQIESKIKDLRKEISQITEEVRRMRKNGKLTTKMWKNRQWMRCQLKASVTIARLTQLKERKLNQLRLKKKGKDKKQKKSDRHQANKQFDEHESQFYEHCRNIIRSDPDNIRPLNRKPNQTTSQQRSNLATQEFEQFWRPNWETAPSENLESRWIKEIRSILQSHAPAQATESIVITTELYYNSIKKKKNWSAPGKDKITNFWIKKLTVLHQQKATALTEIINKELSLPSWLQEGRCIMIPKKEEPAAKDHRPITCLNTLYKAITSVIDELLKEHEAAHQLMQIDQKGCKQGSMGCIDNLLMDKAILEDAQFNRKNITCVWVDVKKAFDSVSHKWLELCLEHHGLPAKLTAFIKTIVKKWKITLEVTTENGKNKIGPISLHRGILQGDSFCVRLFTMCLNPISWSLRNNQGYTLTKVPQHKLTHLLYVDDLKTFHKTPTKAMVETRRMESMFNDIGLEWGLDKCATITISKGKIVPAENLILNENASINVLQGKDPYKFLGKLENFAQLDDEVFDQASKEYLKRLNVIWSSNISIPRKIKATNTFALPVIQYHMWTAEWRLNDLRQLDRETRKVIQEYGGMHSSGSTKLLYLPTYQRGQGLTEIETIYKITKIKLSNYLMRSEDPRLQLVRRFEEMKSAKGLKSVLKDAANYAKGLGITIAFDKTRTVLTNEDQKIIEVQQASPKHISNFLTQVKNNIYMKETAEQKWLGAFTTAQSEDKQMAADVCKLLQKWRNIPDIVYSVNTNLRQQLLPTKTYEKCKLQQHLDDLNCRMCSQKQETVTHIMSACSKIAQSLYTARHDKMLRPYYHYLLSTYGFKAESDHKRPWYQQRSPMPVIENSLAKINWNIEFHMEKKPENNANKVDIAVMDKEKKTWLLIEGTVCGIGLISDRWKTKQDKYRELRAGIRHQYPDYKVNQVNVVFDFLAEYHQSLKNDLNEHLTGKNEEEAQYLIMKSQKWIISQNVEIVKNFYTYKR

SEQ ID NO: 4011 - protein, 977 aa, Montipora capitata
MWLRQIESKIKDLRKEISQITEEIRRIRKNGKLTTKMRKNRQWMRRQMKANITIARLTQLKERKLNQLRLKKQEKDKKQKASERHQANKQFDEHESQFYERCRNIIRSDPDNTRPLYKKQNHTASQQHDNLATQDFEQFWRPIWETAASENLESKWIKEIRSILQSHAPAQFTESVVITAELYYNSIKKKKNWSSPGKDKITNFWIKKLTALHPQIATALTEIINKELSLPSWLQEGRCIMIPKKEEPAAKDHRPITCLNTLYKAVTSVIDELLKEHEATHQLMQIDQKGCKQGSMGCIDNLLIDKAMLEDAQFNKKNITCVWVHVKKAFDSVSHKWLELCLEHHGLPTKLTAFIKNIIKKWEITLEVTTKDGKDKIGPISLHRGILQGDSFSVRLFTMCLNPISWSLRNNQGYTLTKLPQHKLTHLLYVDDLKTYHKTPTKAMMETRRMESMFRDIGLEWGLDKCATVTVTKGKIVSAENLILNENASINVLQDKDHYKFLGKLENAAQLDDEVFDQVNKEYLKRLSVIWSSNISMPRKIKATNTFALPVIQYHMWTVDWRLNDLRQLDRETRKVIQEHGGMHNSGSSKLLYLPTYQRGQGLIEIETIYKITKIKVSNYLMRSEDPRLQLVRRFEEMKVAKGLKSVLKDAANYAKGLGITITFDKAKTVLTNEDQKTIEVQQASPKHISNFLTQAKNSIYMKETSEQKWLGAFTTAQSEDKEMATDVCKLLQKWRNIPEIVYSVNTNLRQQLLPTKTYEKTKLHQHVDDLKCRMCSQKQETVTHIMSARPKIAQSLYTSRHDKMLRPYYHYLLSAYGFNEESDHKRPWYQQRPPIPVIENSLAKVNWNIEFHMEKKPENNANKVDIAVMDKEKKVWLLIEGTVCGIGLISDRWKTKQDKYRELRTGIKQQYPDYKVNQVNVVFDFLAGYHQSLKNDLNEHLTGKNEEETQYLIMKSQKWIISQNVEIVKNFYTYKR

SEQ ID NO: 4012 - protein, 1214 aa, Acropora microphthalma
MSDEDGRQNSTRSGRLKWTDAMNRDLIKCKYKAKEMTESNNPPLKADGKPKGYMQVMKELWDEMGYAGLNIPKQNLRNQVAYVEKSLGDVSEVIRNNVGWRGIEEQESDETDSGREYQFISGSEIINSQCEQPTRLNLHTSANINSQEANELIDLASPLYELIVAVPGDFSNRLIDTRTKEQPTRADIQNINDACGRLLCSKTTGNPHNDPFRHLWVIDCILYAVVAAFLVYKGWKKERSGNNRVVAEKDKDVLEKQVKEIRRKLSIAKAELDRIKKNDRITRKGRRNRKELLKECKVISVGELVNFMEKEKTRLRKLKRAYAQKKKTEKARKINKAFQQDPGRVYSSLREMASEQADKERPKYEARRETQSDGVFENIEQAASYWKALWESEGTGNKSAEWLEEVRQAIAGCVPESCMGECDIEYDQVKKVIVKKRNWSAPGPDRIVNYWWKRAETLHESVALSFREIGFDDNDVPLWFTQGKTSLIPKPGAFSSDNTRPITCLNTIYKWYTSCLLGPMDEHLRKYGLMQGDQRGAKEGCCGTGDNLLIDRTVCQDSQRGKRNVSMAWVDVRKAYDSVDHGWLREMFTVHKFPVWLCKVINKLSASWNTRISVRTAQGVETSEVITFRRGLPQGDALCPRLFTLCINPVSWMLKATEGYRLSKPIGKAVTHLLYIDDLKIFAASREKLRRAMAAVRGAMMDIGLEWNERKCSVAHVKRGTLEPEESESAGDSEREVKSLAEGSHYKFLGVMENTKQDDDLSLQIAGKAYLQRLSLIWSSPLSDYNKVQASNQFAMPVLSYLMPTQCWPVAELKRLDREARKVIVENGGKHPLGSTALLYLPRMLGGRGLKSVEREYKQTKIKAVVRLYRNEDPAMEVVRQFEERSEEKGRRSMVKDAKKYASEFGLKLSLVHPQPLITCLMKDEEVPVKKIGVWLKTAAAERDVEELKVEGWQGSLLSERWEDQEVGEECFSWMSEWKTAPTHTIAGLQELYQQLLPTKVYHQKKTGTHKSQDVKCRMCGKAAETQAHVLAGCGALAQSKYMTRHNAALKVIFYELLKDLDLVTSVPPWYSQNTPKPLYENEKGKALWDVPLYAEYAEVRNNRIDCTVIDKEKKKVVLLEMSCPWVSNRETKCAEKTSKYAPLRYELRRRYPGYKTEQHNIIIDALGGSSRSVKESLRQLVGSGRCKSVLRNMQKAVISSSLNIARTFKVLSD

SEQ ID NO: 4013 - protein, 1214 aa, Acropora microphthalma
MSDEDGRQNSTRSGRLKWTDAMNRDLIKCKFKAKEMTESNNPPLKAGGKPKGYMQVMKELWDEMGYAGLNIPKQNLRNQVAYVEKSLGDVSEVIRNNVGWRGIEEQESDETDSGREYQFISGSEIINSQCEQPTRLNLHTSANINSQEANELIDLASPLYELIVAVPGDFSNRLIDTRTKEQPTRADIQNINDACGRLLCSKTTGNPHNDPFRHLWVIDCILYAVVAAFLVYKGWKKERSGNNRVVAEKDKDVLEKQVKEIRRKLSIAKAELDRIKKNDRITRKGRRNRKELLKECKVISVGELVNFMEKEKTRLRKLKRAYAQKKKTEKARKINKAFQQDPGRVYSSLREMASEQADKERPKYEARRETQSDGVFENIEQAASYWKALWESEGTGNKSAEWLEEVRQAIAGCVPESCMGECDIEYDQVKKVIVKKRNWSAPGPDRIVNYWWKRAETLHESVALSFREIGFDDNDVPLWFTQGKTSLIPKPGAFSSDNTRPITCLNTIYKWYTSCLLGPMDEHLKKYGLMQGDQRGAKEGCCGTGDNLLIDRTVCQDSQRGKRNVSMAWVDVRKAYDSVDHGWLREMFTVHKFPVWLCKVINKLSASWNTRISVRTAQGVETSEVITFRRGLPQGDALCPRLFTLCINPVSWMLKATEGYRLSKPIGKAVTHLLYIDDLKIFAASREKLRRAMAAVRGAMMDIGLEWNERKCSVAHVKRGTLEPEESESAGDSEREVKSLAEGSHYKFLGVMENTKQDDDLSLQIAGKAYLQRLSLIWSSPLSDYNKVQASNQFAMPVLSYLMPTQCWPVAELKRLDREARKVIVENGGKHPLGSTALLYLPRMLGGRGLKSVEREYKQTKIKAVVRLYRNEDPAMEVVRQFEERSEEKGRRSMVKDAKKYASEFGLKLSLVHPQPLITCLMKDEEVPVKKIGVWLKTAAAERDVEELKVEGWQGSLLSERWEDQEVGEECFSWMSEWKTAPTHTIAGLQELYQQLLPTKVYHQKKTGTHKSQDVKCRMCGKAAETQAHVLAGCGALAQSKYMTRHNAALKVIFYELLKDLDLVTSVPPWYSQNTPKPLYENEKGKALWDVPLYAEYAEVRNNRIDCTVIDKEKKKVVLLEMSCPWVSNRETKCAEKTSKYAPLRYELRRRYPGYKTEQHNIIIDALGGSSRSVKESLRQLVGSGRCKSVLRNMQKAVISSSLNIARTFKVLSD

SEQ ID NO: 4014 - protein, 980 aa, Acropora millepora
MSYSCIITYHNSENDSDNNNNNNNNNNNNCNNKIKAELDRIKKNDRITRKGRRNRKELLKECKVISVGELVNFMEKEKTRLRKLKRAYAQKKKTEKARKINKAFQQDPGRVYSSLREMASEQADKERPKYEARRETQSDGVFENIEQAASYWKALWESEGTGNKSAEWLEEVRQAIAGCVPESCMGECDIEYDQVKKVIVKKRNWSAPGPDRIVNYWWKRAETLHESVALSFREIGLDDNDVPLWFTQGKTSLIPKPGAFSSDNTRPITCLNTIYKWYTSCLLGPMDEHLKKYGLMQGDQRGAKEGCCGTGDNLLIDRTVCQDSQRGKRNVSMAWVDVRKAYDSVDHGWLREMFTVHKFPVWLCKVINKLSASWNTRISVRTAQGVETSEVITFRRGLPQGDALCPRLFTLCINPVSWMLKATEGYRLSKPIGKAVTHLLYIDDLKIFAASREKLRRAMAAVRGAMMDIGLEWNERKCSVAHVKRGTLEPEESESAGDSEREVKSLAEGSHYKFLGVMENTKQDDDLSLQIAGKAYLQRLSLIWSSPLSDYNKVQASNQFAMPVLSYLMPTQCWPVVELKRLDREARKVIVENGGKHPLGSTALLYLPRMLGGRGLKSVEREYKQTKIKAVVRLYRNEDPAMEVVRQFEERSEEKGRRSMVKDAKKYASEFGLKLSLVHPQPLITCLMKDEEVPVKKIGVWLKTAAAERDVEELKVEGWQGSLLSERWEDQEVGEECFSWMSEWKTAPTHTIAGLQELYQQLLPTKVYHQKKTGTHKSQDVKCRMCGKAAQTQAHVLAGCGALAQSKYMTRHNAALKVIFYELLKDLDLVTSVPPWYSQNTPKPLYENEKGKALWDVPLYAEYAEVRNNRIDCTVIDKEKKKVVLLEMSCPWVSNRETKCAEKTSKYAPLRYELRRRYPGYKTEQHNIIIDALGGSSRSVKESLRQLVGSGRCNSVLRNMQKAVISSSLNIARTFKVLSD

SEQ ID NO: 4015 - protein, 1092 aa, Acropora hyacinthus
MTCCSEHNNNNNNNNNNNNANINSQEANELIDLASPLYELIVAVPGDFSNRLIDTRTKEQPTRADIQNINDACGRLLCSKTTGNPHNDPFRHLWVIDCILYAVVAAFLVYKGWKKERSRTNLVVAEKDKDVLEKQVKEIRRKLSIAKAELNRIKKNDRITRKGRRNRKELLKECKVISVGELVNLMEKEKTRLRKLKRAYARKKKTEKARKINKAFQQDPGRVYSSLREMASEQADKEKPKYEARRETQSDGVFENIEQAASYWKALWESEGTGNKSAEWLEEVRQAIAGCVPESCMGECDIEYDQVKKVIVKKRNWSAPGPDRIVNYWWKRAETLHESVALSFREIGLDDNDVPLWFTQGKTSLIPKPGAFSSDNTRPITCLNTIYKWYTSCLLGPIDEHLKKYGLMQGDQRGAKEGCCGTGDNLLIDRTVCQDSQRGKRNVSMAWVDVRKAYDSVDHGWLREMFTVHKFPVWLCKVINKLSASWNTRISVRTAQGVETSEVITFRRGLPQGDALCPRLFTLCINPVSWMLKATEGYRLSKPIGKAVTHLLYIDDLKIFAASREKLRRAMAAVRGAMMDIGLEWNERKCSVAHVKRGTLEPEESESAGDSEREVKSLAEGSHYKFLGVMENTKQDDDLSLQIAGKAYLQRLSLIWSSPLSDYNKVQASNQFAMPVLSYLMPTQCWPVVELKRLDREARKVIVENGGKHPLGSTALLYLPRMLGGRGLKSVEREYKQTKIKAVVRLYRNEDPAMEVVRQFEERSEEKGRRSMVKDAKKYASEFGLKLSLVHPQPLITCLMKDEEVPVKKIGVWLKTAAAERDVEELKVEGWQGSLLSERWEDQEVGEECFSWMSEWKTAPTHTIAGLQELYQQLLPTKVYHQKKTGTHKSQDVKCRMCGKAAETQAHVLAGCGALAQSKYMTRHNAALKVIFYELLKDLDLVTSVPPWYSQNTPKPLYENEKGKALWDVPLYAEYAEVRNNRIDCTVIDKEKKKVVLLEMSCPWVSNRETKCAEKTSKYAPLRYELRRRYPGYKTEQHNIIIDALGGSSRSVKESLRQLVGSGRCKSVLRNMQKAVISSSLNIARTFKVLSD

SEQ ID NO: 4016 - protein, 863 aa, Acropora microphthalma
MASEQADKERPKYEARRETQSDGVFENIEQAASYWKALWESEGTGNKSAEWLEEVRQAIAGCVPESCMGECDIEYDQVKKVIVKKRNWSAPGPDRIVNYWWKRAETLHESVALSFREIGFDDNDVPLWFTQGKTSLIPKPGAFSSDNTRPITCLNTIYKWYTSCLLGPMDEHLKKYGLMQGDQRGAKEGCCGTGDNLLIDRTVCQDSQRGKRNVSMAWVDVRKAYDSVDHGWLREMFTVHKFPVWLCKVINKLSASWNTRISVRTAQGVETSEVITFRRGLPQGDALCPRLFTLCINPVSWMLKATEGYRLSKPIGKAVTHLLYIDDLKIFAASREKLRRAMAAVRGAMMDIGLEWNERKCSVAHVKRGTLEPEESESAGDSEREVKSLAEGSHYKFLGVMENTKQDDDLSLQIAGKAYLQRLSLIWSSPLSDYNKVQASNQFAMPVLSYLMPTQCWPVAELKRLDREARKVIVENGGKHPLGSTALLYLPRMLGGRGLKSVEREYKQTKIKAVVRLYRNEDPAMEVVRQFEERSEEKGRRSMVKDAKKYASEFGLKLSLVHPQPLITCLMKDEEVPVKKIGVWLKTAAAERDVEELKVEGWQGSLLSERWEDQEVGEECFSWMSEWKTAPTHTIAGLQELYQQLLPTKVYHQKKTGSHKSQDVKCRMCGKATETQAHVLAGCGALAQSKYMTRHNAALKVIFYELLKDLDLVTSVPPWYSQNTPKPLYENEKGKALWDVPLYAEYAEVRNNRIDCTVIDKEKKKVVLLEMSCPWVSNRETKCAEKTSKYAPLRYELRRRYPGYKTEQHNIIIDALGGSSRSVKESLRQLVGSGRCKSVLRNMQKAVISSSLNIARTFKVLSD

SEQ ID NO: 4017 - protein, 1214 aa, Acropora hyacinthus
MSDEDGRQNSTRSGRLKWTDAMNRDLIKCKYKGKEMTESNNPPLKADGKPKGYMQVMKELWDEMGYAGLNISKQNLRNQVAYVETSLGDVSEVIRNNVGWRGIEEKESDETDSGREYQFIFGSEIINSQCEQPTQLNLHTSANINSQEANELIDLASSLYELIVAVPGDISNRLIDTRTKEQSTRADIQNINDACGRLLCSKTTRNPHNDPFRHLWVIDCILYAVVAAFLVYKGWKKERSGNNRVVAEKDKDVLEKQVKEIRRKLSIAKAELDRIKKNDRITRKGRRNRKELLKEGKVISVGELVNFMEKEKTRLRKLKRAYARKKKTEKARKINKAFQQDPGRVYSSLREMASEQADKERPKYEARRETQSDRVFENIEQAASYWKALWESEGTGNKSAEWLEEVRQAIAGCVPESCMGECDIEYDQVKKVIVKKRNWSAPGPDRIVNYWWKRAETLHESVALSFREIGLDDNDVPLWFTQGKTLLIPKPGAFSSDNTRPITCLNTIYKWYTSCLLGPMDEHLKKYGLMQGDQRGAKEGCCGTGDNLLIDRTVCQDSQRGKRSVSMAWVDVRKAYDSVDHGWLREMFTVHKFPVWLCKVINKLSASWNTRISVRTAQGVETSEVVTFRRVLPQGDALCPRLFTLCINPVSWMLKATEGYRLSKPIGKAVTHLLYIDDLKIFAASREKLRRAMAAVRGAMMDIGLEWNERKCSVAHVKRGTLEPEESESAGDSEREVKSLAEGSHYKFLGVMENTKQDDDLSLQIAGKAYLQRLSLIWSSPLSDYNKVQASNQFAMPVLSYLMPTQCWPVVELKRLDREARKVIVENGGKHPLGSTALLYLPRMLGGRGLKSVEREYKQTKIKAVVRLYRNEDPAMEVVRQFEERSEEKGRRSMVKDAKKYASEFGLKLSLVHPQPFITCLMKDEEVPVKKIGVWLKTATAERDVEELKVEGWQGSLLSERWEDQEVGEECFSWMSEWKTAATHTIAGLQELYQQLLPTKVYHQKKTGTHKSQDVKCHMCGKAAETQAHVLAGCGALAQSKYMTRHNVALKLIFYELLKHLDLVTSVPPWYSQNTPKPLYENEKGKALWDVPLYAEYAEVRNNRIDCTVINKEKKKVVLLEMSCPWVSNRETKCAEKTSKYVPLLYELRRRYPGYKTEQHNIIIDALGVSSRSVKESLRQLVGSGRCNSVLRNMQKAVISSSLNIARTFKVLSD

SEQ ID NO: 4018 - protein, 1214 aa, Acropora hyacinthus
MSDEDGRQNATRSGRLKWTDAMNRDLVKCKYKAKEMRESNNPPLKADGKPKGYMQVMKELWDEMGYAGLNISKQNLRNQVAYVEKSLGDVSEVIRNNVGWRGIEEQESDETDSGREYQFISGSEIINSQCEQPTRLNLHTSANINSQEANELIDLASPLYELIVAVPGDFSNRLIDTRTKEQPTRADIQNINDACGRLLCSKTTGNPHNDPFRHLWVIDCILYAVVAAFLVYKGWKKERSRNNRVVAEKDKDVLEKQVKEIRRKLSIAKAELDRIKKNDRITRKGRRNRKELLKECKVISVGELVNLMEKEKTRLRKLKRAYARKKKTEKARKINKAFQQDPGRVYSSLREMASEQADKEKPKYEARRETQSDGVFENIEQAASYWKALWESEGTGNKSAEWLEEVRQAIAGCVPESCMGECDIEYDQVKKVIVKKRNWSAPGPDRIVNYWWKRAETLHESVALSFREIGLDDNDVPLWFTQGKTSLIPKPGAFSSDNTRPITCLNTIYKWYTSCLLGPMDEHLKKYGLMQGDQRGAKEGCCGTGDNLLIDRTVCQDSQRGKRNVSMAWVDVRKAYDSVDHGWLREMFTVHKFPVWLCKVINKLSASWNTRISVRTAQGVETSEVITFRRGLPQGDALCPRLFTLCINPVSWMLKATEGYRLSKPIGKAVTHLLYIDDLKIFAASREKLRRAMAAVRGAMMDIGLEWNERKCSVAHVKRGTLEPEESESAGDSEREVKSLAEGSHYKFLGVMENTKQDDDLSLQIAGKAYLQRLSLIWSSPLSDYNKVQASNQFAMPVLSYLMPTQCWPVVELKRLDREARKVIVENGGKHPLGSTALLYLPRMLGGRGLKSVEREYKQTKIKAVVRLYRNEDPAMEVVRQFEERSEEKGRRSMVKDAKKYASEFGLKLSLVHPQPLITCLMKDEEVPVKKIGVWLKTAAAERDVEELKVEGWQGSLLSERWEDQEVGEECFSWMSEWKTAPTHTIAGLQELYQQLLPTKVYHQKKTGTHKSQDVKCRMCGKAAETQAHVLAGCGALAQSKYMTRHNAALKVIFYELLKDLDLVTSVPPWYSQNTPKPLYENEKGKALWDVPLYAEYAEVRNNRIDCTVIDKEKKKVVLLEMSCPWVSNRETKCAEKTSKYAPLRYELRRRYPGYKTEQHNIIIDALGGSSRSVKESLHQLVGSGRCKSVLRNMQKAVISSSLNIARTFKILSD

SEQ ID NO: 4019 - protein, 863 aa, Acropora microphthalma
MASKQADKERPKYEARRETQSDGVFENIKQAASYWKALWESEGTGNKSAEWLEEVRQAIAGCVPESCMGECDIEYDQVKKVIVKKRNWSAPGPDRIVNYWWKRAETLHESVALSFREIGFDDNDVPLWFTQGKTSLIPKPGAFSSDNTRPITCLNTIYKWYTSCLLGPMDEHLKKYGLMQGDQRGAKEGCCGTGDNLLIDRTVCQDSQRGKRNVSMAWVDVRKAYDSVDHGWLREMFTVHKFPVWLCKVINKLSASWNTRISVRTAQGVETSEVITFRRGLPQGDALCPRLFTLCINPVSWMLKATEGYRLSKPIGKAVTHLLYIDDLKIFAASREKLRRAMAAVRGAMMDIGLEWNERKCSVAHVKRGTLEPEESESAGDSEREVKSLAEGSHYKFLGVMENTKQDDDLSLQIAGKAYLQRLSLIWSSPLSDYNKVQASNQFAMPVLSYLMPTQCWPVAELKRLDREARKVIVENGGKHPLGSTALLYLPRMLGGRGLKSVEREYKQTKIKAVVRLYRNEDPAMEVVRQFEERSEEKGRRSMVKDAKKYASEFGLKLSLVHPQPLITCLMKDEEVPVKKIGVWLKTAAAERDVEELKVEGWQGSLLSERWEDQEVGEECFSWMSEWKTAPTHTIAGLQELYQQLLPTKVYHQKKTGTHKSQDVKCRMCGKAAETQAHVLAGCGALAQSKYMTRHNAALKVIFYELLKDLDLVTSVPPWYSQNTPKPLYENEKGKALWDVPLYAEYAEVRNNRIDCTVIDKEKKKVVLLEMSCPWVSNRETKCAEKMSKYAPLRYELRRRYPGYKTEQHNIIIDALGGSSRSVKESLRQLVGSGQCKSVLRNMQKAVISSSLNIARTFKVLSD

SEQ ID NO: 4020 - protein, 1214 aa, Acropora nasuta
MSDEDGRQNSTRSGRLKWTDAMNRDLIKCKYKAKEMTESNNPPLKADGKPKGYMQVMKELWDEMGYAGLNISKQNLRNQVAYVEKSLGDVSEVIRNNVGWRGIEEQESDETDSGREYQFISGSEIINSQCEQPTQLNLHTSANINSQEANELIDLASPLYELIVADPGDFSNRLIDTRTKEQPTRADIQNINDACGRLLCSKTTGNPHNDPFRHLWVIDCILYAVVAAFLVYKGWKKERSGNNRVVAEKDKDVLEKQVKEIRRKLSIAKAELDRIKKNDRITRKGRRNRKELLKECKVISVGELVNFMEKEKTRLRKLKRAYARKKKTEKARKINKAFQQDPGRVYSSLREMASEQADKERPKYEARRETQSDGVFENIEQAASYWKALWESEGTGNKSAEWLEEVRQAIAGCVPESCMGECDIEYDQVKKVIVKKRNWSAPGPDRIVNYWWKRAETLHESVALSFREIGFDDNDVPLWFTQGKTSLIPKPGAFSSDNTRPITCLNTIYKWYTSCLLGPMDEHLKKYGLMQGDQRGAKEGCCGTGDNLLIDRTVCQDSQRGKRNVSMAWVDVRKAYDSVDHGWLREMFTVHKFPVWLCKVINKLSASWNTRISVRTAQGVETSEVITFRRGLPQGDALCPRLFTLCINPVSWMLKATEGYRLSKPIGKAVTHLLYIDDLKIFAASREKLRRAMAAVRGAMMDIGLEWNERKCSVAHVKRGTLEPEESESAGDSEREVKSLAVGSHYKFLGVMENTKQDDDLSLQIAGKAYLQRLSLIWSSPLSDYNKVQASNQFAMPVLSYLMPTQCWPVAELKRLDREARKVIVENGGKHPLGSTALLYLPRMLGGRGLKSVEREYKQTKIKAVVRLYRNEDPAMEVVRQFEERSEEKGRRSMVKDAKKYASEFGLKLSLVHPQPLITCLMKDEEVPVKKIGVWLKTAAAERDVEELKVEGWQGSLLSERWEDQGVGEECFSWMSEWKTAPTHTIAGLQELYQQLLPTKVYHQKKTGTHKSQDVKCRMCGKAAETQAHVLAGCGALAQSKYMTRHNAALKVIFYELLKDLDLVTSVPPWYSQNTPKPLYENEKGKALWDVPLYAEYAEVRNNRIDCTVIDKEKKKVVLLEMSCPWVSNRETKCAEKTSKYAPLRYELRRRYPGYKTEQHNIIIDALGGSSRSVKESLRQLVGSGRCNSVLRNMQKAVISSSLNIARTFKVLSD

SEQ ID NO: 4021 - protein, 863 aa, Acropora acuminata
MASEQADKERPKYEARRETQSDGVFENIEQAASYWKVLWESEGTGNKSAEWLEEVRQAIAGCVPESCMGECDIEYDQVKKVIVKKRNWSAPGPDRIVNYWWKRAETLHESVALSFREIGFDDNDVPLWFTQGKTSLIPKPGAFSSDNTRPITCLNTIYKWYTSCLLGPMDEHLKKYGLMQGDQRGAKEGCCGTGDNLLIDRTVCQDSQRGKRNVSMAWVDVRKAYDSVDHGWLREMFTVHKFPVWLCKVINKLSASWNTRISVRTAQGVETSEVITFRRGLPQGDALCPRLFTLCINPVSWMLKATEGYRLSKPIGKAVTHLLYIDDLKIFAASREKLRRAMAAVRGAMMDIGLEWNERKCSVAHVKRGTLEPEESESAGDSEREVKSLAEGSHYKFLGVMENTKQDDDLSLQIAGKAYLQRLSLIWSSPLSDYNKVQASNQFAMPVLSYLMPTQCWPVAELKRLDREARKVIVENGGKHPLGSTALLYLPRMLGGRGLKSVEREYKQTKIKAVVRLYRNEDPAMEVVRQFEERSEEKGRRSMVKDAKKYASEFGLKLSLVHPQPLITCLMKDEEVPVKKIGVWLKTAAAERDVEELKVEGWQGSLLSERWEDQEVGEECFSWMSEWKTAPTHTIAGLQELYQQLLPTKVYHQKKTGTHKSQDVKCRMCGKAAETQAHVLAGCGALAQSKYMTRHNAALKVIFYELLKDLDLVTSVPPWYSQNTPKPLYENEKGKALWDVPLYAEYAEVRNNRIDCTVIDKEKKKVVLLEMSCPWVSNREIKCAEKTSKYAPLRYELRRRYPGYKTEQHNIIIDALGGSSRSVKESLRQLVGSGRCNSVLRNMQKAVISSSLNIARTFKVLSD

SEQ ID NO: 4022 - protein, 1214 aa, Acropora muricata
MSDEDGRQNATRSGRLKWTDAMNRDLIKCKYKAKEMTESNNPPLKADGKPKGYMQVMKELWDEMGYAGLNISKQNLRNQVAYVEKSLGDVSEVIRNNVGWRGIEEQESDETDSGREYQFISGSEIINSQCEQPTQLNLHTSANINSQEANELIDLASPLYELIVAVPGDFSNRLIDTRTKEQPTRADIQNINDACGRLLCSKTTGNPHNDPFRHLWVIDCILYAVVAAFLVYKGWKKERSGNNRVVAEKDKDVLEKQVKEIRRKLSIAKAELDRIKKNDRITRKGRRNRKELLKECKVISVGELVNFMEKEKTRLRKLKRAYARKKKTEKARKINKAFQQDPGRVYSSLREMASEQADKERPKYEARRETQSDRVFENIEQAASYWKALWESEGTGNKSAEWLEEVRQAIAGCVPESCMGECDIEYDQVKKVIVKKRNWSAPGPDRIVNYWWKRAETLHESVALSFREIGLDDNDVPLWFTQGKTSLIPKPGAFSSDNTRPITCLNTIYKWYTSCLLGPMDEHLKKYGLMQGDQRGAKEGCCGTGDNLLIDRTVCQDSQRGKRNVSMAWVDVRKAYDSVDHGWLREMFTVHKFPVWLCKVINKLSASWNTRISVRTAQGVETSEVITFRRGLPQGDALCPRLFTLCINPVSWMLKATEGYRLSKPIGKAVTHLLYIDDLKIFAASREKLRRAMAAVRGAMMDIGLEWNERKCSVAHVKRGTLEPEESESAGDSEREVKSLAEGSHYKFLGVMENTKQDDDLSLQIAGKAYLQRLSLIWSSPLSDYNKVQASNQFAMPVLSYLMPTQCWPVVELKRLDREARKVIVENGGKHPLGSTALLYLPRMLGGRGLKSVEREYKQTKIKAVVRLYRNEDPAMEVVRQFEERSEEKGRRSMVKDAKKYASEFGLKLSLVHPQPFITCLMKDEEVPVKKIGVWLKTATAERDVEELKVEGWQGSLLSERWEDQEVGEECFSWMSEWKTAATHTIAGLQELYQQLLPTKVYHQKKTGTHKSQDVKCHMCGKAAETQAHVLAGCGALAQSKYMTRHNVALKLIFYELLKHLDLVTSVPPWYSQNTPKPLYENEKGKALWDVPLYAEYAEVRNNRIDCTVINKEKKKVVLLEMSCPWVSNRETKCAEKTSKYVPLLYELRRRYPGYKTEQHNIIIDALGVSSRSVKESLRQLVGSGRCNSVLRNMQKAVISSSLNIARTFKVLSD

SEQ ID NO: 4023 - protein, 1214 aa, Acropora hyacinthus
MSDEDGLQNATRSGRLKWTDAMNRDLIKCKYKAKEMTESNNPPLKADGKPKGYMQVMKELWDEMGYAGLNISKQNLQNQVAYVEKSLGDVSEVIRNNVGWRGIEEQESDETDSGREYQFISGSEIINSQCEQPTRLNLHTSANINSQEANELIDLASPLYELIVAVPGDFSNRLIDTRTKEQPTRADIQNINDACGRLLCSKTTGNPHNDPFRHLWVIDCILYAVVAAFLVYKGWKKERSRNNRVVAEKDKDVLEKQVKEIRRKLSIAKAELDRIKKNDRITRKGRRNRKELLKECKVISVGELVNLMEKEKTRLRKLKRAYARKKKTEKARKINKAFQQDPGRVYSSLREMASEQADKEKPKYEARRETQSDGVFENIEQAASYWKALWESEGTGNKSAEWLEEVRQAIAGCVPESCMGECDIEYDQVKKVIVKKRNWSAPGPDRIVNYWWKRAETLHESVALSFREIGLDDNDVPLWFTQGKTSLIPKPGAFSSDNTRPITCLNTIYKWYTSCLLGPMDEHLKKYGLMQGDQRGAKEGCCGTGDNLLIDRTVCQDSQRGKRNVSMAWVDVRKAYDSVDHGWLREMFTVHKFPVWLCKVINKLSASWNTRISVRTAQGVETSEVITFRRGLPQGDALCPRLFTLCINPVSWMLKATEGYRLSKPIGKAVTHLLYIDDLKIFAASREKLRRAMAAVRGAMMDIGLEWNERKCSVAHVKRGTLEPEESESAGDSEREVKSLAEGSHYKFLGVMENTKQDDDLSLQIAGKAYLQRLSLIWSSPLSDYNKVQASNQFAMPVLSYLMPTQCWPVVELKRLDREARKVIVENGGKHPLGSTALLYLPRMLGGRGLKSVEREYKQTKIKAVVRLYRNEDPAMEVVRQFEERSEEKGRRSMVKDAKKYASEFGLKLSLVHPQPLITCLMKDEEVPVKKIGVWLKTAAAERDVEELKVEGWQGSLLSERWEDQEVGEECFSWMSEWKTAPTHTIAGLQELYQQLLPTKVYHQKKTGTHKSQDVKCRMCGKAAETQAHVLAGCGALAQSKYMTRHNAALKVIFYELLKDLDLVTSVPPWYSQNTPKPLYENEKGKALWDVPLYAEYAEVRNNRIDCTVIDKEKKKVVLLEMSCPWVSNRETKCAEKTSKYAPLRYELRRRYPGYKTEQHNIIIDALGGSSRSVKESLRQLVGSGRCKSVLRNMQKAVISSSLNIARTFKVLSD

SEQ ID NO: 4024 - protein, 945 aa, Paragonimus skrjabini
MGSVSSKAVLYQKLAAMFPGRSAEGVKKRLIKAKWSGISKHGVQRDVSQPKDAIQWSSDEDTVINISSDDDDDVTVIDVEQLEEERWRSDMLDNIIDSLTKFSEQRIRSTDLLVIARKLKFGRMTYDAARSELETIVAECFPIKWKFQVRKNRVFRKALSKRMIRRLNYAAIQRLYHTRRKDAANSALDGSWASLYRRELIYPINMKDYWKEIFEMRSKRDSRQVAQKGHEWDVVAALGSEEVRIALRDAAGTAPGVDKLLANEVLKWNLEAVAQLFNLMLVLETPTSRLSLARLTFVPKVDEPATPADYRPIAVSSVLQRVMHKVLAKRVRDRVTFSSLQVAFQKKDGCLEASTLLHTILRTMHDEGKSIAIAFLDISKAFDSVSHDTLLRNARRYGLPPPLVRYLTRLYNDSLTRWDDATIKCCRGVRQGDPLSPSLFIMVMDEVLSYAKPQVGFMLNGKCTGELAYADDLVLFANSQSELTDKLEGLDEGLRLTGMKLNNSKCRTLTIVKDRKRKHLVLFPYEYETESGRIPCMEVDDTVRYLGLHFNWKGRLPVKSTAKAIDMLDNLTKAPLKPYQWLEILKEFLIPKLKFELVVGNAHRNTLKKLDRLVRDKIRTWLRLPKDTTLAFMHSKIDGHGLGIPCLETTIPLEQRAKCERLVNSGTLEVANIVQCKAVVSDIAVANVPIFVYGKPVGSKLEEDKAWREALVKTHDGADLMNVQVDRASFYWLRNPKYVFPRLFIRGLQLRGGLLNTKVRSSRGYRRAPEDVRCRGLCGCPESIGHILQKCPVTHDARCARHNRVVQLVGKLLRARGHSVFVEPIIPSSSTFCKPDLVVGCGSSILVMDVTIVNSRRLVESWQLKVGKYDNPATNVMIAKVCAYNHLESNAVKHTPIVLSDRGELYQKSGLELRKAGLTDRDVSDICLLTIAGSLKCYDTYMRMT

SEQ ID NO: 4025 - protein, 1342 aa, Bemisia tabaci
MDSRKITKQRKNSQITLTNRDRDEEMNRPTNSRTNRADPRNVPTNTPQTLSPTQVQPLSSQPDSQPNHTRARTKWSEAEYKEVMWCYLYIKGSTGSCNMKSIYNLWRKRNPATRPYIEANKLATQRRYIENQKKLNEMQLSEIKADVRLHLGQTSQSPENETERSQSSSANQKDPEDEGISSQVAQSSQRIKWTQEEYKEVMWCHWYTKEGTGFCNIKETYDLWRARNPDTRLHINANKLATQRRYIENKRKLSDELLEEIKADAIATLEASTEEHAGEAPQVAPDALDDILSQDILAELNISNQASQTPPGNQQPTSDELTETNPEPLAPTPEPKSSQNEKPESPIRRLYQEVLEMTLEEREPIRKLNGAKKEKEILARANSEVKTILETEQELDLWKINCLLYAAALTVSDEANNPRPVKKNNAKETKPLWQKRIDNRIKELRCNLSVLTNFKETSKSNEKPMTQRVKSILEKYTDEGEEYNIDNVAEQLKQRISVFSQRIRRYKKRSNQYRENRMFVTNCKSFYRKIKGDGAETGATPKKQEIEEFWKGIYETPTEHNTEADWIKDLNVEHQMEWTPLNEAEVANVLKNLANWKAPGPDKIQSFWYKKMHPIHKYLTTEYIKLLGGEEFPPWLAKGCTYLIPKNKETANPKNFRPITCLNIMYKIYTALMAGKTYKYLESAELLPIEQKGCRKGANGCLDQLLISKTAIEDCKRRKKNLSVAWLDYQKAFDSMPHSWIIRALEIMGVHPNLVNACKNMMKHWATVIQLNGNAGQIVTSEIKIRRGIYQGDAFSPLLFCIGLIPLSKKLNEQQNGYDLEDGYKQLTHLLYMDDLKLFSSNETKLQQQLKTVKEFSDDIGMKFGLDKCAKVTFKKGKFFKGENVTIDNETSIRQLDPGETYKYLGMEENSGVQNTTVKEKVKKEYIRRVRAVLKTELSAKNKISAIGALAVPVLQYGFAILDWKMTEIRALDVKTRKYLTMYKMHHPSADVHRLYVSRKLGGRGLRQIEAAYKSTIISTKYYLRKKRNEDLFLKSVHEADTQLNTLHSITKKADKFETELEQNFEQTPVKSRNQTIKKKIAETLRSKWTEKNMHGQYPRLLEEDRVESTLSTMWLSKGALKGETESLIAAAQDQALNTRYRDRKIHGRARDSKCRICHQHEETIDHIISACPILAKKDYIERHDRVCTHLHHNLCKEYNIAVETNWYEHKPKAITATDDGQTTIIWNVPVRTDRTVPNNRPDIILRKRGQTCLLIDVSIPADRNISLKEAEKRLKYKDLEIEISRMWKTDTKVIPFVIGATGAVSKEWKKFKEEIPGKHSLVTAQKAAILGTARILRKVLS

SEQ ID NO: 4026 - protein, 1345 aa, Trialeurodes vaporariorum
MNSFKPTKQHQGIKRRTDQTNQDKTNKGTRKPRTRLLDPGNDLGNTSQAASPTQDSPSRVTENTQRSPPKTRSKWSVEEYKEIMWCFWYIEESTGNCNIKAMYNLWRERNPIARPHIDANKLATQRRYVINQKKLNKQQLAEIKADVLANLRKMSQSAKNDSEEAENSSADLSTDHPDNPTQTDYPSQRMKWSLEEYKEIMWCHFFTKESSGFCNLKTTYDLWRQRNPETRLNINANKLATQRRYVENKGKLSEQLLEEIKADVSAALEASSEQQAEKNTQDVMEETQILLLDQNTADNPSSPDLMADLTSAYQQTAIDEPAEVQQSEQQPKTPRQSLSTPKETPESPLKKLYHDVLLMTLEEREPIRKLTGTKKEKEVIARINEEVKNILKNESEPSLWKINCLLYAAALTISNEINGPSPPKKNCRKENKPLWQKRIENRIKDLRKNLSVLVNFKRTNIQNGQTMTQKVKSILEKYTNKEEQSNVDSVTEQLRQRIAVFSQRIRRFQKRSNQFRQNKSFESNCKNFYRNIKGEKAEVKTIPKQQEVEQFWKGIYETPVEHNTEANWIKDLSTDHQMEWTAPNEKELTEIIRNLANWKAPGPDKIQSFWYKKVPSAHMYLTAEYKKLLEEGDFPSWLAKGFTYLIPKNKETANPKNYRPITCLNIMYKIYTALMAGKTYKYLESAELLPTEQKGCRKGAKGCLDQLLISKSVIEDCKKHKKNLSIAWLDYQKAFDSMPHSWITKALEIAGVHHNIVNACKDMMKHWSTVIQLRGENDTVVTSEIKIRRGIYQGDAFSPLLFCIGLMPLSNRLNSEKNGYDLRDGHKQLTHLLYMDDLKLFSSSETKLQQQLKTVKQFSDDISMKFGLDKCAKVTFLKGKFSRGENVDVDPETNIRELDQGETYKYLGTEENSGVQHKMMKEKVKKEYIRRVRAVLKTELSAKNKVMAIGSLAVPVLQYGFAILDWKITEIRALDVKTRKYLTMYKMHHPSADIDRLYVSRKLGGRGLRQIEAAYKSTIINTKYYLKEKSNEDLFLKTVHKIDTQLSLSHSICKKADKYEEDLGEDFQQTHVKSRNQHVKRKIAETIKTKWKKKNMHGQYPLMLEEDPVSTNLSTMWLSKGALKGETESLIAAAQDQALNTRYRDRKIHGRIRDSKCRICHQFEETIEHITSGCPILAQKEYIERHDRVCTQIHHNLCKEYGITVEADKWYEHKPKAITATDDGQTTIIWNTPVRTDRTVPANKPDIILRRKGQTCLLIDVSIPADRNITKKEAEKKLKYKDLEIEISRMWKTRTKVIPFVIGATGAVSKEWIKFRNEIPGKHSLIAAQKAAVLGTAGIIRKALS

SEQ ID NO: 4027 - protein, 1559 aa, Oscheius sp.
MVVSRPLPKRFPSSEPPRNPLLRHLPNCFVFVDVTMKLHMLYCFLLLYSPLQTFTLLTKGLQVMASNAVAVDSSDVSDASEDDDTSLNPNISPTVTVIPDFERVLESEDENGNLTVRIPYPASRTIQCGRCEIKFSQGSDFKRCPEQESNARKAIQSHYNTGASKGHKKPTTVVYSCRICQCDIAKREFSKDAADKINIHVKSHRTKCVRDTLEGDFVCGKCLLRFRSHAILGWHAKVCKGDKGKRLIVGERFVTKEGKVFLTKAKLSVQKQHTDREISQTDPALVVTDDSPAPAPPATAPIATATTVTAIIATAPTATSAPAKRALNQHPVVVAPVAKNIVPFITLPDGFSCLEIGAGRNAWFTDDVVNWAMKSMVQSYVVESAVWNVYWFRQSPLYELRAIVEEYPEVFIPVCLNAHWTLLHFRKLDGGKLEGRYMDPFQPSKPPDAIIDFLKSWRITWVHPTSIYDKVDKQRNMWDCGPYICIMAKTLEQHLSGANSIQVLTPGEVRTNLKLKFVTENAQLGNLVNDRAYAEALQDRKNIPRLLDSAVGEPNWTTLPEEDLDWAREQLLSWVIDRNAEFKGNGRPRKEFQWICEQITHAIGDLKRNRIQDFEARMNSKYVQEGDQTEKRRFFSKHGRKRPYSRPVDLNNQIEVMRTYAVNRVKLMKALRDDELSSCGISLKRLEEYWGAEAGAPKVEERDIEELCKVIPKIDISASFMRSISREEIKEILKTLNKESTPGMDGLTYSDWLKFDPSIAIMQYILDTARILKWIPDSWRKSKTILIFKGGDPENPANWRPIALLPTIYKLYTAVWNARINTVKGCFTNQQRGFRKGIPTNTSIQIVQAAMQHAKHHRKSLTVAFLDLKNAFGSVPHRLLLAVLRKFGFPGDLLEIVEDLSQDNSTVIKTEKGETGDIPQMTGTRQGDPISPTFFNLCLEPLIRTYIRPKMGYKVGDKWYSLLAYADDLAILDENVHRLQTKLNILVESARKVNLIFKPPKCAVSIMLSGHMCNEQQIKIRGESIRKITSEGSFKYLGIEVGYKVPFSLEDLKQQTVPLLANIVTSKLAIDQKLEAIRDFVYPKLNFQLEFAIPKWKEVKVLSALFTRYFKIALEIHSSTAPEYIYSMTTAGCLGFLTIEDLSRTFYLGNILKNLWSENEELVSATKIFLITMAKGLSDSVVTLSDAFDFFMSRSQFKNSVIKDPRGRLSMVFYHWRKPQTKKRNTESISKGIFPLITLEVANPGPNEEVQLRLRMMGDKTDRIYTKASSENPVEFLSDKVKEAVYQKWTSENSDGTGIIRAVARCPDISCFYLKTGRIWLSLSESKFLHKARTKSTYLPGDPFAKFTNHGFSVYCPFCPTKELTLFHVSNICPDTKPIYTMRHNSIHFLLEDGIKLGSKRDFLRASDQRVRESATKKRPDIVLRNRLNNNLVNEIIVVDVASPFEYQPGCLDSSNGRKHKKYRTLIEEIRKENPQATVTLKSLIVGALGSWREENWETFRAVGIDKRHEKILACLMVKSAIAWTRYIYNSSFPGQKFMIEQPPQYVLTQFLSKSEAEP

SEQ ID NO: 4028 - protein, 968 aa, Kudoa iwatai
MQINNRDDPFTLYAKFIDMCQHSAQQVGMFYQPIPPKPTNNNNNNNQHNNTQTLPSHNPIQDEKAKARRLRALYRKNTKRCFREVTKPITAWCEATASSIVSTLQPNNNDNFQQQQTSPINSSTTNTDTQPIQDTTTENPINNDNIVDNPTDEINDNSPYHHSEAYSDFHISPEDVGVAIERAKKDSSPGTDGIQMVFWKRIPGIEYLLSSLFNTIIQHQKVPDDWLISRLVMIPKEDNPDTTNPLHYRPISITQTIYRIFMSVLSRKLFQIVKLSPSQKGFCGGDGCVEQSYILQEIINDARRRRKKMNLVWIDIKKAFDSVPHNIIIQESMNQQFPTTITNLLKHLYSNCYNQVTDKDGNTDILHSNGYGVRQGCPLSPLLFNISINPFLDELDNTNLGYAMDQKIFTGLAYADDIVFMSSTTENMQLILQKFEQFLNSTNLKVNHSKCSYTTLSFNCSRRIVNDPSITPFKLFNMEIPKLNNFYKYLGTTANLQTFKDLPSCFDEFMQNLRKLTDCPLFGFMKLEMLRTYMFPTLDYCMKTNILRIDQLNKIDAAVLKAVRSWLNIPSFTNKAMFYCPTNQGGLGLRQLTKDYAALRLSSGLNLIHSPDDRVKAISRQSLQKVVRKRTHTQPLSPVEYLNLEKEQTITHDIKSLISSIRMNRKSLKIRITQNDDNDPTSVDLDLSTILLPDNIFHDSRASRYNRQWISRVKRLRWHYQLQHLNNWSEMLNQGRSLACFGADKLSNSWIRTGNIEIAAYRFGILGRVNCLPTKAVLFKTQRSPDPRCRHCNCDVETLRHILNGCQISRKLQTHRHDKILELIQKRLKPNRNWELRINKQIPNISSTRRPDIVLMNHKEKKVVIVEITICYEQGQESMCQAKMYKSRKYLRESSLLENLGYHVQLDALVFGSLGSHHVENVDVLRMLGIRGKKPMKILHQAITTTALESSYAVWKKHMRRTQANSQH

SEQ ID NO: 4029 - protein, 903 aa, Girardia tigrina
MDGRLSFIKSTNNRKPRSEMPLHKLFRIQPKEAVKLAIHGTKGVTPSPTNNQIKNIFADKATDVKDLSFQPIKNLYPSFINTAPFSVPIPDRDTIQAIIAKMKEQSAGPDKIRPSDIKKIDVIDDIIELFKEAITTGQAAKSWRNSTTTMIPKGGKSNDELLQPNAWRPITKSNTIPKILASYICYYFTHWITDNQILSPNQKAIGSVEGCHDHNAVVNLVRDDVRLWNKNKDRPPKQAFIFFGDIKDAYGSVQHKLLFRILYHLGIDNMIHNLFRKLYINNTTDVQIEGRNIGTMKINKGVKQGCPLSSLFFCIYINALIKNIEVNHQDKGYKIGQTNYNIIAYADDIVLIADNQKDLQSLISATTFLAEKLDLHFQPTKCGILAIPAIREKKTEPFLVRGTPIPFITNKNPSKFLGTPINHRQYMNPRIKFDGIIDDLKKIEKSNLFPSQKLTAYKLFLHSKIPFYLRSNKIALNNFTNNKEDAPALDIKIRTQIQKFMRLPKNTSDHFFYTTTAEGGAGLRRMADEYAVQSIIYIYRLANSRDRRLKEATFANLKNFYIENNLPDDFPSIFHNLNSNTPTPYMKAACQWAKFTLARCMLKKELNIDIKLDWIQQSNRINLNIQFQNQIGFVNITNDSAISPILFNYINQAHRVLLLQDKRGKESFPVSTCNQNLNKEIMKGFISFVGWFFIHRARLNLLECNFRDHLFHQEVSDLCRKCKAWMETPKHIVNHCNYSLPFATIKHDKIKNEIAKAIGRFFGNRYVKVEERHTLPNNSYKRMDIYVDLGTIAWIIEVKSPWDVSTTFSQAYERASNHYLDVKQDLITRYNKTDVLIFPFVVGCLGRWHDCNDQLLTAIGWNGDDIKSYQTKVAKRNIEMCAKHYNQHIQYYSIQQINQDGAT

SEQ ID NO: 4030 - protein, 1564 aa, Hemaris fuciformis
MAPLTEFTVSYPLEGPLKCPFADCSTKGKVGRRVVMDKTFERQTNFATHIRRYHPAVKLRYVCSLCGFVGTSRQAVQVVKKHILREHPGVDLGETISSSASQTKTTFNSQLKRVSGTGVSPGTELSVSPLDGSSSSSNNSSSMRQQRRVALTVVQKTTGNASTQQRAAVTRTAGRPSPPATTTSGAPRRMTRTSFRGPSASTPAPSSLTSQRRAPNTTSANRPSTTSRPVSSRDPAITTTRSRAATTPVAARGPQRNHSGGSEKITATTKSRTPPAAVSTTTRATATFKNITKRNVTGSGSQPTSQRAYSLPPEPSTPPAVNNRSCLAQVRPVTYAETLRREYSWPPGPSLVAVESKTPLMIATSIGATLTTATITSTTCGRPIMTPAITTSGSAGSVQRPPKNAIVGERPLAASDRDLDIPAGGGIPSITIEPPAIKEWRTVQRRKKTRGSLDSSSGSEGEQTGSHRLGRRMRRPSPSSSSSSSSVWLPPQTSPSASPPQPTGNQSLLCPTSPLAASTQLSGQRAGPLEPQVSDCYPAISEEDRVPHRSPGVSVAAGSDWRDITTASNARVSVPPTASRPTVDTGRWAEPLPPGASRQQQAQRNRVRARNRKDLISKAAAVESSEDLEELATLLRTLIGSYKTAAEPTSRRRNFKNNRDRNPSDSEHEDRIREATNIQRLYRKNRKRCMQRVLKGPSPHCEADINIVDNFFRCMYSDSGKPYERPHGLPAWSASADDPLCDAAVRPFSAEEVCRRLKRTHNTAPGPDGITYSDIKKADPTGLTLASVFNACLRVKEIPKLWKSSNTVLIHKKGDRNDLSNWRPLALGDTIAKLFAGLLADRLVDFAVQGERLLRPQKGFLRYEGCHEHNFLLRKILLDSRRQGREVVIAWLDLTNAFGSIPHVAIFDALRRIGLPRTLTDLLEDINTGCTTRVQTTGGLTDPIPLLAGVRQGCPCSPIAFNIAIEGMLNKVETLPVGYDLGNQKFRALAYADDICLIAASPEEMELLLSTTVEAATGLGLTFNPAKCATLHLQGKGTKRTALSSTFSLNRVELPALKAGEAYEYLGIPIGISINQTPLRTIEGMMEDAKAIDASLLAPWQKLDALRTFIQPRLDYILRSGEVDKTPLSMLDKLIKKLAKSWLNLPQRASAEVVYLPTRLGGAGLIPMADLADILTIAHGYRMLSCRDRVVVEAAKTSLWEAVERKARRQPTQPEVAKFLSGSLEEPFKTSGQGDPGLWTRVRLASRRQARRLDLAWTVKEESGELLLECRGISKHRTLVRPGPQSQIISRLRLAVQGHHLDSLLSKKDQGKVFQESSRNAASNSFLRDGRYVRFAEWRFIHRARLNVLPLNGAMRWKDGNDKRCRRCGHAQETLPHVICHCLPHSAALQLRHDAVLKRIAKANRLPGELRVNQVVMDTHGDLARLRPDLVIRNERAKLITIIDVTIPFENGGKSLWTARQAKITKYSALAEGLRAGGYTVHVDAIVVGALGTWDPDNDAVLKRLQVGDNYANLMRRIIVSETIHWSRDIYVEHVSGVRQYRPDSVAPGTAPAGDAASDPHQRG

SEQ ID NO: 4031 - protein, 676 aa, Idaea aversata
MNFILSGRVNVEICPFLYGASLCALRKKDGGLRPIAVGSTFRRLAAKLACTSVREGMAVYLQPHQLGFGTRLGCEAAIHATRAFAVDADNAKKVLIKLDIQNAFNSVERDVLLMEVQENIPSLYPFLFQMYRAASYLYYDGNNLISSQVGAQQGDPLGPLVFSLCLQKIIENLGSPLNIWYLDDGTLGGTPEQVRDDLLVLIPRLAEMGLRVNSSKCEFFSCGPEARDSFALFNSLLPGLKNLTSESFCLLGSPILQDAVPAAIEQRTSLLRGAVARLRDLSGHVALILLRMCFAAPRVMYLLRTAPTWLHPERVATFDAVLRASVEEILNIRLDEEQWVQASLSIRLGGLGVRRVAYVGLPAFLGSAHGVRALVTDIMSPNGGQVVIPFVSDACEAWRVRNPEAGAPSSPEFQRSWDEIGAKRIHDRMLESSVAVDLARLRGVSRSEAGAWLHALPSPHLGTLLDDDSLRVAVSLRLGCDVGEPHACVCGALVEANGHHALSCGRCVGRFPRHFALNDTIRRALISAGIPCMLEPPGLSRTDGKRPDGLTLVPWERGRCLVWDATCVNTFAASHLARTSRVASAAAEAAAASKHIKYAPLQSRYLFVPVAVETSGAWGSEAIGFIREIGRRLRARGLDHRSGAFLAQRLAIAIQRGNAAFLASFVPGVSRGGLFD

SEQ ID NO: 4032 - protein, 950 aa, Idaea aversata
MDIQAKTTCPHCPNSSRLFSQHGLRVHIGRMHKEVSSSSGSQGAALGGGGGAGAQGYLQHCCLEDLGFLRKSVPVLRHIPKAARNSAAGRLGTLLDKCVESNSAEDWCTLLTFSYRAFKIPSKVGGGNLTQKVKENILSLDTSFPAEACLGEARSVSHSVSKIVESKVYEGDLAGAVRLLVSDDTFAEASPETLASLRCKHPSPSRSLRFPDAPDGLVPPLVVKSEQVAQALGSFRAGSAAGLDGIRPSHLKELVSGSAGDSGPRFLESLTNFMNFILSGRVNVEICTFLYGASLCALRKKDGGLRPIAVGSTFRRLAAKLACTSVREGMAVYLQPHQLGFGTRLGCEAAIHATRAFAVDADNAKKVLIKLDIQNAFNSVERDVLLMEVQENIPSLYPFLFQMYRAASHLYYDGNNLISSQVGAQQGDPLGPLVFSLCLQKIIANLGSPLNIWYLDDGTLGGTPEQVRDDLLVLIPRLAEMGLRVNSSKCEFFSCGPEARDSFALFNSLLPGLKNLTSESFCLLGSPILQDAVPAAIEQRTSLLRGAVARLRDLSGHVALILLRMCFAAPRVMYLLRTAPTWLHPERVATFDAVLRASVEEILNIRLDEEQWVQASLPIRLGGLGVRRVADVGLPAFLGSAHGVRALVTDIMSPNGGQVVIPFVSDACEAWRVRNPEAGAPSSPEFQRSWDEIGAKRIHDRMLESSVAVDLARLRGVSRSEAGAWLHALPSPHLGTLLDDDSLRVAVSLRLGCDVGEPHACVCGALVEANGYHALSCGRCVGRFPRHFALNDTIRRALISAGIPCMLEPPGLSRTDGKRPDGLTLVPWERGRCLVWDATCVNTFAASHLARTSRVASAAAEAAAASKHIKYAPLQSRYLFVPVAVETSGAWGSGAIGFIREIGRRLRARGLDNRSGAFLAQRLAIAIQRGNAACILASFVPGVSRGGLFD

SEQ ID NO: 4033 - protein, 950 aa, Idaea aversata
MDIQAKTTCPHCPNSSRLFSQHGLRVHIGRMHKEVSSSSGSQGAALGGGGGAGARVYLQHCCLEDLGFLRKSVPVLRHIPKAARNSAAGRLGTLLDKCVESNSAEDWCTLLTFSYRAFKIPSKVGGGNLTQKVKENILSLDTSFPAEACLGEARSVSHSVSKIVESKVYEGDLAGAVRLLVSDDTFAEASPETLASLRCKHPSPSRSLRFPDAPDGLVPPLVVKSEQVAQALASFRAGSAAGLDGIRPSHLKELVSGSAGDSGPRFLESLTNFMNFILSGRVNVEICPFLYGASLCALRKKDGGLRPIAVGSTFRRLAAKLACTSVREGMAVYLQPHQLGFGTRLGCEAAIHATRAFAVDADNAKKVLIKLDIQNAFNSVERDVLLMEVQENIPSLYPFLFQMYRAASHLYYDGNNLISSQVGAQQGDPLGPLVFSLCLQKIIENLGSPLNIWYLDDGTLGGTPEQVRDDLLVLIPRLAEMGLRVNSSKCEFFSCGPEARDSFALFNSLLPGLKNLTSESFCLLGSPILQDAVPAAIEQRTSLLRGAVARLRDLSGHVALILLRMCFAAPRVMYLLRTAPTWLYPERVATFDAVLRASVEEILNIRLDEEQWVQASLPIRLGGLGVRRVADVGLPAFLGSAHGVRALVTDIMSPNGGQVVIPFVSDACEAWRVRNPEAGAPSSPEFQRSWDEIGAKRIHDRMLESSVAVDLARLRGVSRSEAGAWLHALPSPHLGTLLDDDSLRVAVSLRLGCDVGEPHACVCGALVEANGHHALSCGRCVGRFPRHFALNDTIQRALISAGIPCMLEPPGLSRTDGKRPDGLTLVPWERGRCLVWDATCVNTFAASHLARTSRVASAAAEAAAASKHIKYAPLQSRYLFVPVAVETSGAWGSETIGFIREIGRRLRARGLDHRSGAFLAQRLAIAIQRGNAACILASFVPGVSRGGLFD

SEQ ID NO: 4034 - protein, 947 aa, Idaea aversata
MDNHVRTICPHCPPGSQRLFSQHGLKVHIGRMHKDLSGGLRNSTPIAPELSQQQTCPQHCCLDDLGFLKKSVPVLKHIPKAARSSAAGQLSGLMDRCVECNGSEDWCSLLTFPYRALRVPTKAGVGNLTQKVKENIMSSDTSFPDDLTLRMSSRGRSLPNLIESKVGEGDLRGAVRLLVSDDAVAEAGAETLASLQSKHPAPSRLLVFPDPPDDSFTPPTVGLDLVSQALGSFHSGSAAGLDGLRPGHLKELTSGAAGDNGSRLLTSLTGLVNFILSGEVNAEICPYLYGASLCALNKKDGGVRPIAVGSTLRRLVAKVACASVRESMAVYLCPHQVGFGTRLGCEAAIHATRAFATSSDNSGKVIVKLDIKNAFNTLERDVLLREVRESTPSLYPFLYQVYRMPSHLFYDNHLIPSQVGVQQGDPLGPLVFSLCIQKVITDMKSPLNVWYLDDGTIGGEPERVRDDLLALIPRLAELGLEVNSSKCEFFPCGTGGSSSFSLFNGILPGLKSLTTSSFSLLGSPMFLDGLPQAFEIRKAMLLFARGRLKEISPHVALVLLRTCFAVPKVTYLLRTAPIWLCPREVADFDETLKASVEEILNVNLDETQWDQASLPIRLGGLGVRRVRDVGLPAFLASAHGVVGLVTNILSLNGGRICIPYVAGAIDAWRALNPGVDLPSSPCLQRMWDEAGVKALQERLVGQAQGADLARLKSVASSESGAWLQALPSPNLGTLLDGDSLRVAVALRLGCNVFEPHTCICGSMVGPGGHHALSCCRCLGRFPRHHALNDIIRRALVSANVPCVLEPPGLSRTDGKRPDGLTLVPWRRGRCLIWDATCVNTFAVSHLPLTARVAGAAAETAAGSKHSKYAPLAQNYIFVPLAVETSGSWGAEGLAFVKEIGRRLRDRGFDPRSGAFLVQRLSIAVQRGNAACILSSFAPGTLGRGLFD

SEQ ID NO: 4035 - protein, 915 aa, Idaea aversata
MSTLVKVACPHCPNSSRLFSQHGLKVHIGRMHKEFSSGVGRGVPEWNDVSDSAEQQRLYPQHCCLDDLGFLRKVTPVLKHIPKAARSLAAGQLCSLLDRCVETNGSEDWCALLTFSYRAFKLPNKSGGGSLTRKVKENILSVDTSFSNITSFGGASRGVCSVTKIVESKVFEGDLRGAVRLLVSDDTLAEAGPETLASLRSKHPSPCRPLIFPDAPGASCPALVVKPEQVALALGSFHSGSAAGLDGIRPAHLKELVSASAGDNGQRLLESLTKFVNFILSGQVNVEICPFLYGASLCALCKKDGGVRPIAVGSTFRRLAAKLACGAVREGMAEFLQPHQLGFGTRLGCEAAIHATRAFVMESENSSCVVVKLDIQNAFNSVERDVLLGVVRENTPILYPFLFQVYRSSSNLYYDNNLILSQVGAQQGDPLGPLVFSLCIQKIIADLKSPLNVWYLDDGTIGGSPDQVMEDLSTLIPRFAELGLRVSASKCEFFPCGPEALCSFPLLSALLPGLKILTPSSFNLLGSPVFPNAIPMALQERRTLFLAAVARLKELSSHVALTLLRMCFAAPKIMYFLRTAPTWLHANDVATFDEVLRTSIEELLNIRLNDIQWTQASLPIRFGGLGVRRIGDVGLPAFLGSVHGVVGLVSDLLSLNGGQVAIPFAADACDAWRTLNPDADLLSLNGGQVAIPFAADACDAWRTLNPDADFPSTPGVQRLWDEVGAKRVQDLLVGGAVEVDLARFRGVAKPESGAWLQALPSPSLGTLLDDDSLRVAVALRLGCDVCESHVCICGSTVEVNGHHALSCRRCSGRFPRHHALNDLIRRALISANVPCVLEPPGLSRTDGKRPDGLTLVPWSRGRCLIWDATCVSTFAPSHLARTSRVAASAAEAAAVGKRAKYAPLEGHYLFVPVAV

SEQ ID NO: 4036 - protein, 1147 aa, Nomada fabriciana
MHPEPNYRNQKMDDNVVEASDVGVPGPGAPAADLSAMDGRTTNEDHGNSPGNEMVYVMDLPLSGVITCSFCARSGRRRCFIREAEFGIHCEKEHPSGKIVWRCTPCQRDFKKLQGWRCHVGRCKGQRNTEELEGGTLICCEVCESTFRTPRGLAQHERHRHPAERNKKREQAANKDRNQPGRKATVWTEEETELLIALNERFKHRRQPNVAIREFLPGKSLKQISDKRRQIPAQRETAPEVEIFSDEGAPAVLTEEEEWVEPRTEEENDWQEAIRTAIRAQTLKEDHPLRDLEAQIEHLAEQESIDERQVDTVLQAIVERLLEKRQGRPGTGRTRKSRNAGDALTIERQRSRRTRQKEFEYARAQELYKKCPRKLLDMAITGRPMREVTKGEAPEKKEVEELYRELWGTEGPQIRRELYRPAQQVEGMSGMWYPITMGEAVERIKKIKKNTAAGVDGIQKDHLRIDGALKIMIKLYNLLMLSRVYPSQWKLHRTTLIPKPGKDMERASDWRPITIGSLLSRMYSAIIDKRIRGKIKQHQRQKGFTSEDGCKNNIAILSSALNSMKEKGGGVMTIVDISKAFDTVPHQAVTRCLRSKGVPQEVAAYIRKMYDNCQTTISCRRQEEVKIMLRRGVKQGDPLSPLLFNLIVEPIIEEIDRLTEGVEMGDERISILAFADDVVLLAKDREEATEQSRMLVQFLRELGMKLSIEKCCTVRIVSGNRTWHQMDPELTVDGKRIPYTDPEKVIAYLGAAIGPWKGLAKASNEEIVEATRAIGRMGLKPHQKVNMIRTYLLPRFVHRMVASQPSLGTLRKLDHEIKQQIKQMLHLHPTTTDGIIYTSKSHGGLGVQRIENIVVLAKLRSVAKMTQSQDEAVRQAAIGQEAVVKKYASSVGLSWPVDQESLERTRRALKKKETDRWRGLVSQGHGVSDFAGDKIGNAWLYNPELLKPSRYLDALKLRTNTFGSRVVLNRARKDMDVRCRRCGVQAETLGHILGNCTHTKPMRIHRHNEIAKLIEDSVPEHCEVFQEPSVSVGGELRKPDLVIKDHDRVFVVDVSVRYEDKENLRNAYREKIRKYKNIAEYFKRRMNTTRAEVIPVIVGSRGAMPTQTVNNMKLLGLNTKHCLTASLIALRSSIEMSNQFLDYDHTR

SEQ ID NO: 4037 - protein, 1147 aa, Nomada fabriciana
MHPEPNYRNQKMDDNVVEASDVGVPGPGAPAADLSAMDGRTTNEDHGNSPGNEMVYVMDLPLSGVITCSFCARSGRRRCFIREAEFGIHCEKEHPSGKIVWRCTPCQRDFKKLQGWRCHVGRCKGQRNTEELEGGTLICCEVCESTFRTPRGLAQHERHRHPAERNKKREQAANKDRNQPGRKATVWTEEETELLIALNERFKHRRQPNVAIREFLPGKSLKQISDKRRQIPAQRETAPEVEIFSDEGAPAVLTEEEEWVEPRTEEENDWQEAIRTAIRAQTLKEDHPLRDLEAQIEHLAEQESIDERQVDTVLQAIVERLLEKRQGRPGTGRTRKSRNAGDALTIERQRSRRTRQKEFEYARAQELYKKCPRKLLDMAITGRPMREVTKGEAPEKKEVEELYRELWGTEGPQIRRELYRPAQQVEGMSGMWYPITMGEAVERIKKIKKNTAAGVDGIQKDHLRIDGALKIMIKLYNLLMLSRVYPSQWKLHRTTLIPKPGKDMERASDWRPITIGSLLSRMYSAIIDKRIRGKIKQHQRQKGFTSEDGCKNNIAILSSALNSMKEKGGGVMTIVDISKAFDTVPHQAVTRCLRSKGVPQEVAAYIRKMYDNCQTTISCRRQEEVKIMLRRGVKQGDPLSPLLFNLIVEPIIEEIDRLTEGVEMGDERISILAFADDVVLLAKDWEEATEQSRMLVQFLRELGMKLSIEKCCTVRIVSGNRTWHQMDPELTVDGKRIPYTDPEKVIAYLGAAIGPWKGLAKASNEEIVEATRAIGRMGLKPHQKVNMIRTYLLPRFIHRMVASQPSLGTLRKLDHEIKQQIKQMLHLHPTTTDGIIYTSKSHGGLGVQRIENIVVLAKLRSVAKMTQSQDEAVRQAAIGQEAVVKKYASSVGLSWPVDQESLERTRRALKKKETDRWRGLVSQGHGVSDFAGDKIGNAWLYNPELLKPSRYLDALKLRTNTFGSRVVLNRARKDMDVRCRRCGVQAETLGHILGNCTHTKPMRIHRHNEIAKLIEDSVPEHCEVFQEPSVSVGGELRKPDLVIKDHDRVFVVDVSVRYEDKENLRNAYREKIRKYKNIAEYFKRRMNTTRAEVIPVIVGSRGAMPTQTVNNMKLLGLNTKHCLTASLIALRSSIEMSNQFLDYDHTR

SEQ ID NO: 4038 - protein, 1149 aa, Nomada fabriciana
MEGNATAEASDVEVPGPGTPAADLSAMDRRTSEDDNGNASGHETVHILELPLSGDIKCSFCARIGRSRCFVKEAEFGAHCEKEHPRKRIIWKCVPCQRGFEKLQGWRCHFGKCKGPRSNEVRNEARSRCETCGSTFKTQRGLSQHERHRHPAERNRKREQGANGGGNQPGRRAYAWTEEETALLAQLSERYKHLRQPNVAIREFLPGKSLKQISDKRRQITAQIRAVAEAEISSIGESLAEPAEEEERVELQREVVDPQMDEEVQTEPRTDEEDDWKEPIRRAIRESGLEEDHPLRGIEALVERLAEQETTDGNQVDAVVRATVQKLLETAGDKTGTDRAKRGRTPERGRQESHRTRRRKYEYARIQELYKKCPRKLLDLAIAGRPVGEDKKIEAPSKEEVEPLYRRLWGMEGPQIREELYRPAQEAVKMRDIWYPITVNEAVQRMKKIKKDTAAGIDGIRKEHLRMNGALQLLVKIYNLMMIHRAYPTQWRQHRTTLIPKPGKSAEKASDWRPITIGSLLSRIYSAMMDKRIREKVKQHQRQKGFTSEDGCKNNIAILSSALVKMKEEEGGIATILDISKAFDTVPHQAVKRCLTRKGVPQEVADYVRRMYDSCRTTISCRKQDKVEIMLRRGVKQGDPLSPLIFNLILEPIIEKVDRMTEGISLGEEKVSILAFADDLVLLAKDRKEATRQSGMIVGFLQELGMHLSIEKSSTVQIVSKGRTWHQADPKLYIGNEQVPYTDPERVVAYLGATIGPWKGLAKVSNEEIIEAVKSIGRMGLKPHQKINMIRTYLLPRFIHKMVASTPSLGSLRQLDQEVKQQVKQMLHLHPTTTDGVIYTSKSHGGLGIQRVENIVILAKLRSAIKMARSEDGAVRQTLAGQEAKIRRYASSIGLSWPAEMKDVERMRITLKKRETDRWKGLTSQGQGIKEFAGDRIGNEWLYKPELLKPSRYLDALKLRTNTFGSRVVLYRARKDIDVNCRRCGVQAETLGHILGNCTHTKPMRIHRHDEIVKLVENNVPEGCEVFVEPSVSVGGELRKPDLVIEDHGRVFVVDVSVRYEDKENLRDAYREKKRKYKDTAEYFKRRMNATRAEVIPIIVGCRGAMPMETVKNMKTLGIGRKHCLTASLIALRSSIEMANQFLDYDHTR

SEQ ID NO: 4039 - protein, 1149 aa, Nomada fabriciana
MEGNATAEASDVEVPGPGTPAADLSAMDRRTSEDDNGNASGHETVHILELPLSGDIKCSFCARIGRSRCFVKEAEFGAHCEKEHPRKRIIWKCVPCQRGFEKLQGWRCHFGKCKGPRSNEVRNEARSRCETCGSTFKTQRGLSQHERHRHPAERNRKREQGANGGGNQPGRRAYAWTEEETALLAQLSERYKHLRQPNVAIREFLPGKSLKQISDKRRQITAQIRAVAEAEISSIGESLAEPAEEEERVELQREVVDPQMDEEVQTEPRTDEEDDWKEPIRRAIRESGLEEDHPLRGIEALVERLAEQETTDGNQVDAVVRATVQKLLETAGDKTGTDRAKRGRTPETGRQESHRTRRRKYEYARIQELYKKCPRKLLDQAIAGRPVGEDKKIEAPSKEEVEPLYRRLWGMEGPQIREELYRPAQEAVKMRDIWYPITVNEAVQRMKKIKKDTAAGIDGIRKEHLRMNGALQLLVKIYNLMMIHRAYPTQWRQHRTTLIPKPGKSAEKASDWRPITIGSLLSRIYSAMMDKRIREKVKQHQRQKGFTSEDGCKNNIAILSSALVKMKEEEGGIATILDISKAFDTVPHQAVKRCLTRKGVPQEVADYVRRMYDSCRTTISCRKQDKVEIMLRRGVKQGDPLSPLIFNLILEPIIEKVDRMTEGISLGEEKVSILAFADDLVLLAKDRKEATRQSGMIVGFLQELGMHLSIEKSSTVQIVSKGRTWHQADPKLYIGNEQVPYTDPERVVAYLGATIGPWKGLAKVSNEEIIEAVKSIGRMGLKPHQKINMIRTYLLPRFIHKMVASTPSLGSLRQLDQEVKQQVKQMLHLHPTTTDGVIYTSKSHGGLGIQRVENIVILAKLRSAIKMARSEDGAVRQTLAGQEAKIRRYASSIGLSWPAEMKDVERMRITLKKRETDRWKGLTSQGQGIKEFAGDRIGNEWLYKPELLKPSRYLDALKLRTNTFGSRVVLYRARKDIDVNCRRCGVQAETLGHILGNCTHTKPMRIHRHDEIVKLVENNVPEGCEVFVEPSVSVGGELRKPDLVIEDHGRVFVVDVSVRYEDKENLRDAYREKKRKYKDTAEYFKRRMNATRAEVIPIIVGCRGAMPMETVKNMKTLGIGRKHCLTASLIALRSSIEMANQFLDYDHTR

SEQ ID NO: 4040 - protein, 1149 aa, Nomada fabriciana
MEGNATAEASDVEVPGPGTPAADLSAMDRRTSEDDNGNASGHETVHILELPLSGDIKCSFCARIGRSRCFVKEAEFGAHCEKEHPRKRIIWKCVPCQRGFEKLQGWRCHFGKCKGPRSNEVRNEARSRCETCGSTFKTQRGLSQHERHRHPAERNRKREQGANGGGNQPGRRAYAWTEEETALLAQLSERYKHLRQPNVAIREFLPGKSLKQISDKRRQITAQIRAVAEAEISSIGESLAEPAEEEERVELQREVVDPQMDEEVQTEPRTDEEDDWKEPIRRAIRESGLEEDHPLRGIEALVERLAEQETTDGNQVDAVVRATVQKLLETARDKTGTDRAKRGRTPETGRQESHRTRRRKYEYARIQELYKKCPRKLLDQAIAGRPVGEDKKIEAPSKEEVEPLYRRLWGMEGPQIREELYRPAQEAVKMRDIWYPITVNEAVQRMKKIKKDTAAGIDGIRKEHLRMNGALQLLVKIYNLMMIHRAYPTQWRQHRTTLIPKPGKSAEKASDWRPITIGSLLSRIYSAMMDKRIREKVKQHQRQKGFTSEDGCKNNIAILSSALVKMKEEEGGIATILDISKAFDTVPHQAVKRCLTRKGVPQEVADYVRRMYDSCRTTISCRKQDKVEIMLRRGVKQGDPLSPLIFNLILEPIIEKVDRMTEGISLGEEKVSILAFADDLVLLAKDRKEATRQSGMIVGFLQELGMHLSIEKSSTVQIVSKGRTWHQADPKLYIGNEQVPYTDPERVVAYLGATIGPWKGLAKVSNEEIIEAVKSIGRMGLKPHQKINMIRTYLLPRFIHKMVASTPSLGSLRQLDQEVKQQVKQMLHLHPTTTDGVIYTSKSHGGLGIQRVENIVILAKLRSAIKMARSEDGAVRQTLAGQEAKIRRYASSIGLSWPAEMKDVERMRITLKKRETDRWKGLTSQGQGIKEFAGDRIGNEWLYKPELLKPSRYLDALKLRTNTFGSRVVLYRARKDIDVNCRRCGVQAETLGHILGNCTHTKPMRIHRHDEIVKLVENNVPEGCEVFVEPSVSVGGELRKPDLVIEDHGRVFVVDVSVRYEDKENLRDAYREKKRKYKDTAEYFKRRMNATRAEVIPIIVGCRGAMPMETVKNMKTLGIGRKHCLTASLIALRSSIEMANQFLDYDHTR

SEQ ID NO: 4041 - protein, 1136 aa, Nomada fabriciana
MEDNVVEASDVGVPGPGAPAADLSAMDGRTTNEDHGNSPGNKMVYVMDLPLSGVITCSFCARNEKRRCFIREAEFGMHCEKERPSGKIVWRCTPCQRGFEKLQGWRCHVGRCKGQRNIQELEGGTLIRCEVCENTFKTPRGLAQHERHRHPTERNKKREQAANKNRNQPGRKATVWTEEETELLVALNERFKHRRQPNVAIREFLPGKSLRQISDKRRQIPAQRATAPEVEISSDEEAPTELTGEEERIEPRTQEGNDWQEAIRRAIRTQALKEDHPLRDLEARIEHLAGQEMINEHQADTILQAIVERLLEKRRGRPGRGRTRGSRNAGDALTTERQRSRRARKKGFEYARAQELYKKCPRKLLDMAITGRPMREVTKGEAPEKKEVEALYRELWGTEGPQIRRELYRPAQQVGSMNEMWYPITTDEAVERIKKIKKNTAAGVDGIQKDHLRTDGALQVITKLYNLLMLGRVHPSQWKLHRTTLIPKPGKSMEKASNWRPITIGSLLSRMDSAIIDKRIRGKIKQHQRQKGFTSEDGCKNNIAILSSALNNMKENGGGVMTIVDISKAFDTVPHQAVTRCLRSKGVHHEVAAYIRKMYDNCQTTISCRRQEEVKIMLRRGVRQGDPLSPLLFNLIVEPIIEEIDRVTEGVKIGDERISILAFADDMVLLAKDRTEAREQSKMLVQFLRELGMKLSIGKCSTVQIVNGNRTWHQTDPELTVDGERIPYTDPEKVIAYLGAAIGPWKGLAKASNEEIVEATRAIGRMGLKPHQKVNMIRTYLLPRFIHRMVASQPSLGTLRKLDHEIKQQIKQMLHLHPTTTDGIIYTSKSHGGLGVQRTETIVVLAKLRSVTKMTQSEDEAVRQAALGQEAVAKKYASSVGLSWPVDLENLERTRRALKKKETDRWRGLVSQGHGVKDFAGDRIGNAWLYNPELLKPSRYLDALKLRTNTFGFRVVLNRARKDMDVRCRRCGVQAETLGHILGNYTRTKPMRIHRHNEIAKLIEDSVPEHCEVFQEPSVSIGGELRKPDLVIKDHDRVFVVDVSVRYEDKENLRNAYREKMKKYRNIAEYFKRRMNTARAEVIPVIVGCRGAMPAQTVNNMKLLGLNTKHCLTASLIALRSSIEMSNQFLDYDHTR

SEQ ID NO: 4042 - protein, 1105 aa, Coccinella septempunctata
MNLTLMRAYYQVTEGETHKSNYRAELQLRWHESYPDKPFTSQHLAAQIANIKTRRLISPDELELMKTDFVQAGRNRRTDSVRRSINRRSNIQPRLNEQSDPEGQQIQEDEELNGEITLMYQEINLRYEGMSMEGRPQITRLKIDAEAKKVVRKVNEALSSILDSAGTLEDLCHKIYCAARVVTEIQNQNQTATAPNRPDREQRAPWETRLNRKIDYFRKEIGVLHTFLNSETPSRKVMKKTRKYARRVKIKLTDPQHRQKITVHTEMLKQKIAALGNRIRRYHQRTLRYKQNNLFANNQRLFFRQIETEDTKQQKETPTEERMTAFWKDIWSQSVEHDNGARWIDTEIRNSSGYTAMPEINISESDLIAVFKRMRNWTAPGIDGIHNYWWKTFTSCHKKLANLLQSTLKNPQEIPSYFTKGLTHMIPKKGDLTQPKNYRPITCLPSAYKILTSIISQKLYSHIKRNNILAWEQNGCKHKARGSKELLVIDNVVTKQARKRLKNISMSWIDYQRAYDSMPHSWLIKILDIYKVDQQVSGLLRHLMSTWRTILSVKGTTQTYRTQTVSIKRGIFQGDSLSPLWFCLALNPLSNILNRSAYGYAIDDVTKLTHLFYMDDLKLFARGKQQLEGEMEIVRAFSEDIRMKFGLDKCATVHVRRGKLTENENITLRDGDCIRNLGVESTYRYLGIQQSYEIRQKENKKIAEAELVRRVNKILSTHLNAKNKVVAINVWAIPPLAYTAGILTWSKTDLERLDQKIRTMLTKRGMLHPNSAIERLYVPREEGGRGLANLEVMILKERDKLRNYFRNKNLPFYRTIVDGDKNFTVLNLSRSEEPEVEDALVRMRTTWQNKTIHGRFYASLKQADVDIKMSNTYLTSGYLFPETEGAVLAIQDQVVKTRVYVKHILHQDIETTKCRMCGVAEETIYHLTAGCSTIAPTKYLERHDNMGKVVHQLVCISKDLLNGFTPHYRYSPQSVLEDEKTKMYWDVTIISDRKVEHNRPDMVIWNKAEKSAILVDFAVPSDHNLSKTYAEKHEKYQILAQEMKSMWQLRKVSIMPLVISVNGLVHRRTVQHIKELNLPGNTILWMQKAAILGTVGIVRRIISPY

SEQ ID NO: 4043 - protein, 1105 aa, Coccinella septempunctata
MNLTLMRAYYQVTEGETHKSNYRAELQLRWHESYPDKPFTSQHLAAQIANIKTRRLISPDELELMKTDFVQAGRNRRTDSVRRSINRRSNIQLRLNEQSDPEGQQIQEDEELNGEITLMYQEINLRYEGMSMEGRPQITRLKIDAEAKRVVRKVNEALSSILDSAGTLEDLCHKIYCAARVVTEIQNQNQTATAPNRPDREQRAPWETRLNRKIDYFRKEIGVLHTFLNSETPSRKVMKKTRKYARRVKIKLTDPQHRQKITVHTEMLKQKIAALGNRIRRYHQRTLRYKQNNLFANNQRLFFRQIETEDTKQQKETPTEERMTAFWKDIWSQSVEHDNGARWIDTEIRNSSGYTAMPEINISESDLIAVFKRMRNWTAPGIDGIHNYWWKTFTSCHKKLANLLQSTLKNPQEIPSYFTKGLTHMIPKKGDLTQPKNYRPITCLPSAYKILTSIISQKLYSHIKRNNILAWEQNGCKHKARGSKELLVIDNVVTKQARKRLKNISMSWIDYQRAYDSMPHSWLIKILDIYKVDQQVSGLLRHLMSTWRTILSVKGTTQTYRTQTVSIKRGIFQGDSLSPLWFCLALNPLSNILNRSAYGYAIDDVTKLTHLFYMDDLKLFARGKQQLEGEMEIVRAFSEDIRMKFGLDKCATVHVRRGKLTENENITLRDGDCIRNLGVESTYRYLGIQQSYEIRQKENKKIAEAELVRRVNKILSTHLNAKNKVVAINVWAIPPLAYTAGILTWSKTDLERLDQKIRTMLTKRGMLHPNSAIERLYVPREEGGRGLANLEVMILKERDKLRNYFRNKNLPFYRTIVDGDKNFTVLNLSRSEEPEVEDALVRMRTTWQNKTIHGRFYASLKQADVDIKMSNTYLTSGYLFPETEGAVLAIQDQVVKTRVYIKHILHQDIETTKCRMCGVAEETIYHLTAGCSTIAPTKYLERHDNMGKVVHQLVCISKDLLNGFTPHYRYSPQSVLEDEKTKMYWDVTIISDRKVEHNRPDMVIWNKAEKSAILVDFAVPSDHNLSKTYAEKHEKYQILAQEIKSMWQLRKVSIMPLVISVNGLVHRRTVQHIKELNLPGNTILWMQKAAILGTVGIVRRIISPY

SEQ ID NO: 4044 - protein, 1105 aa, Coccinella septempunctata
MNFTLMRAYYQVTEGETHKSNYRAELQLRWHESYPDKPFTSQHLAAQIANIKTRRLISPDELELMKTDFVQAGRNRRTDSVRRSINRRSNIQPRLNEQSDSEGQQIQEDEELNREITLMYQEINLRYEGMSMEGRPQITRLKINAEAKRVVRKVNEALSSILDSAGTLEDLCHKIYCAARVITDIQNQNQTATTPNRPDREQRAPWETRLNRKIDYLRKEIGVLHTFLNSETPSRKVMKKTRKYARRVKIKLTDPQHRQKITVHTEMLKQKIAALGNRIRRYHQRTLRYKQNNLFANNQRLFFRQIETEDTKQQKETPTEERMTAFWKDIWSQSVEHDNGARWIDTEIRNSSGYTAMPEINISESDLIAVFKIMRNWTAPGIDGIHNYWWKTFTSCHKKLANLLQSTLKNPQEIPSYFTEGLTHMIPKKGDLTQPKNYRPITCLPSAYKILTSIISQKLYSHIKRNNILAWEQNGCKHKARGSKELLVIDNVVTKQARKRLKNISMSWIDYQRAYDSMPHSWLIKILDIYKVDQQVSGLLRHLMSTWRTILSVKGTTQTYRTQTISIKRGIFQGDSLSPLWFCLALNPLSNILNRSAYGYAIDDVTKLTHLFYMDDLKLFARGKQQLEGEMEIVRAFSEDIRMKFGLDKCATVHVRRGKLTENENITLRDGDCIRNLGVESTYRYLGIQQSYEIRQKENKKIAEGELVRRVNKILSTHLNEKNKVVAINVWAIQPLAYTAGILTWSKTDLERLDQKIRTMLTKRGMLHPNSAIERLYVPREEGGRGLANLEVMILKERDKLRNYFRNKNLPFYRTIVDGDKNFTVLNLSRSEEPEVEDALVRMRTTWQNKTIHGRFYASLKQADVDIKMSNTYLTSGYLFPETEGAVLAIQDQVVKTRVYVKHILHQDIETTKCRMCGVAEETIYHLTAGCSTIAQTKYLERHDNMGKVVHQLVCISKDLLNGFTPHYRYSPQSVLEDEKTKMYWDVTIISDRKVEHNRPYMVIWNKAEKSAILVDFAVPSDHNLSKTYAEKHEKYKILAQEMKSMWQLRKVSIMPLVISVNGLVHRRTVQHIKELNLPGNTILWMQKAAILGTVGIVRRIISPY

SEQ ID NO: 4045 - protein, 868 aa, Coccinella septempunctata
MKKTRKYARRVKIKLTDPQHRQKITVHTEMLKQKIAALGNRIRRYHQRTLRYKQNNLFANNQRLFFRQIETEDTKQQKETPTEERMTAFWKDIWSQSVEHDNGARWIDTEIRNSSGYTAMPEINISESDLIAVFKRMRNWTAPGIDGIHNYWWKTFTSCHKKLANLLQSTLKNPQEIPSYFTKGLTHMIPKKGDLTQPKNYRPITCLPSAYKILTSIISQKLYSHIKRNNILAWEQNGCKHKARGSKELLVIDNVVTKQARKRLKNISMSWIDYQRAYDSMPHSWLIKILDIYKVDQQVSGLLRHLMSTWRTILSVKGTTQTYRTQTVSIKRGIFQGDSLSPLWFCLALNPLSNILNRSAYGYAIDDVTKLTHLFYMDDLKLFARGKQQLEGEMEIVRAFSEDIRMKFGLDKCATVHVRRGKLTENENITLRDGDCIRNLGVESTYRYLGIQQSYEIRQKENKKIAEAELVRRVNKILSTHLNAKNKVVAINVWAIPPLAYTAGILTWSKTDLERLDQKIRTMLTKRGMLHPNSAIERLYVPREEGGRGLANLEVMILKERDKLRNYFRNKNLPFYRTIVDGDKNFTVLNLSRSEEPEVEDALVRMRTTWQNKTIHGRFYASLKQADVDIKMSNTYLTSGYLFPETEGAVLAIQDQVVKTRVYVKHILHQDIETTKCRVCGVAEETIYHLTAGCSTIAPTKYLERHDNMGKVVHQLVCISKDLLNGFTPHYRYSPQSVLEDEKTKMYWDVTIISDRKIEHNRPDMVIWNKAEKSAILVDFAVPSDHNLSKTYAEKHEKYQILAQEMKSMWQLRKVSIMPLVISVNGLVHRRTVQHIKELNLPGNTILWMQKAAILGTVGIVRRIISPY

SEQ ID NO: 4046 - protein, 1105 aa, Adalia bipunctata
MNLTLLSAYFQVTEGETKKNRYRAQLQQRWKEIYPDKPFTSQHLAAQITNIKTRLLISPDEIERMKVESAQGGRNRRSMQIRRSINRMSNIQPQQEEQENQEEQITQEHVAVHSEIRLMFEETYLRYDGVSMEGRPPISRLKLNAEAKKVILTVNDALAAPLDVSGTLEDLCYRVYCAARVVNDIQNQKLPTTTLTTREQGTKPPWESRLEGKINRFRKEIGVLHVFLNGQNPSRKVMKKTKNYAKRAKIKLNDPQHRNNLTVRVEILKQKIAALGNRIKRYHQRTQRYKQNNLFVNNQKMFFRQIETECTQKQSIVPTQEKMTEIWKGIWSQNAQHDTQAYWIDAERQSSSRFTAMSEFKISESDLSATVKRMKNWTAPGVDGIHNYWWKAFTNCHKKFANLLQKATRNPALIPLYFTNGQTHMLPKKGDLTDPKNYRPITCLPSVYKVLTSIISQKLNSHIKNNNILAWEQNGCKQKARGCKELLVIDNIVTKQARKRQKNLSMGWIDYQKAYDSMPHSWLIEILRIYKIDRQIIDLLYHLMSTWRTTLLVKGSTQMYRTQTIPIRRGIFQGDSLSPLWFCLALNPLSNLLNRSAYGYTIDDQTKLTHLFYMDDLKLFARGRQQLEGELEIVRAFSGDIRMNFGLEKCASVHVKRGKLTESGDITLKDGDRIRGMGIEDTYKYLGIQQSFEIRQNENKKAAEQELVRRTNKILNSHLNGKNKIMAYNAWAVPAFTYTSGILSWSRTDLERLDRKIRTMLTKRGMLHPNSAIERMYLPRGEGGRGMADLEVATLKEKENLRNYFRNNNSPFCRAIVTIDRNYTHLNLATPVTPEREDPLELMRVTWMNKSMHGRFYASLRQAEVDLKISNTYLTSGYLFPETEGAVLAIQDQVVKTRMYAKHILKQQIDSTKCRMCNAAEETLQHLTAGCSAIAQTRYLERHNNMGKVVHQLICLNKNLVRDFTVPHRYSPQPVLEDECTKVYWDVTVVADRGVEHNRPDMILWNKAEKTATIIDFAVPQDYNLGKTYAEKIDKYQKLAREIKTIWKLKKVIMMPLIISVNGLVHKKTIQHIKELNLPGNTILWMQKAAILGTVGIVRSVVSPY

SEQ ID NO: 4047 - protein, 1122 aa, Coccinella septempunctata
MFPCICGKSYATERGRKDHQRKYCRGAPTEDDGKCRYCNNNFKNYMAMRKHLAAAHPEEYNRELYTETESGNRRQFWTEGELEEMARIEAEYDGDKLLDYLAEKMGRPKDGLRKKRYNMTYTNLVERFRNENLRKRVTESSFEVPGPSRVTTRSRAARGQQIIDTAQSPSTTSESSFETSNDPDYSPPLVEDEPESYVYDPSEGSSPGPSELSPQMASPHQPYDRREERMPDSWAELSIVEDEMESTIIPEVEHELPRTPPAKEIIDDTQDHVMRHLIKMCVASEDVETIEVVRSVCLREEGYRESIDTWVRTMCEEYGKKKKPSQHHKLEIPRKEGGRRRHRARLYKYMQNKYKNNKKELANEIIDDIQPSTDNLKPRKEEIEEEYKKIFECEPPIDYEPITDVDMRPCDIYQCIDSNSIQEAIKLMGTTSAGPDGINSQRLKNIPIEKLEFLFNIMILTKYVPTPLRQSRTVLIPKTEKDRRNVDSWRPITIASVLLRLINRIVAKRLADGITLDKCQRGFTNMDGCFANNLTLQKVIKVRRKEGKPLTVITLDLKKAFDNISHSTIRRALRRFKVDKNTTAYIMANLDDQWTTIFCEEEEITHLKINKGVKQGDPLSPILFNMVIDELIANLKIRKGIKFGETNISVLGYADDLLLLAENTKDAQFLLKFACRFFEARSLHLNTAKCTSLSLTTVPSKKKLFVHPTPKFYVRGSPIPPLTSINETFKYLGQYYSYSGATSCSIKNLDAQLGRILRAPLKPQQKISVLTQHLMPRYIHSLQSPSINAKILKTADRLVRRAVKKIWRLPTHIIDESLYTPVNMGGLGLFSFSRKIPIIMMERLSRARQTCDMFDSVMSVDETWMRRLQRMIKPHLNTKVAIDRSNAERLERSFYGGGTIQAANNSASNNYIHSPPAMWTGEDYISAIKLRTNTLPTRGLPYGPREAKMCRAGCGRIESLSHVLQKCPLGHTKRITRHNFVVKRIAEAARKRGWEILEEPHIRDKRGKLNKPDMVCVKGDVVVVADVGVSWEGPRLLSETYLLKKAVYDQPEFIEVVAEKYVGKSIKVLPFIIGARGFWCRESSSLLQALSIDNVNTRRDLVLTTLRGGWSIHKDVSRRTWD

SEQ ID NO: 4048 - protein, 902 aa, Coccinella septempunctata
MISPHQACSPSRTWTEMSTVESEGMFSPTQDVEHETPQTPPTNEIIEDIHDQVMRHLMKLCVDSDDVEIIELVRSVCLKEEGYKESLDAWVKSICDKYGKRMNSGPKLNTEIPGRECGRRRHRAKLYKYMQNKYKTNKKELANEIIDNIQPSTDNLTPRREEIEEEFKRIFESEPPIDHEPITDAATSPCNIYQCIDSATIQQHIKLMGTTSAGPDGINSQRLKNIPREQLEILFNMMILTKYVPTPLRQSRTILIPKADKDRRYVDSWRPITIASIILRLINRIVAKRLADRIELDKCQRGFTNMDGCFANNLTLQKIIKVRRKEGKPITVLTLDLKKAFDNISHSTIRRALRRFQVDKDTTAYIMANLDDQRTTIYCEGEEITTVQIKKGVKQGDPLSPILFNMVMDELIANLKIRKGIKSGTTNISVLGYADDLLLLAENTKDAQFLLKFAFRFFESRSLSLNTAKCTSMSLAVVPSKKKLFIHLTPKFYVRGIPIPPITSMSDTFKYLGHIYSHAGTTPCNVNNLDMQLGRILKSPLKPQQKISILTQHLIPKYIHSLQSPSINAKTLKKADRLVRRAVKKIWRLPTHIIDESLYTPVNMGGLGIFSFSRKIPIILMERMRRARQTCNMFDDIMSVDETWIQRVQRMIKPHLNTKVAIDRNNAERLERSFYGGGTLQAANNSASNSYIYSPPAMWSGEDYISSIKLRTNTLPTRGLPYGPREAKMCRAGCGRIESLSHVLQKCPLGHTKRIIKHNFVVKRIVDAARKRGWEILEEPDIRNKKGKLNKPDMICIKEDVVVVSDVGISWESPRLLSETYLLKKAVYDQPEFLEVIAEKYSGKNIHVLPFIIGARGFWCRESSSLLQTLSIDNVHTMRDLVLTTLRGSWSIHTDAGRRTWD

SEQ ID NO: 4049 - protein, 1116 aa, Harmonia axyridis
MYPCICGKSYVSERGRKDHQRRYCRGAPVRDESKCRYCDRDFRNFMAMRKHQQASHPEEYNRELYEEAETGGRRQFWTEGELEEMARLEAAYEGEKLLDYLSEKMGRPKEGLRKKRYGMTYTNLVERFKNEIATTSSTSPTSDNECAGPSRPNTRSRVTPGRVAAVRARVETSDSETSSASIEEETYIPEREDSEEEPTEYTYDPDNEQLPLRIVVDLEPDSQTTNAEPITAPHTPTSPNIWQPDIQSTAHHTPTTPGNIPIDTRDPVLNHLIQMCVDLEDVEAIQVCNAVCQRESGYKEVIDRWVLDIWKYGRVRKSSYRTAPQMPEETGGRRKYRARLYKYIQNKFKANKKELAREIIDDIKPSATKSRPKIDDIIEEYKSIFENASPPDIAYITDAMESPCNIYAAIEKTHIMESIKSMGTTSAGPDGIDSGRLKKIPLETLELLYNLMVHSKYVPEPLRKSRTILIPKNDKNKGNIDNWRPITVASILLRVLNKMMAKKLAANIQIDECQRGFTDIDGCFANNLTLQKIIKKKRKEGKPLTVITLDLKKAFDNISHQSIKRALRRFKVDPRTAAYIMANFEDQWTTIFCEGEEIAGMQVKRGVKQGDPLSPILFNMVLDELIASLKIRHGVKMGTANISVLGYADDLLLLAENTKDAQFLLKYACQFFEARSLALNTNKCTSLSLSVVPSKKKLYIHPTPKFYVRGNPIPPITSVAESFKYLGKVYTHAGMTPCSTANLDTQLTRIMRAPLKPQQKMTILAEHLVPRYIHSLQSPSINIRVLKQADRQIRRAVKKILRLPVHVIDESLYTPVRLGGLGIFSLTRKIPIIMMNRIVRVKRRCNLFSSAIGEDDAFTMRLQRMIKPHLKNKNAVDQNNADKLESSFYGGGTKQAANNSASNFYIYSSPPAWSGEDYLSAIKLRTNTLPTRGLPYGPREAKMCRGKCGRIESLSHMLQKCHLGHSKRINRHNFVSRRIAEAARRKGWEVTEEPHIRDTRGRLNKPDMICSKGDIIIVADVGVSWETPRLLSETYMFKKATYDQPEFLDALSVQHPDKNISVLPFIIGARGFWCRESDTLLQALDIATTQLRRDLVMTTLRGSWSIHTDVCRRSWD

SEQ ID NO: 4050 - protein, 1122 aa, Coccinella septempunctata
MFPCICGKSYATERGRKDHQRKYCRGAPTDDDGKCRYCNNNFKNYMAMRKHLAAAHPEEYNRELYTETESGNRRQFWTEGELEEMARLEAEYDGEKLLDYLVEKMGRPKDGLRKKRYNMTYTNLVERFRNENLRKRVTESSFEVPGPSRVTTRSRAARGQQIIDTAQSPSTTSESSFETSNDPDYSPPLVEDEPESYVYDPSEGSSPGPSELSPQMASPHQPYDRREERMPDSWAELSIVEDEMESTIIPEVEHELPRTPPAKEIIDDTQDHVMRHLIKMCVASEDVETIEVVRSVCLREEGYRESIDTWVRTMCEEYGKKKKPSQHHKLEIPRKEGGRRRHRARLYKYMQNKYKNNKKELANEIIDDIQPSTDNLKPRKEEIEEEYKKIFECEPPIDYEPITDVDMRPCDIYQCIDSNSIQEAIKLMGTTSAGPDGINSQRLKNIPIEKLEFLFNIMILTKYVPTPLRQSRTVLIPKTEKDRRNVDSWRPITIASVLLRLINRIVAKRLADGITLDKCQRGFTNMDGCFANNLTLQKVIKVRRKEGKPLTVITLDLKKAFDNISHSTIRRALRRFKVDKNTTAYIMANLDDQWTTIFCEEEEITHLKINKGVKQGDPLSPILFNMVIDELIANLKIRKGIKFGETNISVLGYADDLLLLAENTKDAQFLLKFACRFFEARSLHLNTAKCTSLSLTTVPSKKKLFVHPTPKFYVRGSPIPPLTSINETFKYLGQYYSYSGATSCSIKNLDAQLGRILRAPLKPQQKISVLTQHLMPRYIHSLQSPSINAKILKTADRLVRRAVKKIWRLPTHIIDESLYTPVNMGGLGLFSFSRKIPIIMMERLSRARQTCDMFDSVMSVDETWMRRLQRMIKPHLNTKVAIDRSNAERLERSFYGGGTIQAANNSASNNYIHSPPAMWTGEDYISAIKLRTNTLPTRGLPYGPREAKMCRAGCGRIESLSHVLQKCPLGHTKRITRHNFVVKRIAEAARKRGWEILEEPHIRDKRGKLNKPDMVCVKGDVVVVADVGVSWEGPRLLSETYLLKKAVYDQPEFIEVVAEKYVGKSIKVLPFIIGARGFWCRESSSLLQALSIDNVNTRRDLVLTTLRGGWSIHKDVSRRTWD

SEQ ID NO: 4051 - protein, 1048 aa, Achatina immaculata
MPILANTQQCTVTPVSDKTLEDLCQDIIHSTENIQVESGSGEAIQLSDETRDKVNFPPASAKSIWENLDAGLCKELDKQLRGKNLEQKLEAFGNIIYLHCYKEFGTTKQAKREKVTPRKSRRQRKIEAIRQQKNHARKMFKKAHESEKEGLRQVWQHLKSQHNALCRAERLCTRKRETRYAREKFGFAKQLFEQPKSGTLKAGKEVLEEHLSKTYSDKNRHTPLEQMKGLVWPCAPGSKFKCSPPTLQEVESIVKKAKGKSAPGPNGVPYILYKRCPEVLKKLHKLLRTAWTKGVICKEWKKANGVYIPKEQNSTEINQFRPISLLNVEGKIFFSVMAKRLTTYLLDNGYIDTSVQKGGIPGFPGCLEHASMIWEAIQQAKSGKQDLQVIWLDLTNAYGSVPHQMIWLALDMYHVPKEITNMLKRYLTGFLMRFGTSGYTTRWIELQVGIAMGCTISPILFVLAMQVILRAAGAAAEGPRFRNGCQMPPLKAFMDDTTVITTSEAQARKMERLDSLIIWCRMSFKPKKSRSLSLMKGKVIERSYTVANQIIPTVGEEPVKSLGRVYDASMKDSSAVKQVIEMAQNGLSIIDKSRLLGKFKIWCLQFMLIPKLMWPLLIYEVSTSTVEAVERKINKAIRKWLGVPPGLTDVALYCKKSKLQLPFKSVVEEYKVGKTRLAMMLQESTDPVVREVQPTLKTGRKWKAGEEVTTARETQELKEVMGYTQTNRRGFGHGEIKWWSKASCKERRDMIISEVRNSEDDKRVQKAVQQSQQGQWTTWEEVLQRSLTWNDIWKMAPLRLSFIIRATYDLLPTGSNLYKWGVSEDTKCPLCNERQTLAHVLSASRVSLGQGRYTWRHNRVLQELVAIVDRANDKANNSKRVEVPPKYFIGAGTTSNIEIRDIPLPSLLDGTNDWEVTADLPERREYPTAIKNTGMRPDIVVYSTEKQELIMIELTVPYETRIEEQHLFKCEKYNDLVKQLRQGAGIRAKVIAVEVGAGGFVATSAYDLCKQLGIKGQARARALRSLSETAEKASCWLWSMRNKHWEHK

SEQ ID NO: 4052 - protein, 916 aa, Achatina immaculata
MFKKAHESEKEGLRQVWQHLKSQHNALCRAERLCKRKRETRYAREKFYRDPFGFAKQLFEQPKSGTLKAGKEVLEEHLSKTYSDKNQHTPLEQMKGLVWPCAPGSKFKCSPPTLQEVESIVRKAKGKSAPGPNGVPYILYKRCSEVLKKLHKLLRTAWTKGVICKEWKKANGVYIPKEQNSTEINQFRPISLLNVEGKIFFSVMAKRLTTYLLDNGYIDTSVQKGGIPGFPGCLEHASMIWEAIQQAKSGKQDLQVIWLDLANAYGSVLHQMIWLALNMYHVPKEITNMLKRYFTGFLMRFGTSGYTTRWIELQVGIAMGCTISPILFVLAMQVILRAAEGAAEGPRFRNGCQMPPLKAFMDDTTVITTSEAQARKMLERLDNLIVWCRMSFKPKKSRSLSLMKGKVIERSYTVANQIIPTVGEEPVKSLGRVYDASMKDSSAVKQVIEMAQNGLSIIDKSRLLGKFKIWCLQFMLIPKLMWPLLIYEVSTSTVEAVERKINKAIRKWLGVPPGLTDVALYCKKSKLQLPFKSVVEEYKVGKTRLAMMLQESTDPVVREVQPTLRTGRKWKVGEEVTTARETQELKEVIGYTQTNRRGFGHGEIKWWSKASCKERRDMIISEVRNSEDDKRVQKAVQQSQQGQWTTWEEVLQRSLTWNDIWKMAPLRLSFIIRATYDLLPTGSNLYKWGVSEDTKCPLCNERQTLEHVLSACRVSLGQGRYTWRHNRVLQELVAIVDRANDKANNSKRVEVPPKYFIGAGTTSNIEIRDIPLPSLLDGTNDWEVTADLPERREYPTAIKNTGMRPDIVVYSTEKQELIMIELTVPYETRIEEQHLFKLEKYNDLVKQLRQGAGIRAKVIAVEVGARGFIATSAYDLCKQLGIKGQARARALRSLSETAEKASCWLWSMRNKHWEHK

SEQ ID NO: 4053 - protein, 823 aa, Achatina immaculata
MKGLVWPCAPGSKFKCSPPTLQEVESIVRKAKGKSAPGPNGVPYILYKRCPEVLKKLHKLLRTAWTKGVICKEWKKANGVYIPKEQNSTEINQFRPISLLNVEGKIFFSVMAKRLTTYLLDNGYVDTSVQKGGIPGFPGCLEHASMIWEAIQQAKSGKQDLQVIWLDLANAYGSVPHQMIWLALNMYHVPKEITNMLKRYFTGFLMRFGTSGYTTRWIELQVGIAMGCTISPILFVLAMQVILRAAEGAAEGPRFRNGCQMPPLKAFMDDTTVITTSEAQARKMLESLDSLIIWCRMSFKPKKSRSLSLMKGKVIERSYTVANQIIPTVGEEPVKSLGRVYDASMKDSSAVKQVIEMAQNGLSIIDKSRLLGKFKIWCLQFMLIPKLMWPLLIYEVSTSTVEAVERKINKAIRKWLGVPPGLTDVALYCKKSKLQLPFKSVVEEYKVGKTRLAMMLQESTDPVVREVQPTLRTGRKWKVGEEVTSARETQELKEVIGYTQTNRRGFGHGEIKWWSKASCKERRDMIISEVRNSEDDRLVQKAVQQSQQGQWTTWEEVLQRSITWNDIWKMAPLRLSFIIRATYDLLPTGSNLYKWGVSEDTKCPLCNERQTLEHVLSACRVSLGQGRYTWRHNRVLQELVAIVDRANDKANNSKRVEMPPKYFIGAGTTSNIEIRDIPLPSLLDGTNDWEVTADLPERREYPTAIKNTGMRPDIVVYSTGKQELIMIELTVPYETRIEEQHLFKLEKYSDLVKQLRQGAGIRAKVIAVEVGARGFVATSAYDLCKQLGIKGQARARALRSLSETAEKASCWLWSMRNKHCEHK

SEQ ID NO: 4054 - protein, 823 aa, Achatina immaculata
MKGLVWPCAPGSKFKCSPPTLQEVESIVRKAKGKSVPGPNGVPYILYKRCPEVLKKLHKLLRTAWTKGVICKEWKKANGVYIPKEQNSTEINQFRPISLLNVEGKIFFSVMAKRLTTYLLDNGYIDTSVQKGGIPGFPGCLEHASMIWEAIQQAKSGKQDLQVIWLDLANAYGSVPHQMIWLALNMYHVPKEITNMLKRYFTGFLMRFGTSGYTTRWIELQVGIAMGCTVSPILFVLAMQVILRAAEGAAEGPRFRNGCQMPPLKAFMDDTTVITTSEAQARKMLERLDNLIVWCRMSFKPKKSRSLSLMKGKVIERSYTVANQIIPTVGEEPVKSLGRVYDASMKDSSAVKQVIEMAQNGLSIIDKSRLLGKFKIWCLQFMLIPKLMWPLLIYEVSTSTVEAVERKINKAIRKWLGVPPGLTDVALYCKKSKLQLPFKSVVEEYKVGKTRLAMMLQESTDPVVREVQPTLRTGRKWKVGEEVTTARETQELKEVIGYTQTNRRGFGHGEIKWWSKASCKERRDMIISEVRNSEDDKRVQKAVQQSQQGQWTTWEEVLQRSLTWNDIWKMAPLRLSFIIRATYDLLPTGSNLYKWGVSEDTKCPLCNERQTLEHVLSACRVSLGQGRYTWRHNRVLQELVAIVDRANDKANNRKRVEVPPKYFIGAGTTSNIEIRDIPLPSLLDGTNDWEVTADLPERREYPTAIKNTGMRPDIAVYSTEKQELIMIELTVPYETRIEEQHLFKLEKYNDLVKQLRQGAGIRAKVIAVEVGARGFIATSAYDLCKQLGIKGQARARALRSLSETAEKASCWLWSMRNKHWEHK

SEQ ID NO: 4055 - protein, 1010 aa, Achatina immaculata
MQLSDETRDKVNFPPASAKSIWENLDAGLCKELDKQLRGKNLEQKLEAFGNIIYLHCYKEFGTKQAKREKVTPRKSRRQRKIEAIRQQKNYARKMFKKAHESEKEGLRQVWQHLKSQHNALCRAERLCKRKRETRYAREKFYRDPFGFTKQLFEQPKSGTLKAGKEVLEEHLSKTYSDKNQHTPLEQMKGLVWPCAPGSKFKCSPPTLQEVESIVRKAKGKSAPGPNGVPYILYKRCPEVLKKLHKLLRTAWTKGVICKEWKKANGVYIPKEQNSTEINQFRPISLLNVEGKIFFSVMAKRLTTYLLDNGYIDTSVQKGGIPGFPGCLEHASMIWEPIQQAKSGKQDLQVIWLDLANAYGSVLHQMIWLTLNMYHVPKEITNMLKRYFTGTIMRFGTSGYTTRWIELQVGIAMGCTISPILFVLAMQVILRAAEGAAEGPRFRNGCQMPPLKAFMDDTTVITTSEAQARKMLERLDNLIIWCRMSFKPKKSRSLSLMKGKVIERSYTVANQIIPTVGEEPVKSLGRVYDASMKDSSAVKQVIEMAQNGLSIIDKSRLLGKFKIWCLQFMLIPKLMWPLLIYEVSTSTVEAVERKINKAIRKWLGVPPGLTDVALYCKKSKLQLPFKSVVEEYKVGKTRLSMMLQESTDPVVREVQPTLRTGRKWKVGEEVTTARETQELKEVIGYTQTSRRGFGHGEIKWWSKASCKERRDMIISEVRNSEDDKRVQKAVQQSQQGQWKTWEEVLQRSLTWNDIWKMAPLRLSFIIRATYDLLPTGSNLYKWGVSEDTKCPLCNERQTLEHVLSACRVSLGQGRYTWRHNRALQELVAIVDRANDKANNSKRVEVPPKYFIGAGTTSNIEIRDIPLPSLLDGTNDWEVTADLPERREYPTAIKNTGMRPDIVVYSTEKQELIMIELTVPYETRIEEQHLFKLEKYNDLVKQLRQGAGIRAKVIAVEVGARGFVATSAYDLCKQLGIKGQARARALRSLSETAEKASCWLWSVRNKHWEHK

SEQ ID NO: 4056 - protein, 1103 aa, Achatina immaculata
MLQKSDFTETTMPAPINSSSEQRMEYPCICGRKFNTQRGMKIHRTKKGCGGSLLTNTQQCTVTPVSEKTLEDLCQDIIHSTENIQVESGSGEAMQLSDETRDKVNFPPASAKSIWENLDAGLCKELDKQLRGKNLEQKLEAFGNIIYLHCYKEFGTKQAKREKVTPRKSRRQRKIEAIRQQKNHARKMFKKAHESEKEGLRQVWQHLKSQHNALCRAERLCKRKRETRYAKEKFYRDPFGFAKQLFEQPKSGTLKAGKEVLEEHLSKTYSDKNQHTPLEQMKGLVWPCAPGSKFKCSPPTLQEVESIVRKAKGKSAPGPNGVPYILYKRCPEVLKKLHKLLRTAWTKGVICKEWEKANGVYIPKEQNSTEINQFRPISLLNVEGKIFFSVMATRLTTYLLDNGYIDTSVQKGGIPGFPGRLEHASMIWEAIQQAKSGKQDLQVIWLDLANAYGSVPHQMIWLALNMYHVPKENTNMLKRYFTGFLMRFGTSGYTTRWIELQVGIAMGCTISPILFVLAMQVILRAAEGAAEGPRFRNGCQMPPLKAFMDDTTVITTSEGQARKMLERLDNLIIWCRMSFKPNKSRSLSLMKGKVIERSYTVANQIIPTVGEEPVKSLGRVYDASMKDSSAVKQVIEMAQNGLSIIDKSRLLGKFKIWCLQFMLIPKLMWPLLIYEVSTSTVEAVERKINKAIRKWLGVPPGLTDVALYCKKSKLQLPFRSVVEEYKVGKTRLAMMLQESTDPVVREVQPTLRTGRKWKVGEEVTTARETQELKEVIGYTQTNKRGFGHGEIKWWSKASCKERRDMIISEVRNSEDDKRVQKAVQQSQQGQWTTREEVLQRSLTWNDIWKMAPLRLSFIIRATYDLLPTGSNLYKWGVSEDTKCPLCNERQTLEHVLSACRLSLGQGRYTWRHNRVLQELVAIVDRANDKANNSKRVEVPPKYFIGAGTTSNIEIRDIPLPSLLDGTNDWEVTANLPERREYPTAIKNTGMRPDIVVYSTEKQELIMIELTVPYETRIEEQHLFKCEKYNDLVKQLRQGAGIRAKVIAVEVGARGFVATSAYDLCKQLGIKGQARARALRSLSETAEKASCWLWSMRNKHWEHK

SEQ ID NO: 4057 - protein, 1171 aa, Achatina immaculata
MVMPLTIGKDRWTVGRDRQTLGKTRILTGKASLNWAVRASNPVSRHTIATKSKKKKCPQDPPKGGENDGSTGDFTETTMPAPINSSSEQRMEYPCICGRKFNTQRGMKIHRTKKGCGGSLLTNTQQCTVTPVSDKTLEDLCQDIIHSTENIQVESGSGEAMQLSDETRDKVNFPPASAKSIWENLDAGLCKELDKQLRGKNLEQKLEAFGNIIYLHCYKEFGTKQAKREKVTPRKSRRQRKIEAIRQQKNHTRKMFKKAHESEKEGLTCQVWQHLKSQHNALCRAERLCKRKRETRYAREKFYRDPFGFAKQLFEQPKSGTLKAGKEVLEEHLSKTYSDKNQHTPLEQMKGLVWPCAPGSKFKCSPPTLQEAESIVRKAKGKSAPGPNGVPYILYKRCPEVLKKLHKLLRTAWTKGVVCKEWKKANGVYIPKEQNSTEINQFRPISLLNVEGKIFFSVMAKRLTTYLLDNGYIDTSVQKGGIPGFPGCLEHASMIWEAIQQAKSGKQDLQVIWLDLANAYGSVPHQMIWLALNMYHVPKEITNMLKRYFTGFLMRFGTSGYTTRWIELQVGIAMGCTISPILFVLAMQVILRAAEGAAEGPRFRNGCQMPPLKAFMDDTTVITTSEAQARKMLERLDNLIVWCRMSFKPKKSRSLSLMKGKVIERSYTVANQIIPTVGEEPVKSLGRVYDASMKDSSAVKQVIEMAQNGLSIIDKSRLLGKFKIWCLQFMLIPKLMWPLLIYEVSTSTVEAVERKINKAIRKWLGVPPGLTDVALYCKKSKLQLPFKSVVEEYKVGKTRLPMMLQESTDLVVREVQPTLRTGRKWKVGEEVTTARETQELKDVIGYTQTNRRGFGHGEIKWLSKASCKERRDMIISEVRNSEDDKRVQKAVQQSQQGQWTTWEEVLQRSLTWNDIWKMAPLRLSFIIRATYDLLPTGSNLYKWGVSEDTKCPLCNERQTLEHVLSACRVSLGQGRYTWRHNRVLQELVAIVDRANDKANNSKRVEVPPKYFIGAGTTSNIEIRDIPLPSLLDGTNDWEVTADLPERREYPTAIKNTGMRPDIVVYSTEKQELIMIELTVPYETRIEEQHLFKLEKYNDLVKQLRQGAGIRAKVIAVEVGARGFIATSAYDLCKQLGIKGKPRARALRSLSETAEKASCWLWSMRNKHWEHK

SEQ ID NO: 4058 - protein, 987 aa, Achatina immaculata
MGKPRRRIMQRTGQTAKRKKPGAKAGSICNIIYLHCYKEFGTKQAKREKVTPRKSRRQREVEAIRQQKNHARKMFKKAHESEKEGLRQVWQHLKSQHNALCRAERLRERENRYAREKFYRDPFGFAKQLFEQPKSGTLKAGKEVLEEHLSKTYFDKNQHTPLEQMKGLVWPCAPGSKFKCSPPTLQEVESIVRKAKGKSTPGPNGVPYILYKRCPEVLKKLHKLLRTAWTKGVICKEWKKANGVYIPKEQNSTEINQFRPISLLNVEGKIFFSVMAKRLTTYLLDNGYVDTSVQKGGIPGFSGCLEHASMIWEAIQQAKSGKQDLQVIWLDLANAYGSVPHQMIWLALNMYHVPKEITNMLKRYFTGFLMRFGTSGYTTRWIELQVGIAMGCTISPILFVLDMQVILRAAEGAAEGLRFRNGCQMPPLKAFMDDTTVITTSKAQARKMLERLDNLIIWCRMSFRPKKSRSLSLMKGKVIERSYTVANQIIPTVGEEPVKSLGRVYDASMKDSSAMKQVIEMAQNGLSIIDKSRLLGKFKIWCLKFMLIPKLMWPLLIYEVSTSTVEAVERKINKAIRKWLGVPPGLTDVALYCKKSKLQLPFKSVVEEYKVGKTRLAMMLQESTDPVVREVQPTLRTGRKWKVGEEVTTARETQELKEVIGYTQTNRRGFGHGEIKWWSKASCKERRDMIISEVRNSEDDKRVQKAVQQSQQGQWTTWEEVLQRSLTWNDIWKMAPLRLSFIIRATYDLLPTGSNLYKWGVSQDTKCPLCNERQTLEHVLSACRVSLGQGRYTWRHNRVLQELLAIVDRANDKANNSKRVEVPPKYFIGAGTTSNIEIRDIPLPSLLDGTNDWEVTADLPERREYPTAIKNTGMRPDIVVYSTEKQELIMIEATFPYETRIEEQHLFKLEKYNDLVKQLRQGAGIRAKVIAVEVGARGFVATSAYDLCKQLGIKGQARARALRSLSETAEKASCRLWSMRNKHWEHK

SEQ ID NO: 4059 - protein, 916 aa, Achatina immaculata
MFKKAHESEKEGLRQVWQHLKSQHNALCRAERLCKRKRETRYAREKFYRDPFGFAKQLFEQPKSGTLKVGNEVLEEHLSKTYSDKNQHTPLEQMKGLVWPCAPGSKFKCSPPTLQEVESIVRKAKGKSAPGPNGVPYILYKRCPEVLKKLHKLLRTAWTKGVICKEWKKANGVYIPKEQNSTEINEFRPISLLNVEGKIFFSVMAKRLTTYLLDNGYIDTSVQKGGIPGFPGCLEHASMIWEAIQQAKSGKQDLQVIWLDLANAYGSVPHQMIWLALNMYHVPKEITNMLKRYFTGFLVRFGTSGYTTRWIELQVGIAMGCTISPILFVLAMQVILRAAEGAAEGPRFRNGCQMPPLKAFMDDTTVITTSEAQARKMLERLDNLIVWCRMSFKPKKSRSLSLMKGKVIERSYTVANQIIPTVGEEPVKSLGRVYDASMKDSSAVKQVIEMAQNGLSIIDKSRLLGKFKIWCLQFMLIPKLMWPLLIYEVSTSTVEAVERKINKAIRKWLGVPPGLTDVALYCKKSKLQLPFKSVVEEYKVGKTRLAMMLQESTDPVVREVQPTLRTGRKWKVGEEVTTARETQELKEVIGYTQTNRRGFGHGEIKWWSKASCKERRDMIISEVRNSEDDKRVQKAVQQSQQGQWTTWEEVLQRSLTWNDIWKMAPLRLSFIIRATYDLLPAGSNLYKWGISEDTKCPLCNERQTLEHVLSACRVSLGQGRYTWRHNRVLQELVAIVDRANDKANNSKRVEVPPKYFIGAGTTSNIEIRDIPLPSLLDGTNDWEVTADLPERREYPTAIKNTGMRPDIVVYSTEKQELIMIELTVPYETRIEEQHLFKLEKYNDLVKQLRQGAGIRAKVIAVEVGARGFIATSAYDLCKQLGIKGQARARALRSLSETAEKASCWLWSMRNKHWEHK

SEQ ID NO: 4060 - protein, 1092 aa, Achatina immaculata
MPASINSSSEQRMEYPCICGRKFNTQRGMKIHRTKKGCGGSLLTNTQQRTVTPVSDKTLEDLCQDIIHSTENIQVESGSGEAMQPSDETRDKVNFPPASAKSIWENLDAGLCKELDKQLRGKNLEQKLEAFGNIIYLHCYKEFGTKQAKREKATPRKSRRQRKIEAIRQQKNYARKMFKKAHESEKEGLRQVWQHLKSQHNALCRAERLCKRKRETRYAREKFYRDPFGFAKQLFEQPKSGTLKAGKEVLEEHLSKTYSYKNQHTPLEQMKGLVWPCAPGSKFKCSPPTLQEVESIVRKAKGKSAPGPNGVPYILYKRCPEVLKKLHKLLRTAWTKGVICKEWKKANGVYIPKEQNSTEINQFRPISLLNVEGKIFFSVMAKRLTTYLLDNGYIDTSVQKGGIPGFPGCLEHASMIWEAIQQAKSRKQDLQVIWLDLANAYGSVPHQMIWLALDMYHVPKEITNMLKRYFTWFLMRFGTSGYTTRWIELQVGIAMGCTISHILFVLAMQVILRAAEGAAEGPRFRNGCQMSPLKAFMDDTTVITTSEAQARKMLESLDNLIIWCRMSFKPKKSRSLSLIKGKVIERSYTVANQIIPTVGEEPVKSLGRVYDASMKDSSAVKQVIEMAQNGLSIIDKSRLLGKFKIWCLQFMLIPKLMWPLLIYEVSTSTVEAVERKINKAIRKWLGVPPGLTDVALYCKKSKLQLPFRSVVEEYKVGKTRLTMMLQESTDPVVREVQPTLITGRKWKVGEEVTTARETQELKEVIGYTQTNKRGFGHGEIKWWSKASCKERRDMIISEVRNSEDDKRVQKAVQQSQQGQRTTWEEVLQRSLTWNDIWKMAPLRLSFIIRATYDLLPTGSNLYKWGVSEDTKCPLCNERQTLEHVLSACRVSLGQGRYTWRHNRVLQELVAIVDRANNKANNSKRVEVPLKYFIGAGTTSNIEIRDIPLPSLLDGTNDWEVTADLPERREYPTAIKNTGMRPDIVVYSTEKQELIMIELTVPYETRIEEQHLFKFEKHNDLVKQLRQGAGIRAKVIAVEVGARGFVATSAYDLCKQLGIKGQARARALRSLSETAEKASCWLWSMRNKHWEHN

SEQ ID NO: 4061 - protein, 1010 aa, Achatina immaculata
MQPSDETRDKVNFPPASAKSIWENLDAGLCKELDKQLRGKNLEQKLEAFGNIIYLHCYKEFGTKQAKREKVTSRKSRRQRKIEAIRQQKNHARKMFKKAHESEKEGLRQVWQHLKSQHNALCRAERLCKRKRETRYAREKFYRDPFGFAKQLFEQPKSGTLKVGKEVLEEHLSKTYSDKNQHTPLEQMKGLVWPCAPGSKFKCSPPTLQEVESIVRKAKGKSAPGPNGVPYILYKRCPEVLKKLHKLLRTAWTKGVLCKEWKKANGVYIPKEQNSTEINQFRPISLLNVEGKIFFSVMTKRLTTYLLDNGYIDTSVQKGGIQGFPGYLEHASMIWEAIQQAKSGKQDLQVIWLDLANAYGSVPHQMIWLALNMYHVPKEITNMLKRYFTGFLMRFGTSGYTTRWIELQVGIAMGCTISPILFVLAMQVILRAAEGAAEGPRFRNGCQMPPLKAFMDDTTVITTSEAQARKMLERLDSLIIWCRMSFKPKKSRSLSLMKGKVIERSYTVANQIIPTVGEEPVKSLGRVYDASMKDSSAVKQVIEMAQNGLSIIDKSRLLGKFKIWCLQFMLIPKLMWPLLIYEVSTSTVEAVERKINKAIRKWLGVPPGLTDVALYCKKSKLQLPFKSVVEEYKVGKTRLAMMLQESTDPVVREVQPTLRTGRKWKVGEEVTTARETQELKEVIGYTQTNRRGFGHGEIKWWSKASCKERRDMIISEVRNSEDDKRVQKAVQQSQQGQWTTWEEVLQRSLTWNDIWKMAPLRLSFIIRATYDLLPTGSNLYKWGVSEDTKCPLCNERQTLEHVLSACRVSLRQGRYTWRHNRVLQELVAIVDRANDKANNSKRVEVPPKYFIGAGTTSNIEIRDIPLPSLLDGTNDWEVTADLPERREYPTAIKNTGMRPDIVVYSTEKQELIMIELTVPYETRIEEQHLFKLEKYNDLVKQLRQGAGIRAKVIAVEVGARGFIATSAYDLCKQLGIKGQARARALRSLSETAEKASCWLWSMRNKHWEHK

SEQ ID NO: 4062 - protein, 839 aa, Achatina immaculata
MFKKAHESEKEGLSQVWQHLKSQHNALCRAERLCKRRRETRYAREKFYRDPFGFAKQLFEQPKSGTLKAGKEVLEEHLSKTYSDKNQHTPLEQMKGLVWPCAPGSKFKCSPPTLQEVESIVRKAKGKSAPGPNGVPYILYKRCPEVLKKLHKLLRTAWTKGVICKEWKKANGVYIPKEQNSTEINQFRPISLLNVEGKIFFSVMAKRLTTYLLDNGYIDTSVQRGGIPGFPGCLEHASMIWEAIQQAKSGKQDLQVIWLDLANAYGSVPHQMIWLALNMYHVPKEITNMLKRYFTGFLMRFGTSGYTTRWIELQVGIAMGCTISPILFVLAMQVILRAAEGAAEGPRFRNGCQMPPLKAFMDDTTVITTSEAQARKMLERLDNLIIWCRMSFKPKKSRSLSLMKGKVIERSYTVANQIIPTVGEEPVKSLGRVYDASMKDSSAVKQVIEMAQNGLSIIDKSRLLGKFKIWCLQFMLIPKLMWPYEVSTSTVEAVERKINKAIRKWLGVPPGLTDVALYCKKSKLQLPFKSVVEEYKVGKTRLSMMLQESTDPVVREVQPTLRTGRKWKVGEEVTSARETQELKEVIWYTQTNRRGFGHGEIKWWSKASCKERRDMIISEVRNSEDDKRVQKAVQQSQQGQWTTWEEVLQRSLTWNDIWKKAPLRLSFIIRATYDLLPTGSNLYKWGVSEDTKCPLCNERQTLEHVLSACRVSLGQGRYTWRHNRVLQELVAIVDRANDKANNSKRVEVPPKYFIGAGTTSNIEIRDIPLPSLPDGTNDWEVTAELPERREYPTAIKNTGMRPDIVVYSTEKQELIMIELTVPYETRIEEQQFIQIGEVQ

SEQ ID NO: 4063 - protein, 975 aa, Apolygus lucorum
MASRAQEHQCTHCGRTFHSRIGLSKHTRSAHPEEYAFDEIGPKRCKYWSHEEMTIMATVELELEGTIPGAQMNRALASKMVGRTHKSVEAVRARPHYQNVLEQVRLDATQTPRRTTEELDGSYEISHQQLDEAILAGIPIAQRASEQDEGHQLLISGAIAVVQDLDPQNDLLLWISHIIGITPRPPRDHIINNDTTQETRRDKFSRFRRLWDSDRAAIAEDILGNGRAQMRHTGQQLRQYWARQWSAPSSQWTAEEVRHPQDQLMDHIWMPITEDEIRVSEPTRTACGPDGLLAEVWRMVPHSLRKLFFNTILRRGSMPSTLLQARTTMIPKKNMPETEADYRPITVPSVVVRQFHKIIGKRLESSVTHVEQQKGLRRGVDGLALNVLALNKLLVEANRKKRELHIAVLDVEKAFDRVSHFAIMNIMKGRQWPKQLVQYIESIYQNGSTRIGAGPWMYNARGIRQGDPLSSTLFNAVMDHVLLALPNRVGYIHAGQRWSSLAFADDVVLIATSRAGIVAQIVAFNNALKSVGLNLNLRKSIYLPLMPRGHRLVVPAERPSIDVDGQCLRAAPHNVRWIYLGVSFGTQGICRNMPIKMTTILEKNRAPLKPLQKLVMLRDHGIPSLTHQLVLGSTTLLTLKQMDISVRRYVRKWLRLPFDSANAYIHGPVGDSGLGVMELLSQIPTIRANRVGAANTQLFEGGTSLQQQNGTSRIDCRIARAQRLHQTTDGAELVKSRDNGASTAWIRNPSAKLWGWRSLGMVKVHSGSLPTGVRRTRGRRTGSSHLCRMGCQTPETASHVLQICPAMVRPRCARHNSALNLLEAYTRRKGWPVWLEPHFNLEQRGYRPDLLVVTPRGAFIIDVSVVSGSGQRSLADINASKIRKYEVDALLDAAAALANIQRNQLKVIGATITWRGIWHGKSAKDLIRAGYPLFILEWMTTRVLTGGSFIWSKFRATATRRRATARASGLRGTWS

SEQ ID NO: 4064 - protein, 976 aa, Apolygus lucorum
MASRAQEHQCTHCGRTFHSRIGLSKHTRSAHPEEYAFDEIGPKRCKYWSHEEMTIMATVELELEGTIPGAQMNRALASKMVGRTHKSVEAVRARPHYQNVLEQVRLDATQTPRRTTEELDGSYEISHQQLDEAILAGIPIAQRASEQDEGHQLLINGARAVVQDLDPQNDLLLWISHIIGITPRPPRDHIINNDTTQETRRDKFSRFRRLWDSDRAAIAEDILGNGRAQMRHTGQQLRQYWARQWSAPSSEWTAEEVRHPQNQLMDHIWMPITEDEIRVSEPTRTACGPDGLLAEVWRMVPHSLRKLFFNTILRRGSMPSTLLQARTTMIPKKNMPETEADYRPITVPSVVVRQFHKIIGKRLESSVTHVEQQKGLRRGVDGLALNVLALNKLLVEANRKKRELHIAVLDVEKAFDRVSHFAIMNIMKGRQWPKQLVQYIESIYQNGSTRIGAGPWMYNARGIRQGDPLSSTLFNAVMDHVLLALPNRVGYIHAGQRWSSLAFADDVVLIATSRAGIVAQIVAFNNALKSVGLNLNLRKSIYLPLMPRGRRLVVPAERPSIDVDGQCLRAAPHNVRWIYLGVSFGTQGICRNMPMKMTTILEKIDRAPLKPLQKLVMLRDHGIPSLTHQLVLGSTTLLTLKQMDISVRRYVRKWLRLPFDSANAYIHGPVGDGGLGVMELLSQIPTIRANRVGAANTQLFEGGTSLQQQNGTSRIDRRIARAQRLHQTTDGAELLKSRDNGASTAWIRNPSAKLWGWRSLGMVKVHSGSLPTGVRRTRGRRTGSSHLCRMGCQTPETASHVLQICPAMVRPRCARHNSALNLLEAYARRKGWPVWLEPHFNLEQRGYRPDLLVVTPRGAFIIDVSVVSGSGQRSLADINASKIRKYEVDALLYAAAALANIQRNQLKVIGATITWRGIWHGKSAKDLIRAGYPLFILEWMTTRVLTGGSFIWSKFRATATRRRATARASGLRGTWN

SEQ ID NO: 4065 - protein, 976 aa, Apolygus lucorum
MASRAQEHQCTHCGRTFHSRIWLSKHTRSAHPEEYAFDEIGPKRCKYWSHEEMTIMATVELELEGTIPGAQMNRALASKMVGRTHKSVEAVRARPHYQNVLEQVRLDATQTPRRTTEELDGSYEISHQQLDEAILAGIPIAQRASEQDEGHQLLINGARAVVQDLDPQNDLLLWISHIIGITPRPPRDHIINNDTTQETRRDKFSRFRRLWDSDRAAIAEDILGNGRAQMRHTGQQLRQYWARQWSAPSSEWTAEEVRHPQDQLMDHIWMPITEDEIRVSEPTRTACGPDGLLAEVWRMVPHSLRKLFFNTILRRGSMPSTLLQARTTMIPKKNMPETEADYRPITVPSVVVRQFHKIIGKRLESSVTHVEQQKGLRRGVDGLALNVLALNKLLVEANRKKRELHIAVLDVEKAFDRVSHFAIMNIMKGRQWPKQLVQYIESIYQNGSTRIGAGPWMYNARGIRQGDPLSSTLFNAVMDNVLQSLPNRVGYIHAGQRWSSLAFADVVVLIATSRAGIVTHIVAFNNALRSVGQNLNLRKSIYLPLMSRGRRLVVPAERPSIDVDGQCLRAAPHNVRWIYLGVSFGTQGICRIMPMKITAILEKIDRARLKPLQKLVMLRDHGLPSLTHQLVLGSTTLLTLKQMDISVRRYVRKWLRLPFDSANAYIHGPVGDGGLGVMELLSQIPAIRANRVGAANTQLFEGGTSLQQQNGTSRIDRRIARAQRLHQTTDGAELLKSRDNGASTAWIRNPSAKLWGWRSLGMVKVHSGSLPTGVRRTRGRRTGSSHLCRMGCQTPETASHVLQICPAMVRPRCARHNSALNLLEAYARRKGWPVWLEPHFNLEQRGYRPDLLVVTPRGAFIIDVSVVSGSGQRSLADINASKIRKYEVDALLDAAAALANIQRNQLKVIGATITWRGIWHGKSAKDLIRAGYPLFILEWMTTRVLTGGSFIWSKFRATATRRRATARASGLRGTWN

SEQ ID NO: 4066 - protein, 976 aa, Apolygus lucorum
MASRAQEHQCTHCGRTFHSRIGLSKHTRSAHPEEYAFDESGPKRCKYWSHEEMTIMATVELELEGTIPGAQMNRALASKMVGRTLKSVEAVRARPHYQNVLEQVRLDATQTPRRTTEELDGSYEISHQQLDEAILAGIPIAQRASEQDEGHQLLINGARAVVQDLDPQNDLLLWISHIIGITPRPPRDHIISNDTTQEMRRDKFSRFRRLWDSDRAAIAEDILGNGRTQMRHTGQQLRQYWARQWSAPSSEWTAEEVRHPQDQLMDHIWMPITEDEIRVSEPTRTACGPDGLLAEVWRMVPHSLRKLFFNTILRRGSMPSTLLQARTTMIPKKNMPETEADYRPITVPSVVVRQFHKIIGKRLESSVTHVEQQKGLRRGVDGLALNVLALNKLLVEANRKKRELHIAVLDVEKAFDRVSHFAIMNIMKGRQWPKQLVQYIESIYQNGSTRIGAGPWMYNARGIRQGDPLSSTLFNAVMDHVLLALPIRVGYIHAGQRWSSLAFADDVVLIATSRAGIVAQIVAFNNALKSVGLNLNLRKSIYLPLMPRGRRLVVPAERPSIDVDGQCLRAAPHNVRWIYLGVSFGTQGICRNMPMEMTTILEKIDRAPLKPLQKLVMLRDHGIPSLTHQLVLGSTTLLTLKQMDISVRRYVRKWLRLPFDSANAYIHGPVGDGGLGVMELLNQIPTIRANRVGAAITQLFEGGTSLQQQNGTSRIDRRIARAQRLHQTTDGAELVKSRDNGASTAWIRNPSAKLWGWRSLGMVKVHSGSLPTGVRRTRGRRTGSSHLCRMGCQTPETASHVLQICPAVVRPRCARHNSALNLLEAYARRKGWPVWLEPHFNLEQRGYRPDLLVVTPRGAFIIDVSVVSGSGQRSLADINASKIRKYEVDALLDAAAALANIQRNQLKMIGATITWRGIWHGKSAKDLIRAGYPLFILEWMTTRVLTGGSFIWSKFRATATRRRATARASGLRGTWS

SEQ ID NO: 4067 - protein, 976 aa, Apolygus lucorum
MASRAQEHQCTHCGRTFHSRIGLSKHTRSAHPEEYAFDEIGPKRCKYWSHEEMTIMATVELELEGTIPGAQMNRALASKMVGRTHKSVEAVRARPHYQNVLEQVRLDATQTPQRTTEELDGSYEISHQQLDEAILAGIPIAQRASEQDEGHQLLINGARAVVQDLDPQNDLLLWISHIIGITPRPPRDHIINNDTTQETRRDKFSRFRRLWDSDRAAIAEDILGNGRAQMRHTGQQLRQYWARQWSAPSSEWTAEEVRHPQDQLMDHIWMPITEDEIRVSEPTRTACGPDGLLAEVWRMVPHSLRKLFFNTILRRGSMPSTLLQARTTMIPKKNIPETEADYRPITVPSVVVRQFHKIIGKRLESSVTHVEQQKGLRRGVDGLALNVLALNKLLVEANRKKRELHIAVLDVEKALDRVSHFAIMNIMKGRQWPKQLVQYIESIYQNGSTRIGAGPWMYNARGIRQGDPLSSTLFNAVMDHVLLALPNRVGYIHAGQRWSSLAFADDVVLIATSRAGIVAQIVAFNNALKSVGLNLNLRKSIYLPLMPRGRRLVVPAERPSIDVDGQCLRAAPHNVRWIYLGVSFGTQGICRNMPMKMTTILEKIDRAPLKPLQKLVMLRDHGIPSLTHQLVLGSTTLLTLKQMDISVRRYVRKWLRLPFDSANAYIHGPVGDGGLGVMELLSQIPTIRANRVGAANTQLFEGGTSLQQQNGTSRIDRRIARAQRLHQTTDGAELLKSRDNGASTAWIRNPSAKLWGWRSLGMVKVHSGSLPTGVRRTRGRHTGSSHLCRMGCQTPETASHVLQICPAMVRPRCARHNSALNLLEAYARRKGWPVWLEPHFNLEQRGYRPDLLVVTPRGAFIIDVSVVSGSGQRSLADINASKIRKYEVDALLDAAAALANIQRNQLKVIGATITWRGIWHGKSAKDLIRAGYPLFILEWMTTRVLTGGSSIWSKFRATATRRRATARASGLRGTWN

SEQ ID NO: 4068 - protein, 976 aa, Apolygus lucorum
MASRAQEHQCTHCGRTFHSRIGLSKHTRSAHPEEYAFDEIGPKRCKYWSHEEMTIMATVELELEGTILGAQMNRALASKMVGRTHKSVEAVRARPHYQNVLEQVRLDATQTPQRTTEELDGSYEISHQQLDEAILAGIPIAQRASEQDEGHQLLINGARAVVQDLDPQNDLLLWISHIIGITPRPPRDHIINNDTTQETRRDKFSRFRRLWDSDRAAIAEDILGNGRAQMRHTGQQLRQYWARQWSAPSSEWTAEEVRHPQDQLMDHIWMPITEDEIRVSEPTRTACGPDGLLAEVWRMVPHSLRKLFFNTILRRGSMPSTLLQARTTMIPKKNMPETEADYRPITVPSVVVRQFHKIIGKRLESSVTHVEQQKGLRRGVDGLALNVLALNKLLVEANRKKRELHIAVLDVEKAFDRVSHFAIMNIMKGRQWPKQLVQYIESIYQNGSTRIGAGPWMYNARGIRQGDPLSSTLFNAVMDHVLLALPNRVGYIHAGQRWSSLAFADDVVLIATSRAGIVAQIVAFNNALKSVGLNLNLRKSIYLPLMPRGRRLVVPTERPSIDVDGQCLRAAPHNVRWIYLGVSFGTQGICRNMPMKMTTILEKIDRAPLKPLQKLVMLRDHGIPSLTHQLVLGSTTLLTLKQMDISVRRYVRKWLRLPFDSANAYIHGPVGDGGLGVMELLSQIPTIRANRVGAANTQLFEGGTSLQQQNGTSRIDRRIARAQRLHQTTDGAELLKSRDNGASTAWIRNPSAKLWGWRSLGMVKVHSGSLPTGVRRTRGRRTGSSHLCRMGCQTPETASHVLQICPAMVRPRCARHNSALNLLEAYARRKGWPVWLEPHFNLEQRGYRPDLLVVTPRGAFIIDVSVVSGSGQRSLADINASKIRKYEVDALLDAAAALANIQRNQLKVIGATITWRGIWHGKSAKDLIRAGYPLFILEWMTTRVLTGGSSIWSKFRATATRRRATARASGLRGTWN

SEQ ID NO: 4069 - protein, 905 aa, Apolygus lucorum
MNRALASKMVGRTLKSVEAVRARPHYQNVLEQVRLDATQPPRRTTEELDGSYEISHQQLDEAILAGIPIAQRASEQDEGHQLLINGARAVVQDLDPQNDLLLWISHIIGITPRPPRDHIINNDTTQETRRDKFSRFRRLWDSDRAAIAEDILGNGRAQMRHTGQQLRLYWARQWSAPSSEWTAEEVRHPQDQLMDHIWMPITEDEIRISEPTRTACGPDGLLAEVWRMVPHSLRKLFFNTILRRGSMPSTLLQARTTMIPKKNMPETEADYRPITVPSVVVRQFHKIIGKRLESSVTHVEQQKGLLRGVDGLALNVLALNKLLVEANRKKRELHIAVLDVEKAFDRVSDFAIMNIMKGRQWPKQLVQYIESIYQNGSTRIGAGPWMYNARGIRQGDPLSSTLFNAVMDHVLLALPNRVGYIHAGQRWSSLAFADDVVLIATSRAGIVAQIVAFNNALKSVGLNLNLRKSIYLPLMPRGRRLVVPAERPSIDVDGQCLRSAPHNVRWIYLGVSFGTQGICRNMPMKMTTILEKIDRAPLKPLQKLVMLRDHGIPSLTHQLVLGSTTLLTLKQMDISVRRYVRKWLRLPFDSANAYIHGPVGDGGLGVMELLSQIPTIRANRVGAANTQLFEGGTSLQQQNVTSRIDRRIARAQRLHQTTDGAELVKSRDNGASTAWIRNPSAKLWGWRSLGMVKVHSGSLPTGVRRTRGRRTGSSHLCRMGCQTPETASHVLQICPAVVRPRCARHNSALNLLEAYVRRKGWPVWLEPHFNLEQRGYRPDLLVVTPRGAFIIDVSVVSGSGQRSLADINASKIRKYEVDALLDAAAALANIQRNQLKVIGATITWRGIWHGKSAKDLIRAGYPLFILEWMTTRVITGGSFIWSKFRATATRRRATARASGLRGTWS

SEQ ID NO: 4070 - protein, 976 aa, Apolygus lucorum
MASRAQEHQCTHCGRTFHSRIGLSKHTRSAHPEEYAFDEIGPKRCKYWSHEEMTIMATVELELEGTIPGAQMNRALASKMVGRTHKSVEAVRARPHYQNVLEQVRLDATQTPRRTTEELDGSYEISHQQLDEAILAGIPIAQRASEQDEGHQLLINGARAVVQDLDPQNDLLLWISHIIGITPRPPRDHIINNDTTQETRRDKFSRFRRLWDSDRAAIAEYILGNGRAQMRHTGQQLRQYWARQWSAPSSEWTAEEVRHPQDQLMDHIWMPITEDEIRVSEPTRTACGPDGLLAEVWRMVPHSLRKLFFNTILRRGSMPSTLLQARTTMIPKKSIPETEADYRPITVPSVVVRQFHKIIGKRLESSVTHVEQQKGLRRGVDGLALNVLALNKLLVEANRKKRELHIAVLDVEKAFDRVSHFAIMNIMKGRQWPKQLVQYIESIYQNGSTRIGAGPWMYNARGIRQGDPLSSTLFNAVMDHVLLALPNRVGYIHAGQRWSSLAFADDVVLIATSRAGIVAQIVAFNNALKSVGLNLNLRKSIYLPLMPRGRRLVVPAERPSIDVDGQCLRAAPHNVRWIYLGVSFGTQGICRNMPMKMTTILEKIDRAPLKPLQKLVMLRDHGIPSLTHQLVLGSTTLLTLKQMDISVRRYVRKWLRLPFDSANAYIHGPVGDGGLGVMELLSQIPTIRANRVGAANTQLFEGGTSLQQQNGTSRIDRRIARAQRLHQTTDGAELLKSRDNGASTAWIRNPSAKLWGWRSLGMVKVHSGSLPTGVRRTRGRRTGSSHLCRMGCQTPETASHVLQICPAMVRPRCARHNSALNLLEAYARRKGWPVWLEPHFNLEQRGYRPDLLVVTPRGAFIIDVSVVSGSGQRSLADINATKIRKYEVDALLDAAAALANIQRNQLKVIGATITWRGIWHGKSAKDLIRAGYPLFILEWMTTRVLTGGSFIWSKFRATATRRRATARASGLRGTWS

SEQ ID NO: 4071 - protein, 976 aa, Apolygus lucorum
MASRAQEHQCTHCGRTFHSRIGLSKHTRSAHPEEYAFDEIGPKRCKYWSHEEMTIMATVELELEGTIPGAQMNRALASKMVGRTHKSVEAVRARPHYQNVLEQVRLDVTQTPRRTTEKLDGSYEISHQQLDEAILAGIPIAQRASEQDEGHQLLISGARAVVQDLDPQNDLLLWISHIIGITPRPPRDHIINNDTTQETRRDKFSRFRRLWDSDRAAIAEDILGNGRAQMRHTGQQLRQYWARQWSAPSSEWTAEEVRHPQDQLMDHIWMPITEDEIRVSEPTRTACGPDGLLAEVWRMVPHSLRKLFFNTILRRGSMPSTLLQARTTMIPKKNMPETEADYRPITVPSVVVRQFHKIIGKRLESSVTHVEQQKGLRRGVDGLALNVLALNKLLVEANRKKRELHIAVLDVEKAFDRVSHFAIMNIMKGRQWPKQLVQYIESIYQNGSTRIGAGPWMYNARGIRQGDPLSSTLFNAVMDHVLLALPNRVGYIHAGQRWSSLAFADDVVLIATSRAGIVAQIVAFNNALKSVGLNLNLRKSIYLPLMPRGHRLVVPAERPSIDVDGQCLRAAPHNVRWIYLGVSFGTQGICRNMPIKMTTILEKIDRAPLKPLQKLVMLRDHGIPSLTHQLVLGSTTLLTLKQMDISVRRYVRKWLRLPFDSANAYIHGPVGDGGLGVMELLSQIPTIRANRVGAANTQLFEGGTSLQQQNGTSRIDCRIARAQRLHQTTDGAELVKSRDNGASTAWIRNPSAKLWGWRSLGMVKVHSGSLPTGVRRTRGRRTGSSHLCRMGCQTPETASHVLQICPAMVRPRCARHNSALNLLEAYARRKGWPVWLEPHFNLEQRGYRPDLLVVTPRGAFIIDVSVVSGSGQRSLADINAFKIRKYEVDELLDAAAALANIQRNQLKVIGATITWRGIWHGKSAKDLIRAGYPLFILEWMTTRVLTGGSFIWSKFRATATRRRATARASGLRGTWS

SEQ ID NO: 4072 - protein, 905 aa, Apolygus lucorum
MNRALASKMVGRTLKSVEAVRARPHYQNVLEQVRLDATQPPRRTTEELDGSYEISHQQLDEAILAGIPIAQRASEQDEGHQLLINGARAVVQDLDPQNDLLLWISHIIGITPRPPRDHIINNDTTQETRRDKFSRFRRLWDSDRAAIAEDILGNGRAQMRHTGQQLRLYWARQWSAPSSEWTAEEVRHPQDQLMDHIWMPITEDEIRISEPTRTACGPDGLLAEVWRMVPHSLRKLFFNTILRRGSMPSTLLQARTTMIPKKNMPETEADYRPITVPSVVVRQFHKIIGKRLESSVTHVEQQKGLLRGVDGLALNVLALNKLLVEANRKKRELHIAVLDVEKAFDRVSDFAIMNIMKGRQWPKQLVQYIESIYQNGSTRIGAGPWMYNARGIRQGDPLSSTLFNAVMDHVLLALPNRVGYIHAGQRWSSLAFADDVVLIATSRAGIVAQIVAFNNALKSVGLNLNLRKSIYLPLMPRGRRLVVPAERPSIDVDGQCLRSAPHNVRWIYLGVSFGTQGICRNMPMKMTTILEKIDRAPLKPLQKLVMLRDHGIPSLTHQLVLGSTTLLTLKQMDISVRRYVRKWLRLPFDSANAYIHGPVGDGGLGVMELLSQIPTIRANRVGAANTQLFEGGTSLQQQNVTSRIDRRIARAQRLHQTTDGAELVKSRDNGASTAWIRNPSAKLWGWRSLGMVKVHSGSLPTGVRRTRGRRTGSSHLCRMGCQTPETASHVLQICPAVVRPRCARHNSALNLLEAYVRRKGWPVWLEPHFNLEQRGYRPDLLVVTPRGAFIIDVSVVSGFGQRSLADINASKIRKYEVDALLDAAAALANIQRNQLKVIGATITWRGIWHGKSAKDLIRAGYPLFILEWMTTRVITGGSFIWSKFRATATRRRATARASGLRGTWS

SEQ ID NO: 4073 - protein, 976 aa, Apolygus lucorum
MASRAQEHQCTHCGRTFHSRIGLSKHTRSAHPEEYAFDEIGPKRCKYWSHEEMTIMATVELELEGTIPGAQMNRALASKMVGRTHKSVEAVRARPHYQNVLEQIRLDATQTPRRTTEELDGSYEISHQQLDEAILAGIPIAQRASEQDEGHQLLISGARAVVQDLDPQNDLLLWISHIIGITPRPPRDHIINNDTTQETRRDKFSRFRRLWDSDRAAIAEDILGNGRAQMRHTGQQLRQYWARQWSAPSSEWTAEEVRHPQDQLMDHIWMPITEDEIRVSEPTRTACGPDGLLAEVWRMVPHSLRKLFFNTILRRGSMPSTLLQARTTMIPKKNMPETEADYRPITVPSVVVRQFHKIIGKRLESSVTHVEQQKGLRRGVDGLALNVLALNKLLVEANRKKRELHIAVLDVEKAFDRVSHFAIMNIMKGRQWPKQLVQYIESIYQNGSTRIGAGPWMYNARGIRQGDPLSSTLFNAVMDHVLLALPNRVGYIHAGQRWSSLAFADDVVLIATSRAGIVAQIVAFNNALKSVGLNLNLRKSIYLPLMPRGHRLVVPAERPSIDVDGQCLRAAPHNVRWIYLGVSFGTQGICRNMPIKMTTILEKIDRAPLKPLQKLVMLRDHGIPSLTHQLVLGSTTLLTLKQMDISVRRYVRKWLRLPFDSANAYIHGPVGDGGLGVMELLSQIPTIRANRVGAANTQLFEGGTSLQQQNGTSRIDRRIARAQRLHQITDGAELVKSRDNGASTAWIRNPSAKLWGWRSLGMVKVHSGSLPTGVRRTRGRRTGSSHLCRMGCQTPETASHVLQICPAMVRPRCARHNSALNLLEAYARRKGWPVWLEPHFNLEQRGYRPDLLVVTPRGAFIIDVSVVSGSGQRSLADINASKIRKYEVDALLDAAAALANIQRNQLKVIGATITWRGIWHDKSAKDLIRAGYPLFILEWMTTRVLTGGSFIWSKFRATATRRRATARASGLRGTWS

SEQ ID NO: 4074 - protein, 976 aa, Apolygus lucorum
MASRAQEHQCTHCGRTFHSRIGLSKHTRSAHPEEYAFDEIGPKRCKYWSHEEMTIMATVELELEGTIPGAQMNRALASKMVGRTHKSVEAVRARPHYQNVLQQVRLDATQTPQRTTEELDGSYEISHQQLDEAILAGIPIAQRASEQDEGHQLLINGARAVVQDLDPQNDLLLWISHIIGITPRPPRDHIINNDTTQETRRDKFSRFRRLWDSDRAAIAEDILGNGRAQMRHTGQQLRQYWARQWSAPSSEWTAEEVRHPQDQLMDHIWMPITEDEIRVSEPTRTACGPDGLLAEVWRMVPHSLRKLFFNTILRRGSMPSTLLQARTTMIPKKNMPETEADYRPITVPSVVVRQFHKIIGKRLESSVTHVEQQKGLRRGVDGLALNVLALNKLLVEANRKKRELHIAVLDVEKAFDRVSHFAIMNIMKGRQWPKQLVQYIESIYQNGSTRIGAGPWMYNARGIRQGDPLSSTLFNAVMDHVLLALPNRVGYIHAGQRWSSLAFADDVVLIATSRAGIVAQIVAFNNALKSVGLNLNLRKSIYLPLMPRGRRLVVPAERPSIDVDGQCLRAAPHNVRWIYLGVSFGTQGICRNMPMKMTTILEKIDRAPLKPLQKLVMLRDHGIPSLTHQLVLGSTTLLTLKQMDISVRRYVRKWLRLPFDSANAYIHGPVGDGGLGVMELLSQIPTIRANRVGAANTQLFEGGTSLQQQNGTSRIDRRIARAQRLHQTTDGAELLKSRDNGASTAWIRNPSAKLWGWRSLGMVKVHSGSLPTGVRRTRGRRTGSSHLCRMGCQTPETASHVLQICPAVVRPRCARHNSALNLLEAYARRKGWPVWLEPHFNLEQRGYRPDLLVVTPRGAFIIDVSVVSGSGQRSLADINASKIRKYEVDALLDAAAALANIQRNQLKVIGATITWRGIWHGKSAKDLIRAGYPLFILEWMTTRVLTGGSSIWSKFRATATRRRATARASGLRGTWN

SEQ ID NO: 4075 - protein, 976 aa, Apolygus lucorum
MASRAQEHQCTHCGRTFHSRIGLSKHTRSAHPEEYAFDEIGPKRCKYWSHEEMTIMATVELELEGTIPGAQMNRALASKMVGRTHKSVEAVRARPHYQNVLEQIRLDATQTPQRTTEELDGSYEISHQQLDEAILAGIPIAQRASEQDEGHQLLINGARAVVQDLDPQDDLLLWISHIIGITPRPPRDHIINNDTTQETRRDKFSRFRRLWDSDRAAIAEDILGNGRAQMRHTGQQLRQYWARQWSAPSSEWTAEEVRHPQDQLMDHIWMPITEDEIRVSEPTRTACGPDGLLAEVWRMVPHSLRKLFFNTILRRGSMPSTLLQARTTMIPKKNMPETEADYRPITVPSVVVRQFHKIIGKRLESSVTHVEQQKGLRRGVDGLALNVLALNKLLVEANRKKRELHIAVLDVEKAFDRVSHFAIMNIMKGRQWPKQLVQYIESIYQNGSTRIGAGPWMYNARGIRQGDPLSSTLFNAVMDHVLLALPNRVGYIHAGQRWSSLAFADDVVLIATSRAGIVAQIVAFNNALKSVGLNLNLRKSIYLPLMPRGRRLVVPAERPSIDVDGQCLRAAPHNVRWIYLGVSFGTQGICRNMPMKMTTILEKIDRAPLKPLQKLVMLRDHGIPSLTHQLVLGSTTLLTLKQMDISVRRYVRKWLRLPFDSANAYIHGPVGDGGLGVMELLSQIPTIRANRVGAANTQLFEGGTSLQQQNGTSRIDRRIARAQRLHQTTDGAELLKSRDNGASTAWIRNPSAKLWGWRSLGMVKVHSGSLPTGVRRTRGRRTGSSHLCRMGCQTPETASHVLQICPAMVRPRCARHNSSLNLLEAYARRKGWPVWLEPHFHLEQRGYRPDLLVVTPRGAFIIDVSVVSGSGQRSLADINASKIRKYEVDALLDAAAALANIQRNQLKVIGATITWRGIWHGKSAKDLIRAGYPLFILEWMTTRVLTGGSSIWSKFRATATRRRATARASGLRGTWN

SEQ ID NO: 4076 - protein, 976 aa, Apolygus lucorum
MASRAQEHQCTHCGRTFHSRIGLSKHTRSAHPEEYAFDEIGPKRCKYWSHEEMTIMATVELELEGTIPGAQMNRALASKMVGRTHKSVEAVRARPHYQNVLEQVRLDATQTPRRTTEELDGSYEISHQQLDEAILAGIPIAQRASEQDEGHQLLISGARAVVQDLDPQNDLLLWISHIIGITPRPPRDHIINNDTTQETRRDKFSRFRRLWDSDRAAIAEDILGNGRAQMRHTGQQLRQYWARQWSAPSSEWTAEEVRHPQDQLMDRIWMPITEDEIRVSEPTRTACGPDGLLAEVWRMVPHSLRKLFFNTILRRGSMPSTLLQARTTMIPKKNMPETEADYRPITVPSVVVRQFHKIIGKRLESSVTHVEQQKGLRRGVDGLALNILALNKLLVEANRKKRELHIAVLDVEKAFDRVSHFAIMNIMKGRQWPKQLVQYIESIYQNGSTRIGAGPWMYNARGIRQGDPLSSTLFNAVMDHVLLALPNRVGYIHAGQRWSSLAFADDVVLIATSRAGIVAQIVAFNNALKSVGLNLNLRKSIYLPLMPRGHRLVVPAERPSIDVDGQCLRAAPHNVRWIYLGVSFGTQGICRNMPIKMTTILEKIDRAPLKPLQKLVMLRDHGIPSLTHQLVLGSTTLLTLKQMDISVRRYVRKWLRLPCDSANAYIHGPVGDGGLGVMELLSQIPTIRANRVGAANTQLFEGGTSLQQQNGTSRIDRRIARAQRLHQTTDGAELVKSRDNGASTAWIRNPSAKLWGWRSLGMVKVHSGSLPTGVRRTRGRRTGISHLCRMGCQTPETASHVLQICPAMVRPRCARHNSALNLLEAYARRKGWPVWLEPHFNLEQRGYRPDLLVVTPRGAFIIDVSVVSGSGQRSLADINASKIQKYEVDALLDAAAALANIQRNQLKVIGATITWRGIWHGKSAKDLIRAGYPLFILEWMTTRVLTGGSFIWSKFRATATRRRATARASGLRGTWS

SEQ ID NO: 4077 - protein, 966 aa, Apolygus lucorum
MASRAQEHQCTHCGRTFHSRIGLSKHTRSAHPEEYAFDEIGPKRCKYWSHEEMTIMATVELELEGTIPGAQMNRALASKMVGRTHKSVEAVRARPHYQNVLEQVRLDATQTPRRTTEELDGSYEISHQQLDEAILAGIPIAQRASEQDEGHQLLINGARAVVQDLDPQNDLLLWISHIIGITPRPPRDHIINNDTTQETRRDKFSRFRRLWDSDRAAIAEDILGNGRAQMRHTGQQLRQYWARQWSAPSSEWTAEEVHHPQDQLMDHIWMPITEDEIRVSEPTRTACGPDGLLAEVWRMVPHSLRKLFFNTILHRGSMPSTLLQARTTMIPKKNMPETEADYRPITVPSVVVRQFHKIIGKRLESSVTHVEQQKGLRRGVDGLALNVLALNKLLVEANRKKRELHIAVLDVEKAFDRVSHFAIMNIMKGRQWPKQLVQYIESIYQNGSTRIGAGPWMYNARGIRQGDPLSSTLFNAVMDHVLLALPNRVGYIHARQRWSSLAFADDVVLIATSRAGIVAQIVAFNNALKSVGLNLNLRKSIYLPLMPRGRRLVVPAERPSIDVDGQCLRVAPHNVRWIYLGVSFGTQGICRNMPMKMTTILEKIDRAPLKPLQKLVMLRDHGIPSLTHQLVLGSTTLLTLKQMDISVRRYVRKWLRLPFDSANAYIHGPVGDGGLGVMELLSQIPTIRANRVGAANTQLFEGGTSLQQQNGTSRIDRRIARAQRLHQTTDGAELLKSRDNGASTAWIRNPSAKLWGWRSLGMVKVHSGSLPTGVRRTRGRRTGSSHLCRMGCQTPETASHVLQICPAMVRPRCARHNSALNLLEAYARRKGWPVWLEPHFNLEQRGYRPDLLVVTPRGAFIIDVSVVSGSGQRSLADINASKIRKYEVDALLDAAAALANIQRNQLKVIGATITWRGIWHGKSAKDLIRAGYPLFILEWMTTRVLTGGSFIWSKFRATATRRRATA

SEQ ID NO: 4078 - protein, 924 aa, Apolygus lucorum
MTIMATVELELEGTIPGAQMNRALASKMVGRTHKSVEAVRARPHYQNVLEQVRLDATQTPRRTTEELDGSYAISHQQLDEAILAGIPIAQRASEQDEGHQLLINGARAVVQDLDPQNDLLLWIYHIIGITPRPPRDHIINNDTTQETRRDKFSRFRRLWDSDKAAIAEDILGNGRAQMRHTGQQLRQYWARQWSAPSSEWTAEEVRHPQDQLMDHIWMPITEDEIRVSEPTRTACGPDGLLAEVWRMVPHSLRKLFFNTILRRGSMPSTLLQARTTMIPKKSMPETEADYRPITVPSVVVRQFHKIIGKRLESSVTHVEQQKGLRRGVDGLALNVLALNKLLVEANRKKRELHIAVLDVEKAFDRVSHFAIMNIMKRRQWPKQLVQYIESIYQNGSTRIGAGPWMYNARGIRQGDPLSSTLFNAVMDHVLLALPNRVGYIHAGQRWSSLAFADDVVLIATSRAGIVAQIVAFNNALKSVGLNLNLRKSIYLPLMPRGRRLVVPAERPSIDVDGQCLRAAPHNVRWIYLGVSFGTQGICRNMPMKMTTILEKIDRAPLKPLQKLVMLRDHGIPSLTHQLVLGSTTLLTLKQMDISVRRYVRKWLRLPFDSANAYIHGPVGDGGLGVMELLSQIPTIRANRVGAANTQLFEGGTSLQQQNGTSRIDRRIARAQRLHQTTDGAELLKSRDNGASTAWIRNPSAKLWGWRSLGMVKVHSGSLPTGVRRTRGRRTGSSHLCRMGCQTPETASHVLQICPAMVRPRCARHNSALNLLEAYARRKGWPVWLEPHFNLEQRGYRPDLLVVTPRGAFIIDVSVVSGSGQRSLADINATKIRKYEVDALLDAAAALANIQRNQLKVIGATITWRGIWHGKTAKDLIRAGYPLFILEWMTTRVLTGGSFIWSKFRATATRRRATARASGLRGTWS

SEQ ID NO: 4079 - protein, 976 aa, Apolygus lucorum
MASRAQEHQCTHCGRTFHSRIGLSKHTRSAHPEEYAFDEIGPKRCKYWSHEEMTIMATVELELEGTIPGAQMNRALASKMVGRTHKSVEAVRARPHYQNVLEQVRLDATQTPRRTTEELDGSYEISHQQLDEAILAGIPIAQRASEQDEGHQLLISGARAVVQDLDPQNDLLLWISHIIGITPRPPRDHIINNDTTQETRRDKFLRFRRLWDSDRAAIAEDILGNGRAQMRHTGQQLRQYWARQWSAPSSEWTAEEVRHPQDQLMDHIWMPITEDEIRVSEPTRTACGPDGLLAEVWRMVPHSLRKLFFNTILRRGSMPSTLLQARTTMIPKKNMPETEADYRPITVPSVVVRQFHKIIGKRLESSVTHVEQQKGLRRGVDGLALNVLALNKLLVEANRKKRELHIAVLDVEKAFDRVSHFAIMNIMKGRQWPKQLVQYIESIYQNGSTRIGAGPWMYNARGIRQGDPLSSTLFNAVMDHVLLALPNRVGYIHAGQRWSSLAFADDVVLIATSRAGIVAQIVAFNNALKSVGLNLNLRKSIYLPLMPRGHRLVVPAERPSIDVDGQCLRAAPHNVRWIYLGVSFGTQGICRNMPIKMTTILEKIDRAPLKPLQKLVMLRDHGIPSLTHQLVLGSTTLLTLKQMDISVRRYVRKWLRLPFDSANAYIHGPVGDGGLGVMELLSQIPTIRANRVGAANTQLFEGGTSLQQQNGTSRIDRRIARAQRLHQTTDGAELVKSRDNGASTAWIRNPSAKLWGWRSLGMVKVHSGSLPTGVRRTRGRRTGSSHLCRMGCQTPETASHVLQICPAMVRPRCARHNSALNLLEAYARRKGWPVWLEPHFNLEQRGYRPDLLVVTPRGAFIIDVSVVSGSGQRSLADINASKIRKYEVDALLDAAAALANIQRNQLKVIGATITWRGIWHGKSAKDLIRAGYPLFILEWMTTRVLTGGSFIWSKFRATATRRRATARASGLRGTWS

SEQ ID NO: 4080 - protein, 976 aa, Apolygus lucorum
MASRAQEHQCTHCGRTFHSRIGLSKHTRSAHPEEYAFDEIGPKRCKYWSHEEMTIMATVELELEGTIPGAQMNRALASKMVGRTHKSVEAVRARPHYQNVLEQIRLDATQTPRRTTEELDGSYEISHQQLDEAILAGIPIAQRASEQDEGHQLLISGARAVVQDLDPQNDLLLWISHIIGITPRPPRDHIINNDTTQETRRDKFSRFRRLWDSDRAAIAEDILGNGRAQMRHTGQQLRQYWARQWSAPSSEWTAEEVRHPQDQLMDHIWMPITEDEIRVSEPTRTACGPDGLLAEVWRMVPHSLRKLFFNTILRRGSMPSTLLQARTTMIPKKNMPETEADYRPITVPSVVVRQFHKIIGKRLESSVTHVEQQKGLRRGVDGLALNVLALNKLLVEANRKKRELHIAVLDVEKAFDRVSHFAIMNIMKGRQWPKQLVQYIESIYQNGSTRIGAGPWMYNARGIRQGDPLSSTLFNAVMDHVLLALPNRVGYIHAGQRWSSLAFADDVVLIATSRAGIVAQIVAFNNALKSVGLNLNLRKSIYLPLMPRGHRLVVPAERPSIDVDGQCLRAAPHNVRWIYLGVSFGTQGICRNMPIKMTTILEKIDRAPLKPLQKLVMLRDHGIPSLTHQLVLGSTTLLTLKQMDISVRRYVRKWLRLPFDSANAYIHGPVGDGGLGVMELLSQIPTIRANRVGAANTQLFEGGTSLQQQNGTSRIDRRIARAQRLHQITDGAELVKSRDNGASTAWIRNPSAKLWGWRSLGMVKVHSGSLPTGVRRTRGRRTGSSHLCRMGCQTPETASHVLQICPAMVRPRCARHNSALNLLEAYARRKGWPVWLEPHFNLEQRGYRPDLLVVTPRGAFIIDVSVVSGSGQRSLADINASKIRKYEVDALLDAAAALANIQRNQLKVIGATITWRGIWHGKSAKDLIRAGYPLFILEWMTTRVLTGGSFIWSKFRATATRRRATARASGLRGTWS

SEQ ID NO: 4081 - protein, 976 aa, Apolygus lucorum
MASRAQEHQCTHCGRTFHSRIGLSKHTRSAHPEEYAFDEIGPKRCKYWSHEEMTIMATVELELEGTIPGAQMNRALASKMVDRTLKSVEAVRARPHYQNVLEQVRLDATQPPQRTTEELDGSYEISHQQLDEAILGGIPIAQRASEQDEGHQLLINGARAVVQDLDPQNDLLLWISHIIGITPRPPRDHIINNDTTQETRRDKFSRFRRLWDSDRAAIAEDILGNGRAQMRHTGQQLRQYWARQWSAPSSEWTAEEVRHPQDQLMDHIWMPITEDEIRISEPTRTACGPDGLLAEVWRMVPHSLRKLFFNTILRRGSMPSTLLQARTTMIPKKNMPETEADYRPITVPSVVVRQFHKIIGKRLESSVTHVEQQKGLRRGVDGLALNVLALNKLLVEANRKKRELHIAVLDVEKAFDRVSHFAIMNIMKGRQWPKQLVQYIESIYQNGSTRIGAGPWMYNARGIRQGDPLSSTLFNAVMDHVLLALPNRVGYIHAGQRWSSLAFADDVVLIATSRAGIVAQIVAFNNALKSVGLNLNLRKSIYLPLIPRGRRLVVPAERPSIDVDGQCLRAAPHNVRWIYLGVSFGTQGICRNMPMKMTTILEKIDRAPLKPLQKLVMLRDHGIPSLTHQLVLGSTTLLTLKQMDISVRRYVRKWLRLPFDSANAYIHGPVGDGGLGVMELLSQIPTIRANRVGAANSQLFEGGTSLQQQNGTSRIDRRIARAQRLHQTTDGAELVKSRDNGASTAWIRNPSAKLWGWRSLGMVKIHSGSLPTGVRRTRGRRTGSSHLCRMGCQTPETASHVLQICPAVVRPRCARHNSALNLLEAYARRKGWPVWLEPHFNLEQRGYRPDLLVVTPRGAFIIDVSVVSGSGQRSFADINASKIRKYEVDALLDAAAALANIQRNQLKVIGATITWRGIWHGKSAKDLIRAGYPLFILEWMTTRVLTGGSFIWSKFRATATRRHATARASGLRGTWS

SEQ ID NO: 4082 - protein, 976 aa, Apolygus lucorum
MASRAQEHQCTHCGRTFHSRIGLSKHTRSAHPEEYAFDEIGPKRCKYWSHEEMTIMATVELELEGTIPGAQMNRALASKMVGRTHKSVEAVRARPHYQNVLEQVRLDATQTPRRTTEELDGSYEISHQQLDEAILAGIPIAQRASEQDEGHQLLISGARAVVQDLDPQNDLLLWISHIIGITPRPPRDHIINNDTTQETRRDKFSRFRRLWDSDRAAIAEDILGNGRAQMRHTGQQLRQYWARQWSAPSSEWTAEEVRHPQDQLMDHIWMPITEDEIRVSEPTRTACGPDGLLAEVWRMVPHSLRKLFFNTILRRGSMPSTLLQARTTMIPKKNMPETEADYRPITVPSVVVRQFHKIIGKRLESSVTHVEQQKGLRRGVDGLALNVLALNKLLVEANRKKRELHIAVLDVEKAFDRVSHFAIMNIMKGRQWPKQLVQYIESIYQNGSTRIGAGPWMYNARGIRQGDPLSSTLFNAVMDHVLLALPNRVGYIHAGQRWSSLAFADDVVLIATSRAGIVAQIVAFNNALKSVGLNLNLRKSIYLPLMPRGHRLVVPAERPSIDVDGQCLRAAPHNVRWIYLGVSFGAQGICRNMPIKMTTILEKIDRAPLKPLQKLVMLRDHGIPSLTHQLVLGSTTLLTLKQMDISVRRYVRKWLRLPFDSANAYIHGPVGDGGLGVMELLSQIPTIRANRVGAANTQLFEGGTSLQQQNGTSRIDRRIARAQRLHQTTDGAELVKSRDNGASTAWIRNPSAKLWGWRSLGMVKVHSGSLPTGVRRTRGRRTGSSHLCRMGCQTPETASHVLQICPAMVRPRCARHNSALNLLEAYARRKGWPVWLEPHFNLEQRGYRPDLLVVTPRGAFIIDVSVVSGSGQRSLADINASKIRKYEVDALLDAAAALANIQRNQLKVIGATITWRGIWHGKSAKDLIRAGYPLFILEWMTTRVLTGGSFIWSKFRATATRRRTTARASGLRGTWS

SEQ ID NO: 4083 - protein, 976 aa, Apolygus lucorum
MASRAQEHQCTHCGRTFHSRIGLSKHIRSAHPEEYAFDEIGPKRCKYWSHEEMTIMATVELELEGTIPGAQMNRALASKMVGRTLKSVEAVRARPHYQNVLEQVRLDATQPPRRTTEELDGSYEISHQQLDEAILGGIPVAQRASEQDEGHQLLINGARAVVQDLDPQNDLLLWISHIIGITPRPPRDHVVSSDTTQETRRDKFSRFRRLWDSDRAAIAEDILGNGRAQMRHTGQQLRQYWARQWSAPSSEWTAEEVRHPQDQLMDHIWMPITEDEIRISEPTRTACGPDGLLAEVWRMVPHSLRKLFFNTILRRGSMPSTLLQARTTMIPKKNMPETEADYRPITVPSVVVRQFHKIIGKRLESLVTHVEQQKGLRRGVDGLALNVLALNKLLVEANRKKRELHIAVLDVEKAFDRVSHFAIMNIMKGRQWPKQLVQYIESIYQNGSTRIGAGPWMYNARGIRQGDPLSSTLFNAVMDHVLLALPNRVGYIHAGQRWSSLAFADDVVLIATSRAGIVAQIVAFNNALKSVGLNLNLRKSIYLPLMPRGRRLVVPAERPSIDVDGQCLRAAPHNVRWIYLGVSFGTQGICRNMPMKMTTILEKIDRAPLKPLQKLVMLRDHGIPSLTHQLVLGSTTLSTLKQMDISIRRYVRKWLRLPFDSANAYIHGPVGDGGLGVMELLSQIPTIRANRVGAANTQLFEGGTSLQQQNGTSRIDRRIARAQRLHQTTDGAELVKSRDNGASTAWIRNPSAKLWGWRSLGMVKVHSGSLPTGVRRTRGRRTGSSHLCRMGCQTPETASHVLQICPAVVRPRCARHNSALNLLEAYARRKGWPVWLEPHFNLEQRGYRPDLLVVTPRGAFIIDVSVVSGSGQRSLADINASKIRKYEVDALLDAAATLANIQRNQLKVIGATITWRGIWHGKSAKDLIRAGYPLFILGWMTTRVLTGGSFIWYKFRATATRRRTTARASGLRGTWS

SEQ ID NO: 4084 - protein, 976 aa, Apolygus lucorum
MASRAQEHQCTHCGRTFHSRIGLSKHTRSAHPEEYAFDEIGPKRCKYWSHEEMTIMATVELELEGTIPGAQMNRALASKMVGRTLKSVEAVRARPHYQNVLEQVRLDATQPSRRTTEELDGSYEISHQQLDEAILAGIPIAQRASEQDEGHQLLINGARAVVQDLDPQNDLLLWISHIIGITPRPPRDHIINNDTTQETRRDKFSRFRRLWDSDRAAIAEDILGNGRAQMRHTGQQLRQYWARQWSALSSEWTAEEVRHPQDQLMDHIWMPITEDEIRISEPTRTACGPDGLLAEVWRMVPHSLRKLFFNTILRRGSMPSTLLQARTTMIPKKNMPETEADYRPITVPSVVVRQFHKIIGKRLESSVTHVEQQKGLRRGVDGLALNVLALNKLLVEANRKKRELHIAVLDVEKAFDRVSHFAIMNIMKGRQWPKQLVQYIESIYQNGSTRIGAGPWIYNARGIRQGDPLSSTLFNAVMDHVLLALPNRVGYIHAGQRWSSLAFADDVVLIATSRAGIVAQIVAFNNALKSVGLNLNLRKSIYLPLMPRGRRLVVPAERPSIDVDGQCLRAAPHNVRWIYLGVSFGTQGICRNMPMKMTTILEKIDRAPLKPLQKLVMLRDHGIPSLTHQLVLGSTTLLTLKQMDISVRRYVRKWLRLPFDSANAYIHGPVGDGGLGVMELLSQIPTIRANRVGAANTQLFEGGTSLQQQNGTSRIDRRIARAQRLHQTTDGAELVKSRDNGASTAWIRNPSAKLWGWRSLGMVKVHSGSLPTGVRRTRGRRTGSSHLCRMGCQTPETASHVLQICPAVVRPRCARHNSALNLLEAYARRKGWPVWLEPHFNLEQRGYRPDLLVVTPRGAFIIDVSVVSGSGQRSLADINASKIRKYEVDALLDAAAALANIQRNQLKVIGATITWRGIWHGKSAKDLIRAGYPLFILEWMTTRVLTGGSFIWSKFRATATRRRATARASGLRGTWS

SEQ ID NO: 4085 - protein, 924 aa, Apolygus lucorum
MTIMATVELELEGTIPGAQMNRALASKMVDRTHKSVEAVRARPHYQNVLEQVRLDATQTPRRTTEELDGSYEISHQQLDEAILAGIPIAQRASEQDEGHQLLISGARAVVQDLDPQNDLLLWISHIIGITPRPPRDHIINNDTTQETRRDKFSRFRRLWDSDRAAIAEDILGNGRAQMRHTGQQLRQYWARQWSAPSSEWTAEEVRHPQDQLMDHIWMPITEDEIRVSEPTRTACGPDGLLAEVWRMVPHSLRKLFFNTILRRGSMPSTLLQARTTMIPKKNMPETEADYRPITVPSVVVRQFHKIIGKRLESSVTHVEQQKGLRRGVDGLALNVLALNKLLVEANRKKRELHIAVLDVEKAFDRVSHFAIMNIMKGRQWPKQLVQYIESIYQNGSTRIGAGPWMYNARGIRQGDPLSSTLFNAVMDHVLLALPNRVGYIHAGQRWSSLAFADDVVLIATSRAGIVAQIVAFNNALKSVGLNLNLRKTIYLPLMPRGHRLVVPAERPSIDVDGQCLRAAPHNVRWIYLGVSFGTQGICRNMPIKMTTILEKIDRAPLKPLQKLVMLRDHGIPSLTHQLVLGSTTLLTLKQMDISVRRYVRKWLRLPFDSANAYIHGPVGDGGLGVMELLSQIPTIRANRVGAANTQLFEGGTSLQQQNGTSRIDRRIARAQRLHQTTDGAELVKSRDNGASTAWIRNPSAKLWGWRSLGMVKVHSGSLPTGVRRTRGRRTGSSHLCRMGCQTPETASHVLQICPAMVRPRCARHNSALNLLEAYARRKGWPVWLEPHFNLEQRGYRPDLLVVTPRGAFIIDVSVVSGSGQRSLADINASKIRKYEVDALLDAAAALANIQRNQLKVIGATITWRGIWHGKSAKDLIRAGYPLFILEWMTTRVLTGGSFIWSKFRATATRRRATARASGLRGTWS

SEQ ID NO: 4086 - protein, 954 aa, Apolygus lucorum
MKIIKYPAHPEEYAFDEIGPKRCKYWSHEEMTIMATVELELEGTIPGAQMNRALASKMVGRTHKSVEAVRARPHYQNVLEQIRLDATQTPRRTTEELDGSYEISHQQLDEAILAGIPIAQRASEQDEGHQLLISGARAVVQDLDPQNDLLLWISHIIGITPRPPRDHIINNDTTQETRRDKFSRFRRLWDSDRAAIAEDILGNGRAQMRHTGQQLRQYWARQWSAPSSEWTAEEVRHPQDQLMDHIWMPITEDEIRVSEPTRTACGPDGLLAEVWRMVPHSLRKLFFNTILRRGSMPSTLLQARTTMIPKKNMPETEADYRPITVPSVVVRQFHKIIGKRLESSVTHVEQQKGLRRGVDGLALNVLALNKLLVEANRKKRELHIAVLDVEKAFDRVSHFAIMNIMKGRQWPKQLVQYIESIYQNGSTRIGAGPWMYNARGIRQGDPLSSTLFNAVMDHVLLALPNRVGYIHAGQRWSSLAFADDVVLIATSRAGIVAQIVAFNNALKSVGLNLNLRKSIYLPLMPRGHRLVVPAERPSIDVDGQCLRAAPHNVRWIYLGVSFGTQGICRNMPIKMTTILEKIDRAPLKPLQKLVMLRDHGIPSLTHQLVLGSTTLLTLKQMDISVRRYVRKWLRLPFDSANAYIHGPVGDGGLGVMELLSQIPTIRANRVGAANTQLFEGGTSLQQQNGTSRIDRRIARAQRLHQITDGAELVKSRDNGASTAWIRNPSAKLWGWRSLGMVKVHSGSLPTGVRRTRGRRTGSSHLCRMGCQTPETASHVLQICPAMVRPRCARHNSALNLLEAYARRKGWPVWLEPHFNLEQRGYRPDLLVVTPRGAFIIDVSVVSGSGQRSLADINASKIRKYEVDALLDAAAALANIQRNQLKVIGATITWRGIWHGKSAKDLIRAGYPLFILEWMTTRILTGGSFIWSKFRATATRRRATARASGLRGTWS

SEQ ID NO: 4087 - protein, 976 aa, Apolygus lucorum
MASRAQEHQCTHCGRTFHSRIGLSKHTRSAHPEEYAFDEIGPKRCKYWSHEEMTIMATVELELEGTIPGAQMNRALASKMVGRTHKSVEAVRARPHYQNVLEQIRLDATQTPRRTTEELDGSYEISHQQLDEAILAGIPIAQRASEQDEGHQLLISGARAVVRDLDPQNDLLLWISHIIGITPRPPRDHIINNDTTQETRRDKFSRFRRLWDSDRAAIAEDILGNGRAQMRHTGQQLRQYWARQWSAPSSEWTAEEVRHPQDQLMDHIWMPITEDEIRVSEPTRTACGPDGLLAEVWRMVPHSLRKLFFNTILRRGSMPSTLLQARTTMIPKKNMPETEADYRPITVPSVVVRQFHKIIGKRLESSVTHVEQQKGLRRGVDGLALNVLALNKLLVEANRKKRELHIAVLDVEKAFDRVSHFAIMNIMKGRQWPKQLVQYIESIYQNGSTRIGAGPWMYNARGIRQGDPLSSTLFNAVMDHVLLALPNRVGYIHAGQRWSSLAFADDVVLIATSRAGIVAQIVAFNNALKSVGLNLNLRKSIYLPLMSRGHRLVVPAERPSIDVDGQCLRAAPHNVRWIYLGVSFGTQGICRNMPIKMTTILEKIDRAPLKPLQKLVMLRDHGIPSLTHQLVLGSTTLLTLKQMDISVRRYVRKWLRLPFDSANAYIHGPVGDGGLGVMELLSQIPTIRANRVGAANTQLFEGGTSLQQQNGTSRIDRRIARARRLHQITDGAELVKSRDNGASTAWIRNPSAKLWGWRSLGMVKVHSGSLPTGVRRTRGRRTGSSHLCRMGCQTPETASHVLQICPAMVRPRCARHNSALNLLEAYARRKGWPVWQEPHFNLEQRGYRPDLLVVTPRGAFIIDVSVVSGSGQRSLADINASKIRKYEVDALLDAAAALANIQRNQLKVIGATITWRGIWHGKSAKDLIRAGYPLFILEWMTTRVLTGGSFIWSKFRATATRRRATARASGLRGTWS

SEQ ID NO: 4088 - protein, 976 aa, Apolygus lucorum
MASRAQEHQCTHCGRTFHSRIGLSKHTRSAHPEEYAFDEIGPKRCKYWSHEEMTIMATVELELEGTIPGAQMNRALASKMVGRTHKSVEAVRARPHYQNVLEQIRLDATQTPRRTTEELDGSYEISHQQLDEAILAGIPIAQRASEQDEGHQLLISGARAVVQDLDPQNDLLLWISHIIGITPRPPRDHIINNDTTQETRRDKFSRFRRLWDSDRAAIAEDILGNGRAQMRHTGQQLRQYWARQWSAPSSEWTAEEVRHPQDQLMDHIWMPITEDEIRVSEPTRTACGPDGLLAEVWRMVPHSLRKLFFNTILRRGSMPSTLLQARTTMIPKKNMPETEADYRPITVPSVVVRQFHKIIGKRLESSVTHVEQQKGLRRGVDGLALNVLALNKLLVEANRKKRELHIAVLDVEKAFDRVSHFAIMNIMKGRQWPKQLVQYIESIYQNGSTRIGAGPWMYNARGIRQGDPLSSTLFNAVMDHVLLALPNRVGYIHAGQRWSSLAFADDVVLIATSRAGIVAQIVAFNNALKSVGLNLNLRKSIYLPLMPRGHRLVVPAERPSIDVDGQCLRAAPHNVRWIYLGVSFGTQGICRNMPIKMTTILEKIDRAPLKPLQKLVMLRDHGIPSLTHQLVLGSTTLLTLKQMDISVRRYVRKWLRLPFDSANAYIHGPVGDGGLGVMELLSQIPTIRANRVGAANTQLFEGGTSLQQQNGISRIDRRIARAQRLHQITDGAELVKSRDNGASTAWIRNPSAKLWGWRSLGMVKVHSGSLPTGVRRTRGRRTGSSHLCRMGCQTPETASHVLQICPAMVRPRCARHNSALNLLEAYARRKGWPVWLEPHFNLEQRGYRPDLLVVTPRGAFIIDVSVVSGSGQRSLADINASKIRKYEVDALLDAAAALANIQRNQLKVIGATITWRGIWHGKSAKDLIRAGYPLFILEWMTTRVLTGGSFIWSKFRATATRRRATARASGLRGTWS

SEQ ID NO: 4089 - protein, 905 aa, Apolygus lucorum
MNRALASKMVGRTHKSVEAVRARPHYQNVLEQIRLDATQTPRRTTEELDGSYEISHQQLDEAILAGIPIAQRASEQDEGHQLLISGARAVVQDLDPQNDLLLWISHIIGITPRPPRDHIINNDTTQETRRDKFSRFRRLWDSDRAAIAEDILGNGRAQMRHTGQQLRQYWARQWSAPSSEWTAEEVRHPQDQLMDHIWMPITEDEIRVSEPTRTACGPDGLLAEVWRMVPHSLRKLFFNTILRRGSMPSTLLQARTTMIPKKNMPETEADYRPITVPSVVVRQFHKIIGKRLESSVTHVEQQKGLRRGVDGLALNVLALNKLLVEANRKKRELHIAVLDVEKAFDRVSHFAIMNIMKGRQWPKQLVQYIESIYQNGSTRIGAGPWMYNARGIRQGDPLSSTLFNAVMDHVLLALPNRVGYIHAGQRWSSLAFADDVVLIATSRAGIVAQIVAFNNALKSVGLNLNLRKSIYLPLMPRGHRLVVPAERPSIDVDGQCLRAAPHNVRWIYLGVSFGTQGICRNMPIKMTTILEKIDRAPLKPLQKLVMLRDHGIPSLTHQLVLGSTTLLTLKQMDISVRRYVRKWLRLPFDSANAYIHGPVGDGGLGVMELLSQIPTIRANRVGAANTQLFEGGTSLQQQNGTSRIDRRIARAQRLHQITDGAELVKSRDNGASTAWIRNPSAKLWGWRSLGMVKVHSGSLPTGVRRTRGRRTGSSHLCRMGCQTPETASHVLQICPAMVRPRCARHNSALNLLEAYARRKGWPVWLEPHFNLEQRGYRPDLLVVTPRGAFIIDVSVVSGSGQRSLADINASKIRKYEVDALLDAAAALANIQRNQLKVIGATITWRGIWHGKSAKDLIRAGYPLFILEWMTTRVLTGGSFIWSKFRATATRRRATARASGLRGTWS

SEQ ID NO: 4090 - protein, 976 aa, Apolygus lucorum
MANRAQEHQCTHCGRTFHSRIGLSKHTRSAHPEEYAFDEIGPKRCKYWSHEEMTIMATVELELEGTIPGAQMNRALASKMVGRTHKSVEAVRARPHYQNVLEQVRLDATQTPRRTTEELDGSYEISHQQLDEAILAGIPIAQRASEQDEGHQLLISGARAVVQDLDPQNDLLLWISHIIGITPRPPRDHIINNDTTQETRRDKFSRFRRLWDSDRAAIAEDILGNGRAQMRHTGQQLRQYWARQWSAPSSEWTAEEVRHPQDQLMDHIWMPITEDEIRVSEPTRTACGPDGLLAEVWRMVPHSLRKLFYNTILRRGSMPSTLLQARTTMIPKKNMPETEADYRPITVPSVVVRQFHKIIGKRLESSVTHVEQQKGLRRGVDGLALNVLALNKLLVEANRKKRELHIAVLDVEKAFDRVSHFAIMNIMKGRQWPKQLVQYIESIYQNGSTRIGAGPWMYNARGIRQGDPLSSTLFNAVMDHVLLALPNRVGYIHAGQRWSSLAFADDVVLIATSRAGIVAQIVAFNNALKSVGLNLNLRKSIYLPLMPRGHRLVVPAERPSIDVDGQCLRAAPHNVRWIYLGVSFGTQGICRNMPIKMTTILEKIDRAPLKPLQKLVMLRDHGIPSLTHQLVLGSTTLLTLKQMDISVRKYVRKWLRLPFDSANAYIHGPVGDGGLGVMELLSQIPTIRANRVGAANTQLFEGGTSLQQQNGTSRIDRRIARAQRLHQITDGAELVKSRDNGASTAWIRNPSAKLWGWRSLGMVKVHSGSLPTGVRRTRGRRTGSSHLCRMGCQTPETASHVLQICPAMVRPRCARHNSALNLLEAYARRKGWPVWLEPHFNLEQRGYRPDLLVVTPRGAFIIDVSVVSGSGQRSLADINASKIRKYEVDALLDAAAALANIQRNQLKVIGATITWRGIWHGKSAKDLIRAGYPLFILEWMTTRVLTGGSFIWSKFRATATRRRATARASGLRGTWS

SEQ ID NO: 4091 - protein, 976 aa, Apolygus lucorum
MASRAQEHQCTHCGRTFHSRIGLSKHTRSAHPEEYAFDEIGPKRCKYWSHEEMTIMATVELELEGTIPGAQMNRALASKMVGRTLKFVEAVRARPHYQNVLEQVRLDATQPPRRTTEELDGSYEISHQQLDEAILGGIPIAQRASEQDEGHQLLINGARAVVQDLDPQNDLLLWISHIIGITPRPPRDHIINNDTTQETRRDKFSRFRRLWDSDRAAIAEDILGNGRAQMRHTGQQLRQYWARQWSAPSSEWTAEEVRHPQDQLMDHIWMPITEDEIRISEPTRTACGPDGLLAEVWRMVPHSLRKLFFNTILRRGSMPSTLLQARTTMIPKKNMPETEADYRPITVPSVVVRQFHKIIGKRLESSVTHVEQQKGLRRGVDGLALNVLALNKLLVEANRKKRELHIAVLDVEKAFDRVSHFAIMNIMKGRQWPKQLVQYIESIYQNGSTRIGAGPWMYNARGIRQGDPLSSTLFNAVMDHVLLALPNRVGYIHAGQRWSSLAFVDDVVLIATSRAGIVAQIVAFNNALKSVGLNLNLRKSIYLPLMPRGRRLVVPAERPSIDVDGQCLRAAPHNVRWIYLGVSFGTQGICRNMPMKMTTILEKIDRAPLKPLQKLVMLRDHGIPSLTHQLVLGSTTLLTLKQMDISVRRYVRKWLRLPFDSANAYIHGPVGDGGLGVMELLSQIPTIRANRVGAANTQLFEGGTSLQQQNGTSRIDRRIARAQRLHQTTDGAELVKSRDNGASTAWIRNPSAKLWGWRSLGMVKVHSGSLPTGVRRTRGRRTGSSHLCRMGCQTPETASHVLQICPAVVRPRCARHNSALNLLEAYARRKGWPVWLEPHFNLEQRGYRPDLLVVTPRGAFIIDVSVVSGSGQRSLADINASKIRKYEVDALLDAAAALANIQRNQLKVIGATITWRGIWHGKSAKDLIRAGYPLFILEWMTTRVLTGGSFIWSKFRATATRRRATARASGLRGTWS

SEQ ID NO: 4092 - protein, 976 aa, Apolygus lucorum
MASRAQEHQCTHCERTFHSRIGLSKHTRSAHPEEYAFDEIGPKRCKYWSHEEMTIMATVELELEGTIPGAQMNRALASKMVGRTHKSVEAVRARPHYQNVLEQIRLDATQTPQRTTEELDGSYEISHQQLDEAILAGIPIAQRASEQDEGHQLLISGARAVVQDLDPQNDLLLWISHIIGITPRPPRDHIINNDTTQETRRDKFSRFRRLWDSDRAAIAEDILGNGRAQMRHTGQQLRQYWARQWSAPSSEWTAEEVRHPQDQLMDHIWMPITEDEIRVSEPTRTACGPDGLLAEVWRMVPHSLRKLFFNTILRRGSMPSTLLQAQTTMIPKKNMPETEADYRPITVPSVVVRQFHKIIGKRLESSVTHVEQQKGLRRGVDGLALNVLALNKMLVEANRKKRELHIAVLDVEKAFDRVSHFAIMNIMKGRQWPKQLVQYIESIYQNGSTRIGAGPWMYNARGIRQGDPLSSTLFNAVMDHVLLALPNRVGYIHAGQRWSSLAFADDVVLIATSRAGIVAQIVAFNNALKSVGLNLNLRKSIYLPLMPRGHRLVVPAERPSIDVDGQCLRAAPHNVRWIYLGVSFGTQGICRNMPIKMTTILEKIDRAPLKPLQKLVMLRDHGIPSLTHQLVLGSTTLLTLKQMDISVRRYVRKWLRLPFDSANAYIHGPVGDGGLGVMELLSQIPTIRANRVGAANTQLFEGGTSLQQQNGTSRINRRIARAQRLHQITDGAELVKSRDNGASTAWIRNPSAKLWGWRSLGMVKVHSGSVPTGVRRTRGRRTGSSHLCRMGCQTPETASHVLQICPAMVRPRCARHNSALNLLEAYARRKGWPVWLEPHFNLEQRGYRPDLLVVTPRGAFIIDVSVVSGSGQRSLADINASKIRKYEVDALLDAAAALANIQRNQLKVIGATITWRGIWHGKSAKDLIRAGYPLFILEWMTTRVLTGGSFIWSKFRATATRRRATARASGLRGTWS

SEQ ID NO: 4093 - protein, 976 aa, Apolygus lucorum
MASRAQEHQCTHCGRTFHSRIGLSKHTRSAHPEEYAFDEIGPKRCKYWSHEEMTIMATVELELEGTIPGAQMNRALASKMVGRTLKSVEAVRARPHYQNVLEQVRLDATQTPRRTTEELDGSYEISHQQLDEAILAGIPIAQRASEQDEGHHLLINGARAVVQDLDPQNDLLLWISHIIGITPRPPRDHIINNDTTQETRRDKFSRFRRLWDSDRAAIAEDILGNGRAQMRHTGQQLRQYWARQWSTPSSEWTAEEVRHPQDQLMDHIWMPITEDEIRVSEPTRTACGPDGLLTEVWRMVPHSLRKLFFNTILRRGSMPSTLLQARTTMIPKKNMPETEADYRPITVPSVVVRQFHKIIGKRLESSVTHVEQQKGLRRGVDGLALNVLALNKLLVEANRKKRELHIAVLDVEKAFDRVSHFAIMNIMKGRQWPKQLVQYIESIYQNGSTRIGAGPWMYNARGIRQGDPLSSTLFNAVMDHVLLALPNRVGYIHAGQRWSSLAFADDVVLIATSRAGIVAQIVAFNNALKSVGLNLNLRKSIYLPLMPRGRRLVVPAERPSIDVDGQCLRAAPHNVRWIYLGVSFGTQGICRNMPMKMTTILEKIDRAPLKPLQKLVMLRDHGIPSLTHQLVLGSTTLLTLKQMDISVRRYVRKWLRLPFDSANAYIHGPVGDGGLGVMELLSQIPTIRANRVGAANTQLFEGGTSLQQQNGTSRIDRRIARAQRLHQTTDGAELVKSRDNGASTAWIRNPSAKLWGWRSLGMVKVHSGSLPTGVRRTRGRRTGSSHLCRMGCQTPETASHVLQICPAVVRPRCARHNSALNLLEAYARRKGWPVWLEPHFNLEQRGYRPDLLVVTPRGAFIIDVSVVSGSGQRSLADINASKIRKYEVDALLDAAAALANIQRNQLKVIGATITWRGIWHGKSAKDLIRAGYPLFILEWMTTRVLTGGSFIWSKFRATATRRRATARASGLRGTWS

SEQ ID NO: 4094 - protein, 915 aa, Apolygus lucorum
MASRAQEHQCTHCGRTFHSRIGLSKHTRSAHPEEYAFDEIGPKRCKYWSHEEMTIMATVELELEGTIPGAQMNRALASKMVGRTLKSVEAVRARPHYQNVLEQVRLDATQTPRRTTEELDGSYEISHQQLDEAILAGIPIAQRASEQDEGHQLLINGARAVVQDLDPQNDLLLWISHIIGITPRPPRDHIINNDTTQETRRDKFSRFRRLWDSDRAAIAEDILGNGRAQMRHTGQQLRQYWARQWSTPSSEWTAEEVRHPQDQLMDHIWMPITEDEIRVSEPTRTACGPDGLLAEVWRMVPHSLRKLFFNTILRRGSMPSTLLQARTTMIPKKNMPETEADYRPITVPSVVVRQFHKIIGKRLESSVTHVEQQKGLRRGVDGLALNVLALNKLLVETNRKKREIHIAVLDVEKAFDRVSHFAIMNIMKGRQWPKQLVQYIESIYQNGSTRIGAGPWMYNARGIRQGDPLSSTLFNAVMDHVLLALPNRVGYIHAGQRWSSLAFADDVVLIATSRAGIVAQIVAFNNALKSVGLNLNLRKSIYLPLMPRGRRLVVPAERPSIDVDGQCLRAAPHNVRWIYLGVSFGTQGICRNMQMKMTTILEKIDRAPLKPLQKLVMLRDHGIPSLTHQLVLGSTTLLTLKQMDISVRRYVRKWLRLPFDSANAYIHGPVGDGGLGVMELLSQIPTIRANRVGAANTQLFEGGTSLQQQNGTSRIDRRIARAQRLHQTTDGAELVKSRDNGASTAWIRNPSAKLWGWRSLGMVKVHSGSLPTGVRRTRGRRTGSSHLCRMGCQTPETASHVLQICPAVVRPRCARHNSALNLLEAYARRKGWQVWLEPHFNLEQRGYRPDLLVVTPRGAFIIDVSVVSGSGQRSLADINASKIRKYEVDALLDAAAALANIQRNQLKVIGATITW

SEQ ID NO: 4095 - protein, 976 aa, Apolygus lucorum
MASRAQEHQCTHCGRTFHSRIGLSKHTRSAHPEEYAFDEIGPKRCKYWSHEEMTIMATVELELEGTIPGAQMNRALASKMVGRTHKSVEAVRARPHYQNVLEQVRLDATQTPQRTTEELDGSYEISHQQLDEAILAGIPIAQRASEQDEGHQLLINGARAVVQDLDPQNDLLLWISHIIGITPRPPRDHIINNDTTQETRRDKFSRFRRLWDSDRAAIAEDILGNGRAQMRHTGQQLRQYWARQWLAPSSEWTAEEVRHPQDQLMDHIWMPITEDEIRVSEPTRTACGPDGLLAEVWRMVPHSLRKLFFNTILRRGSMPSTLLQARTTMIPKKNMPETEADYRPITVPSVVVRQFHKIIGKRLESSVTHVEQQKGLRRGVDGLALNVLALNKLLVEANRKKRELHIAVLDVEKAFDRVSHFAIMNIMKGRQWPKQLVQYIESIYQNGSTRIGAGPWMYNARGIRQGDPLSSTLFNAVMDHVLLALPNRVGYIHAGQRWSSLAFADDVVLIATSRAGIVAQIVAFNNALKSVGLNLNLRKSIYLPLMPRGRRLVVPAERPSIDVDGQCLRAAPHNVRWIYLGVSFGTQGICRNMPMKMTTILEKIDRAPLKPLQKLVMLRDHGIPSLTHQLVLGSTTLLTLKQMDISVRRYVRKWLRLPFDSANAYIHGPVGDGGLGVMELLSQIPTIRANRVGAANTQLFEGGTSLQQQNGTSRIDRRIARAQRLHQTTDGAELLKSRDNGASTAWIRNPSAKLWGWRSLGMVKVHSGSLPTGVRRTRGRRTGSSHLCRMGCQTPETASHVLQICPAMVRPRCARHNSALNLLEAYARRKGWPVWLEPHFNLEQRGYRPDLLVVTPRGAFIIDVSVVSGSGQRSLADINASKIRKYEVDALLDAAAALANIQRNQLKVIGATITWRGIWHGKSAKDLIRAGYPLFILEWMTTRVLTGGSSIWSKFRATATRRRAMARASGLRGTWN

SEQ ID NO: 4096 - protein, 924 aa, Apolygus lucorum
MTIMATVELELEGTIPGAQMNRALASKMVGRTHKSVEAVRARPHYQNVLEQVRLDATQTPQRTTEELDGSYEISHQQLDEAILAGIPIAQRASEQDEGHQLLINGARAVVQDLDPQNDLLLWISHIIGITPRPPRDHIINNDTTQETRRDKFSRFRRLWDSDRAAIAEDILGNGRAQMRHTGQQLRQYWARQWSAPSSEWTAEEVRHPQDQLMDHIWMPITEDEIRVSEPTRTACGPDGLLAEVWRMVPHSLRKLFFNTILRRGSMPSTLLQARTTMIPKKNMPETEADYRPITVPSVVVRQFHKIIGKRLESSVTHVEQQKGLRRGVDGLALNVLALNKLLVEANRKKRELHIAVLDVEKAFDRVSHFAIMNIMKGRQWPKQLVQYIESIYQNGSTRIGVGPWMYNARGIRQGDPLSSTLFNAVMDHVLLALPNRVGYIHAGQRWSSLAFADDVVLIATSRAGIVAQIVAFNNALKSVGLNLNLRKSIYLPLMPRGRRLVVPAERSSIDVDGQCLRAAPHNVRWIYLGVSFGTQGICRNMPMKMTTILEKIDRAPLKPLQKLVMLRDHGIPSLTHQLVLGSTTLLTLKQMDISVRRYVRKWLRLPFDSANAYIHGPVGDGGLGVMELLSQIPTIRANRVGAANTQLFEGGTSLQQQNGTSRIDRRIARAQRLHQTTDGAELLKSRDNGASTAWIRNPSAKLWGWRSLGMVKVHSGSLPTGVRRTRGRRTGSSHLCRMGCQTPETASHVLQICPAMVRPRCARHNSALNLLEAYARRKGWPVWLEPHFNLEQRGYRPDLLVVTPRGAFIIDVSVVSGSGQRSLADINASKIRKYEVDALLDAAATLANIQRNQLKVIGATITWRGIWHGKSAKDLIRAGYPLFILEWMTTRVLTGGSFIWYKFRATATRRRTTARASGLRGTWS

SEQ ID NO: 4097 - protein, 976 aa, Apolygus lucorum
MASRAQEHQCTHCGRTFHSRIGLSKHTRSAHPEEYAFDEIGPKRCKYWSHEEMTIMATVELELEGTIPGAQMNRALASKMVGRTHKSVEAVRARPHYQNVLEQIRLDATQTPRRTTEELDGSYEISHQQLDEAILAGIPIAQRASEQDEGHQLLISGARAVVQDLDPQNDLLLWISHIIGITPRPPRDHIINNDTTQETRRDKFSRFRRLWDSDRAAIAEDILGNGRAQMRHTGQQLRQYWARQWSAPSSEWTAEEVRHPQDQLMDHIWMPITEDEIRVSEPTRTACGPDGLLAEVWRMVPHSLRKLFFNTILRRGSMPSTLLQARTTMIPKKNMPETEADYRPITVPSVVVRQFHKIIGKRLESSVTHVEQQKGLRRGVDGLALNVLALNKLLVEANRKKRELHIAVLDVEKAFDRVSHFAIMNIMKGRQWPKQLVQYIESIYQNGSTRIGAGPWMYNARGIRQGDPLSSTLFNAVMDHVLLALPNRVGYIHAGQRWSSLAFADDVVLIATSRAGIVAQIVAFNNALKSVGLNLNLRKSIYLPLMPRGHRLVVPAERPSIDVDGQCLRAAPHNVRWIYLGVSFGTQGICRNMPIKMTTILEKIDRAPLKPLQKLVMLRDHGIPSLTHQLVLGSTTLLTLKQMDISVRRYVRKWLRLPFDSANAYIHGPVGDGGLGVMELLSQIPTIRANRVGAANTQLFEEGTSLQQQNGTSRIDRRIARAQRLHQITDGAELVKSRDNGASTAWIRNPSAKLWGWRSLGMVKVHSGSLPTGVRRTRGRRTGSSHLCRMGCQTPETASHVLQICPAMVRPRCARHNSALNLLEAYARRKGWPVWLEPHFNLEQRGYRPDLLVVTPRGAFIIDVSVVSGSSQRSLADINASKIRKYEVDALLDAAAALANIQRNQLKVIGATITWRGIWHGKSAKDLIRAGYPLFILEWMTTRVLTGGSFIWSKFRATATRRRATARASGLRGTWS

SEQ ID NO: 4098 - protein, 976 aa, Apolygus lucorum
MASRAQEHQCTHCGRTFHSRIGLSKHTRSAHPEEYAFDEIGPKRCKYWSHEEMTIMATVELELEGTIPGAQMNRALASKMVGRTHKSVEAVRARPHYQNVLEQIRLDATQTPRRTTEELDGSYEISHQQFDEAILAGIPIAQRASEQDEGHQLLISGARAVVQDLDPQNDLLLWISHIIGITPRPPRDHIINNDTTQETRRDKFSRFRRLWDSDRAAIAKDILGNGRAQMRHTGQQLRQYWARQWSAPSSEWTAEEVRHPQDQLMDHIWMPITEDEIRVSEPTRTACGPDGLLAEVWRMVPHSLRKLFFNTILRRGSMPSTLLQARTTMIPKKNMPETEADYRPITVPSVVVRQFHKIIGKRLESSVTHVEQQKGLRRGVDGLALNVLALNKLLVEANRKKRELHIAVLDIEKAFDRVSHFAIMNIMKGRQWPKQLVQYIESIYQNGSTRIGAGPWMYNARGIRQGDPLSSTLFNAVMDHVLLALPNRVGYIHAGQRWSSLAFADDVVLIATSRAGIVAQIVAFNNALKSVGLNLNLRKSIYLPLMPRGHRLVVPAERPSIDVDGQCLRAAPHNVRWIYLGVSFGTQGICRNMPIKMTTILEKIDRAPLKPLQKLVMLRDHGIPSLTHQLVLGSTTLLTLKQMDISVRRYVRKWLRLPFDSANAYIHGPVGDGGLGVMELLSQIPTIRANRVGAANTQLFEGGTSLQQQNGTSRIDRRIARAQRLHQITDGAELVKSRDNGASTAWIRNPSAKLWGWRSLGMVKVHSGSLPTGVRRTRGRRTGSSHLCRMGCQTPETASHVLQICPAMVRPRCARHNSALNLLEAYARRKGWPVWLEPHFNLEQRGYRPDLLVVTPRGAFIIDVSVVSGSGQRSLADINASKIRKYEVDALLDAAAALANIQRNQLKVIGATITWRGIWHGKSAKDLIRAGYPLFILEWMTTRVLTGGSFIWSKFRATATRRRATARASGLRGTWS

SEQ ID NO: 4099 - protein, 976 aa, Apolygus lucorum
MASRAQEHQCTHCGRTFHSRIGLSKHTRSAHPEEYAFDEIGPKRCKYWSHEEMTIMATVELELEGTIPGAQMNRALASKMVGRTHKSVEAVRARPHYQNVLEQVRLDATQTPRRTTEELDGSYEISHQQLDEAILAGIPIAQRASEQDEGHQLLISGARAVVQDLDPQNDLLLWISHIIGITPRPPRDHIINNDTTQETRRDKFSRFRRLWDSDRAAIAEDILGNGRAQMRHTGQQLRQYWARQWSAPSSEWTAEEVRHPQDQLMDHIWMPITEDEIRVSEPTRTACGPDGLLAEVWRMVPHSLRKLFFNTILRRGSMPSTLLQARTTMIPKKNMPETEADYRPITVPSVVVRQFHKIIGKRLESSVTHVEQQKGLRRGVDGLALNVLALNKLLVEANRKKRELHIAVLDVEKAFDRVSHFAIMNIMKGRQWPKQLVQYIESIYQNGSTRIGAGPWMYNARGIRQGDPLSSTLFNAVMDHVLLALPNRVGYIHAGQRWSSLAFADDVVLIATSRAGIVAQILAFNDALKSVGLNLNLRKSIYLPLMPRGHRLVVPAERPSIDVDGQCLRAAPHNVRWIYLGVSFGTQGICRNMPIKMTTILEKIDRAPLKPLQKLVMLRDHGIPSLTHQLVLGSTTLLTLKQMDISVRRYVRKWLRLPFDSANAYIHGPVGDGGLGVMELLSQIPTIRANRVGAANTQLFEGGTSLQQQNGTSRIDRRIARAQRLHQTTDGAELVKSRDNGASTAWIRNPSAKLWGWRSLGMVKVHSGSLPTGVRRTRGRRTGSSHLCRMGCQTPETASHVLQICPAMVRPRCARHNSALNLLEAYARRKGWPVWLEPHFNLEQRGYRPDLLVVTPRGAFIIDVSVVSGSGQRSLADINASKIRKYEVDALLDAAAALANIQRNQLKVIGATITWRGIWHGKSAKDLIRAGYPLFILEWMTTRVLTGGSFIWSKFRATATRRRATARANGLRGTWS

SEQ ID NO: 4100 - protein, 976 aa, Apolygus lucorum
MASRAQEHQCTHCGRTFHSRIGLSKHTRSAHPEEYAFDEIGPKRCKYWSHEEMTIMATVELELEGTIPGAQMNRALASKMVGRTHKSVEAVRARPHYQNVLEQVRLDATQTPRRTTEELDGSYEISHQQLDEAILAGIPIAQRASEQDEGHQLLISGARAVVQDLDPQNDLLLWISHIIGITPRPPRDHIINNDTTQETRRDKFSRFRRLWDSDRAAIAEDILGNGRAQMRHTGQQLRQYWARQWSAPSSEWTAEEVRHPQDQLMDHIWMPITEDEIRVSEPTRTACGPDGLLAEVWRMVPHSLRKLFFNTILRRGSMPSTLLQARTTMIPKKNMPETEADYRPITVPSVVVRQFHKIIGKRLESSVTHVEQQKGLRRGVDGLALNVLALNKLLVEANRKKRELHIAVLDVEKAFDRVSHFAIMNIMKGRQWPKQLVQYIESIYQNGSTRIGAGPWMYNARGIRQGDPLSSTLFNAVMDHVLLALPNRVGYIHAGQRWSSLAFADDVVLIATSRAGIVAQIVAFNNALKSVGLNLNLRKSIYLPLMPRGHRLVVPAERPSIDVDGQCLRAAPHNVRWKYLGVSFGTQGICRNMPIKITTILEKIDRAPLKPLQKLVMLRDHGIPSLTHQLVLGSTTLLTLKQMDISVRRYVRKWLRLPFDSANAYIHGPVGDGGLGVMELLSQIPTIRANRVGAANTQLFEGGTSLQQQNGTSRIDRRIARAQRLHQITDGAELVKSRDNGASTAWIRNPSAKLWGWRSLGMVKVHSGSLPTGVRRTRGRRTGSSYLCRMGCQTPETASHVLQICPAMVRPRCARHNSALNLLEAYARRKGWPVWLEPHFNLEQRGYRPDLLVVTPRGAFIIDVSVVSGSGQRSLADINASKIRKYEVDALLDAAAALANIQRNQLKVIGATITWRGIWHGKSAKDLIRAGYPLFILEWMTTRVLTGGSFIWSKFRATATRRRATARASGLRGTWS

SEQ ID NO: 4101 - protein, 935 aa, Apolygus lucorum
MASRAQEHQCTHCGRTFHSRIGLSKHTRSAHPEEYAFDEIGPKRCNYWSHEEMTIMATVELELEGTIPGAQMNRALASKMVGRTLKSVEAVRARPHYQNVLVQVRLDATQTPRRTTEELDGSYEISHQQLDEATLAGIPIAQRASEQDEGHQLLINGARAVVQDLDPQNDLLLWISHIIGITPRPPRDHIINNDTTQETRRDKFSRFRRLWDSDRAAIAEDILGNGRAQMCHTGQQLRQYWARQWSTPSSEWTAEEVRHPQDQLMDHIWMPITEDEIRVSEPTRTACGPDGLLAEVWRMVPHSLRKLFFNTILRRGSKPSTLLQARTTMIPKKNMPETEADYRPITVPSVVVRQFHKIIGKRLESSVTHVEQQKGLRKGVDGLALNVLALNKLLVEANRKKRELHIAVLDVEKAFDRVSHFAIMNIMKGRQWPKQLVQYIESIYQNGSTRIGAGPWMYNARGIRQGDPLSSTLFNAVMDHVLLALPNRVGYIHAGQRWSSLAFADDVVLIATSRAGIVAQIVAFNNALKSVGLNLNLRKSIYLPLMPRGRRLVVPAERPSIDVDGQCLRAAPHNVRWIYLGVSFGTQGICRNMPMKMTTILEKIDRAPLKPLQKLVMLRDHGIPSLTHQLVLGSTTLLTLKQMDISVRRYVRKWLRLPFDSANAYIHGPVGDGGLGVMELLSQIPTIRANRVGAANTQLFEGGTSLQQQNGTSRIDRRIARAQRLHQTTDGAELVKSRDNGASTAWIRNPSAKLWGWRSLGMVKVHSGSLPTGVRRTRGRRTGSSHLCRMGCQTPETASHVLQICPAVVRPRCARHNSALNLLEAYARRKGWPVWLEPHFNLEQRGYRPDLLVVTPRGAFIIDVSVVSGSGQRSLADINASKIRKYEVDALLDAAAALANIQRNRGGGEQGNRRRGKALRRREEVDGPEGEADLM

SEQ ID NO: 4102 - protein, 976 aa, Apolygus lucorum
MASRAQEHQCTHCGRTFHSRIGLSKHTRSAHPEEYAFDEIGPKRCKYWSHEEMTIMATVELELEGTIPGAQMNRALASKMVGRTHKSVEAVRARPHYQNVLEQVRLDATQTPRRTTEELDGSYEISHQQLDEAILAGIPIAQRASEQDEGHQLLISGARAVVQDLDPQNDLLLWISHIIGITPRPPRDHIINNDTTQETRRDKFSRFRRLWDSDRAAIAEDILGNGRAQMRHTGQQLRQYWARQWSAPSSEWTAEEVRHPQDQLMDHIWMPITEDEIRVSEPTRTACGPDGLLAEVWRMVPHSLRKLFFNTILRRGSMPSTLLQARTTMIPKKNMPETEADYRPITVPSVVVRQFHKIIGKRLESSVTHVEQQKGLRRGVDGLALNVLALNKLLVEANRKKRELHIAVLDVEKAFDRVSHFAIMNIMKGRQWPKQLVQYIESIYQNGSTRIGAGPWMYNARGIRQGDPLSSTLFNAVMDHVLLALPNRVGYIHAGQRWSSLAFADDVVLIATSRAGIVAQIVAFNNALKSVGLNLNFRKSIYLPLMPRGHRLVVPAERPSIDVDGQCLRAAPHNVRWIYLGVSFGTQGICRNMPIKMTTILEKIDRAPLKPLQKLVMLRDHGIPSLTHQLVLGNTTLLTLKQMDISVRRYVRKWLRLPFDSANAYIHGPVGDGGLGVMELLSQIPTIRANRVGAANTQLFEGGTSLQQQNGTSRIDRRIARAQRLHQTTDGAELVKSRDNGASTAWIRNPSAKLWGWRSLGMVKVHSGSLPTGVRRTRGRRTGSSHLCRMGCQTPETASHVLQICPAMVRPRCARHNSALNLLEAYARRKGWPVWLEPHFNLERRGYRPDLLVVTPRGAFIIDVSVVSGSGQRSLADINASKIRKYEVDALLDAAAALANIQRNQLKVIGATITWRGIWHGKSAKDLIRAGYPLFILEWMTTRVLTGGSFIWSKFRATATRRRATARASGLRGTWS

SEQ ID NO: 4103 - protein, 976 aa, Apolygus lucorum
MASRAQEHQCTHCGRTFHSRIGLSKHTRSAHPEEYAFDEIGPKRCKYWSHEEMTIMATVELELEGTIPGAQMNRALASKMVGRTHKSVEAVRARPHYQNVLEQVRLDATQTPRRTTEELDGSYEISHQQLDEAILAGIPIAQRASEQDEGHQLLINGARAVVQDLDPQNDLLLWISHIIGITPRPPRDHIINNDTTQETRRDKFSRFRRLWDSDRAAIAEDILGNGRAQMRHTGQQLRQYWARQWSAPSSEWTAEEVRHPQDQLMDHIWMPITEDEIRVSEPTRTACGPDGLLAEVWRMVPHSLRKLFFNTILRRGSMPSTLLQARTTMIPKKNMPETEADYRPITVPSVVVRQFHKIIGKRLESSVTHVEQQKGLRRGVDGLALNVLALNKLLVEANRKKRELHIAVLDVEKAFDRVSHFAIMNIMKGRQWPKQLVQYIESIYQNGSTRIGAGPWMYNARGIRQGDPLSSTLFNAVMDHVLLALPNRVGYIHAGQRWSSLAFADDVVLIATSRAGIVAQIVAFNNALKSVGLNLNLRKSIYLPLMPRGRRLVVPAERPSIDVDGQCLRAAPHNVRWIYLGVSFGTQGICRNMPMKMTTILEKIDRAPLKPLQKLVMLRDHGIPSLTHQLVLGSTTLLTLKQMDISVRRYVRKWLRLPFDSANAYIHGPVGDGGLGVMELLSQIPTIRANRVGAANTQLFEGGTSLQQQNGTSRIDRRIARAQRLHQTTDGAELLKSRDNGASTAWIRNPSAKLWGWRSLGMVKVHSGSLPTGVRRTRGRRTGSSHLCRMGCQTSETASHVLQICPAMVRPRCARHNSALNLLEAYARRKGWPVWLEPHFNLEQRGYRPDLLVVTPRGAFIIDVSVVSGSGQRSLADINASKIRKYEVDALLDAAAALANIQRNQLKVIGATITWRGIWHGKSAKDLIRAGYPLFILEWMTTRVLTGGSFIWSKFRATATRRRATARASGLRGTWN

SEQ ID NO: 4104 - protein, 976 aa, Apolygus lucorum
MASRAQEHQCTHCGRTFHSRIGLSKHTRSAHPEEYAFDEIGPKRCKYWSHEEMTIMATVELELEGTIPGAQMNRALASKMVGRTHKSVEAVRARPHYQNVLEQVRLDATQTPRRTTEELDGSYEISHQQLDEAILAGIPIAQRASEQDEGHQLLISGARAVVQDLDPQNDLLLWISHIIGITPRPPRDHIINNDTTQETRRDKFSRFRRLWDSDRAAIAEDILGNGRAQMRHTGQQLRQYWARQWSAPSSEWTAEEVRHPQDQLMDHIWMPITEDEIRVSEPTRTACGPDGLLAEVWRMVPHGLRKLFFNTILRRGSMPSTLLQARTTMIPKKNMPETEADYRPITVPSVVVRQFHKIIGKRLESSVTHVEQQKGLRRGVDGLALNVLALNKLLVEANRKKRELHIAVLDVEKAFDRVSHFAIMNIMKGRQWPKQLVQYIESIYQNGSTRIGAGPWMYNARGIRQGDPLSSTLFNAVMDHVLLALPNRVGYIHAGQRWSSLALADDVVLIATSRAGIVAQIVAFNNALKSVGLNLNLRKSIYLPLMPRGHRLVVPAERPSIDVDGQCLRAAPHNVRWIYLGVSFGAQGICRNMPIKMTTILEKIDRAPLKPLQKLVMLRDHGIPSLTHQLVLGSTTLLTLKQMDISVRRYVRKWLRLPFDSANAYIHGPVGDGGLGVMELLSQIPTIRANRVGAANTQLFEGGTSLQQQNGTSRIDRRIARAQRLHQITDGAELVKSRDNGASTAWIRNPSAKLWGWRSLGMVKVHSGSLPTGVRRTRGRRTGSSHLCRMGCQTPETASHVLQICPAMVRPRCARHNSALNLLEAYARRKGWPVWLEPHFNLEQRGYRPDLLVVTPRGAFIIDVSVVSGSGQRSLADINASKIRKYEVDALLDAAAALANIQRNQLKVIGATITWRGIWHGKSAKDLIRAGYPLFILEWMTTRVLTGGSFIWSKFRATASRRRATARASGLRGTWS

SEQ ID NO: 4105 - protein, 976 aa, Apolygus lucorum
MASRAQEHQCTHCGRTFHSRIGLSKHTRSAHPEEYAFDEIGPKRCKYWSHEEMTIMATVELELEGTIPGAQMNRALASKMVGRTHKSVEAVRARPHYQNVLEQVRLDVTQTPRRTTEELDGSYEISHQQLDEAILAGIPIAQRASEQDEGHQLLINGARAVVQDLDPQNDLLLWISHIIGITPRPPRDHIINNDTTQETRRDKFSRFRRLWDSDRAAIAEDILGNGRAQMRHTGQQLRQYWARQWSAPSSEWTAEEVRHPQDQLMDHIWMPITEDEIRVSEPTRTACGPDGLLAEVWRMVPHSLRKLFFNTILRRGSMPSTLLQARTTMIPKKNMPETEADYRPITVPSVVVRQFHKIIGKRLESSVTHVEQQKGLRRGVDGLALNVLALNKLLVEANRKKRELHIAVLDVEKAFDRVSHFAIMNIMKGRQWPKQLVQYIESIYQNGSTRIGAGPWMYNARGIRQGDPLSSTLFNAVMDHVLLALPNRVGYIHAGQRWSSLAFADDVVLIATSRAGIVAQIVAFNNALKSVGLNLNLRKSIYLPLMPRGHRLVVPAERPSIDVDGQCLRAAPHNVRWIYLGVSFGTQGICRNMPIKMTTILEKIDRAPLKPLQKLVMLRDHGIPSLTHQLVLGSTTLLTLKQMDISVRRYVRKWLRLPFDSANAYIHGPVGDGGLGVMELLSQIPTIRANRVGAANTQLFEGGTSLQQQNGTSRIDRRIARAQRLHQTTDGAELVKSRDNGASTAWIRNPSAKLWGWRSLGMVKVHSGSLPTGVRRTRGRRTGSSHLCRMGCQTPETASHVLQICPAMVRPRCARHNSALNLLEAYARRKGWPVWLEPHFNLEQRGYRPDLLVVTPRGAFIIDVSVVSGSGQRSLADINASKIRKYEVDALLDAAAALANIQRNQLKVIGATITWRGIWHGKSAKDLIRAGYPLFILEWMTTRVLTGGSFIWSKFRATATRRRATARASGLRGTWS

SEQ ID NO: 4106 - protein, 976 aa, Apolygus lucorum
MASRAQEHQCTHCGRTFHSRIGLSKHTRSAHPEEYAFDEIGPKRCKYWSHEEMTIMATVELELEGTIPGAQMNRALASKMVGRTLKSVEAVRARPHYQNVLEQVRLDATQTPRRTTEELDGSYEISHQQLDEAILAGIPIAQRASEQDEGHQLLINGARAVVQDLDPQNDLLLWISHIIGITPRPPRDHIINNDTTQETRRDKFSRFRRLWDSDRAAIAEDILGNGRAQMRHTGQQLRQYWARQWSAPSSEWTAEEVRHPQDQLMDHIWMPITEDEIRVSEPTRTACGPDGLLAEVWRMVPHSLRKLFFNTILRRGSMPSTLLQARTTMIPKKNMPETEADYRPITVPSVVVRQFHKIIGKRLESSVTHVEQQKGLRRGVDGLALNVLALNKLLVEANRKKRELHIAVLDVEKAFDRVSHFAIMNIMKGRQWPKQLVQYIESIYQNGSTRIGAGPWMYNARGIRQGDPLSSTLFNAVMDHVLLALPNRVGYIHAGQRWSSLAFADDVVLIATSRAGIVAQILAFNNALKSVGLNLNLRKSIYLPLMPRGRRLVVPAERPSIDVDGQCLRAAPHNVRWIYLGVSFGTQGICRNMPMKITTILEKIDRAPLKPLQKLVMLRDHGIPSLTHQLVLGSTTLLTLKQMDISVRRYVRKWLRLPFDSANAYIHGPVGDGGLGVMELLSQIPTIRANRVGAANTQLFEGGTSLQQQNGTSRIDRQIARAQRLHQTTDGAELVKSRDNGASTAWIRNPSAKLWGWRSLGMVKVHSGSLPTGVRRTRGRRTGSSHLCRMGCQTPETASHVLQICPAVVRPRCARHNSALNLLEAYARRKGWPVWLEPHFNLEQRGYRPDLLVVTPRGAFIIDVSVVSGSGQRSLADINASKIRKYEVDALLDAAAALANIQRNQLKVIGATITWRGIWHGKSAKDLIRAGYPLFILEWMTTRVLTGGSFIWSRFRATATRRRATARASGLRGTWS

SEQ ID NO: 4107 - protein, 976 aa, Apolygus lucorum
MASRAQEHQCTHCGRTFHSRIGLSKHTRSAHPEEYAFDEIGPKRCKYWSHEEMTIMATVELELEGTIPGAQMNRALASKMVGRTHKSVEAVRARPHYQNVLEQVRLDATQTPQRTTEELDGSYETSHQQLDEAILAGIPIAQRASEQDEGHQLLINGARAVVQDLDPQNDLLLWISHIIGITPRPPRDHIINNDTTQETRRDKFSRFRRLWDSDRAAIAEDILGNGRAQMRHTGQQLRQYWARQWSAPSSEWTAEEVRHPQDQLMDHIWMPITEDEIRVSEPTRTACGPDGLLAEVWRMVPHSLRKLFFNTILRRGSMPSTLLQARTTMIPKKNMPETEADYRPITVPSVVVRQFHKIIGKRLESSVTHVEQQKGLRRGVDGLALNVLALNKLLVEANRKKRELHIAVLDVEKAFDRVSHFAIMNIMKGRQWPKQLVQYIESIYQNGSTRIGAGPWMYNARGIRQGDPLSSTLFNAVMDHVLLALPNRVGYIHAGQRWSSLAFADDVVLIATSRAGIVAQIVAFNNALKSVGLNLNLRKSIYLPLMPRGCRLVVPAERPSIDVDGQCLRAAPHNVRWIYLGVSFGTQGICRNMPIKMTTILEKIDRAPLKPLQKLVMLRDHGIPSLTHQLVLGSTTLLTLKQMDISVRRYMRKWLRLPFDSANAYIHGPVGDGGLGVMELLSQIPTIRANRVGAANTQLFEGGTSLQQQNGTSRIDRRIARAQRLHQTTDGAELLKSRDNRASTAWIRNPSAKLWGWRSLGMVKVHSGSLPTGVRRTRGRRTGSSHLCRMGCQTPETASHVLQICPAMVRPRCARHNSALNLLEAYARRKGWPVWLEPHFNLEQRGYRPDLLVVTPRGAFIIDVSVVSGSGQRSLADINASKIRKYEVDALLDAAAALANIQRNQLKVIGATITWRGIWHGKSAKDLIRAGYPLFILEWMTTRVLTGGSSIWSKFRATATRRRATAPASGLRGTYS

SEQ ID NO: 4108 - protein, 897 aa, Apolygus lucorum
MVGRTHKSVEAVRARPHYQNVLEQVRLDATQTLRRTTEELDGNYEISHQQLDEAILAGIPVAQRASEQDEGHQLLISGARAVVQDLDPQNDLLLWISHIIGITPRPPRDHIINNDTTQETRRDKFSRFRRLWDSDRAAIAEDILGNGRAQMRHTGQQLRQYWARQWSAPSSEWTAEEVRHPQDQLMDHIWMPITEDEIRVSEPTRTACGPDGLLAEVWRMVPHSLRKLFFNTILRRGSMPSTLLQARTTMIPKKNMPETEADYRPITVPSVVVRQFHKIIGKRLESSVTHVEQQKGLRRGVDGLALNVLALNKLLVEANRKKRELHIAVLDVEKAFDRVSHFAIMNIMKGRQWPKQLVQYIESIYQNGSTRIGAGPWMYNARGIRQGDPLSSTLFNAVMDHVLLALPNRVGYIHAGQRWSSLAFADDVVLIATSRAGIVAQIVAFNNALKSVGLNLNLRKSIYLPLMPRGHRLVVPAERPSIDVDGQCLRAAPHNVRWIYLGVSFGTQGICRNMPIKMTTILEKIDRAPLKPLQKLVMLQDHGIPSLTHQLVLGSTTLLTLKQMDISVRRYVRKWLRLPFDSANAYIHGPVGDGGLGVMELLSQIPTIRANRVGAANTQLFEGGTSLQQQNGTSRIDRRIARAQRLHQITDGAELVKSRDNGASTAWIRNPSAKLWGWRSLGMVKVHSGSLPTGVRRTRGRRTGSSHLCRMGCQTPETASHVLQICPAMVRPRCARHNSALNLLEAYARRKGWPVWLEPHFNLEQRGYRPDLLVVTPRGAFIIDVSVVSGSGQRSLADINASKIRKYEVDALLDAAAALANIQRNQLKVIGATITWRGIWHGKSAKDLIRAGYPLFILEWMTTRVLTGGSFIWSKFRATATGWRATARASGPRGTWS

SEQ ID NO: 4109 - protein, 976 aa, Apolygus lucorum
MASRAQEHQCTHCGRTFHSRIGLSKHTRSAHPEEYAFDEIGPKRCKYWSHEEMTIMATVELELEGTIPGAQMNRALASKMVGRTHKSVEAVRARPHYQNVLEQIRLDATQTPRRTTEELDGSYEISHQQLDEAILAGIPIAQRASEQDEGHQLLISGARAVVQDLDPQNDLLLWISHIIGITPRPPRDHIINNDTTQETRRDKFSRFRRLWDSDRAAIAEDILGNGRAQMRHTGQQLRQYWARQWSAPSSEWTAEEVRHPQDQLMDHIWMPITEDEIRVSEPTRTACGPDGLLAEVWRMVPHSLRKLFFNTILRRGSMPSTLLQARTTMIPKKNMPETEADYRPITGPSVVVRQFHKIIGKRLESSVTHVEQQKGLRRGVDGLALNVLALNKLLVEANRKKRELHIAVLDVEKAFDRVSHFAIMNIMKGRQWPKQLVQYIESIYQNGSTRIGAGPWMYNARGIRQGDPLSSTLFNAVMDHVLLALPNRVGYIHAGQRWSSLAFADDVVLIATSRAGIVAQIVAFNNALKSVGLNLNLRKSIYLPLMPRGHRLVVPAERPSIDVDGQCLRAAPHNVRWIYLGVSFGTQGICRNMPIKMTTILEKIDRAPLKPLQKLVMLRDHGIPSLTHQLVLGSTTLLTLKQMDISVRRYVRKWLRLPFDSANAYIHGPVGDGGLGVMELLSQIPTIRANRVGAANTQLFEGGTSLQQQNGTSRIDRRIARAQRLHQITDGAELVKSRDNGASTAWIRNPSAKLWGWRSLGMVKVHSGSLPTGVRRTRGRRTGSSHLCRMGCQTPETASHVLQICPAMVRPRCARHNSALNLLEAYARRKGWPVWLEPHFNLEQRGYRPDLLVVTPRGAFIIDVSVVSGSGQRSLADINASKIRKYEVDALLDAAAALANIQRNQLKVIGATITWRGIWHGKSAKDLIRAGYPLFILEWMTTRVLTGGSFIWSKFRATATRRRATARASGLRGTWS

SEQ ID NO: 4110 - protein, 924 aa, Apolygus lucorum
MTIMATVELELEGTIPGAQMNRALASKMVGRTLKSVEAVRARPHYQNVLEQVHLDATQPPRRTTEELDGSYEISHQQLDEAILGGIPIAQRASEQDEGHQLLINGARAVVQDLDPQNDLLLWISHIIGITPRPPRDHIINNDTTQETRRDKFSRFRRLWDSDRAAIAEDILGNGRARMRHTGQQLRQYWARQWSAPSSEWTAEEVRHPQDQLMDHIWMPITEDKIRISEPTRTACGPDGLLAEVWRMVPHSLRKLFFNTILRRGSMPSTLLQARTTMIPKKNMPETEADYRPITVPSVVVRQFHKIIGKRLESSVTHVEQQKGLRRGVDGLALNVLALNKLLVEANRKKRELHIAVLDVEKAFDRVSHFAIMNIMKGRQWPKQLVQYIESIYQNGSTRIGAGPWMYNARGIRQGDPLSSTLFNAVMDHVLLALPNRVGYIHAGQRWSSLAFADDVVLIATSRAGIVAQIVAFNNALKSVGLNLNLRKSIYLPLMPRGRRLVVPAERPSIDVDGQCLRAAPHNVRWIYLGVSFGTQGICRNMPMKMTTILEKIDRAPLKPLQKLVMLRDHGIPSLTHQLVLGSTTLLTLKQMDISVRRYVRKWLRLPFDSANAYIHGPVGDGGLGVMELLSQIPTIRANRVGAANTQLFEGGTSLQQQNGTSRIDRRIARAQRLHQTTDGAELVKSRNNGASTAWIRNPSAKLWGWRSLGMVKVHSGSLPTGVRRTRGRRTGSSHLCRMGCQTPETASHVLQICPAVVRPRCARHNSALNLLEAYARRKGWPVWLEPHFNLEQRGYRPDLLVVTPRGAFIIDVSVVSGSGQRSLADINASKIRKYEVDALLDAAAALANIQRNQLKVIGATITWRGIWHGKSAKDLIRAGYPLFILEWMTTRVLTGGSFIWSKFRATATRRRATARASGLRGTWS

SEQ ID NO: 4111 - protein, 976 aa, Apolygus lucorum
MASRAQEHQCTHCGRTFHSRIGLSKHTRSAHPEEYAFDEIGPKRCKYWSHEEMTIMATVELELEGTIPGAQMNRALASKMVGRTHKSVEAVRARPHYQNVLEQIRLDATQTPRRTTEELDGSYEISHQQLDEAILAGIPIAQRASEQDEGHQLLISGARAVVQDLDPQNDLLLWISHIIGITPRPPRDHIINNDTTQETRRDKFSRFRRLWDSDRAAIAEDILGNGRAQMRHTGQQLRQYWARQWSAPSSEWTAEEVRHPQDQLMDHIWMPITEDEIRVSEPTRTACGPDGLLAEVWRMVPHSLRKLFFNTILRRGSMPSTLLQARTTMIPKKNMPETEADYRPITVPSVVVRQFHKIIGKRLESSVTHVDQQKGLRRGVDGLALNVLALNKLLVEANRKKRELHIAVLDVEKAFDRVSHFAIMNIMKGRQWPKQLVQYIESIYQNGSTRIGAGPWMYNARGIRQGDPLSSTLFNAVMDHVLLALPNRVGYIHAGQRWSSLAFADDVVLIATSRAGIVAQIVAFNNALKSVGLNLNLRKSIYLPLMPRGHRLVVPAERPSIDVDGQCLRAAPHNVRWIYLGVSFGTQGICRNMPIKMTTILEKIDRAPLKPLQKLVMLRDHGIPSLTHQLVLGSTTLLTLKQMDISVRRYVRKWLRLPFDSANAYIHGPVGDGGLGVMELLSQIPTIRANRVGAANTQLFEGGTSLQQQNGTSRIDRRIARAQRLHQITDGAELVKSRDNGASTAWIRNPSAKLWGWRSLGMVKVHSGSLPTGVRRTRGRRTGSSHLCRMGCQTPETASHVLQICPAMVRPRCARHNSALNLLEAYARRKGWPVWLEPHFNLEQRGYRPDLLVVTPRGAFIIDVSVVSGSGQRSLADINASKIRKYEVDALLDAAAALANIQQNQLKVIGATITWRGIWHGKSAKDLIRAGYPLFILEWMTTRVLTGGSFIWSKFRATATRRRATARASGLRGTWS

SEQ ID NO: 4112 - protein, 976 aa, Apolygus lucorum
MASRAQEHQCTHCGRTFHSRIGLSKHTRSAHPEEYAFDEIGPKLCKYWSHEEMTIMATVELELEGTIPGAQMNRALASKMVGRTLKSVEAVRARPHYQNVLEQVRLDATQTPRRTTEELDGSYEISHQQLDEAILAGIPIAQRASEQDEGHQLLINGARAVVQDLDPQNDLLLWISHIIGITPRPPRDHIINNDTTQETRRDKFSRFRRLWDSDRAAIAEDILGNGRAQMRHTGQQLRQYWARQWSTPSSEWTAEEVRHPQDQLMDHIWMPITEDEIRVSEPTRTACGPDGLLAEVWRMVPHSLRKLFFNTILHRGSMPSTLLQARTTMIPKKNMPETEADYRPITVPSVVVRQFHKIIGKRLESSVTHVEQQKGLRRGVDGLALNVLALNKLLVEANRKKRELHIAVLDVEKAFDRVSHFAIMNIMRGRQWPKQLVQYIESIYQNGSTRIGAGPWMYNARGIRQGDPLSSTLFNAVMDHVLLALPNRVGYIHAGQRWSSLAFADDVVLIATSRAGIVAQIVAFNNTLKSVGLNLNLRKSIYLPLMPRGRRLVVPTERPSIDVDGQCLRAAPHNVRWVYLGVSFGTQGICRNMPMKMTTILEKIDRAPLKPLQKLVMLRDHGIPSLTHQLVLGSTTLLTLKQMDISVRRYVRKWLRLPFDSANAYIHGPVGDGGLGVMELLSQIPTIRANRVGAANTQLFEEGTSLQQQNGTSRIDRRIARAQRLHQTTDGAELVKSRDNGASTAWIRNPSAKLWGWRSLGMVKVHSGSLPTGVRRTRGRRTGSSHLCRMGCQTPETASHVLQICPAVVRPRCARHNSALNLLEAYARRKGWPVWLEPHFNLEQRGYRPDLLVVTPRGAFIIDVSVVSGSGQRSLADINASKIRKYEVDALLDAAAALANIQRNQLKVIGATITWRGIWHGKSAKDLIRAGYPLFILEWMTTRVLTGGSFIWSKFRATATRRRATARASGLRGTWS

SEQ ID NO: 4113 - protein, 948 aa, Apolygus lucorum
MASRAQEHQCTHCGRTFHSRIGLSKHTRSAHPEEYAFDEIGPKRCKYWSHEEMTIMATVELELEGTIPGAQMNRALASRMVGRTLKSVEAVRARPHYQNVLEQVRLDATQPPRRTTEELDGSYEISHQQLDEAILGGIPIAQRASEQDEGHQLLINGARAVVQDLDPQNDLLLWISHIIGITPRPPRDHIINNDTTQETRRDKFSRFRRLWDSDRAAIAEDILGNGRAQMRHTGQQLRQYWARQWSAPSSEWTAEEVRHPQDQLMDHIWMPITEDEIRIPEPTTTACGPDGLLAEVWRMVPHSLRKLFFNTILRRGSMPSTLLQARTTMIPKKNMPETEADYRPITVPSVVVRQFHKIIGKRLESSVTHVEQQKGLRRGIDGLALNVLALNKLLVEANRKKRELHIAVLDVEKAFDRVSHFAIMNIMKGRQWPKQLVQYIESIYQNGSTRIGAGPWMYNARGIRQGDPLSSTLFNAVMDHVLLALPNRVGYIHAGRRWSSLAFADDVVLIATSRAGIVAQIVAFNNALKSVGLNLNLRKSIYLPLMPRGRRLVVPAERPSIDVDGQCLRAAPHNVRWIYLGVSFGTQGICRNMPMKMTTILEKIDRAPLKPLQKLVMLRDHGIPSLTHQLVLGSTTLLTLKQMDISVRRYVRKWLRLPFDSANAYIHGPVGDGGLGVMELLSQIPTIRANRVGAANTQLFEGGTSLQQQNGKSRIDRQIARAQRLHQTTDGAELVKSRDNGASTAWIRNPSAKLWGWRSLGMVKVHSGSLPTGVRRTRGRRTGSSHLCRMGCQTPETASHVLQICPAVVRPRCARHNSALNLLEAYARHKGWPVWLEPHFNLEQRGYRPDLLVVTPRGAFIIDVSVVSGSGQRSLADINASKIRKYEVDALLDAAAALANIQRNQLKVIGATITWRGIWHGKSAKDLIRAYPGVDDHPSPNRRIIHLV

SEQ ID NO: 4114 - protein, 976 aa, Apolygus lucorum
MASRAQEHQCTHCGRTFHSRIGLSKHTRSAHPEEYAFDEIGPKRCKYWSHEEMTIMATVELELEGTIPGAQMNRALASKMVGRTHKSVEAVRARPHYQNVLEQIRLDATQTPRRTTEELDGSYEISHQQLDEAILAGIPIAQRASEQDEGHQLLISGARAVVQDLDPQNDLLLWISHIIGITPRPPRDHIINNDTTQETRRDKFSRFRKLWDSDRAAIAEDILGNGRAQMRHTGQQLRQYWARQWSAPSSEWTAEEVRHPQDQLMDHIWMPITEDEIRVSEPTRTACGPDGLLAEVWRMVPHSLRKLFFNTILRRGSMPSTLLQARTTMIPKKNMPETEADYRPITVPSVVVRQFHKIIGKRLESSVTHVEQQKGLRRGVDGLALNVLALNKLLVEANRKKRELHIAVLDVEKAFDRVSHFAIMNIMKGRQWPKQLVQYIESIYQNGSTRIGAGPWMYNARGIRQGDPLSSTLFNAVMDHVLLALPNRVGYIHAGQRWSSLAFADDVVLIATSRAGIVAQIVAFNNALKSVGLNLNLRKSIYLPLMPRGHRLVVPAERPSIDVDGQCLRAAPHNVRWIYLGVSFGTQGICRNMPIKMTTILEKIDRAPLKPLQKLVMLRDHGIPSLTHQLVLGSTTLLTLKQMDISVRRYVRKWLRLPFDSANAYIHGPVGDGGLGVMELLSQIPTIRANRVGAANTQLFEGGTSLQQQNGTSRIDRRIARAQRLHQITDGAELVKSRDNGASTAWIRNPSAKLWGWRSLGMVKVHSGSLPTGVRRTRGRRTGSSHLCRMGCQTPETASHVLQICPAMVRPRCARHNSALNLLEAYARRKGWPVWLEPHFNLEQRGYRPDLLVVTPRGAFIIDVSVVSGSGQRSLADINNSKIRKYEVDALLDAAAALANIQRNQLKVIGATITWRGIWHGKSAKDLIRAGYPLFILEWMTTRVLTGGSFIWSKFRATATRRRATARASGLRGTWS

SEQ ID NO: 4115 - protein, 976 aa, Apolygus lucorum
MASRAQEHQCTHCGRTFHSRIGLSKHTRSAHPEEYAFDEIGPKRCKYWSHEEMTIMATVELELEGTIPGAQMNRALASKMVGRTHKSVEAVRARPHYQNVLEQVRLDATQTPQRTTEELDGSYEISHQQLDEAILAGIPIAQRASEQDEGHQLLINGARAVVQDLDPQNDLLLWISHIIGITPRPPRDHIINNDTTQEMRRDKFSRFRRLWDSDRAAIAEDILGSGRAQMRHTGQQLRQYWARQWSAPYSEWTAEEVRHPQDQLMDHIWMPITEDEIRVSEPTRTACGPDGLLAEVWRMVPHSLRKLFFNTILRRGSMPSTLLQARTTMIPKKNMPETEADYRPITVPSVVVRQFHKIIGKRLESSVTHVEQQKGLRRGVDGLALNVLALNKLLVEANRKKRELHIAVLDVEKAFDRVSHFAIMNIMKGRQWPKQLVQYIESIYQNGSTRIGAGPWMYNARGIRQGDPLSSTLFNAVMDHVLLALPNRVGYIHAGQRWSSLAFADDVVLIATSRAGIVAQIVAFNNALKSVGLNLNLRKSIYLPLMPRGRRLVVPAERPSIDVDGQCLRAAPHNVRWIYLGVSFGTQGICRNMPMKMTTILEKIDRAPLKPLQKLVMLRDHGIPSLTHQLVLGSTTLLTLKQMDISVRRYVRKWLRLPFDSANAYIHGPVGDGGLGVMELLSQIPTIRANRVGAANTQLFEGGTSLQQQNGTSRIDRRIARAQRLHQTTDGAELLKSRDNGASTAWIRNPSAKLWGWRSLGMVKVHSGSLPTGVRRTRGRRTGSSHLCRMGCQTPETASHVLQICPAMVRPRCARHNSALNLLEAYARRKGWPVWLEPHFNLEQRGYRPDLLVVTPRGAFIIDVSVVSGSGQRSLADINASKIRKYEVDALLDAAAALANIQRNQLKVIGATITWRGIWYGKSAKDLIRAGYPLFILEWMTTRVLTGGSSIWSKFRATATRRRATARASGLRGTWN

SEQ ID NO: 4116 - protein, 976 aa, Apolygus lucorum
MASRAQEHQCTHCGRTFHSRIGLSKHTRSAHPEEYAFDEIGPKRCKYWSHEEMTIMATVELELEGTIPGAQMNRALASKMVGRTHKSVEAVRARPHYQNVLEQVRLDATQSPRRTTEELDGSYEISHQQLDEAILAGIPIAQRASEQDEGHQLLISGARAVVQDLDPQNDLLLWISHIIGITPRPPRDHIINNDTTQETRRDKFSRFRRLWDSDRAAIAEDILGNGRAQMRHTGQQLRQYWARQWSAPSSEWTAEEVRHPQDQLMDHIWMPITEDEIRVSEPTRTACGPDGLLAEVWRMVPHSLRKLFFNTILRRGSMPSILLQARTTMIPKKNMPETEADYRPITVPSVVVRQFHKIIGKRLESSVTHVEQQKGLRRGVDGLALNVLALNKLLVEANRKKRELHIAVLDVEKAFDRVSHFAIMNIMKGRQWPKQLVQYIESIYQNGSTRIGAGPWMYNARGIRQGDPLSSTLFNAVMDHVLLALPNRVGYIHAGQRWSSLAFADDVVLIATSRAGIVAQIVAFNNALKSVGLNLNLRKSIYLPLMPRGHRLVVPAERPSIDVDGQCLRAAPHNVRWIYLGVSFGTQGICRNMPIKMTTILEKIDRAPLKPLQKLVMLRDHGIPSLTHQLVLGSTTLLTLKQMDISVRRYVRKWLRLPFDSANAYIHGPVGDGGLGVMELLSQIPTIRANRVGAANTQLFEGGTSLQQQNGTSRIDRRIARAQRLHQTTDGAELVKSRDNGASTAWIRNPSAKLWGWRSLGMVKVHSGSLPTGVRRTRGRRTGSSHLCRMGCQTPETASHVLQICPAMVRPRCARHNSALNLLEAYARRKGWPVWLEPHFNLERRGYRPDLLVVTPRGAFIIDVSVVSGSGQRSLADINASKIRKYEVDALLDAAAALANIQRNQLKVIGATITWRGIWHGKSAKDLIRAGYPLFILEWMTTRVLTGGSFIWSKFRATATRRRATARASGLRGTWS

SEQ ID NO: 4117 - protein, 976 aa, Apolygus lucorum
MASRAQEHQCTHCGRTFHSRIGLSKHTRSAHPEEYAFDEIGPKRCKYWSHEEMTIMATVELELEGTIPGAQMNRALASKMVGRTHKSVEAVRARPHYQNVLEQVRLDATQTPQRTTEELDGSYEISHQQLDEAILAGIPIAQRASEQDEGHQLLINGARAVVQDLDPQNDLLLWISHIIGITPRPPRDHIINNDTTQETRRDKFSRFRRLWDSDRAAIAEDILGNGRAQMRHTGQQLRQYWARQWSAPSSEWTAEEVRHPQDQLMDHIWMPITEDEIRVSEPTRTACGPDGLLAEVWRMVPHSLRKLFFNTILRRGSMPSTLLQARTTMIPKKNMPETEADYRPITVPSVVVRQFHKIIGKRLESSVIHVEQQKGLRRGVDGLALNVLALNKLLVEANRKKRELHIAVLDVEKAFDRVSHFAIMNIMKGRQWPKQLVQYIESIYQNGSTRIGAGPWMYNARGIRQGDPLSSTLFNAVMDHVLLALPNRVGYIHAGQRWSSLAFADDVVLIATSRAGIVAQIVAFNNALKSVGLNLNLRKSIYLPLMPRGRRLVVPAERPSIEVDGQCLRAAPHNVRWIYLGVSFGTQGICRNMPMKMTTILEKIDRAPLKPLQKLVMLRDHGIPSLTHQLVLGSTTLLTLKQMDISVRRYVRKWLRLPFDSANAYIHGPVGDGGLGVMELLSQIPTIRANRVGAANTQLFEGGTSLQQQNGTSRIDRRIARAQRLHQTTDGAELLKSRDNGASTAWIRNPSAKLWGWRSVGMVKVHSGSLPTGVRRTRGRRTGSSHLCRMGCQTPETASHVLQICPAMVRPRCARHNSALNLLEAYARRKGWPVWLEPHFNLEQRGYRPDLLVVTPRGAFIIDVSVVSGSGQRSLADINASKIRKYEVDALLDAAAALANIQRNQLKVIGATITWRGIWHGKSAKDLIRAGYPLFILEWMTTRVLTGGSSIWSKFRATATRRRATARASGLRGTWN

SEQ ID NO: 4118 - protein, 976 aa, Apolygus lucorum
MASRAQEHQCTHCGRTFHSRIGLSKHTRSAHPEEYAFDEIGPKRCKYWSHEEMTIMATVELELEGTIPGAQMNRALASKMVGRTHKSVEAVRARPHYQNVLEQVRLDATQTPRRTTEELDGSYEISHQQLDEAILAGIPIAQRASEQDEGHQLLISGARAVVQDLDPQNDLLLWISHIIGITPRPPRDHIINNDTTQETRRDKFSRFRRLWDSDRAAIVEDILGNGRAQMRHTGQQLRQYWARQWSAPSSEWTAEEVRHPQDQLMDHIWMPITEDEIRVSEPTRTACGPDGLLAEVWRMVPHSLRKLFFNTILRRGSMPSTLLQARTTMIPKKNMPETEADYRPITVPSVVVRQFHKIIGKRLESLVTHVEQQKGLRRGVDGLALNVLALNKLLVEANRKKRELHIAVLDVEKAFDRVSHFAIMNIMKGRQWPKQLVQYIESIYQNGSTRIGAGPWMYNARGIRQGDPLSSTLFNAVMDHVLLALPNRVGYIHAGQRWSSLAFADDVVLIATSRAGIVAQIVAFNNALKSVGLNLNLRKSIYLPLIPRGHRLVVPAERPSIDVDGQCLRAAPHNVRWIYLGVSFGTQGICRNMPIKMTTILEKIDRAPLKPLQKLVMLRDHGIPSLTHQLVLGSTTLLTLKQMDISVRRYVRKWLRLPFDSANAYIHGPVGDGGLGVMELLSQIPTIRANRVGAANTQLFEGGTSLQQQNGTSRIDRRIARAQRLHQTTDGAELVKSRDNGASTAWIRNPSAKLWGWRSLGMVKVHSGSLPTGVRRTRGRRTGSSHLCRMGCQTPETASHVLQICPAMVRPRCARHNSALNLLEAYARRKGWPVWLEPHFNLEQRGYRPDLLVVTPRGAFIIDVSVVSGSGQRSLADINASKIRKYEVDALLDAAAALANIQRNQLKVIGATITWRGIWHGKSAKDLIRAGYPLFILEWMTTRVLTGGSFIWSKFRATATRRRATARASGLRGTWS

SEQ ID NO: 4119 - protein, 976 aa, Apolygus lucorum
MASRAQEHQCTHCGRTFHSRIGLSKHTRSAHPEEYAFDEIGPKRCKYWSHEEMTIMATAELELEGTIPGAQMNRALASKMVGRTHKSVEAVRARPHYQNVLEQVRLDATQTPRRTTEELDGSYEISHQQLDEAILAGIPIAQRASEQDEGHQLLISGARAVVQDLDPQNDLLLWISHIIGITPRPPRDHIINNDTTQETRRDKFSRFRRLWDSDRAAIAEDILGNGRAQMRHTGQQLRQYWARQWSAPSSEWTAEEVRHPQDQLMDHIWMPITEDEIRVSEPTRTACGPDGLLAEVWRMVPHSLRKLFFNTILRRGSMPSTLLQARTTMIPKKNMPETEADYRPITVPSVVVRQFHKIIGKRLESSVTHVEQQKGLRRGVDGLALNVLALNKLLVEANRKKRELHIAVLDVEKAFDRVSHFAIMNIMKGRQWPKQLVQYIESIYQNGSTRIGAGPWMYNARGIRQGDPLSSTLFNAVMDHVLLALPNRVGYIHAGQRWSSLAFADDVVLIATSRAGIVAQIVAFNNALKSVGLNLNLRKSIYLPLMPRGHRLVVPAERPSIDVDGQCLRAAPHNVRWIYLGVSFGTQGICRNMPIKMTTILEKIDRAPLKPLQKLVMLRDHGIPSLTHQLVLGSTTLLTLKQMDISVRRYVRKWLRLPFDSANAYIHGPVGDGGLGVMELLSQIPTIRADRVGAANTQLFEGGTSLQQQNGTSRIDRRIARAQRLHQTTDGAELVKSRDNGASTAWIRNPSAKLWGWRSLGMVKVHFGSLPTGVRRTRGRRTGSSHLCRMGCQTPETASHVLQICPAMVRPRCARHNSALNLLEAYARRKGWPVWLEPHFNLEQRGYRPDLLVVTPRGAFIIDVSVVSGSGQRSLADINASKIRKYEVDALLDAAAALANIQRNQLKVIGATITWRGIWHGKSAKDLIRAGYPLFILEWMTTRVLTGGSFIWSKFRATATRRRATARASGLRGTWS

SEQ ID NO: 4120 - protein, 976 aa, Apolygus lucorum
MASRAQEHQCTHCGRTFHSRIGLSKHTRSAHPEEYAFDEIGSKRCKYWSHEEMTIMATVELELEGTIPGAQMNRALASKMVGRTLKSVEAVRARPHYQNVLEQVRLDATQPPRRTTEELDGSYEISHQQLDEAILGGIPIAQRASEQDEGHQLLINGARAVVQDLDPQNDLLLWISHIIGITPRPPRDHIINNDTTQETRRDKFSRFRRLWDSDRAAIAEDILGNGRAQMRHTGQQLRQYWARQWSAPSSEWTAEEVRHPQDQLMDHIWMPITEDEIRISEPTRTACGPDGLLAEVWRMVPHSLRKLFFNTILRRGSMPSTLLQARTTMIPKKNMPETEADYRPITVPSVVVRQFHKIIGKRLESSVTHVEQQKGLRRGVDGLALNVLALNKLLVEANRKKRELHIAVLDVEKAFDRVSHFAIMNIMKGRQWPKQLVQYIESIYQNGSTRIGAGPWMYNARGIRQGDPLSSTLFNAVMDHVLLALPNRVGYIHAGQRWSSLAFADDVVLIATSRAGIVAQIVAFNNALKSVGLNLNLRKSIYLPLMPRGRRLVVPAERPSIDVDGQCLRAAPHNVRWIYLGVSFGTQGICRNMPMKMTTILEKIDRAPLKPLQKLVMLRDHGIPSLTHQLVLGSTTLLTLKQMDISIRRYVRKWLRLPFDSANAYIHGPVGDGGLGVMELLSQIPTIRANRVGAANTQLFEGGTSLQQQNGTSRIDRRIARAQRLHQTTDGAELVKSRDNGASTAWIRNPSAKLWGWRSLGMVKVHSGSLPTGVRRTRGRRTGSSHLCRMGCQTPETASHVLQICPAVVRPRCARHNSALNLLEAYARRKGWPVWLEPHFNLEQRGYRPDLLVVTPRGAFIIDVSVVSGSGQRSLADINASKIRKYEVDALLDAAATLANIQRNQLKVIGATITWRGIWHGKSAKDLIRAGYPLFILEWMTTRVLTGGSFIWYKFRATATRRRTTARASGLRGTWS

SEQ ID NO: 4121 - protein, 976 aa, Apolygus lucorum
MASRAQEHQCTHCGRTFHSRIGLSKHTRSAHPEEYAFDEIGPKRCKYWSHEEMTIMATVELELEGTIPGAQMNRALASKMVGRTHKSVEAVRARPHYQNVLEQVRLDATQTPQRTTEELDGSYEISHQQLDEAILAGIPIAQRASEQDEGHQLLINGARAVVQDLDPQNDLLLWISHIIGITPRPPRDHIINNDTTQETRRDKFSRFRRLWDSDRAAIAEDILGNGRAQMRHTGQQLRQYWARQWSAPSSEWTAEEVRHPQDQLMDHIWMPITEDEIRVSEPTRTACGPDGLLAEVWRMVPHSLRKLFFNTILRWGSMPSTLLQARTTMIPKKNMPETEADYRPITVPSVVVRQFHKIIGKRLESSVTHVEQQKGLRRGVDGLALNVLALNKLLVEANRKKRELHIAVLDVEKAFDRVSHFAIMNIMKGRQWPKQLVQYIESIYQNGSTRIGAGPWMYNARGIRQGDPLSSTLFNAVMDHVLLALPNRVGYIHAGQRWSSLAFADDVVLIATSRAGIVAQIVAFNNALKSVGLNLNLRKSIYLPLMPRGRRLMVPAERPSIDVDGQCLRAAPHNVRWIYLGVSFGTQGICRNMPMKMTTILEKIDRAPLKPLQKLVMLRDHGIPSLTHQLVLGSTTLLTLKQMDISVRRYVRKWLRLPFDSANAYIHGPVGDGGLGVMELLSQIPTIRANRVGAANTQLFEAGTSLQQQNGTSRIDRRIARAQRLHQTTDGAELLKSRDNGASTAWIRNPSAKLWGWRSLGMVKVHSGSLPTGVRRTRGRRTGSSHLCGMGCQTPETASHVLQICPAMVRPRCARHNSALNLLEAYARRKGWPVWLEPHFNLEQRGYRPDLLVVTPRGAFIIDVSVVSGSGQRSLADINASKIRKYEVDALLDAAAALANIQRNQLKVIGATITWRGIWHGKSAKDLIRAGYPLFILEWMTTRVLTGGSSIWSKFRATATRRRATARASGLRGTWN

SEQ ID NO: 4122 - protein, 976 aa, Apolygus lucorum
MASRAQEHQCTHCGRTFHSRIGLSKHTRSAHPEEYAFDEIGPKRCKYWSHEEMTIMATVELELEGTIPGAQMNRALASKMVGRTHKSVEAVRARPHYQNVLEQVRLDATQTPQRTTEELDGSYEISHQQLDEAILAGIPIAQRASEQDEGHQLLINGARAVVQDLDPQNDLLLWISHIIGITPRPPRDHIINNDTTQETRRDKFSRFRRLWDSDRAAIAEDILGNGRAQMRHTGQQLRQYWARQWSAPSSEWTAEEVRHPQDQLMDHIWMPITEDEIRVSEPTRTACGPDGLLAEVWRMVPHSLRKLFFNTILRRGSMPSTLLQARTTMIPKKNMPETEADYRPITVPSVVVRQFHKIIGKRLESSVTHVEQQKGLRRGVDGLALNVLALNKLLVEANRKKRELHIAVLDVEKAFDRVSHFAIMNIMKGRQWPKQLVQYIESIYQNGSTRIGAGPWMYNARGIRQGDPLSSTLFNAVMDHVLLALPNRVGYIHAGQRWSSLAFADDVVLIATSRAGIVAQIVAFNNALKSVGLNLNLRKSIYLPLMPRGRRLVVPAERPSIDVDGQCLRAAPHNVRWIYLGVSFGTQGICRNMPMKMTTILEKIDRAPLKPLQKLVMLRDHGIPSLTHQLVLGSTTLLTLKQMDISVRRYVRKWLRLPFDSANAYIHGPVGDGGLGVMELLSQIPTIRANRVGAANTQLFEGGTSLQQQNGTSRIDRRIARAQLLHQTTDGAELLKSRDNGASTAWIRNPSAKLWGWRSLGMVKVHSGSLPTGVRRTRGRRTGSSHLCRMGCQTPETASHVLQICPAMVRPRCARHNSALNLLEAYARRKGWPVWLEPHFNLEQRGYRPDLLVVTPRGAFIIDVSVVSGSGQRSLADINASKIRKYEVDALLDAAAALANIQRNQLKVIGATITWRGIWHGKSAKDLIRAGYPLFILEWMTTRVLTGGSSIWSKFRATATRRRATARASGLRGTWN

SEQ ID NO: 4123 - protein, 962 aa, Apolygus lucorum
MASRAQEHQCTHCGRTFHSRIGLSKHSRSAHPEEYAFDEIGPKRCKYWSHEEMTIMATVELELEGTIPGAQMNRALASKMVGRTHKSVEAVRARPHYQNVLEQIRLDATQTPRRTTEELDGSYEISHQQLDEAILAGIPIAQRASEQDEGHQLLISGARAVVQDLDPQNDLLLWISHIIGITPRPPRDHIINNDTTQETSGGAIAEDILGNGRAQMRHTGQQLRQYWARQWSAPSSEWTAEEVRHPQDQLMDHIWMPITEDEIRVSEPTLTACGPDGLLAEVWRMVPHSLRKLFFNTILRRGSMPSTLLQARTTMIPKKNMPETEADYRPITVPSVVVRQFHKIIGKRLESSVTHVEQQKGLRRGVDGLALNVLALNKLLVEANRKKRELHIAVLDVEKAFDRVSHFAIMNIMKGRQWPKQLVQYIESIYQNGSTRIGAGPWMYNARGIRQGDPLSSTLFNAVMDHVLLALPNRVGYIHAGQRWSSLAFADDVVLIATSRAGIVAQIVAFNNALKSVGLNLNLRKSIYLPLMPRGHRLVVPAERPSIDVDGQCLRAAPHNVRWIYLGVSFGTQGICRNMPIKMTTILEKIDRAPLKPLQKLVMLRDHGIPSLTHQLVLGSTTLLTLKQMDISVRRYVRKWLRLPFDSANAYIHGPVGDGGLGVMELLSQIPTIRANRVGAANTQLFEGGTSLQQQNGTSRIDRRIARAQRLHQITDGAELVKSRDNGASTAWIRNPSAKLWGWRSLGMVKVHSGSLPTGVRRTRGRRTGSSHLCRMGCQTPETASHVLQICPAMVRPRCARHNSALNLLEAYARRKGWPVWLEPHFNLEQRGYRPDLLVVTPRGAFIIDVSVVSGSGQRSLADINASKIRKYEVDALLDAAAALANIQRNQLKVIGATITWRGIWHGKSAKDLIRAGYPLFILEWMTTRVLTGGSFIWSKFRATATRRRATARASGLRGTWS

SEQ ID NO: 4124 - protein, 976 aa, Apolygus lucorum
MASRAQEHQCTHCGRTFHSRIGLSKHTRSAHPEEYAFDEIGPKRCKYWSHEEMTIMATVELELEGTIPGAQMNRALASKMVGRTLKSVEAVRARPHYQNVLEQVRLDATQPPRRTTEELDGSYEISHQQLDEAILGGIPIAQRASEQDEGHQLLINGARAVVQDLDPQNDLLLWISHIIGITPRPPRDHIINNDTTQETRRDKFSRFRRLWDSDRAAIAEDILGNGRAQMRHTGQQLRQYWARQWSAPSSEWTAEEVRHPQDQLMDHIWMPITEDEIRISEPTRTACGPDGLLAEVWRMVPHSLRKLFFNTILRRGSMPSTLLQARTTMIPKKNMPETEADYRPITVPSVVVRQFHKIIGKRLESSVTHVEQQKGLRRGVDGLALNVLALNKLLVEANRKKRELHIAVLDVEKAFDRVSHFAIMNIMKGRQWPKQLVQYIESIYQNGSTRIGAGPWMYNARGIRQGDPLSSTLFNAVMDHVLLALPNRVGYIHAGQRWSSLAFADDVVLIATSRAGIVAQIVAFNNALKSVGLNLNLRKSIYLPLMPRGRRLVVPAERPSIDVDGQCLRAAPHNVRWIYLGVSFGTQGICRNMPMKMTTILEKIDRAPLKPLQKLVMLRDHGIPSLTHQLVLGSTTLLTLKQMDISVRRYVRKWLRLPFDSANAYIHGPVGDGGLGVMELLSQIPTIRANRVGAANTQLFEGGTSLQQQNGTSRIDRRIARAQRLHQTTDGAELVKSRDNGASTAWIRNPSAKLWGWRSLGMVKVHSGSLPTGVRRTRGRRTGSSHLCRMGCQTPETASHVLQICPAVVRPRCARHNSALNLLEAYARRKGWPVWLEPHFNLEQRGYRPDLLVVTPRGAFIIDVSVVSGSGQRSLADINASKIRKYEVDALLDAAAALANIQRNQLKVIGATITWRGIWHGKSAKDLIRAGYPLFILEWMTTRVLTGGSFIWSKFRATATRRRATARASGLRGTWS

SEQ ID NO: 4125 - protein, 976 aa, Apolygus lucorum
MASRAQEHQCTHCGRTFHSRIGLSKHTRSAHPEEYAFDEIGPKRCKYWSHEEMTIMATVELELEGTIPGAQMNRALASKMVGRTHKSVEAVRARPHYQNVLEQIRLDATQTPRRTTEELDGSYEISHQQLDEAILAGIPIAQRASEQDEGHQLLISGARAVVQDLDPQNDLLLWISHIIGITPRPPRDHIINNDTTQETRRDKFSRFRRLWDSDRAAIAEDILGNGRAQMRHTGQQLRQYWARQWSAPSSEWTAEEVRHPQDQLMDHIWMPITEDEIRVSEPTRTACGPDGLLAEVWRMVPHSLRKLFFNTILRRGSMPSTLLQARTTMIPKKNMPETEADYRPITVPSVVVRQFYKIIGKRLESSVTHVEQQKGLRRGVDGLALNVLALNKLLVEANRKKRELHIAVLDVEKAFDRVSHFAIMNIMKGRQWPKQLVQYIESIYQNGSTRIGAGPWMYNARGIRQGDPLSSTLFNAVMDHVLLALPNRVGYIHAGQRWSSLAFADDVVLIATSRAGIVAQIVAFNNALKSVGLNLNLRKSIYLPLMPRGHRLVVPAERPSIDVDGQCLRAAPHNVRWIYLGVSFGTQGICRNMPIKMTTILEKIDRAPLKPLQKLVMLRDHGIPSLTHQLVLGSTTLLTLKQMDISVRRYVRKWLRLPFDSANAYIHGPVGDGGLGVMELLSQIPTIRANRVGAANTQLFEGGTSLQQQNGTSRIDRRIARAQRLHQITDGAELVKSRDNGASTAWIRNPSAKLWGWRSLGMVKVHSGSLPTGVRRTRGRRTGSSHLCRMGCQTPETASHVLQICPAMVRPRCARHNSALNLLEAYARRKGWPVWLEPHFNLEQRGYRPDLLVVTPRGAFIIDVSVVSGSGQRSLADINASKIRKYEVDALLDAAAALANIQRNQLKVIGATITWRGIWHGKSAKDLIRAGYPLFILEWMTTRVLTGGSFIWSKFRATATRRRATARASGLRGTWS

SEQ ID NO: 4126 - protein, 976 aa, Apolygus lucorum
MASRAQEHQCTHCGRTFHSRIGLSKHTRSAHPEEYAFDEIGPKRCKYWSHEEMTIMATVELELEGTIPGAQMNRALASKMVGRTLKSVEAVRARPHYQNVLEQVRLDATQPPRRTTEELDGSYEISHQQLDEAILGGIPIAQRASEQDEGHQLLINGARAVVQDLDPQNDLLLWISHIIGITPRPPRDHIINNDTTQETRRDKFSRFRRLWDSDRAAIAEDILGNGRAQMRHTGQQLRQYWARQWSAPSSEWTAEEVRHPQDQLMDHIWMPITEDEIRISEPTRTACGPDGLLAEVWRMVPHSLRKLFFNTILRRGSMPSTLLQARTTMIPKKNMPETEADYRPITVPSVVVRQFHKIIGKRLESSVTHVEQQKGLRRGVDGLALNVLALNKLLVEANRKKRELHIAVLDVEKAFDRVSHFAIMNIMKGRQWPKQLVQYIESIYQNGSTRIGAGPWMYNARGIRQGDPLSSTLFNAVMDHVLLALPNRVGYIHAGQRWSSLAFADDVVLIATSRAGIVAQIVAFNNALKSVGLNLNLRKSIYLPLMPRGRRLVVPAERPSIDVDGQCLRAAPHNVRWIYLGVSFGAQGICRNMPMKMTTILEKIDRAPLKPLQKLVMLRDHGIPSLTHQLVLGSTTLLTLKQMDISVRRYVRKWLRLPFDSANAYIHGPVGDGGLGVMELLSQIPTIRANRVGAANTQLFEGGTSLQQQNGTSRIDRRIARAQRLHQTTDGAELVKSRDNGASTAWIRNPSAKLWGWRSLGMVKVHSGSLPTGVRRTRGRRTGSSHLCRMGCQTPETASHVLQICPAVVRPRCARHNSALNLLEAYARRKGWPVWLEPHFNLEQRGYRPDLLVVTPRGAFIIDVSVVSGSGQRSLADINASKIRKYEVDALLDAAAALANIQRNQLKVIGATITWRGIWHGKSAKDLIRAGYPLFILEWMTTRVLTGGSFIWSKFRAKATRRRATARASGLRGTWS

SEQ ID NO: 4127 - protein, 905 aa, Apolygus lucorum
MNRALASKMVGRTHKSVEAVRARPHYQNVLEQIRLDATQTPRRTTEELDGSYEISHQQLDEAILAGIPIAQRASEQDEGHQLLISGARAVVQDLDPQNDLLLWISHIIGITPRPPRDHIINNDTTQETRRDKFSRFGRLWDSDRAAIAEDILGNGRAQMRHTGQQLRQYWARQWSAPSSEWTAEEVRHPQDQLMDHIWMPITEDEIRVSEPTRTACGPDGLLAEVWRMVPHSLRKLFFNTILRRGSMPSTLLQARTTMIPKKNMPETEADYRPITVPSVVVRQFHKIIGKRLESSVTHVEQQKGLRRGVDGLALNVLALNKLLVEANRKKRELHIAVLDVEKAFDRVSHFAIMNIMKGRQWPKQLVQYIESIYQNGSTRIGAGPWMYNARGIRQGDPLSSTLFNAVMDHVLLALPNRVGYIHAGQRWSSLAFADDVVLIATSRAGIVAQIVAFNNALKSVGLNLNLRKSIYLPLMPRGHRLVVPAERPSIDVDGQCLRAAPHNVRWIYLGVSFGTQGICRNMPIKMTTILEKIDRAPLKPLQKLVMLRDHGIPSLTHQLVLGSTTLLTLKQMDISVRRYVRKWLRLPFDSANAYIHGPVGDGGLGVMELLSQIPTIRANRVGAANTQLFEGRTSLQQQNGTSRIDRRIARAQRLHQTTDGAELVKSRDNGASTAWIRNPSAKLWGWRSLGMVKVHSGSLPTGVRRTRGRRTGSSHLCRMGCQTPETASHVLQICPAMVRPRCARHNSALNLLEAYARRKGWPVWLEPHFNLEQRGYRPDLLVVTPRGAFIIDVSVVSGSGQRSLADINASKIRKYEVDALLDAAAALANIQRNQLKVIGATITWRGIWHGKSAKDLIRAGYPLFILEWMTTRVLTGGSFIWSKFRATATRRRATARASGLRGTWS

SEQ ID NO: 4128 - protein, 747 aa, Apolygus lucorum
MRHTGQQLRQYWARQWSAPSSEWTAEEVRHPQDQLMDHIWMPITEDEIRISEPTRTACGPDGLLAEVWRMVPHSLRKLFFNTILRRGSMPSTLLQARTTMIPKKNMPETEADYRPITVPSVVVRQFHKIIGKRLESSVTHVEQQKGLRRGVDGLALNVLALNKLLVEANRKKRELHIAVLDVEKAFDRVSHFAIMNIMKGRQWPKQLVQYIESIYQNGSTRIGAGPWMYNARGIRQGDPLSSTLFNAVMDHVLLALPNRVGYIHAGQRWSSLAFADDVVLIATSRAGIVAQIVAFNNALKSVGLNLNLRKSIYLPLMPRGRRLVVPAERPSIDVDGQCLRAAPHNVRWIYLGVSFGTQGICRNMPMKMTTILEKIDRAPLKPLQKLVMLRDHGIPSLTHQLVLGSTTLLTLKQMDISIRRYVRKWLRLPFDSANAYIHGPVGDGGLGVMKLLSQIPTIRANRVGAANTQLFEGGTSLQQQNGTSRIDRRIARAQRLHQTTDGAELVKSRDNGASTAWIRNPSAKLWGWRSLGMVKVHSGSLPTGVRRTRGRRTGSSHLCRMGCQTPETASHVLQICPAVVRPRCARHNSALNLLEAYARRKGWPVWLEPHFNLEQRGYRPDLLVVTPRGAFIIDVSVVSASGQRSLADINASKIRKYEVDALLDAAATLANIQRNQLKVIGATITWRGIWHGKSAKDLIRAGYPLFILEWMTTRVLTGGSFIWYKFRATATRRRTTARASGLRGTWS

SEQ ID NO: 4129 - protein, 976 aa, Apolygus lucorum
MASRAQEHQCTHCGRTFHSRIGLSKHTRSAHPEEYAFDEIGPKRCKYWSHEEMTIMATVELELEGTIPGAQMNRALASKMVGRTHKSVEAVRARPHYQNVLEQVRLDATQTPRRTTEELDGSYEISHQQLDEAILAGIPIAQRASEQDEGHQLLISGARAVVQDLDPQNDLLLWISHIIGITPRPPRDHIINNDTTQETRRDKFSRFRRLWDSDRAAIAEDILGNGRAQMRHTGQQLRQYWARQWSAPSSEWTAEEVRHPQDQLMDHIWMPITEDEIRVSEPTRTACGPDGLLAEVWRMVPHSLRKLFFNTILRRGSMPSTLLQARTTMIPKKNMPETVADYRPITVPSVVVRQFHKIIGKRLESSVTHVEQQKGLRRGVDGLALNVLALNKLLVEANRKKRELHIAVLDVEKAFDRVSHFAIMNIMKGRQWPKQLVQYIESIYRNGSTRIGAGPWMYNARGIRQGDPLSSTLFNAVMDHVLLALPNRVGYIHAGQRWSSLAFADDVVLIATSRAGIVAQILAFNDALKSVGLNLNLRKSIYLPLMPRGHRLVVPAERPSIDVDGQCLRAAPHNVRWIYLGVSFSTQGICRNMPIKMTTILEKIDRAPLKPLQKLVMLRDHGIPSLTHQLVLGSTTLLTLKQMDISVRRYVRKWLRLPFDSANAYIHGPVGDGGLGVMELLSQIPTIRANRVGAANTQLFEGGTSLQQQNGTSRIDRRIARAQRLHQTTDGAELVKSRDNGASTAWIRNPSAKLWGWRSLGMVKVHSGSLPTGVRRTRGRRTGSSHLCRMGCQTPETASHVLQICPAMVRPRCARHNSALNLLEAYARRKGWPVWLEPHFNLEQRGYRPDLLVVTPRGAFIIDVSVVSGSGQRSLADINASKIRKYEVDALLDAAAALANIQRNQLKVIGATITWRGIWHGKSAKDLIRAGYPLFILEWMTTRVLTGGSFIWSKFRATATRRRATARANGLRGTWS

SEQ ID NO: 4130 - protein, 924 aa, Apolygus lucorum
MTIMATVELELEGTIPGAQMNRALASKMVGRTLKSVEAVRARPHYQNVLEQVRLDATQPPRRTTEELDGSYEISHQQLDEAILGGIPIAQRASEQDEGHQLLINGARAVVQDLDPQNDLLLWISHIIGITPRPPRDHIINNDTTQETRRDKFSRFRRLWDSDRAAIAEDILGNGRAQMRHTGQQLRQYWARQWSAPSSEWTAEEVRHPQDQLMDHIWMPITEDEIRISEPTRTACGPDGLLAEVWRMVPHSLRKLFFNTILRRGSMPFTLLQARTTMIPKKNMPETEADYRPITVPSVVVRQFHKIIGKRLESSVTHVEQQKGLRRGVDGLALNVLALNKLLVEANRKKRELHIAVLDVEKAFDRVSHFAIMNIMKGRQWPKQLVQYIESIYQNGSTRIGAGPWMYNARGIRQGDPLSATLFNAVMDHVLLALPNRVGYIHAGQRWSSLAFADDVVLIATSRAGIVAQIVAFNNALKSVGLNLNLRKSIYLPLMPRGRRLVVPAERPSIDVDGQCLRAAPHNVRWIYLGVSFGTQGICRNMPMKMTTILQKIDRAPLKPLQKLVMLRDHGIPSLTHQLVLGSTTLLTLKQMDISVRRYVRKWLRLQFDSANAYIHGPVGDGGLGVMELLSQIPTIRANRVGVANTQLFEGGTSLQQQNGTSRIDRRIARAKRLHQTTDGAELVKSRDNGASTAWIRNPSAKLWGWRSLGMVKVHSGSLPTGVRRTRGRRTGSSHLCRMGCQTPETASHVLQICPAVVRPRCARHNSALNLLEAYARRKGWPVWLEPHFNLEQRGYRPDLLVVTPRGAFIINVSVVSGSGQRSLADINASKIRKYEVDALLDAAAALANIQRNQLKVIGPTITWRGIWHGKSAKDLIRAGYPLFILEWMTTRVLTGGSFIWSKFRATATRRRATARASGLRGTWS

SEQ ID NO: 4131 - protein, 976 aa, Apolygus lucorum
MASRAQEHQCTHCGRTFHSRIGLSKHTRSAHPEEYAFDEIGPKRCKYWSHEEMTIMATVELELEGTIPGAQMNRALASKMVGRTHKSVEAVRARPHYQNVLEQVRLDATQPPRRTTEELDGSYEISHQQLDEAILGGIPIAQRASEQDEGHQLLINGARAVVQDLDPQNDLLLWISHIIGITPRPPRDHIINNDTTQETRRDKFSRFRRLWDSDRAAIAEDILGNGRAQMRHTGQQLRQYWARQWSAPSSEWTAEEVRHPQDQLMDHIWMPITEDEIRISEPTRTACGPDGLLAEVWRMVPHSLRKLFFNTILRRGSMPSTLLQARTTMIPKKNMPETEADYRPITVPSVVVRQFHKIIGKRLESSVTHVEQQKGLRRGVDGLALNVLALNKLLVEANRKKRELHIAVLDVEKAFDRVSHFAIMNIMKGRQWPKLLVQYIESIYQNGSTRIGAGPWMYNARGIRQGDPLSSTLFNAVMDHVLLALPNRVGYIHAGQRWSSLAFADDVVLIATSRAGIVAQIVAFNNALKSVGLNLNLRKSIYLPLMPRGRRLVVPAERPSIDVDGQCLRAAPHNVRWIYLGVSFGTQGICRNMPMKMTTILEKIDRAPLKPLQKLVMLRDHGIPSLTHQLVLGSTTLLTLKQMDISVRRYVRKWLRLPFDSANAYIHGPVGDGGLGVMELLSQIPTIRANRVGAANTQLFEGGTSLQQQNGTSRIDRRIARAQRLHQTTDGAELVKSRDNGASTAWIRNPSAKLWGWRSLGMVKVHSGSLPTGVRRTRGRRTGSSHLCRMGCQTPETASHVLQICPAVVRPRCARHNSALNLLEAYARRKGWPVWLEPHFNLEQRGYRPDLLVVTPRGAFIIDVSVVSGSGQRSLADINASKIRKYEVDALLDAAAALANIQRNQLKVIGATITWRGIWHGKSAKDLIRAGYPLFILEWMTTRVLTGGSFIWSKFRATATRRRATARASGLRGTWS

SEQ ID NO: 4132 - protein, 976 aa, Apolygus lucorum
MASRAQEHQCTHCGRTFHSRIGLSKHTRSAHPEEYAFDEIGPKRCKYWSHEEMTIMATVELELEGTIPGAQMNRALASKMVGRTLKSVEAVRARPHYQNVLEQVRLDATQTPRRTTEELDGSYEISHQQLDEAILAGIPIAQRASEQDEGHHLLINGARAVVQDLDPQNDLLLWISHIIGITPRPPRDHIINNDTTQETRRDKFSRFRRLWDSDRAAIAEDILGNGRAQMRHTGQQLRQYWARQWSTPSSEWTAEEVRHPQDQLMDHIWMPITEDEIRVSEPTRTACGPDGLLAEVWRMVPHSLRKLFFNTILRRGSMPSTLLQARTTMIPKKNMPETEADYRPITVPSVVVRQFHKIIGKRLESSVTHVEQQKGLRRGVDGLALNVLALNKLLVEANRKKRELHIAVLDVEKAFDRVSHFAIMNIMKGRQWPKQLVQYIESIYQNGSTRIGAGPWMYNARGIRQGDPLSSTLFNAVMDHVLLALPNRVGYIHAGQRWSSLAFADDVVLIATSRAGIVAQIVAFNNALKSVGLNLNLRKSIYLPLMPRGRRLVVPAERPSIDVDGQCLRAAPHNVRWIYLGVSFGTQGICRNMPMKMTTILEKIDRAPLKPLQKLVMLRDHGIPSLTHQLVLGSTTLLTLKQMDISVRRYVRKWLRLPFDSANAYIHGPVGDGGLGVMELLSQIPTIRANRVGAANTQLFEGGTSLQQQNGTSRIDRRIARAQRLHQTTDGAELVKSRDNGASTAWIRNPSAKLWGWRSLGMVKVHSGSLPTGVRRTRGRRTGSSHLCRMGCQTPETASHVLQICPAVVRPRCARHNSALNLLEAYARRKGWPVWLEPHFNLEQRGYRPDLLVVTPRGAFIIDVSVVSGSGQRSLADINASKIRKYEVDALLDAAAALANIQRNQLKVIGATITWRGIWHGKSAKDLIRAGYPLFILEWMTTRVLTGGSFIWSKFRATATRRRATARASGLRGTWS

SEQ ID NO: 4133 - protein, 1247 aa, Campodea augens
METRSRRYHLRSLPGDRQGTSGADAGCDSMRTIGGVELHGRALTGTPENTTTEMRNEELLTNQADAEGVSVEAHALLSQTTKAGKQRQRMKWTTDINIFIMRSYYYVTNLETDMTLYRRKLYDKFNEEYPLINVTEQRIADQRRTIERNNLIPAAQLVELRRQIAAELKSEREATECDKNPEEDRNHEALHVSLSSNSTVASTEEDKENEILRISNHESCENLELIRSLTFNFETALIQFAGSDPTCRPKLPKVSTSRKLSKTIAIFNKHILPKSISYESSVIDIHTAVYCSVAAILKHLGIKMKQQQQTNKKCYRKYVPPWQKRLESDIEFIRKDIGRLTQYQNNNKSKKVIRQVTTIMQKIGTHTAYDNQNSSVLECLDTLKQKLALKVHRLKRYKKSQARKDHNKLFISNEKKFYRNLNENNNFRANAGGVPTKEELTRYWSNIWSNKFEHHKDSTWIEEELKDTIDVPKMNFREITTEDLTRVLKKAHNWKSPGIDNIQNFWYKRFTSIHGVLAKCFTHLIRNPHDVPHFFMQGITFMLPKNEDTSDPSQYRPITCLPTIYKLLLACITNEIYEHVEGNSILTEQQKGCRRNHMGCKEQLLIDNVILKQTAKQNRHLHLAYVDYKKAFDSVPHSWLIHVLHLYKVDPIIIDCLKIVMTQWETKLHLSNGMTDLTTEIIKIKRGIYQGDSLSPLWFCLALNPLSKMLNSTQYGFDIRHNKSIKSTLSHLLYMDDIKIYAKTETQLQHLLDITARFSSDVGMEFGLSKCNILHIEKGVVKKGDYNVNRSELIKSMAEDEVYKYLGLLQAKLTEHKIIKNNLTKEYLSRLNSILKTSLNSKNTIKAINTFAIPILTYSFGVINWSKTDIESLQIKTRVELSKYRFHHPKSAVERTTIPRHMGGRGLIDLLMLHDKQIHSLRSFFYQKSETSPLHKAVATADSNLTPLNLANKNLLDISTQEHLQHKIVTWTQKELHGRHANDLNQPHVDKESSNKWLSLGELYGETEGFMIAIQDQVIKTKNYAKYILKDPKVKDDRCRRCNNMSETIQHITSGCTTLAQTDYTHRHNQIANIIHQKLAIKYQLLSETQTTAYYKYQPCAVLENNDFKLYYDRSILTDRTIHNNRPDIVLQDKIHRTTYLIDIAVPNTHNLQKTVSEKIRKYSDLSEEVARVWEMKKVVIVPIVISATGVIPKQLLTNLTLLELPEQTYILMQKAAILNTCRIVRKFLNLNIDNTIDTNMDIQRLI

SEQ ID NO: 4134 - protein, 945 aa, Portunus trituberculatus
MGDDKSPTCPICRQSFKDYKGRRVHQRVAHPREFHGEEAQALSAGSRRVRWDPEELAMMAAYEALHLGARNINKEIRERVLPHRTIDAIKGARKAESYRAQVRLKSLEGPGAASAPVPQDSAEPPNDHHIGSMILTTPENGASGDEPSFHPMTEDVIYIYVSDLSRALGLTIPSRIEEVEAQVDIWGPPCAYVYKEPGSGGPVSTNKKAKKKRDYRRIQKFWRKERGRAVKEIITGIPDGPPLIPPGMKDYWAGLFGRASLEELRSPDAVRPTLDVDGPICEDEIKRALKTIKPSTAPGPDGRRREDVSALSLDQLGWAMNTMLLLKDVPQSWAMGRTTLIPKTPEAKDPGDFRPITITSILLRMFHKILRARLMGAAPLPLEQKGFAPEEGVAANILLLQELIKNATLNKTDLCVTFLDFKKAFDSVSHPSLVAATKRWGFPPRLTEYISTLYGKAQTNIMGDTCPIRRGVLQGDPLSPYLFNIMLDWALSQVPTDVRARLAGTPLSYIAYADDVALTASTPSGLKASLNVLVQEAAKVGLELGIPKCATLTIRGDGKRKRWLVDAYTVFTACGTNIKALGPGETYKYLGLEMGVALGQAKTRRALATLIKDLGAVQKGPLKPQQKLWSLKYVLIPKHQYCLVLDRTKRGTLERYDAEIRKFIKKALHLPHDTPNAAIYAKICDGGLGVPRLSALVPLLRRGTLERSCKSHDPRVARIAEAILLSTPGLDSKEQKKANAMTTRNALYASADGRGLSGADKSPSTHEWVDNGCLLMRGSTYISVIKTRLGVINTRLRSSRGRPGAPVSCDLGCGRFESLGHILQSCPKLAPERTARHDQVLALLVKQLSRKNYNILKEPNIRTTAGVRKPDVVVFDQNQSVVLDVQIVSDNSIRDALVHAHGLKKSYYDVGEIRSWVRERTGLNPVFTTLTINWQGIMATPSYMA

SEQ ID NO: 4135 - protein, 981 aa, Callinectes sapidus
MSVDNIEGVNSPTCPICLKTFANYRGRRFHQRSQHPDVFHTEEVETLSAGSRKVRWDPGELAMMASFESQNPGIRYINQAIKARVLPHRTIESIKGARKTGEYKARLRALETQMEDSASAPAVPVSPTFSDGPNSPLIPGPGNSDLEPPPPNMTEDVISTYVHELSSALGLTVPTRIDEVEAQVDLWCPPRAYAYRPPGTGNPVSQNKKAKKKRDYRRIQRLCRKERGRAVKEIITGIPDGPPIIPPGMKDFCEGLFGRSSLHESRSPPAMRPTLNVTGPITEDEIKRALKNTKPSTAPGPDGRRREEVSALSLQRLGWAFNTLLLLKDVPQSWAMGRTTLIPKSPEAREPSDYRPITITSLLLRLYHKIIVARLMAAAPLPMEQKGFAPEEGVAANILLLQKLINDATSNKTNLCVAFIDFKKAFDSVSHPSLVAATKRWGFPAELTEYIRTLYEKACTNIMGNTCPIRRGGLQGDPLSPYLFNITLDWALSQVPAGVGARLAGIPIPYIAYADDVALTASTTCGLQASLNELAQGAAAVGLEIGLPKCATFYIRGDGKRKRWLVDSKTTFEVGGSKIKALGPGEKYKYLGLEVGPAMGHTEPRRALAALIKDLGSLQRAPLKPQQKLWSLKNVIIPKHQYPRVLGRTTKGNLERMDCEVRKFIKKTLHLPKDTPNAALYTKTCEGGLGVPRLTVLIPALKRGALERLHKSHDERVAKIAEVLLQTPSLTSKEQKEAAALQHKTKLYASVDGRGLSEAGKSPPTHEWVDDGTVLMRGSTYISAIKTRLGVANTRLRASRGRPNAPVHCDLGCGRIESLGHILQSCPKLAPERTMRHDKVLSLLVQQLNSKQHQILREPNIRTSAGVRKPDVVVWNQRQSVVLDVQIVSDSSTGESLDRAHGLKRSYYDVGEIRDWAIQRTGLPPVFATLTINWRGIMATPSYMALKSLGLSKRDIHLLTVRCMEGSVATLRSHRDLGGWG

SEQ ID NO: 4136 - protein, 981 aa, Callinectes sapidus
MSVEGRGGDNSPTCPICLKSFTNFRGRRVHERSQHPESFHREEVEALSAASRKVRWDPGELALMATFESQNPGVRFMNQEIRAQVLPHRSIEAIKGARKTRAYKDRLEALRTRGGPSGPAPGAPASPTPASGSASPVTPRAGPPDLEPPTQSSAEDVICTYVQELSISLGLTVPSRIDEVEAQVDLWCPPRAYAYRPPGVGNQVSQEKKAKRKRQYRRIQRLWRKERGRAVKEIITGIPDGPPIIPPRMKEFWAGLFGRSSLHESRSPSATRPTLNVTGPITEDEIKRAIKTTKPSTAPGPDGRRREDVSALSLERLGWAYNTILLLKDVPQSWARGRTTLIPKNPEAKEPGDFRPITITSLLLRIYHKILVARLMAAAPLPMEQKGFAPEEGVAANILLLQELINSATSNKTNLCVAFIDFKKAFDSVSHPSLVAATKRWGFPPELTEYIRTLYDKASTSIMGDTCPIRRGVLQGDPLSPYLFNITLDWALSQVPADVGARLAGTPIPYIAYADDVALTASTPCGLQASLNALAQGAAGVGLEIGLPKCATLYIRGDGKRKRWLVDTKTTFEVSGEKLKALGPGETYKYLGLELGPAVGRAEPRRALAALIKDLGSIQVAPLKPQQKLWALKNVVIPKHQYSRVLGKTTKGNLQRMDCEVRKFVKKALHLPKDTPNAGIYTRTCEGGLGVPRLTVLIPALKRGALERLCKSHDYRVARTAEALLQTPSLTSKELREQANIAHKQQLYASADGRGLSEADGSPPTHGWVDDGTLLMRGATYINAIKTRLGVVNTKLRSSRGRSQAPVLCDLGCGRIESLGHILKTCPRLAPERTHRHDRVLSLFLEQLKKHNHQVLREPNIRTQAGLRKPDVVVWNQRQSVVLDVQITSDSSLEKSLEVAHGLKRSYYDVGEIREWVRTKTGHAPVFATLTINWRGIMATPSYMALKTLGLSKKDLHLLTVRSLEGSVATLRSHRGMGGWG

SEQ ID NO: 4137 - protein, 981 aa, Callinectes sapidus
MSVDNIEGVNSPTCPICLKTFANYRGRRVHQRSQHPDVFHTEEVETLSAGSRKVRWDPGELAMMASFESQNPGIRYINQAIKARVLPHRTIESIKGARKTGEYKARLRALETQREDSASAPAVPVSPTFSDGPNSPLIPGPGNSDLEPPPPNMTEDVISTYVHELSSALGLTVPTRIDEVEAQVDLWCPPRAYAYRPPGTGNPVSQNKKAKKKRDYRRIQRLWRKERGRDVKEIITGIPDGPPIIPPGMKDFWEGLFGRSSLHESRSPPGMRPTLNVTGPITEDEIKRALKNTKPSTAPGPDGRRREEVSALSLQRLGWAFNTLLLLKDVPQSWAMGRTTLIPKSPEAREPSDYRPITITSLLLRLYHKIIVARLMAAAPLPMEQKGFAPEEGVAANILLLQKLINDATSNKTNLCVAFIDFKKAFDSVSHPSLVAATKRWGFPAELTEYIRTLYEKACTNIMGNTCPIRRGVLQGDPLSPYLFNITLDWALSQVPAGVGARLAGIPIPYIAYADDVALTASTPCGLQASLNELAQGAAAVGLEIGLPKCATFYIRGDGKRKRWLVDSKTTFEVGGSKIKALGPGEKYKYLGLEVGPAMGHTEPRRALAALIKDLGSLQRAPLKPQQKLWSLKNVIIPKHQYPRVLGRTTKGNLERMDCEVRKFIKKALHLPKDTPNAALYTKTCEGGLGVPRLTVLIPALKRGAFERLHKSHDERVAKIAEVLLQIPSLTSKEQKEAAALQHKTKLYASVDGRGLSEAGKSPPTHEWVEDGTVLMRGSTYISAIKTRLGVANTRLRASRGRPNAPVHCDLWCGRIESLGHILQSCPKLAPERTMRHDKVLSLLVQQLNSKHHQILREPNIRTSAGVRKPDVVVWNQRQSVVLDVQIVSDSSTGESLDRAHGLKRSYYDVGEIRNREIQRTGLLPVFATLTINWRGIMATPSYMALKSLGLSKRDIHLLTVRCMEGSVATLRSHRDLGGWG

SEQ ID NO: 4138 - protein, 1044 aa, Chelmon rostratus
MEQKARVRWPRANDSKEWEAVDRDLSVILSRLRGDVVEKLDKIGDVIYSYGRERFGVLVKRKGERVQVGKSRRQREIEKLVKERRQLRKQWRKATEEEREGIKVLQEELRSRLAVLRRAEHLREKRKKKERARSAFFRNPFNFVKGLFNQEKGGQLKATKSEIEQYLKSTYSDSKENRNIGLPPDMPPLGEVEQEMDVSPPRWREVVEVVRRAKASSAPGPNGVPYRVYKSAPGILRTLWRYLRIVWEKQSIPRAWRRAGGVFIPKEKESSDLSQFRMISLLNVEGKIFFSIVAQRLAKYLERNGMIDTTVQKAGIPGFAGCLEHTSMIWHQIQTAKREKRDLNVVFLDLANAFGSVPHNLIWSSFDYFKVPEIVVNLVKAYFQDIRLCASIAELTTGWQRLEVGIMAGCTVSPLAFTMAMEVVIRASKWVVGGERRQNGMRLPPIRAYMDDMTLLTSTVPCTRRLLDKVNQNLKWASMKIKPSKSRSISIYRGKVSDRKFAIDGEEIPTIREKSVKSLGRWYNVDLNDVEQVVQFRKDVAEGLERIDKSGLPGKLRLWCLQFGLYPRLMWPMSVYEVPLSVAERMERLVSSYIRKWLGAPRCLSNVALYGKGMLQLPVSSLTEEFKCTKVRTELLLSGSKDMLVSNVVPNPSGGRKWNPRAAVQEAEAALRHAEIVGNVQFGRGGLGLGPGKPVWNKAGLKEKRKLVVEQVRRQEELLKGAKAVGQAKQGQWLNWEGVEKRKLSWRDLWNMEEGRIKFLIGATYDVLPTPQNLSLWVQGDQSCPLCSGTASLKHILSGCRISLSQGRYTWRHNQVLRSLAAGIEERRKQVNSGSSRKERLDVQFVREGEKNRAAKSGRKQVGGCLVGADDWQMQVDLGGKLVVPQEIVYSNLRPDIVLWSMSKKTVYFIELTVPWENSVEAAYERKKTKYADLKTESEQRGWKTRVCPVEVGCRGFVAGSAVSLLRELGVHGQNLRKTVREMSDEAARSSQWIWIRRNNSSWGGGGGAGRGHACLTRQEKRLKSEQDTSPLLCFLRPIFSLCQ

SEQ ID NO: 4139 - protein, 1006 aa, Chelmon rostratus
MEQKARVKWPRANDSKEWEAVDRDLSVILSRLRGDVVEKLDKIGDVIYSYGRERFGVLVKRKGERVQVGKSRRQREIEKLVKERRQLRKQWRKATEEEREGIKVLQEELRSRLAVLRRAEHLREKRKKKERARSAFFRNPFNFVKGLFNQEKGGQLKATKSEIEQYLKSTYSDSKENRNIGLPPDMPPLGEVEQEMDVSPPRWREVVEVVRRAKASSAPGPNGVPYRVYKSAPGILRTLWRYLRIVWEKQSIPRAWRRAGGVFIPKEKESSDLSQFRMISLLNVEGKIFFSIVAQRLAKYLERNGMIDTTVQKAGIPGFAGCLEHTSMIWHQIQTAKREKRDLNVVFLDLANAFGSVPHNLIWSSFDYFKVPEIVVNLVKAYFQDIRLCASIAELTTGWQRLEVGIMAGCTVSPLAFTMAMEVIIRASKWVVGGERRQNGMRLPPIRAYMDDMTLLTSTVPCTRRLLDKVNQNLKWASMKIKPSKSRSISIYRGKVSDRKFAIDGEEIPTIREKSVKSLGRWYNVDLNDVEQVVQFRKDVAEGLERIDKSGLPGKLRLWCLQFGLYPRLMWPMSVYEVPLSVAERMERLVSSYIRKWLGAPRCLSNVALYGKGMLQLPVSSLTEEFKCTKVRTELLLSGSKDMLVSNVVPNPSGGRKWNPRAAVQEAEAALRHAEIVGNVQFGRGGLGLGPGKPVWNKAGLKEKRKLVVEQVRRQEELLRGAKAVGQAKQGQWLNWEGVEKRKLSWRDLWNMEEGRIKFLIGATYDVLPTPQNLSLWVQGDQSCPLCSGTASLKHILSGCRISLSQGRYTWRHNQVLRSLAAGIEERRKQVNSGSSRKERLDVQFVREGEKNKAAKSGRKQGGGCLVGADDWQMQVDLGGQLVVPQEILYSNLRPDIVLWSMSKKTVYFIELTVPWENSVEAAYERKKTKYADLKTESEQRGWKTRVCPVEVGCRGFVAGSAVSLLRELGVHGQNLRKTVREMSDEAARSSQWIWIRRNNSSWGVK

SEQ ID NO: 4140 - protein, 1150 aa, Chelmon rostratus
MVTNRITDMTMPWIHDSVRDGGTDPSLRARGSSTQVTGKATKESKSCAAEDKKLQVCPCGWQKITSIRGLRTHQGRRKCLAVEGQSGRIDQYFLRSQSNQSDEVQRQVENHSSQDISNTIPGEEEVRRGDAVGVEGNRPAKERSMEQKARVKWPRANDSKEWEAVDRDLSVILSRLRGDVVEKLDKIGDVIYSYGRERFGVLVKRKGERVQVGKSRRQREIEKLVKERRQLRKQWRKATEEEREGIKVLQEELRSRLAVLRRAEHLREKRKKKERARSAFFRNPFNFVKGLSNQEKGGQLKATKSEIEQYLKSTYSDSKENRNIGLPPDMPPLGEVEQEMDVSPPRWREVVEVVRRAKASSAPGPNGVPYRVYKSAPGILRTLWRYLRIVWEKQSIPRAWRRAGGVFIPKEKESSDLSQFRMISLLNVEGKIFFSIVAQRLAKYLERNGMIDTTVQKAGIPGFAGCLEHTSMIWHQIQTAKREKRDLNVVFLDLANAFGSVPHNLIWSSFDYFKVPEIVVNLVKAYFQDIRLCASIAELTTGWQRLEVGIMAGCTVSPLAFTMAMEVIIRASKWVVGGERRQNGMRLPPIRAYMDDMTLLTSTVPCTRRLLDKVNQNLKWASMKIKPSKSRSISIYRGKVSDRKFAIDGEEIPTIREKAVKSLGRWYNVDLNDVEQVVQFRKDVAEGLERIDKSGLPGKLRLWCLQFGLYPRLMWPMSVYEVPLSVAERMERLVSSYIRKWLGAPRCLSNVALYGKGMLQLPVSSLTEEFKCTKVRTELLLSGSKDMLVSNVVPNPSGGRKWNPRAAVQEAEAALRHAEIVGNVQFGRGGLGLGPGKPVWNKAGLKEKRKLVVEQVRRQEELLRGAKAVGQAKQGQWLNWEGVEKRKLSWRDLWNMEEGRIKFLIGATYDVLPTPQNLSLWVQGDQSCPLCSGTASLKHILSGCRISLSQGRYTWRHNQVLRSLAAGIEERRKQVNSGSSRKERLDVQFVREGEKNKAAKSGRKQGGGCLVGADDWQMQVDLGGQLVVPQEIVYSNLRPDIVLWSMSKKTVYFIELTVPWENSVEAAYERKKTKYADLKTESEQRGWKTRVCPVEVGCRGFVAGSAVSLLRELGVHGQNLRKTVREMSDEAARSSQWIWIRRNNSSWGVK

SEQ ID NO: 4141 - protein, 819 aa, Chelmon rostratus
MPPLGEVEQEMDVSPPRWREVVEVVRRAKASSAPGPNGVPYRVYKSAPGILRTLWRYLRIVWEKQSIPRAWRRAGGVFIPKEKESSDLSQFRMISLLNVEGKIFFSIVAQRLAKYLERNGMIDTTVQKAGIPGFAGCLEHTSMIWHQIQTAKREKRDLNVVFLDLANAFGSVPHNLIWSSFDYFKVPEIVVNLVKAYFQDIRLCASIAELTTGWQRLEVGIMAGCTVSPLAFTMAMEVIIRASKWVVGGERRQNGMRLPPIRAYMDDMTLLTSTVPCTRRLLDKVNQNLKWASMKIKPSKSRSISIYRGKVSDRKFAIDGEEIPTIREKSVKSLGRWYNVDLNDVEQVVQFRKDVAEGLERIDKSGLPGKLRLWCLQFGLYPRLMWPMSVYEVPLSVAERMERLVSSYIRKWLGAPRCLSNVALHGKGMLQLPVSSLTEEFKCTKVRTELLLSGSKDMLVSNVVPNPSGGRKWNPRAAVQEAEAALRHAEIVGNVQFGRGGLGLGPGKPVWNKAGLKEKRKLVVEQVRRQEELLRGAKAVGQAKQGQWLNWEGVEKRKLSWRDLWNMEEGRIKFLIGATYDVLPTPQNLSLWVQGDQSCPLCSGTASLKHILSGCRISLSQGRYTWRHNQVLRSLAAGIEERRKQVNSGSSRKERLDVQFVREGEKNRAAKSGRKQGGGCLVGADDWQMQVDLGGQLVVPQEIVYSNLRPDIVLWSMSKKTVYFIELTVPWENSVEAAYERKKTKYAYLKTESEQRGWKTRVCPVEVGCRGFVAGSAVSLLRELGVHGQNLRKREMSDEAARSSQWIWIRRNNSSWGVK

SEQ ID NO: 4142 - protein, 1150 aa, Chelmon rostratus
MVTNRITDMTMPWIHDSVRDGGTDPSLRARGSSTQVTGKATKESKSCAAEDKKLQVCPCGWQKITSIRGLRTHQGRRKCLAVEGQSGRIDQYFLRSQSNQSDEVQRQVENHSSQDISNTIPGEEEVRRGDAVGVEGNRPAKERSMEQKARVKWPRANDSKEWEAVDRDLSVILSRLRGDVVEKLDKIGDVIYSYGRERFGVLVKRKGERVQVGKSRRQREIEKLVKERRQLRKQWRKATEEEREGIKVLQEELRSRLAVLRRAEHLREKRKKKERARSAFFRNPFNFVKGLFNQEKGGQLKATKSEIEQYLKSTYSDSKENRNIGLPPDMPPLGEVEQEMDVSPPRWREVVEVVRRAKASSAPGPNGVPYRVYKSAPGILRTLWRYLRIVWEKQSIPRAWRRAGGVFIPKEKESSDLSQFRMISLLNVEGTIFFSIVAQRLAKYLEGNGMIDMTVQKAGIPGFAGCLEHTSMIWHQIQTAKREKRDLNVVFLDLANAFGSVPHNLIWSSFDYFKVPEIVVNLVKAYFQDIRLCASIAELTTGWQRLEVGIMAGCTVSPLAFTMAMEVIIRASKWVVGGERRQNGMRLPPIRAYMDDMTLLTSTMPCTRRLLDKVNQNLKWASMKIKPSKSRSISIYRGKVSDRKFAIDGEEIPTIREKSVKSLGRWYNVDLNDVEQVVQFRKDVAEGLERIDKSGLPGKLRLWCLQFGLYPRLMWPMSVYEVPLSVAERMERLVSSYIRKWLGAPRCLSNVALYGKGMLQLPVSSLTEEFKCTKVRTELLLSGSKDMLVSNVVPNPSGGRKWNPRAAVQEAEAALRHAEIVGNVQFGRGGLGLGPGKPVWNKAGLKEKRKLVVEQVRRQEELLRGAKAVGQAKQGQWLNWEGVEKRKLSWRDLWNMEEGRIKFLIGATYDVLPTPQNLSLWVQGDQSCPLCSGTASLKHILSGCRISLSQGRYTWRHNQVLRSLAAGIEERRKQVNSGSSRKERLDVQFVREGEKNKAAKSGRKQVGGCLVGADDWQMQVDLGGKLVVPQEIVYSNLRPDIVLWSMSKKTVYFIELTVPWENSVEAAYERKKTKYADLKTESEQRGWKTRVCPVEVGCRGFVAGSAVSLLRELGVHGQNLRKTVREMSDEAARSSQWIWIRRNNSSWGVK

SEQ ID NO: 4143 - protein, 819 aa, Epinephelus lanceolatus
MDVRPPRWKEVQEVVRRAKASSAPGPNGVPYRVYKSAPDTLKFLWKQLRIVWEKQIIPRAWRRAGGVLIPKEKESVDLSQFRMISLLNVEGKIFFSVVAQRLASYLERNSLIDTMVQKAGIPGFSGCLEHTSMIWHQIQAAKINKRDLHVIFLDLANAFGSVPHSLIWSAFDYFRVPQVVVNLVKAYFQDIRLCLSTAGFTTGWQRLEIGIMAGCTISPLAFTMAMEVIIRASKWVVGGERRQNGLHLPPVRAYMDDMTLVTTTMPCTKRLLEKVNKNLKWASMKIKPSKSRSISICRGKLSDRKFVIDDEDIPTIREKSVKSLGRWYNVELNDKEQVVKFRKDVAEGLDRIDKSELPGKLKLWCLQFGLYPRLMWPLSVYEIPISVVERMERSVSSYIRKWLGAPRCLSSVALYGKGILQLPVSSLTEEFKCTKVRTELLLSGSKDVVVRSVVPNPTKGRKWNPRSAVQEAEAALRHAEIVGNVQFGRGGLGLGSGKPVWNTAGLKDKRKLVVEQIRRQEEIVRGAKVVAQAKQGQWLNWESVEKRKLSWRDLWSMEENRIRFLVGATYDVLPTPQNLKLWVNEDPSCPLCSRTATLKHILSGCKVSLSQGRYTWRHNQVLKCLAAGIEGKRRQVNSEGVKDRGLVIQFVREGEKYRRDKLVRRQGCGRLEGACDWEMQVDLGGKLVVPQEIVCTRQRPDLVLWSVSQQIVYFIELTVPWEDSVEEAYERKKLRYADLGAEAEQRGWKTRICPVEVGCRGFIARSTVSLLGELGVRGQNLRKTVREMSDEAIKCSQFIYYRRNNVSWGPAGGTTKQGT

SEQ ID NO: 4144 - protein, 1113 aa, Epinephelus lanceolatus
MLQVCPCGWQKVTSVKGLRTHQGKKKCVAKKGQSSRIDQYFLRSQSSQSDEVQRQVESHSLQDISNAATEEEEEEEEEEGVVREDAGDTEASMLARERTMEQKVRVRWPRANDSKEWEIVNRDLSVILSRLRGNAIQRLEKMGDIMYSYGVERFGVHERKRSERVQSGKSRRQREIEKLVKERRQLRKQWKKATEEEREGIKVLQEELRSRLAVLRRAEHLRKKRRKKEYARTGFFRDPFKFVKGLFSQEKGGQLKAERLEVEEYLRNTYSDLEKNRIVGFPPDIPPLGGIEHEMDVRPPRWKEVQEVVRRAKASSAPGPNGVPYRVYKSAPDTLKFLWKQLRIVWEKQIIPRAWRRAGGVLIPKEKESVDLSQFRMISLLNVEGKIFFSVVAQRLASYLERNSLIDTMVQKAGIPGFSGCLEHTSMIWHQIQAAKINKRDLHVIFLDLANAFGSVPHSLIWSAFDYFRVPQVVVNLVKAYFQDIRLCLSTAGFTTGWQRLEIGIMAGCTISPLAFTMAMEVIIRASKWVVGGERRQNGLHLPPVRAYMDDMTLVTTTMPCTKRLLEKVNKNLKWASMKIKPSKSRSISICRGKLSDRKFVIDDEDIPTIREKSVKSLGRWYNVELNDKEQVVKFRKDVAEGLDRIDKSELPGKLKLWCLQFGLYPRLMWPLSVYEIPISVVERMERSVSSYIRKWLGAPRCLSSVALYGKGILQLPVSSLTEEFKCTKVRTELLLSGSKDVVVRSVVPNPTKGRKWNPRSAVQEAEAALRHAEIVGNVQFGRGGLGLGSGKPVWNTAGLKDKRKLVVEQIRRQEEIVRGAKVVAQAKQGQWLNWESVEKRKLSWRDLWSMEENRIRFLVGATYDVLPTPQNLKLWVNEDPSCPLCSRTATLKHILSGCKVSLSQGRYTWRHNQVLKCLAAGIEGKRRQVNSEGVKDRGLVIQFVREGEKYRRDKLVRRQGCGRLEGACDWEMQVDLGGKLVVPQEIVCTRQRPDLVLWSVSQQIVYFIELTVPWEDSVEEAYERKKLRYADLGAEAEQRGWKTRICPVEVGCRGFIARSTVSLLGELGVRGQNLRKTVREMSDEAIKCSQFIYYRRNNVSWGPAGGTTKQGT

SEQ ID NO: 4145 - protein, 1150 aa, Chelmon rostratus
MVTNRITDMTMPWIHDSVRDGGTDPSLRARGSSTQVTGKATKESKSCAAEDKKLQVCPCGWQKITSIRGLRTHQGRRKCLAVEGQSGRIDQYFLRSQSNQSDEVQRQVENHSSQDISNTIPGEEEVRRGDAVGVEGNRPAKERSMEQKARVKWPRANDSKEWEAVDRDLSVILSRLRGDVVEKLDKIGDVIYSYGRERFGVLVKRKGERVQVGKSRRQREIEKLVKERRQLRKQWRKATEEEREGIKVLQEELRSRLAVLRRAEHLREKRKKKERARSAFFRNPFNFVKGLFNQEKGGQLKATKSEIEQYLKSTYSDSKENRNIGLPPDMPPLGEVEQEMDVSPPRWREVVEVVRRAKASSAPGPNGVPYRVYKSAPGILRTLWRYLRIVWEKQSIPRAWRRAGGVFIPKEKESSDLSQFRMISLLNVEGKIFFSIVAQRLAKYLERNGMIDTTVQKAGIPGFAGCLEHTSMIWHQIQTAKREKRDLNVVFLDLANAFGSVPHNLIWSSFDYFKVPEIVVNLVKAYFQDIRLCASIAELTTGWQRLEVGIMAGCTVSPLAFTMAMEVIIRASKWVVGGERRQNGMRLPPIRAYMDDMTLLTSTVPCTRRLLDKVNQNLKWASMKIKPSKSRSISIYRGKVSDRKFAIDGEEIPTIREKSVKSLGRWYNVDLNDVEQVVQFRKDVAEGLERIDKSGLPGKLRLWCLQFGLYPRLMWPMSVYEVPLSVAERMERLVSSYIRKWLGAPRCLSNVALYGKGMLQLPVSSLTEEFKCTKVRTELLLSGSKDMLVSNVVPNPSGGRKWNPRAAVQEAEAALRHAEIVGNVQFGRGGLGLGPGKPVWNKAGLKEKRKLVVEQVRRQEELLRGAKAVGQAKQGQWLNWEGVEKRKLSWRDLWNMEEGRIKFLIGATYDVLPTPQNLSLWVQGDQSCPLCSGTASLKHILSGCRISLSQGRYTWRHNQVLRSLAAGIEERRKQVNSGSSRKERLDVQFVREGEKNKAAKSGRKQGGGCLVGADDWQMQVDLGGQLVVPQEIVYSNLRPDIVLWSMSKKTVYFIELTVPWENSVEAAYERKKTKYADLKTESEQRGWKTRVCPVEVGCRGFVAGSAVSLLRELGVHGQNLRKTVREMSDEAARSSQWIWIRRNNSSWGVK

SEQ ID NO: 4146 - protein, 1150 aa, Chelmon rostratus
MVTNRITDMTMPWIHDSVRDGGTDPSLRARGSSTQVTGKATKESKSCAAEDKKLQVCPCGWQKITSIRGLRTHQGRRKCLAVEGQSGRIDQYFLRSQSNQSDEVQRQVENHSSQDISNTIPGEEEVRRGDAVGVEGNRPAKERSMEQKARVKWPRANDSKEWEAVDRDLSVILSRLRGDVVEKLDKIGDVIYSYGRERFGVLVKRKGERVQVGKSRRQREIEKLVKERRQLRKQWRKATEEEREGIKVLQEELRSRLAVLRRAEHLREKRKKKERARSAFFRNPFNFVKGLFNQEKGGQLKATKSEIEQYLKSTYSDSKENRNIGLPPDMPPLGEVEQEMDVSPPRWREVVEVVRRAKASSAPGPNGVPYRVYKSAPGILRTLWRYLRIVWEKQSIPRAWRRAGGVFIPKEKESSDLSQFRMISLLNVEGKIFFSIVAQRLAKYLERNGMIDTTVQKAGIPGFAGCLEHTSMIWHQIQTAKREKRDLNVVFLDLANAFGSVPHNLIWSSFDYFKVPEIVVNLVKAYFQDIRLCASIAELTTGWQRLEVGIMAGCTVSPLAFTMAMEVIIRASKWVVGGERRQNGMRLPPIRAYMDDMTLLTSTVPCTRRLLDKVNQNLKWASMKIKPSKSRSISIYRGKVSDRKFAIDGEEIPTIREKAVKSLGRWYNVDLNDVEQVVQFRKDVAEGLERRDKSGLPGKLRLWCLQFGLYPRLMWPMSVYEVPLSVAERMERLVSSYIRKWLGAPRCLSNVALYGKGMLQLPVSSLTEEFKCTKVRTELLLSGSKDMLVSNVVPNPSGGRKWNPRAAVQEAEAALRHAEIVGNVQFGRGGLGLGPGKPVWNKAGLKEKRKLVVEQVRRQEELLRGAKAVGQAKQGQWLNWEGVEKRKLSWRDLWNMEEGRIKFLIGATYDVLPTPQNLSLWVQGDQSCPLCSGTASLKHILSGCRISLSQGRYTWRHNQVLRSLAAGIEERRKQVNSGSSRKERLDVQFVREGEKNKAAKSGRKQGGGCLVGADDWQMQVDLGGQLVVPQEIVYSNLRPDIVLWSMSKKTVYFIELTVPWENSVEAAYERKKTKYADLKTESEQRGWKTRVCPVEVGCRGFVAGSAVSLLRELGVHGQNLRKTVREMSDEAARSSQWIWIRRNNSSWGVK

SEQ ID NO: 4147 - protein, 1006 aa, Chelmon rostratus
MEQKARVRWPRANDSKEWEAVDRDLSVILSRLRGDVVEKLDKIGDVIYSYGRERFGVLVKRKGERVQVGKSRRQREIEKLVKERRQLRKQWRKATEEEREGIKVLQEELRSRLAVLRRAEHLREKRKKKERARSAFFRNPFNFVKGLFNQEKGGQLKATKSEIEQYLKSTYSDSKENRNIGLPPDMPTLGEVEQEMDVSPPRWREVVEVVRRAKASSAPGPNGVPYRVYKSAPGILRTLWRYLRIVWEKQSIPRAWRRAGGVFIPKEKESSDLSQFQMISLLNVEGKIFFSIVAQRLAKYLERNGMIDTTVQKAGIPGFAGCLEHTSMIWHQIQTAKREKRDLNVVFLDLANAFGSVPHNLIWSSFDYFKVPEIVVNLVKAYFQDIRLCASIAELTTGWQRLEVGIMAGCTVSPLAFTMAMEVIIRASKWVVGGERRQNGMRLPPIRAYMDDMTLLTSTVPCTRRLLDKVNQNLKWASMKIKPSKSRSISIYRGKVSDRKFAIDGEEIPTIREKSVKSLGRWYNVDLNDVEQVVQFRKDVAEGLERIDKSGLPGKLRLWCLQFGLYPRLMWPMSVYEVPLSVAERMERLVSSYIRKWLGAPRCLSNVALYGKGMLQLPVSSLTEEFKCTKVRTELLLSGSKDMLVSNVVPNPSGGRKWNPRAAVQEAEAALRHAEIVGNVQFGRGGLGLGPGKPVWNKAGLKEKRKLVVEQVRRQEELLRGAKAVGQAKQGQWLNWEGVEKRKLSWRDLWNMEEGRIKFLIGATYDVLPTPQNLSLWVQGDQSCPLCSGTASLKHILSGCRISLSQGRYTWRHNQVLRSLAAGIEERRKQVNTGSSRKERLDVQFVREGEKNRAAKSGRKQVGGCLVGADDWQMQVDLGGKLVVPQEIVYSNLRPDIVLWSMSKKTVYFIELTVPWENSVEAAYERKKTKYADLKTESEQRGWKTRVCPVEVGCRGFVAGSAVSLLRELGVHGQNLRKTVREMSDEAARSSQWIWIRRNNSSWGVK

SEQ ID NO: 4148 - protein, 1150 aa, Chelmon rostratus
MVTNRITDMTMPWIHDSVRDGGTDPSLRARGSSTQVTGKATKESKSCAAEDKKLQVCPCGWQKITSIRGLRTHQGRRKCLAVEGQSGRIDQYFLRSQSNQSDEVQRQVENHSSQDISNTIPGEEEVRRGDAVGVEGNRPAKERSMEQKARVKWPRANDSKEWEAVDRDLSVILSRLRGDVVEKLDKIGDVIYSYGRERFGVLVKRKGERVQVGKSRRQREIEKLVKERRQLRKQWRKATEEEREGIKVLQEELRSRLAVLRRAEHLREKRKKKERARSAFFRNPFNFVKGLFNQEKGGQLKATKSEIEQYLKSTYSDSKENRNIGLPPDMPPLGEVEQEMDVSPPRWREVVEVVRRAKASSAPGPNGVPYRVYKSAPGILRTLWRYLRIVWEKQSIPRAWRRAGGVFIPKEKESSDLSQFRMISLLNVEGKIFFSIVAQRLAKYLERNGMIDTTVQKAGIPGFAGCLEHTSMIWHQIQTAKREKRDLNVVFLDLANAFGSVPHNLIWSSFDYFKVPEIVVNLVKAYFQDIRLCASIAELTTGWQRLEVGIMAGCTVSPLAFTMAMEVIIRASKWVVGGERRQNGMRLPPIRAYMDDMTLLTSTVPCTRRLLDKVNQNLKWASMKIKPSKSRSISIYRGKVSDRKFAIDGEEIPTIREKAVKSLGRWYNVDLNDVEQVVQFRKDVAEGLERIDKSGLPGKLRLWCLQFGLYPRLMWPMSVYEVPLSVAERMERLVSSYIRKWLGAPRCLSNVALYGKGMLQLPVSSLTEEFKCTKVRTELLLSGSKDMLVSNVVPNPSGGRKWNPRAAVQEAEAALRHAEIVGNVQFGRGGLGLGPGKPVWNKAGLKEKRKLVVEQVRRQEELLRGAKAVGQAKQGQWLNWEGVEKRKLSWRDLWNMEEGRIKFLIGATYDVLPTPQNLSLWVQGDQSCPLCSGTASLKHILSGCRISLSQGRYTWRHNQVLRSLAAGIEERRKQVNSGSSRKERLDVQFVREGEKNKAAKSGRKQGGGCLVGADDWQMQVDLGGQLVVPQEIVYSNLRPDIVLWSMSKKTVYFIELTVPWENSVEAAYERKKTKYADLKTESEQRGWKTRVCPVEVGCRGFVAGSAVSLLRELGVHGQNLRKTVREMSDEAARSSQWIWIRRNNSSWGVK

SEQ ID NO: 4149 - protein, 1148 aa, Epinephelus lanceolatus
MTWTGDSVKDRGTDLSTSARISSTQGKVSASVEGKSSIVENKMLQVCPCGWQKVTSVKGLRTHQGKKKCVAKKGQSSRIDQYFLRSQSSQSDEVQRQVENHSSQDISNAATEEEGVVREDAGDTEASMLARERTMEQKVRVRWPRANDSKEWEIVNRDLSVILSRLRGNAIQRLEKMGDIMYSYGVERFGVHERKRSERVQSGKSRRQREIEKLVKERRQLRKQWKKATEEEREGIKVLQEELRSRLAVLRRAEHLRKKRRKKEYARTGFFRDPFKFVKGLFSQEKGGQLKAERLEVEEYLRNTYSDLEKNRIVGFPPDIPPLGGIEHEMDVRPPRWKEVQEVVRRAKASSAPGPNGVPYRVYKSAPDTLKFLWKQLRIVWEKQIIPRAWRRAGGVLIPKEKESVDLSQFRMISLLNVEGKIFFSVVAQRLASYLERNSLIDTMVQKAGIPGFSGCLEHTSMIWHQIQAAKINKRDLHVIFLDLANAFGSVPHSLIWSAFDYFRVPQVVVNLVKAYFQDIRLCLSTAGFTTGWQRLEIGIMAGCTISPLAFTMAMEVIIRASKWVVGGERRQNGLHLPPVRAYMDDMTLVTTTMPCTKRLLEKVNKNLKWASMKIKPSKSRSISICRGKLSDRKFVIDDEDIPTIREKSVKSLGRWYNVELNDKEQVVKFRKDVAEGLDRIDKSELPGKLKLWCLQFGLYPRLMWPLSVYEIPISVVERMERSVSSYIRKWLGAPRCLSSVALYGKGILQLPVSSLTEEFKCTKVRTELLLSGSKDVVVRSVVPNPTKGRKWNPRSAVQEAEAALRHAEIVGNVQFGRGGLGLGSGKPVWNTAGLKDKRKLVVEQIRRQEEIVRGAKVVAQAKQGQWLNWESVEKRKLSWRDLWSMEENRIRFLVGATYDVLPTPQNLKLWVNEDPSCPLCSRTATLKHILSGCKVSLSQGRYTWRHNQVLKCLAAGIEGKRRQVNSEGVKDRGLVIQFVREGEKYRRDKLVRRQGCGRLEGACDWEMQVDLGGKLVVPQEIVCTRQRPDLVLWSVSQQIVYFIELTVPWEDSVEEAYERKKLRYADLGAEAEQRGWKTRICPVEVGCRGFIARSTVSLLGELGVRGQNLRKTVREMSDEAIKCSQFIYYRRNNVSWGPAGGTTKQGT

SEQ ID NO: 4150 - protein, 1121 aa, Epinephelus lanceolatus
MTWTGDSVKDRGTDLSTSARISSTQGKVSASVEGKSSIVENKMLQVCPCGWQKVTSVKGLRTHQGKKKCVAKKGQSSRIDQYFLRSQSSQSDEVQRQVENHSSQDISNAATEEEGVVREDAGDTEASMLARERTMEQKVRVRWPRANDSKEWEIVNRDLSVILSRLRGNAIQRLEKMGDIMYSYGVERFGVHERKRSERVQSGKSRRQREIEKLVKERRQLRKQWKKATEEEREGIKVLQEELRSRLAVLRRAEHLRKKRRKKEYARTGFFRDPFKFVKGLFSQEKGGQLKAERLEVEEYLRNTYSDLEKNRIVGFPPDIPPLGGIEHEMDVRPPRWKEVQEVVRRAKASSAPGPNGVPYRVYKSAPDTLKFLWKQLRIVWEKQIIPRAWRRAGGVLIPKEKESVDLSQFRMISLLNVEGKIFFSVVAQRLASYLERNSLIDTMVQKAGIPGFSGCLEHTSMIWHQIQAAKINKRDLHVIFLDLANAFGSVPHSLIWSAFDYFRVPQVVVNLVKAYFQDIRLCLSTAGFTTGWQRLEIGIMAGCTISPLAFTMAMEVIIRASKWVVGGERRQNGLHLPPVRAYMDDMTLVTTTMPCTKRLLEKVNKNLKWASMKIKPSKSRSISICRGKLSDRKFVIDDEDIPTIREKSVKSLGRWYNVELNDKEQVVKFRKDVAEGLDRIDKSELPGKLKLWCLQFGLYPRLMWPLSVYEIPISVVERMERSVSSYIRKWLGAPRCLSSVALYGKGILQLPVSSLTEEFKCTKVRTELLLSGSKDVVVRSVVPNPTKGRKWNPRSAVQEAEAALRHAEIVGNVQFGRGGLGLGSGKPVWNTAGLKDKRKLVVEQIRRQEEIVRGAKVVAQAKQGQWLNWESVEKRKLSWRDLWSMEENRIRFLVGATYDVLPTPQNLKLWVNEDPSCPLCSRTATLKHILSGCKVSLSQGRYTWRHNQVLKCLAAGIEGKRRQVNSEGVKDRGLVIQFVREGEKYRRDKLVRRQGCGRLEGACDWEMQVDLGGKLVVPQEIVCTRQRPDLVLWSVSQRIVYFIELTVPWEDSVEEAYERKKLRYADLGAEAEQRGWKTRICPVEVGCRGFIARSAVSLLGELGVQGQSLRKTEHKILVFI

SEQ ID NO: 4151 - protein, 1150 aa, Chelmon rostratus
MVTNRITDMTMPWIHDSVRDGGTDPSLRARGSSTQVTGKATKESKSCAAEDKKLQVCPCGWQKITSIRGLRTHQGRRKCLAVEGQSGRIDQYFLRSQSNHSDEVQRQVENHSSQDISNTIPGEEEVRRGDAVGVEGNRPAKERSMEQKARVRWPRANDSKEWEAVDRDLSVILSRLRGDVVEKLDKIGDVIYSYGRERFGVLVKRKGERVQVGKSRRQREIEKLVKERRQLRKQWRKATEEEREGIKVLQEELRSRLAVLRRAEHLREKRKKKERARSAFFRNPFNFVKGLFNQEKGGQLKATKSEIEQYLKSTYSDSKENRNIGLPPDMPPLGEVEQEMDVSPPRWREVVEVVRRAKASSAPGPNGVPYRVYKSAPGILRTLWRYLRIVWEKQSIPRAWRRAGGVFIPKEKESSDLSQFRMISLLNVEGKIFFSIVAQRLAKYLERNGMIDTTVQKAGIPGFAGCLEHTGMIWHQIQTAKREKRDLNVVFLDLANAFGSVPHNLIWSSFDYFKVPEIVVNLVKAYFQDIRLCASIAELTTGWQRLEVGIMAGCTVSPLAFTMAMEVIIRASKWVVGGERRQNGMRLPPIRAYMDDMTLLTSTVPCTRRLLDKVNQNLKWASMKIKPSKSRSISIYRGKVSDRKFAIDGEEIPTIREKSVKSLGRWYNVDLNDVEQVVQFRKDVAEGLERIDKSGLPGKLRLWCLQFGLYPRLMWPMSVYEVPLSVAERMERLVSSYIRKWLGAPRCLSNVALYGKGMLQLPVSSLTEEFKCTKVRTELLLSGSKDMLVSNVVPNPSGGRKWNPRAAVQEAEAALRHAEIVGNVQFGRGGLGLGPGKPVWNKAGLKEKRKLVVEQVRRQEELLRGAKAVGQAKQGQWLNWEGVEKRKLSWRDLWNMEEGRIKFLIGATYDVLPTPQNLSLWVQGDQSCPLCSGTASLKHILSGCRISLSQGRYTWRHNQALRSLAAGIEVRRKQVNSGSSRKERLDVQFVREGEKNRAAKSGRKQVGGCLVGADDWQMQVDLGGKLVVPQEIVYSNLRPDIVLWSMSKKTVYFIELTVPWENSVEAAYERKKTKYADLKTESEQRGWKTRVCPVEVGCRGFVAGSAVSLLRELGVHGQNLRKTVREMSDEAARSSQWIWIRRNNSSWGVK

SEQ ID NO: 4152 - protein, 1148 aa, Epinephelus lanceolatus
MTWTGDSVKDRGTDLSTSARISSTQGKVSASVEGKSSIVENKMLQVCPCGWQKVTSVKGLRTHQGKKKCVAKKGQSSRIDQYFLRSQSSQSDEVQRQVENHSSQDISNAATEEEGVVREDAGDTEASMLARERTMEQKVRVRWPRANDSKEWEIVNRDLSVILSRLRGNAIQRLEKMGDIMYSYGVERFGVHERKRSERVQSGKSRRQREIEKLVKERRQLRKQWKKATEEEREGIKVLQEELRSRLAVLRRAEHLRKKRRKKEYARTGFFRDPFKFVKGLFSQEKGGQLKAERLEVEEYLRNTYSDLEKNRIVGFPPDIPPLGGIEHEMDVRPPRWKEVQEVVRRAKASSAPGPNGVPYRVYKSAPDTLKFLWKQLRIVWEKQIIPRAWRRAGGVLIPKEKESVDLSQFRMISLLNVEGKIFFSVVAQRLASYLERNSLIDTMVQKAGIPGFSGCLEHTSMIWHQIQAAKINKRDLHVIFLDLANAFGSVPHSLIWSAFDYFRVPQVVVNLVKAYFQDIRLCLSTAGFTTGWQRLEIGIMAGCTISPLAFTMAMEVIIRASKWVVGGERRQNGLHLPPVRAYMDDMTLVTTTMPCTKRLLEKVNKNLKWASMKIKPSKSRSISICRGKLSDRKFVIDDEDIPTIREKSVKSLGRWYNVELNDKEQVVKFRKDVAEGLDRIDKSELPGKLKLWCLQFGLYPRLMWPLSVYEIPISVVERMERSVSSYIRKWLGAPRCLSSVALYGKGILQLPVSSLTEEFKCTKVRTELLLSGSKDVVVRSVVPNPTKGRKWNPRSAVQEAEAALRHAEIVGNVQFGRGGLGLGSGKPVWNTAGLKDKRKLVVEQIRRQEEIVRGAKVVAQAKQGQWLNWESVEKRKLSWRDLWSMEENRIRFLVGATYDVLPTPQNLKLWVNEDPSCPLCSRTATLKHILSGCKVSLSQGRYTWRHNQVLKCLAAGIEGKRRQVNSEGVKDRSLVIQFVREGEKHRRDKLVRRQGCGRLEGACDWEMQVDLGGKLVVPQEIVCTKQRPDIVLWSLSQRIVYFIELTVPWEDSVEEAYERKKLRYADLGAEAEQRGWKTRICPVEVGCRGFIARSAVSLPGELGVRGQSLRKTVREMSDEAVRASQFIYKRRNNVSWGPAGGTTKQGT

SEQ ID NO: 4153 - protein, 1150 aa, Chelmon rostratus
MVTNRITDMTMPWIHDSVRDGGTDPSLRARGSSTQVTGKATKESKSCAAEDKKLQVCPCGWQKITSIRGLRTHQGRRKCLAVEGQSGRIDQYFLRSQSNQSDEVQRQVENHSSQDISNTIPGEEEVRRGDAVGVEGNRPAKERSMEQKARVKWPRANDSKEWEAVDRDLSVILSRLRGDVVEKLDKIGDVIYSYGRERFGVLVKRKGERVQVGKSRRQREIEKLVKERRQLRKQWRKATEEEREGIKVLQEELRSRLAVLRRAEHLREKRKKKERARSAFFRNPFNFVKGLFNQEKGGQLKATKSEIEQYLKSTYSDSKENRNIGLPPDMPPLGEVEQEMDVSPPRWREVVEVVRRAKASSAPGPNGVPYRVYKSAPGILRTLWRYLRIVWEKQSIPRAWRRAGGVFIPKEKESSDLSQFRMISLLNVEGKIFFSIVAQRLAKYLERNGMIDTTVQKAGIPGFAGCLEHTSMIWHQIQTAKREKRDLNVVFLDLANAFGSVPHNLIWSSFDYFKVPEIVVNLVKAYFQDIRLCASIAELTTGWQRLEVGIMAGCTVSPLAFTMAMEVIIRASKWVVGGERRQNGMRLPPIRAYMDDMTLLTSTVPCTRRLLDKVNQNLKWASMKIKPSKSRSISIYRGKVSDRKFAIDGEEIPTIREKAVKSLGRWYNVDLNDVEQVVQFRKDVAEGLERIDKSGLPGKLRLWCLQFGLYPRLMWPMSVYEVPLSVAERMERLVSSYIRKWLGAPRCLSNVALYGKGMLQLPVSSLTEEFKCTKVRTELLLSGSKDMLVSNVVPNPSGGRKWNPRAAVQEAEAALRHAEIVGNVQFGRGGLGLGPGKPVWNKAGLKEKRKLVVEQVRRQEELLRGAKAVGQAKQGQWLNWEGVEKRKLSWRDLWNMEEGRIKFLIGATYDVLPTPQNLSLWVQGDQSCPLCSGTASLKHILSGCRISLSQGRYTWRHNQVLRSLAAGIEERRKQVNSGSSRKERLDVQFVREGEKNKAAKSGRKQGGGCLVGADDWQMQVDLGGQLVVPQEIVYSNLRPDIVLWSMSKKTVYFIELTVPWENSVEAAYERKKTKYADLKTESEQRGWKTRVCPVEVGCRGFVAGSAVSLLRELGVHGQNLRKTVREMSDDAARSSQWIWIRRNNSSWGVK

SEQ ID NO: 4154 - protein, 1150 aa, Chelmon rostratus
MVTNRITDMTMPWIHDSVRDGGTDPSLRARGSSTQVTGKATKESKSCAAEDKKLQVCPCGWQKITSIRGLRTHQGRRKCLAVEGQSGRIDQYFLRSQSNQSDEVQRQVENHSSQDISNTIPGEEEVRRGDAVGVEGNRPAKERSMEQKARVKWPRANDSKEWEAVDRDLSVILSRLRGDVVEKLDKIGDVIYSYGRERFGVLVKRKGERVQVGKSRRQREIEKLVKERRQLRKQWRKATEEEREGIKVLQEELRSRLAVLRRAEHLREKRKKKERARSAFFRNPFNFVKGLFNQEKGGQLKATKSEIEQYLKSTYSDSKENRNIGLPPDMPPLGEVEQEMDVSPPRWREVVEVVRRAKASSAPGPNGVPYRVYKSAPGILRTLWRYLRIVWEKQSIPRAWRRAGGVFIPKEKESSDLSQFRMISLLNVEGKIFFSIVAQRLAKYLERNGMIDTTVQKAGIPGFAGCLEHTSMIWHQIQTAKREKRDLNVVFLDLANAFGSVPHNLIWSSFDYFKVPEIVVNLVKAYFQDIRLCASIAELTTGWQRLEVGIMAGCTVSPLAFTMAMEVIIRASKWVVGGERRQNGMRLPPIRAYMDDMTLLTSTVPCTRRLLDKVNQNLKWASMKIKPSKSRSISIYRGKVSDRKFAIDGEEIPTIREKSVKSLGRWYSVDLNDVEQVVQFRKDVAEGLERIDKSGLPGKLRLWCLQFGLYPRLMWPMSIYEVPLSVAERMERLVSSYIRKWLGAPRCLSNVALYGKGMLQLPVSSLTEEFKCTKVRTELLLSGSKDMLVSNVVPNPSGGRKWNPRAAVQEAEAALRHAEIVGNVQFGRGGLGLGPGKPVWNKAGLKEKRKLVVEQVRRQEELLRGAKAVGQAKQGQWLNWEGVEKRKLSWRDLWNMEEGRIKFLIGATYDVLPTPQNLSLWVQGDQSCPLCSGTASLKHILSGCRISLSQGRYTWRHNQVLRSLAAGIEERRKQVNSGSSRKERLDVQFVREGEKNKAAKSGRKQGGGCLVGADDWQMQVDLGGQLVVPQEIVYSNLRPDIVLWSMSKKTVYFIELTVPWENSVEAAYERKKTKYADLKTESEQRGWKTRVCPVEVGCRGFVAGSAVSLLRELGVHGQNLRKTVREMSDEAARSSQWIWIRRNNSSWGVK

SEQ ID NO: 4155 - protein, 1172 aa, Chelmon rostratus
MVTNRITDMTMPWIHDSVRDGGTDPSLRARGSSTQVTGKATKESKSCAAEDKKLQVCPCGWQKITSIRGLRTHQGRRKCLAVEGQSGRIDQYFLRSQSNQSDEVQRQVENHSSQDISNTIPGEEEVRRGDAVGVEGNRPAKERSMEQKARVKWPRANDSKEWEAVDRDLSVILSRLRGDVVEKLDKIGDVIYSYGRERFGVLVKRKGERVQVGKSRRQREIEKLVKEKRQLRKQWRKATEEEREGIKVLQEELRSRLAVLRRAEHLREKRKKKERARSAFFRNPFNFVKGLFNQEKGGQLKATKSEIEQYLKSTYSDSKENRNIGLPPDMPPLGEVEQEMDVSPPRWREVVEVVRRAKASSAPGPNGVPYHVYKSAPGILRTLWRYLRIVWEKQSIPRAWRRAGGVFIPKEKESSDLSQFRMISLLNVEGKIFFSIVAQRLAKYLERNGMIDTTVQKAGIPGFAGCLEHTSMIWHQIQTAKREKRDLNVVFLDLANAFGSVPHNLIWSSFDYFKVPEIVVNLVKAYFQDIRLCASIAELTTGWQRLEVGIMAGCTVSPLAFTMAMEVIIRASKWVVGGERRQNGMRLPPIRAYMDDMTLLTSTVPCTRRLLDKVNQNLKWASMKIKPSKSRSISIYRGKVSDRKFAIDGEEIPTIREKSVKSLGRWYNVDLNDVEQVVQFRKDVAEGLERIDKSGLPGKLRLWCLQFGLYPRLMWPMSVYEVPLSVAERMERLVSSYIRKWLGAPRCLSNVALYGKGMLQLPVSSLTEEFKCTKVRTELLLSGSKDMLVSNVVPNPSGGRKWNPRAAVQEAEAALRHAEIVGNVQFGRGGLGLGPGKPVWNKAGLKEKRKLVVEQVRRQEELLRGAKAVGQAKQGQWLNWEGVEKRKLSWRDLWNMEEGRIKFLIGATYDVLPTPQNLSLWVQGDQSCPLCSGTASLKHILSGCRISLSQGRYTWRHNQVLRSLAAGIEERRKQVNSGSSRKERLDVQFVREGEKNRAAKSGRKQGGGCLVGADDWQMQVDLGGQLVVPQEIVYSNLRPDIVLWSMSKKTVYFIELTVPWENSVEAAYERKKTKYADLKTESEQRGWKTRVCPVEVGCRGFVAGSAVSLLRELGVHGQNLRKTVRDMSDEAARSSQWIWIRRNNSSWGVKEGQWGGRQRTCMPNPAREEVKV

SEQ ID NO: 4156 - protein, 1021 aa, Epinephelus lanceolatus
MLARERTMEQKVRVRWPRANDSKEWEIVNRDLSVILSRLRGNAIQRLEKMGDIMYSYGVERFGVHERKRSERVQSGKSRRQREIEKLVKERRQLRKQWKKATEEEREGIKVLQEELRSRLAVLRRAEHLRKKRRKKEYARTGFFRDPFKFVKGLFSQEKGGQLKAERLEVEEYLRNTYSDLEKNRIVGFPPDIPPLGGIEHEMDVRPPRWKEVQEVVRRAKASSAPGPNGVPYRVYKSAPDTLKFLWKQLRIVWEKQIIPRAWRRAGGVLIPKEKESVDLSQFRMISLLNVEGKIFFSVVAQRLASYLERNSLIDTMVQKAGIPGFSGCLEHTSMIWHQIQAAKINKRDLHVIFLDLANAFGSVPHSLIWSAFDYFRVPQVVVNLVKAYFQDIRLCLSTAGFTTGWQRLEIGIMAGCTISPLAFTMAMEVIIRASKWVVGGERRQNGLHLPPVRAYMDDMTLVTTTMPCTKRLLEKVNKNLKWASMKIKPSKSRSISICRGKLSDRKFVIDDEDIPTIREKSVKSLGRWYNVELNDKEQVVKFRKDVAEGLDRIDKSELPGKLKLWCLQFGLYPRLMWPLSVYEIPISVVERMERSVSSYIRKWLGAPRCLSSVALYGKGILQLPVSSLTEEFKCTKVRTELLLSGSKDVVVRSVVPNPTKGRKWNPRSAVQEAEAALRHAEIVGNVQFGRGGLGLGSGKPVWNTAGLKDKRKLVVEQIRRQEEIVRGAKVVAQAKQGQWLNWESVEKRKLSWRDLWSMEENRIRFLVGATYDVLPTPQNLKLWVNEDPSCPLCSRTATLKHILSGCKVSLSQGRYTWRHNQVLKCLAAGIEGKRRQVNSEGVKDRGLVIQFVREGEKYRRDKLVRRQGCGRLEGACDWEMQVDLGGKLVVPQEIVCTRQRPDLVLWSVSQQIVYFIELTVPWEDSVEEAYERKKLRYADLGAEAEQRGWKTRICPVEVGCRGFIARSTVSLLGELGVRGQNLRKTVREMSDEAIKCSQFIYYRRNNVSWGPAGGTTKQGT

SEQ ID NO: 4157 - protein, 1148 aa, Epinephelus lanceolatus
MTWTGDSVKDRGTDLSTSARISSTQGKVSASVEGKSSIVENKMLQVCPCGWQKVTSVKGLRTHQGKKKCVAKKGQSSRIDQYFLRSQSSQSDEVQRQVENHSSQDISNAATEEEGVVREDAGDTEASMLARERTMEQKVRVRWPRANDSKEWEIVNRDLSVILSRLRGNAIQRLEKMGDIMYSYGVERFGVHERKRSERVQSGKSRRQREIEKLVKERRQLRKQWKKATEEEREGIKVLQEELRSRLAVLRRAEHLRKKRRKKEYARTGFFRDPFKFVKGLFSQEKGGQLKAERLEVEEYLRNTYSDLEKNRIVGFPPDIPPLGGIEHEMDVRPPRWKEVQEVVRRAKASSAPGPNGVPYRVYKSAPDTLKFLWKQLRIVWEKQIIPRAWRRAGGVLIPKEKESVDLSQFRMISLLNVEGKIFFSVVAQRLASYLERNSLIDTMVQKAGIPGFSGCLEHTSMIWHQIQAAKINKRDLHVIFLDLANAFGSVPHSLIWSAFDYFRVPQVVVNLVKAYFQDIRLCLSTAGFTTGWQRLEIGIMAGCTISPLAFTMAMEVIIRASKWVVGGERRQNGLHLPPVRAYMDDMTLVTTTMPCTKRLLEKVNKNLKWASMKIKPSKSRSISICRGKLSDRKFVIDDEDIPTIREKSVKSLGRWYNVELNDKEQVVKFRKDVAEGLDRIDKSELPGKLKLWCLQFGLYPRLMWPLSVYEIPISVVERMERSVSSYIRKWLGAPRCLSSVALYGKGILQLPVSSLTEEFKCTKVRTELLLSGSKDVVVRSVVPNPTKGRKWNPRSAVQEAEAALRHAEIVGNVQFGRGGLGLGSGKPVWNTAGLKDKRKLVVEQIRRQEEIVRGAKVVAQAKQGQWLNWESVEKRKLSWRDLWSMEENRIRFLVGATYDVLPTPQNLKLWVNEDPSCPLCSRTATLKHILSGCKVSLSQGRYTWRHNQVLKCLAAGIEGKRRQVNSEGVKDRGLVIQFVREGEKYRRDKLVRRQGCGRLEGACDWEMQVDLGGKLVVPQEIVCTRQRPDLVLWSVSQRIVYFIELTVPWEDSVEEAYERKKLRYADLGAEAEQRGWKTRICPVEVGCRGFIARSAVSLLGELGVRGQSLRKTVREMSDEAVRASQFIYKRRNNVSWGPAGGTTKQGT

SEQ ID NO: 4158 - protein, 1150 aa, Chelmon rostratus
MVTNRITDMTMPWIHDSVRDGGTDPSLRARGSSTQVTGKATKESKSCAAEDKKLQVCPCGWQKITSIRGLRTHQGRRKCLAVEGQSGRIDQYFLRSQSNQSDEVQRQVENHSSQDISNTIPGEEEVRRGDAVGVEGNRPAKERSMEQKARVKWPRANDSKEWEAVDRDLSVILSRLRGDVVEKLDKIGDVIYSYGRERFGVLVKRKGERVQVGKSRRQREIEKLVKERRQLRKQWRKATEEEREGIKVLQEELRSRLAVLRRAEHLREKRKKKERARSAFFRNPFNFVKGLFNQEKGGQLKATKSEIEQYLKSTYSDSKENRNIGLPPDMPPLGEVEQEMDVSPPRWREVVEVVRRAKASSAPGPNGVPYRVYKSAPGILRTLWRYLRIVWEKQSIPRAWRRAGGVFIPKEKESSDLSQFRMISLLNVEGKIFFSIVAQRLAKYLERNGMIDTTVQKAGIPGFAGCLEHTSMIWHQIQTAKREKRDLNVVFLDLANAFGSVPHNLIWSSFDYFKVPEIVVNLVKAYFQDIRLCASIAELTTGWQRLEVGIMAGCTVSPLAFTMAMEVIIRASKWVVGGERRQNGMRLPPIRAYMDDMTLLTSTVPCTRRLLDKVNQNLKWASMKIKPSKSRSISIYRGKVSDRKFAIDGEEIPTIREKAVKSLGRWYNVDLNDVEQVVQFRKDVAEGLERIDKSGLPGKLRLWCLQFGLYPRLMWPMSVYEVPLSVAERMERLVSSYIRKWLGAPRCLSNVALYGKGMLQLPVSSLTEEFKCTKARTELLLSGSKDMLVSNVVPNPSGGRKWNPRAAVQEAEAALRHAEIVGNVQFGRGGLGLGPGKPVWNKAGLKEKRKLVVEQVRRQEELLRGAKAVGQAKQGQWLNWEGVEKRKLSWRDLWNMEEGRIKFLIGATYDVLPTPQNLSLWVQGDQSCPLCSGTASLKHILSGCRISLSQGRYTWRHNQVLRSLAAGIEERRKQVNSGSSRKERLDVQFVREGEKNKAAKSGRKQGGGCLVGADDWQMQVDLGGQLVVPQEIVYSNLRPDIVLWSMSKKTVYFIELTVPWENSVEAAYERKKTKYADLKTESEQRGWKTRVCPVEVGCRGFVAGSAVSLLRELGVHGQNLRKTVREMSDEAARSSQWIWIRRNNSSWGVK

SEQ ID NO: 4159 - protein, 973 aa, Chelmon rostratus
MEQKARVRWPRANDSKEWEAVDRDLSVILSRLRGDVVEKLDKIGDVIYSYGRERFGVLVKRKGERVQVGKSRRQREIEKLVKERRQLRKQWRKATEEEREGIKVLQEELRSRLAVLRRAEHLREKRKKKERARSAFFRNPFNFVKGLFNQEKGGQLKATKSEIEQYLKSTYSDSKENRNIGLPPDMPPLGEVEQEMDVSPPRWREVVEVVRRAKASSAPGPNGVPYRVYKSAPGILRTLWRYLRIVWEKQSIPRAWRRAGGVFIPKEKESSDLSQFRMISLLNVEGKIFFSIVAQRLAKYLERNGMIDTTVQKAGIPGFAGCLEHTGMIWHQIQTAKREKRDLNVVFLDLANAFGSVPHNLIWSSFDYFKVPEIVVNLVKAYFQDIRLCASIAELTTGWQRLEVGIMAGCTVSPLAFTMAMEVIIRASKWVVGGERRQNGMRLPPIRAYMDDMTLLTSTVPCTRRLLDKVNQNLKWASMKIKPSKSRSISIYRGKVSDRKFAIDGEEIPTIREKAVKSLGRWYNVDLNDVEQVVQFRKDVAEGLERIDKSGLPGKLRLWCLQFGLYPRLMWPMSVYEVPLSVAERMERLVSSYIRKWLGAPRCLSNVALYGKGMLQLPVSSLTEEFKCIKVRTELLLSGSKDMLVSNVVPNPSGGRKWNPRAAVQEAEAALRHAEIVGNVQFGRGGLGLGPGKPVWNKAGLKEKRKLVVEQVRRQEELLRGAKAVGQAKQGQWLNWEGVEKRKLSWRDLWNMEEGRIKFLIGATYDVLPTPQNLSLWVQGDQSCPLCSGTASLKHILSGCRISLSQGRYTWRHNQVLRSLAAGIEERRKQVNSGSSRKERLDVQFVREGEKNAKSGRKQVGGCLVGADDWQMQVDLGGKLVVPQEIVYSNLRPDIVLWSMSKKTVYFIELTVPWENSVEAAYERKKTKYADLKTESEQRGWKTRVCPVEVGCRGFVAGSAVSLLRELGVHGQN

SEQ ID NO: 4160 - protein, 821 aa, Chelmon rostratus
MPPLGEVEQEMDVSPPRWREVVEVVRRAKASSAPGPNGVPYRVYKSAPGILRTLWRYLRIVWEKQSIPRAWRRAGGVFIPKEKESSDLSQFRMISLLNVEGKIFFSIVAQRLAKYLERNGMIDTTVQKAGIPGFAGCLEHTSMIWHQIQTAKREKRDLNVVFLDLANAFGSVPHNLIWSSFDYFKVPEIVVNLVKAYFQDIRLCASIAELTTGWQRLEVGIMAGCTVSPLAFTMAMEVIIRASKWVVGGERRQNGMRLPPIRAYMDDMTLLTSTVPCTRRLLDKVNQNLKWASMKIKPSKSRSISIYRGKVSDRKFAIDGEEIPTIREKAVKSLGRWYNVDLNDVEQVVQFRKDVAEGLERIDKSGLPGKLRLWCLQFGLYPRLMWPMSVYEVPLSVAERMERLVSSYIRKWLGAPRCLSNVALYGKGMLQLPVSSLTEEFKCTKVRTELLLSGSKDMLVSNVVPNPSGGRKWNPRAAVQEAEAALRHAEIVGNVQFGRGGLGLGPGKPVWNKAGLKEKRKLVVEQVRRQEELLRGAKAVGQAKQGQWLNWEGVEKRKLSWRDLWNMEEGRIKFLIGATYDVLPTPQNLSLWVQGDQSCPLCSGTASLKHILSGCRISLSQGRYTWRHNQVLRSLAAGIEERRKQVNSGSSRKERLDVQFVREGEKNKAAKSGRKQGGGCLVGADDWQMQVDLGGQLVVPQEIVYSNLRPDIVLWSMSKKTVYFIELTVPWENSVEAAYERKKTKYADLKTESEQRGWKTRVCPVEVGCRGFVAGSAVSLLRELGVHGQNLRKTVREMSDEAARSSQWIWIRRNNSSWGVK

SEQ ID NO: 4161 - protein, 821 aa, Chelmon rostratus
MPPLGEVEQEMDVSPPRWREVVEVVRRAKASSAPGPNGVPYRVYKSAPGILRTLWRYLRIVWEKQSIPRAWRRAGGVFIPKEKESSDLSQFRMISLLNVEGKIFFSIVAQRLAKYLERNGMIDTTVQKAGIPGFAGCLEHTSMIWHQIQTAKREKRDLNVVFLDLANAFGSVPHNLIWSSFDYFKVPEIVVNLVKAYFQDIRLCASIAELTTGWQRLEVGIMAGCTVSPLAFTMAMEVIIRASKWVVGGERRQNGMRLPPIRAYMDDMTLLTSTVPCTRRLLDKVNQNLKWASMKIKPSKSRSISIYRGKVSDRKFAIDGEEIPTIREKSVKSLGRWYNVDLNDVEQVVQFRKDVAEGLERIDKSGLPGKLRLWCLQFGLYPRLMWPMSVYEVPLSVAERMERLVSSYIRKWLGAPRCLSNVALYGKGMLQLPVSSLTEEFKCTKVRTELLLSGSKDMLVSNVVPNPSGGRKWNPRAAVQEAEAALRHAEIVGNVQFGRGGLGLGPGKPVWNKAGLKEKRKLVVEQVRRQEELLRGAKAVGQAKQGQWLNWEGVEKRKLSWRDLWNMEEGRIKFLIGATYDVLPTPQNLSLWVQGDQSCPLCSGTASLKHILSGCRISLSQGRYTWRHNQVLRSLAAGIEERRKQVNTGSSRKERLDVQFVREGEKNRAAKSGRKQVGGCLVGADDWQMQVDLGGKLVVPQEIVYSNLRPDIVLWSMSKKTVYFIELTVPWENSVEAAYERKKTKYADLKTESEQRGWKTRVCPVEVGCRGFVAGSAVSLLRELGVHGQNLRKTVREMSDEAARSSQWIWIRRNNSSWGVK

SEQ ID NO: 4162 - protein, 1006 aa, Chelmon rostratus
MEQKARVKWPRANDSKEWEAVDRDLSVILSRLRGDVVEKLDKIGDVIYSYGRERFGVLVKRKGERVQVGKSRRQREIEKLVKERRQLRKQWRKATEEEREGIKMLQEELRSRLAVLRRAEHLREKRKKKERARSAFFRNPFNFVKGLFNQEKGGQLKATKSEIEQYLKSTYSDSKENRNIGLPPDMPPLGEVEQEMDVSPPRWREVVEVVRRAKASSAPGPNGVPYRVYKSAPGILRTLWRYLRIVWEKQSIPRAWRRAGGVFIPKEKESSDLSQFRMISLLNVEGKIFFSIVAQRLAKYLERNGMIDTTVQKAGIPGFAGCLEHTSMIWHQIQTAKREKRDLNVVFLDLANAFGSVPHNLIWSSFDYFKVPEIVVNLVKAYFQDIRLCASIAELTTGWQRLEVGIMAGCTVSPLAFTMAMEVIIRASKWVVGGERRQNGMRLPPIRAYMDDMTLLTSTVPCTRRLLDKVNQNLKWASMKIKPSKSRSISIYRGKVSDRKFAIDGEEIPTIREKAVKSLGRWYNVDLNDVEQVVQFRKDVAEGLERIDKSGLPGKLRLWCLQFGLYPRLMWPMSVYEVPLSVAERMERLVSSYIRKWLGAPRCLSNVALYGKGMLQLPVSSLTEEFKCTKVRTELLLSGSKDMLVSNVVPNPSGGRKWNPRAAVQEAEAALRHAEIVGNVQFGRGGLGLGPGKPVWNKAGLKEKRKLVVEQVRRQEELLRGAKAVGQAKQGQWLNWEGVEKRKLSWRDLWNMEEGRIKFLIGATYDVLPTPQNLSLWVQGDQSCPLCSGTASLKHILSGCRISLSQGRYTWRHNQVLRSLAAGIEERRKQVNSGSSRKERLDVQFVREGEKNKAAKSGRKQGGGCLVGADDWQMQVDLGGQLVVPQEIVYSNLRPDIVLWSMSKKTVYFIELTVPWENSVEAAYERKKTKYADLKTESEQRGWKTRVCPVEVGCRGFVAGSAVSLLRELGVHGQNLRKTVREMSDEAARSSQWIWIRRNNSSWGVK

SEQ ID NO: 4163 - protein, 1006 aa, Chelmon rostratus
MEQKARVRWPRANDSKEWEAVDRDLSVILSRLRGDVVEKLDKIGDVIYSYGRERFGVLVKRRGERVQVGKSRRQREIEKLVKERRQLRKQWRKATEEEREGIKVLQEELRSRLAVLRRAEHLREKRKKKERARSAFFRNPFNFVKGLFNQEKGGQLKATKSEIEQYLKSTYSDSKENRNIGLPPDMPPLGEVEQEMDVSPPRWREVVEVVRRAKASSAPGPNGVPYRVYKSAPGILRTLWRYLRIVWEKQSIPRAWRRAGGVFIPKEKESSDLSQFRMISLLNVEGKIFFSIVAQRLAKYLERNGMIDTTVQKAGIPGFAGCLEHTSMIWHQIQTAKREKRDLNVVFLDLANAFGSVPHNLIWSSFDYFKVPEIVVNLVKAYFQDIRLCASIAELTTGWQRLEVGIMAGCTVSPLAFTMAMEVIIRASKWVVGGERRQNGMRLPPIRAYMDDMTLLTSTVPCTRRLLDKVNQNLKWASMKIKPSKSRSISIYRGKVSDRKFAIDGEEIPTIREKSVKSLGRWYNVDLNDVEQVVQFRKDVAEGLERIDKSGLPGKLRLWCLQFGLYPRLMWPMSVYEVPLSVAERMERLVSSYIRKWLGAPRCLSNVALYGKGMLQLPVSSLTEEFKCTKVRTELLLSGSKDMLVSNVVPNPSGGRKWNPRAAVQEAEAALRHAEIVGNVQFGRGGLGLGPGKPVWNKAGLKEKRKLVVEQVRRQEELLRGAKAVGQAKQGQWLNWEGVEKRKLSWRDLWNMEEGRIKFLIGATYDVLPTPQNLSLWVQGDQSCPLCSSTASLKHILSGCRISLSQGRYTWRHNQVLRSLAAGIEERRKQVNSGSSKKERLDVQFVREGEKNRAAKSGRKQVGGCLVGADDWQMQVDLGGKLVVPQEIVCSNLRPDIVLWSMSKKTVYFIELTVPWENSVEAAYERKKTKYADLKTESEQRGWKTRVCPVEVGCRGFVAGSAVSLLRELGVHGQNLRKTVREMSDEAARSSQWIWIRRNNSSWGVK

SEQ ID NO: 4164 - protein, 1106 aa, Chelmon rostratus
MYMNELNKVLVYCPCGWQKITSIRGLRTHQGRRKCLAVEGQSGRIDQYFLRSQSNQSDEVQRQVENHSSQDISNTIPGEEEVRRGDAVGVEGNRPAKERSMEQKARVKWPRANDSKEWEAVDRDLSVILSRLRGDVVEKLDKIGDVIYSYGRERFGVLVKRKGERVQVGKSRRQREIEKLVKERRQLRKQWRKATEEEREGIKVLQEELRSRLAVLRRAEHLREKRKKKERARSAFFRNPFNFVKGLFNQEKGGQLKATKSEIEQYLKSTYSDSKENRNIGLPPDMPPLGEVEQEMDVSPPRWREVVEVVRRAKASSAPGPNGVPYRVYKSAPGILRTLWRYLRIVWEKQSIPRAWRRAGGVFIPKEKESSDLSQFRMISLLNVEGKIFFSIVAQRLAKYLERNGMIDTTVQKAGIPGFAGCLEHTSMIWHQIQTAKREKRDLNVVFLDLANAFGSVPHNLIWSSFDYFKVPEIVVNLVKAYFQDIRLCASIAELTTGWQRLEVGIMAGCTVSPLAFTMAMEVIIRASKWVVGGERRQNGMRLPPIRAYMDDMTLLTSTVPCTRRLLDKVNQNLKWASMKIKPSKSRSISIYRGKVSDRKFAIDGEEIPTIREKAVKSLGRWYNVDLNDVEQVVQFRKDVAEGLERIDKSGLPGKLRLWCLQFGLYPRLMWPMSVYEVPLSVAERMERLVSSYIRKWLGAPRCLSNVALYGKGMLQLPVSSLTEEFKCTKVRTELLLSGSKDMLVSNVVPNPSGGRKWNPRAAVQEAEAALRHAEIVGNVQFGRGGLGLGPGKPVWNKAGLKEKRKLVVEQVRRQEELLRGAKAVGQAKQGQWLNWEGVEKRKLSWRDLWNMEEGRIKFLIGATYDVLPTPQNLSLWVQGDQSCPLCSGTASLKHILSGCRISLSQGRYTWRHNQVLRSLAAGIEERRKQVNSGSSRKERLDVQFVREGEKNKAAKSGRKQGGGCLVGADDWQMQVDLGGQLVVPQEIVYSNLRPDIVLWSMSKKTVYFIELTVPWENSVEAAYERKKTKYADLKTESEQRGWKTRVCPVEVGCRGFVAGSAVSLLRELGVHGQNLRKTVREMSDEAARSSQWIWIRRNNSSWGVK

SEQ ID NO: 4165 - protein, 1006 aa, Chelmon rostratus
MEQKARVKWPRANDSKEWEAVDRDLSVILSRLRGDVVEKLDKIGDVIYSYGRERFGVLVKRKGERVQVGKCRRQREIEKLVKERRQLRKQWRKATEEEREGIKVLQEELRSRLAVLRRAEHLREKRKKKERARSAFFRNPFNFVKGLFNQEKGGQLKATKSEIEQYLKSTYSDSKENRNIGLPPDMPPLGEVEQEMDVSPPRWREVVEVVRRAKASSAPGPNGVPYRVYKSAPGILRTLWRYLRIVWEKQSIPRAWRRAGGVFIPKEKESSDLSQFRMISLLNVEGKIFFSIVAQRLAKYLERNGMIDTTVQKAGIPGFAGCLEHTSMIWHQIQTAKREKRDLNVVFLDLANAFGSVPHNLIWSSFDYFKVPEIVVNLVKAYFQDIRLCASIAELTTGWQRLEVGIMAGCTVSPLAFTMAMEVIIRASKWVVGGERRQNGMRLPPIRAYMDDMTLLTSTVPCTRRLLDKVNQNLKWASMKIKPSKSRSISIYRGKVSDRKFAIDGEEIPTIREKSVKSLGRWYNVDLNDVEQVVQFRKDVAEGLERIDKSGLPGKLRLWCLQFGLYPRLMWPMSVYEVPLSVAERMERLFSSYIRKWLGAPRCLSNVALYGKGMLQLPVSSLTEEFKCTKVRTELLLSGSKDMLVSNVVPNPSGGRKWNPRAAVQEAEAALRHAEIVGNVQFGRGGLGLGPGKPVWNKAGLKEKRKLVVEQVRRQEELLRGAKAVGQAKQGQWLNWEGVEKRKLSWRDLWNMEEGRIKFLIGATYDVLPTPQNLSLWVQGDQSCPLCSGTASLKHILSGCRISLSQGRYTWQHNQVLRSLAAGIEERRKQVNSGSSRKERLDVQFVREGEKNRAAKSGRKQGGGCLVGADDWQMQVDLGGQLVVPQEIVYSNLRPDIVLWSMSKKTVYFIELTVPWENSVEAAYERKKTKYADLKTESEQRGWKTRVCPVEVGCRGFVAGSAVSLLRELGVHGQNLRKTVREMSDEAARSSQWIWIRRNNSSWGVK

SEQ ID NO: 4166 - protein, 1150 aa, Chelmon rostratus
MVTNRITDMTMPWIHDSVRDGGTDPSLRARGSSTQVTGKATKESKSCAAEDKKLQVCPCGWQKITSIRGLRTHQGRRKCLAVEGQSGRIDQYFLRSQSNQSDEVQRQVENHSSQDISNTIPGEEEVRRGDAVGVEGNRPAKERSMEQKARVKWPRANDSKEWEAVDRDLSVILSRLRGDVVEKLDKIGDVIYSYGRERFGVLVKRKGERVQVGKSRRQREIEKLVKERRQLRKQWRKATEEEREGIKVLQEELRSRLAVLRRAEHLREKRKKKERARSAFFRNPFNFVKGLFNQEKGGQLKATKSEIEQYLKSTYSDSKENRNIGLPPDMPPLGEVEQEMDVSPPRWREVVEVVRRAKASSAPGPNGVPYRVYKSAPGILRTLWRYLRIVWEKQSIPRAWRRAGGVFIPKEKESSDLSQFRMISLLNVEGKIFFSIVAQRLAKYLERNGMIDTTVQKAGIPGFAGCLEHTSMIWHQIQTAKREKRDLNVVFLDLANAFGSVPHSLIWSSFDYFKVPEIVVNLVKAYFQDIRLCASIAELTTGWQRLEVGIMAGCTVSPLAFTMAMEVIIRASKWVVGGERRQNGMRLPPIRAYMDDMTLLTSTVPCTRRLLDKVNQNLKWASMKIKPSKSRSISIYRGKVSDRKFAIDGEEIPTIREKAVKSLGRWYNVDLNDVEQVVQFRKDVAEGLERIDKSGLPGKLRLWCLQFGLYPRLMWPMSVYEVPLSVAERMERLVSSYIRKWLGAPRCLSNVALYGKGMLQLPVSSLTEEFKCTKVRTELLLSGSKDMLVSNVVPNPSGGRKWNPRAAVQEAEAALRHAEIVGNVQFGRGGLGLGPGKPVWNKAGLKEKRKLVVEQVRRQEELLRGAKAVGQAKQGQWLNWEGVEKRKLSWRDLWNMEEGRIKFLIGATYDVLPTPQNLSLWVQGDQSCPLCSGTASLKHILSGCRISLSQGRYTWRHNQVLRSLAAGIEERRKQVNSGSSRKERLDVQFVREGEKNKAAKSGRKQGGGCLVGADDWQMQVDLGGQLVVPQEIVYSNLRPDIVLWSMSKKTVYFIELTVPWENSVEAAYERKKTKYADLKTESEQRGWKTRVCPVEVGCRGFVAGSAVSLLRELGVHGQNLRKTVREMSDEAARSSQWIWIRRNNSSWGVK

SEQ ID NO: 4167 - protein, 821 aa, Chelmon rostratus
MPPLGEVEQEMDVSPPRWREVVEVVRRAKASSAPGPNGVPYRVYKSAPGILRTLWRYLRIVWEKQSIPRAWRRAGGVFIPKEKESSDLSQFRMISLLNVEGKIFFSIVAQRLAKYLEGNGMIDTTVQKAGIPGFAGCLEHTSMIWHQIQTAKREKRDLNVVFLDLANAFGSVPHNLIWSSFDYFKVPEIVVNLVKAYFQDIRLCASIAELTTGWQRLEVGIMAGCTVSPLAFTMAMEVIIRASKWVVGGERRQNGMRLPPIRAYMDDMTLLTSTMPCTRRLLDKVNQNLKWASMKIKPSKSRSISIYRGKVSDRKFAIDGEEIPTIREKSVKSLGRWYNVDLNDVEQVVQFRKDVAEGLERIDKSGLPGKLRLWCLQFGLYPRLMWPMSVYEVPLSVAERMERLVSSYIRKWLGAPRCLSNVALYGKGMLQLPVSSLTEEFKCTKVRTELLLSGSKDMLVSNVVPNPSGGRKWNPRAAVQEAEAALRHAEIVGNVQFGRGGLGLGPGKPVWNKAGLKEKRKLVVEQVRRQEELLRGAKAVGQAKQGQWLNWEGVEKRKLSWRDLWNMEEGRIKFLIGATYDVLPTPQNLSLWVQGDQSCPLCSGTASLKHILSGCRISLSQGRYTWRHNQVLRSLAAGIEERRKQVNSGSSRKERLDVQFVREGEKNKAAKSGRKQVGGCLVGADDWQMQVDLGGKLVVPQEIVYSNLRPDIVLWSMSKKTVYFIELTVPWENSVEAAYERKKTKYADLKTESEQRGWKTRVCPVEVGCRGFVAGSAVSLLRELGVHGQNLRKTVREMSDEAARSSQWIWIRRNNSSWGVK

SEQ ID NO: 4168 - protein, 1102 aa, Epinephelus lanceolatus
MTWTGDSVKDRGTDLSTSARISSTQGKVSASVEGKSSIVENKMLQVCPCGWQKVTSVKGLRTHQGKKKCVAKKGQSSRIDQYFLRSQSSQSDEVQRQVENHSSQDISNAATEEEGVVREDAGDTEASMLARERTMEQKVRVRWPRANDSKEWEIVNRDLSVILSRLRGNAIQRLEKMGDIMYSYGVERFGVHERKRSERVQSGKSRRQREIEKLVKERRQLRKQWKKATEEEREGIKVLQEELRSRLAVLRRAEHLRKKRRKKEYARTGFFRDPFKFVKGLFSQEKGGQLKAERLEVEEYLRNTYSDLEKNRIVGFPPDIPPLGGIEHEMDVRPPRWKEVQEVVRRAKASSAPGPNGVPYRVYKSAPDTLKFLWKQLRIVWEKQIIPRAWRRAGGVLIPKEKESVDLSQFRMISLLNVEGKIFFSVVAQRLASYLERNSLIDTMVQKAGIPGFSGCLEHTSMIWHQIQAAKINKRDLHVIFLDLANAFGSVPHSLIWSAFDYFRVPQVVVNLVKAYFQDIRLCLSTAGFTTGWQRLEIGIMAGCTISPLAFTMAMEVIIRASKWVVGGERRQNGLHLPPVRAYMDDMTLVTTTMPCTKRLLEKVNKNLKWASMKIKPSKSRSISICRGKLSDRKFVIDDEDIPTIREKSVKSLGRWYNVELNDKEQVVKFRKDVAEGLDRIDKSELPGKLKLWCLQFGLYPRLMWPLSVYEIPISVVERMERSVSSYIRKWLGAPRCLSSVALYGKGILQLPVSSLTEEFKCTKVRTELLLSGSKDVVVRSVVPNPTKGRKWNPRSAVQEAEAALRHAEIVGNVQFGRGGLGLGSGKPVWNTAGLKDKRKLVVEQIRRQEEIVRGAKVVAQAKQGQWLNWESVEKRKLSWRDLWSMEENRIRFLVGATYDVLPTPQNLKLWVNEDPSCPLCSRTATLKHILSGCKVSLSQGRYTWRHNQVLKCLAAGIEGKRRQVNSEGVKDRGLVIQFVREGEKYRRDKLVRRQGCGRLEGACDWEMQVDLGGKLVVPQEIVCTRQRPDLVLWSVSQQIVYFIELTVPWEDSVEEAYERKKLRYADLGAEAEQRGWKTRICPVEVGCRGFIARSAVSLLGV

SEQ ID NO: 4169 - protein, 1150 aa, Chelmon rostratus
MVTNRITDMTMPWIHDSVRDGGTDPSLRARGSSTQVTGKATKESKSCAAEDKKLQVCPCGWQKITSIRGLRTHQGRRKCLAVEGQSGRIDQYFLRSQSNQSDEVQRQVENHSSQDISNTIPGEEEVRRGDAVGVEGNRPAKERSMEQKARVKWPRANDSKEWEAVDRDLSVILSRLRGDVVEKLDKIGDVIYSYGRERFGVLVKRKGERVQVGKSRRQREIEKLVKERRQLRKQWRKATEEEREGIKVLQEELRSRLAVLRRAEHLREKRKKKERARSAFFRNPFNFVKGLFNQEKGGQLKATKSEIEQYLKSTYSDSKENRNIGLPPDMPPLGEVEQEMDVSPPRWREVVEVVRRAKASSAPGPNGVPYRVYKSAPGILRTLWRYLRIVWEKQSIPRAWRRAGGVFIPKEKESSDLSQFRMISLLNVEGKIFFSIVAQRLAKYLERNGMIDTTVQKAGIPGFAGCLEHTSMIWHQIQTAKREKRDLNVVFLDLANAFGSVPHNLIWSSFDYFKVPEIVVNLVKAYFQDIRLCASIAELTTGWQRLEVGIMAGCTVSPLAFTMAMEVIIRASKWVVGGERRQNGMRLPPIRAYMDDMTLLTSTVPCTRRLLDKVNQNLKWASMKIKPSKSRSISIYRGKVSDRKFAIDGEEIPTIREKSVKSLGRWYNVDLNDVEQVVQFRKDVAEGLERIDKSGLPGKLRLWCLQFGLYPRLMWPMSIYEVPLSVAERMERLVSSYIRKWLGAPRCLSNVALYGKGMLQLPVSSLTEEFKCTKVRTELLLSGSKDMLVSNVVPNPSGGRKWNPRAAVQEAEAALRHAEIVGNVQFGRGGLGLGPGKPVWNKAGLKEKRKLVVEQVRRQEELLRGAKAVGQAKQGQWLNWEGVEKRKLSWRDLWNMEEGRIKFLIGATYDVLPTPQNLSLWVQGDQSCPLCSGTASLKHILSGCRISLSQGRYTWRHNQVLRSLAAGIEERRKQVNSGSSRKERLDVQFVREGEKNKAAKSGRKQGGGCLVGADDWQMQVDLGGQLVVPQEIVYSNLRPDIVLWSMSKKTVYFIELTVPWENSVEAAYERKKTKYADLKTESEQRGWKTRVCPVEVGCRGFVAGSAVSLLRELGVHGQNLRKTVREMSDEAARSSQWIWIRRNNSSWGVK

SEQ ID NO: 4170 - protein, 1150 aa, Chelmon rostratus
MVTNRITDMTMPWIHDSVRDGGTDPSLRARGSSTQVTGKATKESKNCAAEDKKLQVCPCGWQKITSIRGLRTHQGRRKCLAVEGQSGRIDQYFLRSQSNQSDEVQRQVENHSSQDISNTIPGEEEVRRGDAVGVEGNRPAKERSMEQKARVKWPRANDSKEWEAVDRDLSVILSRLRGDVVEKLDKIGDVIYSYGRERFGVLVKRKGERVQVGKSRRQREIEKLVKERRQLRKQWRKATEEEREGIKVLQEELRSRLAVLRRAEHLREKRKKKERARSAFFRNPFNFVKGLFNQEKGGQLKATKSEIEQYLKSTYSDSKENRNIGLPPDMPPLGEVEQEMDVSPPRWREVVEVVRRAKASSAPGPNGVPYRVYKSAPGILRTLWRYLRIVWEKQSIPRAWRRAGGVFIPKEKESSDLSQFRMISLLNVEGKIFFSIVAQRLAKYLERNGMIDTTVQKAGIPGFAGCLEHTSMIWHQIQTAKREKRDLNVVFLDLANAFGSVPHNLIWSSFDYFKVPEIVVNLVKAYFQDIRLCASIAELTTGWQRLEVGIMAGCTVSPLAFTMAMEVIIRASKWVVGGERRQNGMRLPPIRAYMDDMTLLTSTVPCTRRLLDKVNQNLKWASMKIKPSKSRSISIYRGKVSDRKFAIDGEEIPTIREKSVKSLGRWYNVDLNDVEQVVQFRKDVAEGLERIDKSGLPGKLRLWCLQFGLYPRLMWPMSVYEVPLSVAERMERLVSSYIRKWLGAPRCLSNVALYGKGMLQLPVSSLTEEFKCTKVRTELLLSGSKDMLVSNVVPNPSGGRKWNPRAAVQEAEAALRHAEIVGNVQFGRGGLGLGPGKPVWNKAGLKEKRKLVVEQVRRQEELLRGAKAVGQAKQGQWLNWEGVEKRKLSWRDLWNMEEGRIKFLIGATYDVLPTPQNLSLWVQGDQSCPLCSGTASLKHILSGCRISLSQGRYTWRHNQVLRSLAAGIEERRKQVNSGSSRKERLDVQFVREGEKNKAAKSGRKQGGGCLVGADDWQMQVDLGGQLVVPQEIVYSNLRPDIVLWSMSKKTVYFIELTVPWENSVEAAYERKKTKYADLKTESEQRGWKTRVCPVEVGCRGFVAGSAVSLLRELGVHGQNLRKTVREMSDEAARSSQWIWIRRNNSSWGVK

SEQ ID NO: 4171 - protein, 1150 aa, Chelmon rostratus
MVTNRITDMTMPWIHDSVRDGGTDPSLRARGSSTQVTGKATKESKSCAAEDKKLQVCPCGWQKITSIRGLRTHQGRRKCLAVEGQSGRIDQYFLRSQSNQSDEVQRQVENHSSQDISNTIPGEEEVRRGDAVGVEGNRPAKERSMEQKARVKWPRANDSKEWEAVDRDLSVILSRLRGDVVEKLDKIGDVIYSYGRERFGVLVKRKGERVQVGKSRRQREIEKLVKERRQLRKQWRKATEEEREGIKVLQEELRSRLAVLRRAEHLREKRKKKERARSAFFRNPFNFVKGLFNQEKGGQLKATKSEIEQYLKSTYSDSKENRNIGLPPDMPPLGEVEQEMDVSPPRWREVVEVVRRAKASSAPGPNGVPYRVYKSAPGILRTLWRYLRIVWEKQSIPRAWRRAGGVFIPKEKESSDLSQFRMISLLNGEGKIFFSIVAQRLAKYLERNGMIDTTVQKAGIPGFAGCLEHTSMIWHQIQTAKREKRDLNVVFLDLANAFGSVPHNLIWSSFDYFKVPEIVVNLVKAYFQDIRLCASIAELTTGWQRLEVGIMAGCTVSPLAFTMAMEVIIRASKWVVGGERRQNGMRLPPIRAYMDDMTLLTSTVPCTRRLLDKVNQNLKWASMKIKPSKSRSISIYRGKVSDRKFAIDGEEIPTIREKSVKSLGRWYNVDLNDVEQVVQFRKDVAEGLERIDKSGLPGKLRLWCLQFGLYPRLMWPMSVYEVPLSVAERMERLVSSYIRKWLGAPRCLSNVALYGKGMLQLPVSSLTEEFKCTKVRTELLLSGSKDMLVSNVVPNPSGGRKWNPRAAVQEAEAALRHAEIVGNVQFGRGGLGLGPGKPVWNKAGLKEKRKLVVEQVRRQEELLRGAKAVGQAKQGQWLNWEGVEKRKLSWRDLWNMEEGRIKFLIGATYDVLPTPQNLSLWVQGDQSCPLCSGTASLKHILSGCRISLSQGRYTWRHNQVLRSLAAGIEERRKQVNSGSSRKERLDVQFVREGEKNKAAKSGRKQGGGCLVGADDWQMQVDLGGQLVVPQEIVYSNLRPDIVLWSMSKKTVYFIELTVPWENSVEAAYERKKTKYADLKTESEQRGWKTRVCPVEVGCRGFVAGSAVSLLRELGVHGQNLRKTVREMSDEAARSSQWIWIRRNNSSWGVK

SEQ ID NO: 4172 - protein, 1150 aa, Chelmon rostratus
MVTNRITDMTMSWIHDSVRDGGTDPSLRTRGSSTQVTGKATKESKSCAAEDKKLQVCPCGWQKITSIRGLRTHQGRRKCLAVEGQSGRIDQYFLRSQSNQSDEVQRQVETHSSQDISNTIPGEEEVWRGDAVGVEVNRPAKERSMEQKARVRWPRANDSKEWEAVDRDLSVILSRLRGDVVEKLDKIGDVIYSYGRERFGVLVKRKGERVQVGKSRRQREIEKLVKERRQLRKQWRKATEEEREGIKVLQEELRSRLAVLRRAEHLREKRKKKERARSAFFRNPFNFVKGLFNQEKGGQLKATKSEIEQYLKSTYSDSKENRNIGLPPDMPPLGEVEQEMDVSPPRWREVVEVVRRAKASSAPGPNGVPYRVYKSAPGILRTLWRYLRIVWEKQSIPRAWRRAGGVFIPKEKESSDLSQFRMISLLNVEGKIFFSIVAQRLAKYLERNGMIDTTVQKAGIPGFAGCLEHTSMIWHQIQTAKREKRDLNVVFLDLANAFGSVPHNLIWSSFDYFKVPEIVVNLVKAYFQDIRLCASIAELTTGWQRLEVGIMAGCTVSPLAFTMAMEVIIRASKWVVGGERRQNGMRLPPIRAYMDDMTLLTSTVPCTRRLLDKVNQNLKWASMKIKPSKSRSISIYRGKVSDRKFAIDGEEIPTIREKSVKSLGRWYNVDLNDVEQVVQFRKDVAEGLERIDKSGLPGKLRLWCLQFGLYPRLMWPMSVYEVPLSVAERMERLVSSYIRKWLGAPRCLSNVALYGKGMLQLPVSSLTEEFKCTKVRTELLLSGSKDMLVSNVVPNPSGGRKWNPRAAVQEAEAALRHAEIVGNVQFGRGGLGLGPGKPVWNKAGLKEKRKLVVEQVRRQEELLRGAKAVGQAKQGQWLNWEGVEKRKLSWRDLWNMEEGRIKFLIGATYDVLPTPQNLSLWVQGDQSCPLCSGTASLKHILSGCRISLSQGRYTWRHNQVLRSLAAGIEERRKQVNTGSSRKERLDVQFVREGEKNRAAKSGRKQVGGCLVGADDWQMQVDLGGKLVVPQEIVYSNLRPDIVLWSMSKKTVYFIELTVPWENSVEAAYERKKTKYADLKTESEQRGWKTRVCPVEVGCRGFVAGSAVSLLRELGVHGQNLRKTVREMSDEAARSSQWIWIRRNNSSWGVK

SEQ ID NO: 4173 - protein, 1220 aa, Chelmon rostratus
MCSVCQSGRNPNHQYVFRFKFQNITKFLKNTLLITIWTITFIGIALCLYIRKIPQESARAGVEDDSQVDCMVTNRITDMTMPWIHDSVRDGGTDLSLRTRGSSTQVTGKATKESKSCAAEDKKLQVCPCGWQKITSIRGLRTHQGRRKCLAVEGQSGRIDQYFLRSQSNQSDEVQRQVETHSSQDISNTIPGEEEVWRGDAVGVEVNRPAKERSMEQKARVRWPRANDSKEWEAVDRDLSVILSRLRGDVVEKLDKIGDVIYSYGRERFGVLVKRKGERVQVGKSRRQREIEKLVKERRQLRKQWRKATEEEREGIKVLQEELRSRLAVLRRAEHLREKRKKKERARSAFFRNPFNFVKGLFNQEKGGQLKATKSEIEQYLKSTYSDSKENRNIGLPPDMPPLGEVEQEMDVSPPRWREVVEVVRRAKASSAPGPNGVPYRVYKSAPGILRTLWRYLRIVWEKQSIPRAWRRAGGVFIPKEKESSDLSQFRMISLLNVEGKIFFSIVAQRLAKYLERNGMIDTTVQKAGIPGFAGCLEHTSMIWHQIQTAKREKRDLNVVFLDLANAFGSVPHNLIWSSFDYFKVPEIVVNLVKAYFQDIRLCASIAELTTGWQRLEVGIMAGCTVSPLAFTMAMEVIIRASKWVVGGERRQNGMRLPPIRAYMDDMTLLTSTVPCTRRLLDKVNQNLRWASMKIKPSKSRSISIYRGKVSDRKFAIDGEEIPTIREKSVKSLGRWYNVDLNDVEQVVQFRKDVAEGLERIDKSGLPGKLRLWCLQFGLHPRLMWPMSVYEVPLSVAERMERLVSSYNRKWLGAPRCLSNVALYGKGMLQLPVSSLTEEFKCTKVRTELLLSGSKDMLVSNVVPNPSGGRKWNPRAAVQEAEAALRHAEVVGNVQFGRGGLGLGPGKPVWNKAGLKEKRKLVVEQVRRQEELLRGAKAVGQAKQGQWLNWEGVEKRKLSWRDLWNMEEGRIKFLIGATYDVLPTPQNLSLWVQGDQSCPLCSGTASLKHILSGCRISLSQGRYTWRHNQVLRSLAAGIEERRKQVNTGSSRKERLDVQFVREGEKNRAAKSGRKQVGGCLVGADDWQMQVDLGGKLVVPQEIVYSNLRPDIVLWSMSKKTVYFIELTVPWENSVEAAYERKKTKYADLKTESEQRGWKTRVCPVEVGCRGFVAGSAVSLLRELGVHGQNLRKTVREMSDEAARSSQWIWIRRNNSSWGVK

SEQ ID NO: 4174 - protein, 1119 aa, Chelmon rostratus
MVTNRITDMTMPWIHDSVRDGGTDPSLRARGSSTQVTGKATKESKSCAAEDKKLQVCPCDWQKITSIRGLRTHQGRRKCLAVEGQSGRIDQYFLRSQSNQSDEVQRQVENHSSQDISNTIPGEEEVRRGDAVGVEGNRPAKERSMEQKARVRWPRANDSKEWEAVDRDLSVILSRLRGDVVEKLDKIGDVIYSYGRERFGVLVKRKGERVQVGKSRRQREIEKLVKERRQLRKQWRKATEEEREGIKVLQEELRSRLAVLRRAEHLREKRKKKERARSAFFRIPFNFVKGLFNQEKGGQLKATKSEIEQYLKSTYSDSKENRNIGLPPDMPPLGEVEQEMDVSPPRWREVVEVVRRAKASSAPGPNGVPYRVYKSAPGILRTLWRYLRIVWEKQSIPRAWRRAGGVFIPKEKESSDLSQFRMISLLNVEGKIFFSIVAQRLAKYLEGNGMIDTTVQKAGIPGFAGCLEHTSMIWHQIQTAKREKRDLNVVFLDLANAFGSVPHNLIWSSFDYFKVPEIVVNLVKAYFQDIRLCASIAELTTGWQRLEVGIMAGCTVSPLAFTMAMEVIIRASKWVVGGERRQNGMRLPPIRAYMDDMTLLTSTMPCTRRLLDKVNQNLKWASMKIKPSKSRSISIYRGKVSDRKFAIDGEEIPTIREKSVKSLGRWYNVDLNDVEQVVQFRKDVAEGLERRDKSGLPGKLRLWCLQFGLYPRLMWPMSVYEVPLSVAERMERLVSSYIRKWLGAPRCLSNVALYGKGMLQLPVSSLTEEFKCTKVRTELLLSGSKDMLVSNVVPNPSGGRKWNPRAAVQEAEAALRHAEIVGNVQFGRGGLGLGPGKPVWNKASLKEKRKLVVEQVRRQEELLRGAKAVGQAKQGQWLNWEGVEKRKLSWRDLWNMEEGRIKFLIGATYDVLPTPQNLSLWVQGDQSCPLCSGTASLKHILSGCRISLSQGRYTWRHNQVLRSLAAGIEERRKQVNSGSSRKERLDVQFVREGEKNKAAKSGRKQVGGCLVGADDWQMQVDLGGKLVVPQEIVYSNLRPDIVLWSMSKKTVYFIELTVPWENSVEAAYERKKTKYADLKTESEQRGWKTRVCPVEVGCRGFVAGSAVSLLRELGVHGQI

SEQ ID NO: 4175 - protein, 1006 aa, Chelmon rostratus
MEQKARVKWPRANDSKEWEAVDRDLSVILSRLRGDVVEKLDKIGDVIYSYGRERFGVLVKRKGERVQVGKSRRQREIEKLVKERRQLRKQWRKATEEEREGIKVLQEELRSRLAVLRRAEHLREKRKKKERARSAFFRNPFNFVKGLFNQEKGGQLKATKSEIEQYLKSTYSDSKENRNIGLPPDMPPLGEVEQEMDVSPPRWREVVEVVRRAKASSAPGPNGVPYRVYKSAPGILRTLWRYLRIVWEKQSIPRAWRRAGGVFIPKEKESSDLSQFRMISLLNVEGKIFFSIVAQRLAKYLERNGMIDTTVQKAGIPGFAGCLEHTSMIWHQIQTAKREKRDLNVVFLDLANAFGSVPHNLIWSSFDYFKVPEIVVNLVKAYFQDIRLCASIAELTTGWQRLEVGIMAGCTVSPLAFTMAMEVIIRASKWVVGGERRQNGMRLPPIRAYMDDMTLLTSTVPCTRRLLDKVNQNLKWASMKIKPSKSRSISIYRGKVSDRKFAIDGEEIPTIREKSVKSLGRWYNVDLNDVEQVVQFRKDVAEGLERIDKSGLPGKLRLWCLQFGLYPRLMWPMSVYEVPLSVAERMERLVSSYIRKWLGAPRCLSNVALYGKGMLQLPVSSLTEEFKCTKVRTELLLSGSKDMLVSNVVPNPSGGRKWNPRAAVQEAEAALRHAEIVGNVQFGRGGLGLGPGKPVWNKAGLKEKRKLVVEQVRRQEELLRGAKAVGQAKQGQWLNWEGVEKRKLSWRDLWNMEEGRIKFLIGATYDVLPTPQNLSLWVQGDQSCPLCSGTASLKHILSGCRISLSQGRYTWRHNQVLRSLAAGIEERRKQVNSGSSRKERLDVQFVREGEKNKAAKSGRKQGGGCLVGADDWQMQVDLGGQLVVPQEIVYSNLRPDIVLWSMSKKTVYFIELTVPWENSVEAAYERKKTKYADLKTESEQRGWKTRVCPVEVGCRGFVAGSAVSLLRELGVHGQNLRKTVREMSDEAARSSQWIWIRRNNSSWGVK

SEQ ID NO: 4176 - protein, 819 aa, Epinephelus lanceolatus
MDVRPPRWKEVQEVVRRAKASSAPGPNGVPYRVYKSAPDTLKFLWKQLRIVWEKQIIPRAWRRAGGVLIPKEKESVDLSQFRMISLLNVEGKIFFSVVAQRLASYLERNSLIDTMVQKAGIPGFSGCLEHTSMIWHQIQAAKIKKRDLHVVFLDLANAFGSVPHSLIWSAFDYFRVPQVVVNLVKAYFQDIRLCLSTAGFTTGWQRLEIGIMAGCTISPLAFTMAMEVIIRASKWVVGGERRQNGLHLPPVRAYMDDMTLVTTTMPCTKRLLEKVNKNLKWASMKIKPSKSRSISICRGKLSDRKFVIDDEDIPTIREKSVKSLGRWYNVELNDKEQVVKFRKDVAEGLDRIDKSELPGKLKLWCLQFGLYPRLMWPLSVYEIPISVVERMERSVSSYIRKWLGAPRCLSSVALYGKGILQLPVSSLTEEFKCTKVRTELLLSGSKDVVVRSVVPNPTKGRKWNPRSAVQEAEAALRHAEIVGNVQFGRGGLGLGSGKPVWNTAGLKDKRKLVVEQIRRQEEIVRGAKVVAQAKQGQWLNWESVEKRKLSWRDLWSMEENRIRFLVGATYDVLPTPQNLKLWVNEDPSCPLCSRTATLKHILSGCKVSLSQGRYTWRHNQVLKCLAAGIEGKRRQVNSEGVKDRGLVIQFVREGEKYRRDKLVRRQGCGRLEGACDWEMQVDLGGKLVVPQEIVCTRQRPDLVLWSVSQQIVYFIELTVPWEDSVEEAYERKKLRYADLGAEAEQRGWKTRICPVEVGCRGFIARSTVSLLGELGVRGQNLRKTVREMSDEAIKCSQFIYYRRNNVSWGPAGGTTKQGT

SEQ ID NO: 4177 - protein, 1021 aa, Epinephelus lanceolatus
MPVRERTMEQKVRVRWPRANDIKEWEIFNRDLSVILSRLRGNAIERLEKMGDIMYSYGVERFGVHERKRSERVQSGKSRRQREIEKLVKERRQLRKQWKKATEEEREGIKVLQEELRSRLAVLRRAEHLRKKRRKKEYARTGFFRDPFKFVKGLFSQEKGGQLKAERLEVEEYLRNTYSDLEKNRIVGFPPDIPPLGGIEHEMDVRPPRWKEVQEVVRRAKASSAPGPNGVPYRVYKSAPDTLKFLWKQLRIVWEKQIIPRAWRRAGGVLIPKEKESVDLSQFRMISLLNVEGKIFFSVVAQRLASYLERNSLIDTMVQKAGIPGFSGCLEHTSMIWHQIQAAKINKRDLHVIFLDLANAFGSVPHSLIWSAFDYFRVPQVVVNLVKAYFQDIRLCLSTAGFTTGWQRLEIGIMAGCTISPLAFTMAMEVIIRASKWVVGGERRQNGLHLPPVRAYMDDMTLVTTTMPCTKRLLEKVNKNLKWASMKIKPSKSRSISICRGKLSDRKFVIDDEDIPTIREKSVKSLGRWYNVELNDKEQVVKFRKDVAEGLDRIDKSELPGKLKLWCLQFGLYPRLMWPLSVYEIPISVVERMERSVSSYIRKWLGAPRCLSSVALYGKGILQLPVSSLTEEFKCTKVRTELLLSGSKDVVVRSVVPNPTKGRKWNPRSAVQEAEAALRHAEIVGNVQFGRGGLGLGSGKPVWNTAGLKDKRKLVVEQIRRQEEIVRGAKVVAQAKQGQWLNWESVEKRKLSWRDLWSMEENRIRFLVGATYDVLPTPQNLKLWVNEDPSCPLCSRTATLKHILSGCKVSLSQGRYTWRHNQVLKCLAAGIEGKRRQVNSEGVKDRGLVIQFVREGEKYRRDKLVRRQGCGRLEGACDWEMQVDLGGKLVVPQEIVCTRQRPDLVLWSVSQQIVYFIELTVPWEDSVEEAYERKKLRYADLGAEAEQRGWKTRICPVEVGCRGFIARSTVSLLGELGVRGQNLRKTVREMSDEAIKCSQFIYYRRNNVSWGPAGGTTKQGT

SEQ ID NO: 4178 - protein, 1206 aa, Chelmon rostratus
MGNTLIAPQVLVWASNPWQQWQALTLLQPDLATTNIRKIPQESARAGVEDDSQVDCMVTNRITDMTMPWIHDSVRDGGTDPSLRARGSSTQVTGKATKESKSCAAEDKKLQVCPCGWQKITSIRGLRTHQGRRKCLAVEGQSGRIDQYFLRSQSNQSDEVQRQVENHSSQDISNTIPGEEEVRRGDAVGVEGNRPAKERSMEQKARVKWPRANDSKEWEAVDRDLSVILSRLRGDVVEKLDKIGDVIYSYGRERFGVLVKRKGERVQVGKSRRQREIEKLVKERRQLRKQWRKATEEEREGIKVLQEELRSRLAVLRRAEHLREKRKKKERARSAFFRNPFNFVKGLFNQEKGGQLKATKSEIEQYLKSTYSDSKENRNIGLPPDMPPLGEVEQEMDVSPPRWREVVEVVRRAKASSAPGPNGVPYRVYKSAPGILRTLWRYLRIVWEKQSIPRAWRRAGGVFIPKEKESSDLSQFRMISLLNVEGKIFFSIVAQRLAKYLERNGMIDTTVQKAGIPGFAGCLEHTSMIWHQIQTAKREKRDLNVVFLDLANAFGSVPHNLIWSSFDYFKVPEIVVNLVKAYFQDIRLCASIAELTTGWQRLEVGIMAGCTVSPLAFTMAMEVIIRASKWVVGGERRQNGMRLPPIRAYMDDMTLLTSTVPCTRRLLDKVNQNLKWASMKIKPSKSRSISIYRGKVSDRKFAIDGEEIPTIREKAVKSLGRWYNVDLNDVEQVVQFRKDVAEGLERIDKSGLPGKLRLWCLQFGLYPRLMWPMSVYEVPLSVAERMERLVSSYIRKWLGAPRCLSNVALYGKGMLQLPVSSLTEEFKCTKVRTELLLSGSKDMLVSNVVPNPSGGRKWNPRAAVQEAEAALRHAEIVGNVQFGRGGLGLGPGKPVWNKAGLKEKRKLVVEQVRRQEELLRGAKAVGQAKQGQWLNWEGVEKRKLSWRDLWNMEEGRIKFLIGATYDVLPTPQNLSLWVQGDQSCPLCSGTASLKHILSGCRISLSQGRYTWRHNQVLRSLAAGIEERRKQVNSGSSRKERLDVQFVREGEKNRAAKSGRKQGGGCLVGADDWQMQVDLGGQLVVPQEIVYSNLRPDIVLWSMSKKTVYFIELTVPWENSVEAAYERKKTKYADLKTESEQRGWKTRVCPVEVGCRGFVAGSAVSLLRELGVHGQNLRKTVREMSDEAARSSQWIWIRRNNSSWGVK

SEQ ID NO: 4179 - protein, 821 aa, Chelmon rostratus
MPPLGEVEQEMDVSPPRWREVVEVVRRAKASSAPGPNGVPYRVYKSAPSILRTLWRYLRIVWEKQSIPRAWRRAGGVFIPKEKESSDLSQFRMISLLNVEGKIFFSIVAQRLAKYLERNGMIDTTVQKAGIPGLTGCLEHTSMIWHQIQTAKREKRDLNVVFLDLANAFGSVPHNLIWSSFDYFKVPEIVVNLVKAYFQDIRLCASIAELTTGWQRLEVGIMAGCTVSPLAFTMAMEVIMRASKWVVGGERRQNGMRLPPIRAYMDDMTLLTSTVPCTRRLLDKVNQNLKWASMKIKPSKSRSISIYRGKVSDRKFAIDGEEIPTIREKSVKSLGRWYNVDLNDAEQVVQFRKDVAEGLERIDKSGLPGKLRLWCLQFGLYPRLMWPMSVYEVPLSVAERMERLVSSYIRKWLGAPRCLSNVALYGKGMLQLPVSSLTEEFKCTKVRTELLLSGSKDMLVSNVVPNPSGGRKWNPRAAVQEAEAALRHAEIVGNVQFGRGGLGLGPGKPVWNKAGLKEKRKLVVEQVRRQEELLRGAKAVGQAKQGQWLNWEGVEKRKLSWRDLWNMEEGRIKFLIGATYDVLPTPQNLSLWVQGDQSCPLCSGTASLKHILSGCSISLSQGRYTWRHNQVLRSLAAGIEERRKQVNSGSSRKERLDVQFVREGEKNRAAKSGRKQVGGCLVGADDWQMQVDLGGKLVVPQEIVYSNLRPDIVLWSMSKKTVYFIELTVPWENSVEAAYERKKTKYADLKTESEQRGWKTRVCPVEVGCRGFVAGSAVSLLRELGVHGQNLRKTVREMSDKAARSSQWIWIRRNNSSWGVK

SEQ ID NO: 4180 - protein, 1150 aa, Chelmon rostratus
MVTNRITDMTMPWIHDSVRDGGTDPSLRARCSSTQVTGKATKESKSCAAEDKKLQVCPCGWQKITSIRGLRTHQGRRKCLAVEGQSGRIDQYFLRSQSNQSDEVQRQVENHSSQDISNTIPGEEEVRRGDAVGVEVNRPAKERSMEQKARVRWPRANDSKEWEAVDRDLSVILSRLRGDVVEKLDKIGDVIYSYGRERFGVLVKRKGERVQVGKSRRQREIEKLVKERRQLRKQWRKATEEEREGIKVLQEELRSRLAVLRRAEHLREKRKKKERARSAFFRNPFNFVKGLFNQEKGGQVKATKSEIEQYLKSTYSDSKENRNIGLPPDMPPLGEVEQEMDVSPPRWREVVEVVRRAKASSAPGPNGVPYRVYKSAPGILRTLWRYLRIVWEKQSIPRAWRRAGGVFIPKEKESSDLSQFRMISLLNVEGKIFFSIVAQRLAKYLERNGMIDTTVQKAGIPGFAGCLEHTSMIWHQIQTAKREKRDLNVVFLDLANAFGSVPHNLIWSSFDYFKVPEIVVNLVKAYFQDIRLCASIAELTTGWQRLEVGIMAGCTVSPLAFTMAMEVIIRASKWVVGGERRQNGMRLPPIRAYMDDMTLLTSTVPCTRRLLDKVNQNLKWASMKIKPSKSRSISIYRGKVSDRKFAIDGEEIPTIREKSVKSLGRWYNVDLNDAEQVMQFRKDVAEGLERIDKSGLPGKLRLWCLQFGLYPRLMWPMSVYEVPLSVAERMERLVSSYIRKWLGAPRCLSNVALYGKGMLQLPVSSLTEEFKCTKVGTELLLSGSKDMLVSNVVPNPSGGRKWNPRAAVQEAEAALRHAEIVGNVQFGRGGLGLGPGKPVWNKAGLKEKRKLVVEQVRRQEELLRGAKAVGQAKQGQWLNWEGVEKRKLSWRDLWNMEEGRIKFLIGVTYDVLPTPQNLSLWVQGDQSCPLCSGTASLKHILSGCRISLSQGRYTWRHNQVLRSLAAGIEERRKQVNSGSSRKERLDVQFVREGEKNRAAKSGRKQVGGCLVGADDWQMQVDLGRKLVVPQEIVYSNLRPDIVLWSMSKKTVYFIELTVPWENSVEAAYERKKTKYADLKTESEQRGWKTRVCPVEVGCRGFVAGSAVSLLRELGVHGQKLRKTVREMSDEAARSSQWIWIRRNNSSWGVK

SEQ ID NO: 4181 - protein, 1150 aa, Chelmon rostratus
MVTNRITDMTMPWIYDSVRDGGTDPSLRARGSSTQVTGKATKESKSCAAEDKKLQVCPCGWQKITSIRGLRTHQGRRKCLAVEGQSGRIDQYFLRSQSNQSDEVQRQVENHSSQDISNTIPGEEEVRRGDAVGVEGNRPAKERSMEQKARVKWPRANDSKEWEAVDRDLSVILSRLRGDVVEKLDKIGDVIYSYGRERFGVLVKRKGERVQVGKSRRQREIEKLVKERRQLRKQWRKATEEEREGIKVLQEELRSRLAVLRRAEHLREKRKKKERARSAFFRNPFNFVKGLFNQEKGGQLKATKSEIEQYLKSTYSDSKENRNIGLPPDMPPLGEVEQEMDVSPPRWREVVEVVRRAKASSAPGPNGVPYRVYKSAPGILRTLWRYLRIVWEKQSIPRAWRRAGGVFIPKEKESSDLSQFRMISLLNVEGKIFFSIVAQRLAKYLERNGMIDTTVQKAGIPGFAGCLEHTSMIWHQIQTAKREKRDLNVVFLDLANAFGSVPHNLIWSSFDYFKVPEIVVNLVKAYFQDIRLCASIAELTTGWQRLEVGIMAGCTVSPLAFTMAMEVIIRASKWVVGGERRQNGMRLPPIRAYMDDVTLLTSTVPCTRRLLDKVNQNLKWASMKIKPSKSRSISIYRGKVSDRKFAIDGEEIPTIREKSVKSLGRWYNVDLNDVEQVVQFRKDVAEGLERIDKSGLPGKLRLWCLQFGLYPRLMWPMSVYEVPLSVAERMERLVSSYIRKWLGAPRCLSNVALYGKGMLQLPVSSLTEEFKCTKARTELLLSGSKDMLVSNVVPNPSGGRKWNPRAAVQEAEAALRHAEIVGNVQFGRGGLGLGPGKPVWNKAGLKEKRKLVVEQVRRQEELLRGAKAVGQAKQGQWLNWEGVEKRKLSWRDLWNMEEGRIKFLIGATYDVLPTPQNLSLWVQGDQSCPLCSGTASLKHILSGCRISLSQGRYTWRHNQVLRSLAAGIEERRKQVNSGSSRKERLDVQFVREGEKNKAAKSGRKQGGGCLVGADDWQMQVDLGGQLVVPQEIVYSNLRPDIVLWSMSKKTVYFIELTVPWENSVEAAYERKKTKYADLKTESEQRGWKTRVCPVEVGCRGFVAGSAVSLLRELGVHGQNLRKTVREMSDEAARSSQWIWIRRNNSSWGVK

SEQ ID NO: 4182 - protein, 968 aa, Epinephelus lanceolatus
MYSYGVERFGVHERKRSERVQSGKSRRQREIEKLVKERRQLRKQWKKATEEEREGIKVLQEELRSRLAVLRRAEHLRKKRRKKEYARTGFFRDPFKFVKGLFSQEKGGQLKAERLEVEEYLRNTYSDLEKNRIVGFPPDIPPLGGIEHEMDVRPPRWKEVQEVVRRAKASSAPGPNGVPYRVYKSAPDTLKFLWKQLRIVWEKQIIPRAWRRAGGVLIPKEKESVDLSQFRMISLLNVEGKIFFSVVAQRLASYLERNSLIDTMVQKAGIPGFSGCLEHTSMIWHQIQAAKINKRDLHVIFLDLANAFGSVPHSLIWSAFDYFRVPQVVVNLVKAYFQDIRLCLSTAGFTTGWQRLEIGIMAGCTISPLAFTMAMEVIIRASKWVVGGERRQNGLHLPPVRAYMDDMTLVTTTMPCTKRLLEKVNKNLKWASMKIKPSKSRSISICRGKLSDRKFVIDDEDIPTIREKSVKSLGRWYNVELNDKEQVVKFRKDVAEGLDRIDKSELPGKLKLWCLQFGLYPRLMWPLSVYEIPISVVERMERSVSSYIRKWLGAPRCLSSVALYGKGILQLPVSSLTEEFKCTKVRTELLLSGSKDVVVRSVVPNPTKGRKWNPRSAVQEAEAALRHAEIVGNVQFGRGGLGLGSGKPVWNTAGLKDKRKLVVEQIRRQEEIVRGAKVVAQAKQGQWLNWESVEKRKLSWRDLWSMEENRIRFLVGATYDVLPTPQNLKLWVNEDPSCPLCSRTATLKHILSGCKVSLSQGRYTWRHNQVLKCLAAGIEGKRRQVNSEGVKDRGLVIQFVREGEKYRRDKLVRRQGCGRLEGACDWEMQVDLGGKLVVPQEIVCTRQRPDLVLWSVSQQIVYFIELTVPWEDSVEEAYERKKLRYADLGAEAEQRGWKTRICPVEVGCRGFIARSTVSLLGELGVRGQNLRKTVREMSDEAIKCSQFIYYRRNNVSWGPAGGTTKQGT

SEQ ID NO: 4183 - protein, 1046 aa, Epinephelus lanceolatus
MQDISNAATEEEGVVREDAGDTEASMLARERTMEQKVRVRWPRANDSKEWEIVNRDLSVILSRLRGNAIQRLEKMGDIMYSYGVERFGVHERKRSERVQSGKSRRQREIEKLVKERRQLRKQWKKATEEEREGIKVLQEELRSRLAVLRRAEHLRKKRRKKEYARTGFFRDPFKFVKGLFSQEKGGQLKAERLEVEEYLRNTYSDLEKNRIVGFPPDIPPLGGIEHEMDVRPPRWKEVQEVVRRAKASSAPGPNGVPYRVYKSAPDTLKFLWKQLRIVWEKQIIPRAWRRAGGVLIPKEKESVDLSQFRMISLLNVEGKIFFSVVAQRLASYLERNSLIDTMVQKAGIPGFSGCLEHTSMIWHQIQAAKINKRDLHVIFLDLANAFGSVPHSLIWSAFDYFRVPQVVVNLVKAYFQDIRLCLSTAGFTTGWQRLEIGIMAGCTISPLAFTMAMEVIIRASKWVVGGERRQNGLHLPPVRAYMDDMTLVTTTMPCTKRLLEKVNKNLKWASMKIKPSKSRSISICRGKLSDRKFVIDDEDIPTIREKSVKSLGRWYNVELNDKEQVVKFRKDVAEGLDRIDKSELPGKLKLWCLQFGLYPRLMWPLSVYEIPISVVERMERSVSSYIRKWLGAPRCLSSVALYGKGILQLPVSSLTEEFKCTKVRTELLLSGSKDVVVRSVVPNPTKGRKWNPRSAVQEAEAALRHAEIVGNVQFGRGGLGLGSGKPVWNTAGLKDKRKLVVEQIRRQEEIVRGAKVVAQAKQGQWLNWESVEKRKLSWRDLWSMEENRIRFLVGATYDVLPTPQNLKLWVNEDPSCPLCSRTATLKHILSGCKVSLSQGRYTWRHNQVLKCLAAGIEGKRRQVNSEGVKDRGLVIQFVREGEKYRRDKLVRRQGCGRLEGACDWEMQVDLGGKLVVPQEIVCTRQRPDLVLWSVSQQIVYFIELTVPWEDSVEEAYERKKLRYADLGAEAEQRGWKTRICPVEVGCRGFIARSTVSLLGELGVRGQNLRKTVREMSDEAIKCSQFIYYRRNNVSWGPAGGTTKQGT

SEQ ID NO: 4184 - protein, 1150 aa, Chelmon rostratus
MVTNRITDMTMPWIHDSVRDGGTDPSLRARGSSTQVTGKATKESKSCAAEDKKLQVCPCGWQKITSIRGLRTHQGRRKCLAVEGQSGRIDQYFLRSQSNQSDEVQRQVENHSSQDISNTIPGEEEVRRGDAVGVEGNRPAKERSMEQKARVKWPRANDSKEWEAVDRDLSVILSRLRGDVVEKLDKIGDVIYSYGRERFGVLVKRKGERVQVGKSRRQREIEKLVKERRQLRKQWRKATEEEREGIKVLQDELRSRLAVLRRAEHLREKRKKKERARSAFFRNPFNFVKGLFNQEKGGQLKATKSEIEQYLKSTYSDSKENRNIGLPPDMPPLGEVEQEMDVSPPRWREVVEVVRRAKASSAPGPNGVPYRVYKSAPGILRTLWRYLRIVWEKQSIPRAWRRAGGVFIPKEKESSDLSQFRMISLLNVEGKIFFSIVAQRLAKYLERNGMIDTTVQKAGIPGFAGCLEHTSMIWHQIQTAKREKRDLNVVFLDLANAFGSVPHNLIWSSFDYFKVPEIVVNLVKAYFQDIRLCASIAELTTGWQRLEVGIMAGCTVSPLAFTMAMEVIIRASKWVVGGERRQNGMRLPPIRAYMDDMTLLTSTVPCTRRLLDKVNQNLKWASMKIKPSKSRSISIYRGKVSDRKFAIDGEEIPTIREKAVKSLGRWYNVDLNDVEQVVQFRKDVAEGLERIDKSGLPGKLRLWCLQFGLYPRLMWPMSVYEVPLSVAERMERLVSSYIRKWLGAPRCLSNVALYGKGMLQLPVSSLTEEFKCTKVRTELLLSGSKDMLVSNVVPNPSGGRKWNPRAAVQEAEAALRHAEIVGNVQFGRGGLGLGPGKPVWNKAGLKEKRKLVVEQVRRQEELLRGAKAVGQAKQGQWLNWEGVEKRKLSWRDLWNMEEGRIKFLIGATYDVLPTPQNLSLWVQGDQSCPLCSGTASLKHILSGCRISLSQGRYTWRHNQVLRSLAAGIEERRKQVNSGSSRKERLDVQFVREGEKNRAAKSGRKQGGGCLVGADDWQMQVDLGGQLVVPQEIVYSNLRPDIVLWSMSKKTVYFIELTVPWENSVEAAYERKKTKYADLKTESEQRGWKTRVCPVEVGCRGFVAGSAVSLLRELGVHGQNLRKTVREMSDEAARSSQWIWIRRNNSSWGVK

SEQ ID NO: 4185 - protein, 1208 aa, Chelmon rostratus
MNVPVLVLTFSCSSLVRCSKSNEVAGSEIQTKDNNQGHLFTPQESARAGVEDDSQVDCMVTNRITDMTMPWIHDSVRDGGTDPSLRARGSSTQVTGKATKESKSCAAEDKKLQVCPCGWQKITSIRGLRTHQGRRKCLAVEGQSGRIDQYFLRSQSNQSDEVQRQVENHSSQDISNTIPGEEEVRRGDAVGVEGNRPAKERSMEQKARVKWPRANDSKEWEAVDRDLSVILSRLRGDVVEKLDKIGDVIYSYGRERFGVLVKRKGERVQVGKSRRQREIEKLVKERRQLRKQWRKATEEEREGIKVLQEELRSRLTVLRRAEHLREKRKKKERARSAFFRNPFNFVKGLFNQEKGGQLKATKSEIEQYLKSTYSDSKENRNIGLPPDMPPLGEVEQEMDVSPPRWREVVEVVRRAKASSAPGPNGVPYRVYKSAPGILRTLWRYLRIVWEKQSIPRAWRRAGGVFIPKEKESSDLSQFRMISLLNVEGKIFFSIVAQRLAKYLERNGMIDTTVQKAGIPGFAGCLEHTSMIWHQIQTAKREKRDLNVVFLDLANAFGSVPHNLIWSSFDYFKVPEIVVNLVKAYFQDIRLCASIAELTTGWQRLEVGIMAGCTVSPLAFTMAMEVIIRASKWVVGGERRQNGMRLPPIRAYMDDMTLLTSTVPCTRRLLDKVNQNLKWASMKIKPSKSRSISIYRGKVSDRKFAIDGEEIPTIREKSVKSLGRWHNVDLNDVEQVVQFRKDVAEGLERIDKSGLPGKLRLWCLQFGLYPRLMWPMSVYEVPLSVAERMERLVSSYIRKWLGAPRCLSNVALYGKGMLQLPVSSLTEEFKCTKVRTELLLSGSKDMLVSNVVPNPSGGRKWNPRAAVQEAEAALRHAEIVGNVQFGRGGLGLGPGKPVWNKAGLKEKRKLVVEQVRRQEELLRGAKAVGQAKQGQWLNWEGVEKRKLSWRDLWNMEEGRIKFLIGATYDVLPTPQNLSLWVQGDQSCPLCSGTASLKHILSGCRISLSQGRYTWRHNQVLRSLAAGIEERRKQVNSGSSRKERLDVQFVREGEKNRAAKSGRKQGGGCLVGADDWQMQVDLGGQLVVPQEIVYSNLRPDIVLWSMSKKTVYFIELTVPWENSVEASYERKKTKYADLKTESEQRGWKTRVCPVEVGCRGFVAGSAVSLLRELGVHGQNLRKTVREMSDEAARSSQWIWIRRNNSSWGVK

SEQ ID NO: 4186 - protein, 1150 aa, Chelmon rostratus
MVTNRITDMTMPWIHDSVRDGGTDPSLRTRGSSTQVTGKATKESKSCAAEDKKLQVCPCGWQKITSIRGLRTHQGRRKCLAVEGQSGRIDQYFLRSQSNQSDEVQRQVENHSSQDISNTIPGEEEVRRGDAVGVEVNRPAKERSMEQKARVRWPRANDSKEWEAVDRDLSVILSRLRGDVVEKLDKIGDVIYSYGRERFGVLVKRKGERVQVGKSRRQREIEKLVKERRQLRKQWRKATEEEREGIKVLQEELRSRLAVLRRAEHLREKRKKKERARSAFFRNPFNFVKGLFNQEKGGQLKATKSEIEQYLKSTYSDSKENRNIGLPPDMPPLGEVEQEMDVSPPRWREVVEVVRRAKASSAPGPNGVPYRVYKSAPGILRTLWRYLRIVWEKQSIPRAWRRAGGVFIPKEKESSDLSQFRMISLLNVEGKIFFSIVAQRLAKYLERNGMIDTTVQKAGIPGFAGCLEHTSMIWHQIQTAKREKRDLNVVFLDLANAFGSVPHNLIWSSFDYFKVPEIVVNLVKAYFQDIRLCASIAELTTGWQRLEVGIMAGCTVSPLAFTMAMEVIIRASKWVVGGERRQNGMRLPPIRAYMDDMTLLTSTVPCTRRLLDKVNQNLKWASMKIKPSKSRSISIYRGKVSDRKFAIDGEEIPTIREKSVKSLGRWYNVDLNDVEQVVQFRKDVAEGLERIDKSGLPGKLRLWCLQFGLYPRLMWPMSVYEVPLSVAERMERLVSSYIRKWLGAPRSLSNVALYGKGMLQLPVSSLTEEFKCTKVRTELLLSGSMDMLVSNVVPNPSGGRKWNPRAAVQEAEAALRHAEIVGNVQFGRGGLGLGPGKPVWNKAGLKEKRKLVVEQVRRQEELLRGAKAVGQAKQGQWLNWEGVEKRKLSWRDLWNMEEGRIKFLIGATYDVLPTPQNLSLWVQGDQSCPLCSGTASLKHILSGCRISLSQGRYTWRHNQVLRSLAAGIEERRKQVNTGSSRKERLDVQFVREGEKNRAAKSGRKQVGGCLVGADDWQMQVDLGGKLVVPQEIVYSNLRPDIVLWSMSKKTVYFIELTVPWENSVEAAYERKKTKYADLKTESEQRGWKTRVCPVEVGCRGFVAGSAVSLLRELGVHGQNLRKTVREMSDEAARSSQWIWIRRNNSSWGVK

SEQ ID NO: 4187 - protein, 943 aa, Epinephelus lanceolatus
MTDFVYYFNHFASTDHHQNSIICTEEEREGIKVLQEELRSRLAVLRRAEHLRKKRRKKEYARTGFFRDPFKFVKGLFSQEKGGQLKAERLEVEEYLRNTYSDLEKNRIVGFPPDIPPLGGIEHEMDVRPPRWKEVQEVVRRAKASSAPGPNGVPYRVYKSAPDTLKFLWKQLRIVWEKQIIPRAWRRAGGVLIPKEKESVDLSQFRMISLLNVEGKIFFSVVAQRLASYLERNSLIDTMVQKAGIPGFSGCLEHTSMIWHQIQAAKINKRDLHVIFLDLANAFGSVPHSLIWSAFDYFRVPQVVVNLVKAYFQDIRLCLSTAGFTTGWQRLEIGIMAGCTISPLAFTMAMEVIIRASKWVVGGERRQNGLHLPPVRAYMDDMTLVTTTMPCTKRLLEKVNKNLKWASMKIKPSKSRSISICRGKLSDRKFVIDDEDIPTIREKSVKSLGRWYNVELNDKEQVVKFRKDVAEGLDRIDKSELPGKLKLWCLQFGLYPRLMWPLSVYEIPISVVERMERSVSSYIRKWLGAPRCLSSVALYGKGILQLPVSSLTEEFKCTKVRTELLLSGSKDVVVRSVVPNPTKGRKWNPRSAVQEAEAALRHAEIVGNVQFGRGGLGLGSGKPVWNTAGLKDKRKLVVEQIRRQEEIVRGAKVVAQAKQGQWLNWESVEKRKLSWRDLWSMEENRIRFLVGATYDVLPTPQNLKLWVNEDPSCPLCSRTATLKHILSGCKVSLSQGRYTWRHNQVLKCLAAGIEGKRRQVNSEGVKDRGLVIQFVREGEKYRRDKLVRRQGCGRLEGACDWEMQVDLGGKLVVPQEIVCTRQRPDLVLWSVSQQIVYFIELTVPWEDSVEEAYERKKLRYADLGAEAEQRGWKTRICPVEVGCRGFIARSTVSLLGELGVRGQNLRKTVREMSDEAIKCSQFIYYRRNNVSWGPAGGTTKQGT

SEQ ID NO: 4188 - protein, 1006 aa, Chelmon rostratus
MEQKARVKWPRANDSKEWEAVDRDLSVILSRLRGDVVEKLDKIGDVIYSYGRERFGVLVKRKGERVQVGKSRRQREIEKLVKERRQLRKQWRKATEEEREGIKVLQEELRSRLAVLRRAEHLREKRKKKERARSAFFRNPFNFVKGLFNQEKGGQLKATKSEIEQYLKSTYSDSKENRNIGLPPDMPPLGEVEQEMDVSPPRWREVVEVVRRAKASSAPGPNGVPYRVYKSAPGILRTLWRYLRIVWEKQSIPRAWRRAGGVFIPKEKESSDLSQFRMISLLNVEGKIFFSIVAQRLAKYLERNGMIDTTVQKAGIPGFAGCLEHTSMIWHQIQTAKREKRDLNVVFLDLANAFGSVPHNLIWSSFDYFKVPEIVVNLVKAYFQDIRLCASIAELTTGWQRLEVGIMAGCTVSPLAFTMAMEVIIRASKWVVGGERRQNGMRLPPIRAYMDDMTLLTSTVPCTRRLLDKVNQNLKWASMKIKPSKSRSISIYRGKVSDRKFAIDGEEIPTIREKSVKSLGRWYNVDLNDVEQVVQFRKDVAEGLERIDKSGLPGKLRLWCLQFGLYPRLMWPMSVYEVPLSVAERMERLVSSYIRKWLGAPRCLSNVALYGKGMLQLPVSSLTEEFKCTKVRTELLLSGSKDMLVSNVVPNPSGGRKWNPRAAVQEAEAALRHAEIVGNVQFGRGGLGLGPGKPVWNKAGLKEKRKLVVEQVRRQEELLRGAKAVGQAKQGQWLNWEGVEKRKLSWRDLWNMEEGRIKFLIGATYDVLPTPQNLSLWVQGDQSCPLCSGTASLKHILSGCRISLSQGRYTWRHNQVLRSLAAGIEERRKQVNSGSSRKERLDVQFVREGEKNRAAKSGRKQGGGCLVGADDWQMQVDLGGQLVVPQEIVYSNLRPDIVLWSMSKKTVYFIELTVPWENSVEAAYERKKTKYADLKTESEQRGWKTRVCPVEVGCRGFVAGSAVSLLRELGVHGQNLRKTVREMSDEAARSSQWIWIRRNNSSWGVK

SEQ ID NO: 4189 - protein, 1014 aa, Epinephelus lanceolatus
MEQKVRVRWPRANDSKEWEIVNRDLSVILSRLRGNAIQRLEKMGDIMYSYGVERFGVHERKRSERVQSGKSRRQREIEKLVKERRQLRKQWKKATEEEREGIKVLQEELRSRLAVLRRAEHLRKKRRKKEYARTGFFRDPFKFVKGLFSQEKGGQLKAERLEVEEYLRNTYSDLEKNRIVGFPPDIPPLGGIEHEMDVRPPRWKEVQEVVRRAKASSAPGPNGVPYRVYKSAPDTLKFLWKQLRIVWEKQIIPRAWRRAGGVLIPKEKESVDLSQFRMISLLNVEGKIFFSVVAQRLASYLERNSLIDTMVQKAGIPGFSGCLEHTSMIWHQIQAAKINKRDLHVIFLDLANAFGSVPHSLIWSAFDYFRVPQVVVNLVKAYFQDIRLCLSTAGFTTGWQRLEIGIMAGCTISPLAFTMAMEVIIRASKWVVGGERRQNGLHLPPVRAYMDDMTLVTTTMPCTKRLLEKVNKNLKWASMKIKPSKSRSISICRGKLSDRKFVIDDEDIPTIREKSVKSLGRWYNVELNDKEQVVKFRKDVAEGLDRIDKSELPGKLKLWCLQFGLYPRLMWPLSVYEIPISVVERMERSVSSYIRKWLGAPRCLSSVALYGKGILQLPVSSLTEEFKCTKVRTELLLSGSKDVVVRSVVPNPTKGRKWNPRSAVQEAEAALRHAEIVGNVQFGRGGLGLGSGKPVWNTAGLKDKRKLVVEQIRRQEEIVRGAKVVAQAKQGQWLNWESVEKRKLSWRDLWSMEENRIRFLVGATYDVLPTPQNLKLWVNEDPSCPLCSRTATLKHILSGCKVSLSQGRYTWRHNQVLKCLAAGIEGKRRQVNSEGVKDRGLVIQFVREGEKYRRDKLVRRQGCGRLEGACDWEMQVDLGGKLVVPQEIVCTRQRPDLVLWSVSQQIVYFIELTVPWEDSVEEAYERKKLRYADLGAEAEQRGWKTRICPVEVGCRGFIARSTVSLLGELGVRGQNLRKTVREMSDEAIKCSQFIYYRRNNVSWGPAGGTTKQGT

SEQ ID NO: 4190 - protein, 1150 aa, Chelmon rostratus
MVTNRIADMTMPWIHDSVRDGGTDPSLRARGSSTQVTGKATKESKSCAAEDKKLQVCPCGWQKITSIRGLRTHQGRRKCLAVEGQSGRIDRYFLRSQSNQSDEVQRQVENHSSQDISNTIPGEEEVRRGDAVGVEGNRPAKERSMEQKARVKWPRANDSKEWEAVDRDLSVILSRLRGDVVEKLDKIGDVIYSYGRERFGVLVKRKGERVQVGKSRRQREIEKLVKERRQLRKQWRKATEEEREGIKVLQEELRSRLAVLRRAEHLREKRKKKERARSAFFRNPFNFVKGLFNQEKGGQLKATKSEIEQYLKSTYSDSKENRNIGLPPDMPPLGEVEQEMDVSPPRWREVVEVVRRAKASSAPGPNGVPYRVYKSAPGILRTLWRYLRIVWEKQSIPRAWRRAGGVFIPKEKESSDLSQFRMISLLNVEGKIFFSIVAQRLAKYLERNGMIDTTVQKAGIPGFAGCLEHTSMIWHQIQTAKREKRDLNVVFLDLANAFGSVPHNLIWSSFDYFKVPEIVVNLVKAYFQDIRLCASIAELTTGWQRLEVGIMAGCTVSPLAFTMAMEVIIRASKWVVGGERRQNGMRLPPIRAYMDDMTLLTSTVPCTRRLLDKVNQNLKWASMKIKPSKSRSISIYRGKVSDRKFAIDGEEIPTIREKSVKSLGRWYNVDLNDVEQVVQFRKDVAEGLERIDKSGLPGKLRLWCLQFGLYPRLMWPMSVYEVPLSVAERMERLVSSYIRKWLGAPRCLSNVALYGKGMLQLPVSSLTEEFKCTKVRTELLLSGSKDMLVSNVVPNPSGGRKWNPRAAVQEAEAALRHAEIVGNVQFGRGGLGLGPGKPVWNKAGLKEKRKLVVEQVRRQEELLRGAKAVGQAKQGQWLNWEGVEKRKLSWRDLWNMEEGRIKFLIGATYDVLPTPQNLSLWVQGDQSCPLCSGTASLKHILSGCRISLSQGRYTWRHNQVLRSLAAGIEERRKQVNSGSSRKERLDVQFVREGEKNKAAKSGRKQGGGCLVGADDWQMQVDLGGQLVVPQEIVYSNLRPDIVLWSMSKKTVYFIELTVPWENSVEAAYERKKTKYADLKTESEQRGWKTRVCPVEVGCRGFVAGSAVSLLRELGVHGQNLRKTVREMSDEAARSSQWIWIRRNNSSWGVK

SEQ ID NO: 4191 - protein, 1006 aa, Chelmon rostratus
MEQKARVKWPRANDSKEWEAVDRDLSVILSRLRGDVVEKLDKIGDVIYSYGRERFGVLVKRKGERVQVGKSRRQREIEKLVKERRQLRKQWRKATEEEREGIKVLQEELRSRLAVLRRAEHLREKRKKKERARSAFFRNPFNFVKGLFNQEKGGQLKATKSEIEQYLKSTYSDSKENRNIGLPPDMPPLGEVEQEMDVSPPRWREVVEVVRRAKASSAPGPNGVPDRVYKSAPGILRTLWRYLRIVWEKQSIPRAWRRAGGVFIPKEKESSDLSQFRMISLLNVEGKIFFSIVAQRLAKYLERNGMIDTTVQKAGIPGFAGCLEHTSMIWHQIQTAKREKRDLNVVFLDLANAFGSVPHNLIWSSFDYFKVPEIVVNLVKAYFQDIRLCASIAELTTGWQRLEVGIMAGCTVSPLAFTMAMEVIIRASKWVVGGERRQNGMCLPPIRAYMDDMTLLTSTVPCTRRLLDKVNQNLKWASMKIKPSKSRSISIYRGKVSDRKFAIDGEEIPTIREKSVKSLGRWYNVDLNDVEQVVQFRKDVAEGLERIDKSGLPGKLRLWCLQFGLYPRLMWPMSVYEVPLSVAERMERLVSSYIRKWLGAPRCLSNVALYGKGMLQLPVSSLTEEFKCTKVRTELLLSGSKDMLVSNVVPNPSGGRKWNPRAAVQEAEAALRHAEIVGNVQFGRGGLGLGPGKPVWNKAGLKEKRKLVVEQVRRQEELLRGAKAVGQAKQGQWLNWEGVEKRKLSWRDLWNMEEGRIKFLIGATYDVLPTPQNLSLWVQGDQSCPLCSGTASLKHILSGCRISLSQGRYTWRHNQVLRSLAAGIEERRKQVNSGSSRKERLDVQFVREGEKNRAAKSGRKQGGGCLVGADDWQMQVDLGGQLVVPQEIVYSNLRPDIVLWSMSKKTVYFIELTVPWENSVEAAYERKKTKYADLKTESEQRGWKTRVCPVEVGCRGFVAGSAVSLLRELGVHGQNLRKTVREMSDEAARSSQWIWIRRNNSSWGVK

SEQ ID NO: 4192 - protein, 1150 aa, Chelmon rostratus
MVTNRITDMTMPWIHDSVRDGGTDPSLRARGSSTQVTGKATKESKSCAAEDKKLQVCPCGWQKITSIRGLRTHQGRRKCLAVEGQSGRIDQYFLRSQSNQSDEVQRQVENHSSQDISNTIPGEEEVRRGDAVGVEGNRPAKERSMEQKARVKWPRANDSKEWEAVDRDLSVILSRLRGDVVEKLDKIGDVIYSYGRERFGVLVKKKGERVQVGKSRRQREIEKLVKERRQLRKQWRKATEEEREGIKVLQEELRSRLAVLRRAEHLREKRKKKERARSAFFRNPFNFVKGLFNQEKGGQLKATKSEIEQYLKSTYSDSKENRNIGLPPDMPPLGEVEQEMDVSPPRWREVVEVVRRAKASSAPGPNGVPYRVYKSAPGILRTLWRYLRIVWEKQSIPRAWRRAGGVFIPKEKESSDLSQFRMISLLNVEGKIFFSIVAQRLAKYLERNGMIDTTVQKAGIPGFAGCLEHTSMIWHQIQTAKREKRDLNVVFLDLANAFGSVPHNLIWSSFDYFKVPEIVVNLVKAYFQDIRLCASIAELTTGWQRLEVGIMAGCTVSPLAFTMAMEVIIRASKWVVGGERRQNGMRLPPIRAYMDDMTLLTSTVPCTRRLLDKVNQNLKWASMKIKPSKSRSISIYRGKVSDRKFAIDGEEIPTIREKAVKSLGRWYNVDLNDVEQVVQFRKDVAEGLERIDKSGLPGKLRLWCLQFGLYPRLMWPMSVYEVPLSVAERMERLVSSYIRKWLGAPRCLSNVALYGKGMLQLPVSSLTEEFKCTKVRTELLLSGSKDMLVSNVVPNPSGGRKWNPRAAVQEAEAALRHAEIVGNVQFGRGGLGLGPGKPVWNKAGLKEKRKLVVEQVRRQEELLRGAKAVGQAKQGQWLNWEGVEKRKLSWRDLWNMEEGRIKFLIGATYDVLPTPQNLSLWVQGDQSCPLCSGTASLKHILSGCRISLSQGRYTWRHNQVLRSLAAGIEERRKQVNSGSSRKERLDVQFVREGEKNKAAKSGRKQVGGCLVGADDWQMQVDLGGQLVVPQEIVYSNLRPDIVLWSMSKKTVYFIELTVPWENSVEAAYERKKTKYADLKTESEQRGWKTRVCPVEVGCRGFVAGSAVSLLRELGVHGQNLRKTVREMSDEAARSSQWIWIRRNNSSWGVK

SEQ ID NO: 4193 - protein, 1106 aa, Epinephelus lanceolatus
MLQVCPCGWQKVTSVKGLRTHQGKKKCVAKKGQSSRIDQYFLRSQSSQSDEVQWQVENHSSQDISNAATEEEGVVREDAGDTEASMLARERTMEQKVRVRWPRANDSKEWEIVNRDLSVILSRLRGNAIQRLEKMGDIMYSYGVERFGVHERKRSERVQSGKSRRQREIEKLVKERRQLRKQWKKATEEEREGIKVLQEELRSRLAVLRRAEHLRKKRRKKEYARTGFFRDPFKFVKGLFSQEKGGQLKAERLEVEEYLRNTYSDLEKNRIVGFPPDIPPLGGIEHEMDVRPPRWKEVQEVVRRAKASSAPGPNGVPYRVYKSAPDTLKFLWKQLRIVWEKQIIPRAWRRAGGVLIPKEKESVDLSQFRMISLLNVEGKIFFSVVAQRLASYLERNSLIDTMVQKAGIPGFSGCLEHTSMIWHQIQAAKINKRDLHVIFLDLANAFGSVPHSLIWSAFDYFRVPQVVVNLVKAYFQDIRLCLSTAGFTTGWQRLEIGIMAGCTISPLAFTMAMEVIIRASKWVVGGERRQNGLHLPPVRAYMDDMTLVTTTMPCTKRLLEKVNKNLKWASMKIKPSKSRSISICRGKLSDRKFVIDDEDIPTIREKSVKSLGRWYNVELNDKEQVVKFRKDVAEGLDRIDKSELPGKLKLWCLQFGLYPRLMWPLSVYEIPISVVERMERSVSSYIRKWLGAPRCLSSVALYGKGILQLPVSSLTEEFKCTKVRTELLLSGSKDVVVRSVVPNPTKGRKWNPRSAVQEAEAALRHAEIVGNVQFGRGGLGLGSGKPVWNTAGLKDKRKLVVEQIRRQEEIVRGAKVVAQAKQGQWLNWESVEKRKLSWRDLWSMEENRIRFLVGATYDVLPTPQNLKLWVNEDPSCPLCSRTATLKHILSGCKVSLSQGRYTWRHNQVLKCLAAGIEGKRRQVNSEGVKDRGLVIQFVREGEKYRRDKLVRRQGCGRLEGACDWEMQVDLGGKLVVPQEIVCTRQRPDLVLWSVSQRIVYFIELTVPWEDSVEEAYERKKLRYADLGAEAEQRGWKTRICPVEVGCRGFIARSAVSLLGELGVQGQSLRKTVREMSDEAIKCSQFIYKRRSNVSWGPAGGTTKQGT

SEQ ID NO: 4194 - protein, 1021 aa, Epinephelus lanceolatus
MLARERTMEQKVRVRWPRANDSKEWEIVNRDLSVILSRLRENAIERLEKMGDIMYSYGVERFGVHERKRSERVQSGKSRRQREIEKLVKERRQLRKQWKKATEEEREGIKVLQEELRSRLAVLRRAEHLRKKRRKKEYARTGFFRDPFKFVKGLFSQEKGGQLKAERLEVEEYLRNTYSDLEKNRIVGFPPDIPPLGGIEHEMDVRPPRWKEVQEVVRRAKASSAPGPNGVPYRVYKSAPDTLKFLWKQLRIVWEKQIIPRAWRRAGGVLIPKEKESVDLSQFRMISLLNVEGKIFFSVVAQRLASYLERNSLIDTMVQKAGIPGFSGCLEHTSMIWHQIQAAKINKRDLHVIFLDLANAFGSVPHSLIWSAFDYFRVPQVVVNLVKAYFQDIRLCLSTAGFTTGWQRLEIGIMAGCTISPLAFTMAMEVIIRASKWVVGGERRQNGLHLPPVRAYMDDMTLVTTTMPCTKRLLEKVNKNLKWASMKIKPSKSRSISICRGKLSDRKFVIDDEDIPTIREKSVKSLGRWYNVELNDKEQVVKFRKDVAEGLDRIDKSELPGKLKLWCLQFGLYPRLMWPLSVYEIPISVVERMERSVSSYIRKWLGAPRCLSSVALYGKGILQLPVSSLTEEFKCTKVRTELLLSGSKDVVVRSVVPNPTKGRKWNPRSAVQEAEAALRHAEIVGNVQFGRGGLGLGSGKPVWNTAGLKDKRKLVVEQIRRQEEIVRGAKVVAQAKQGQWLNWESVEKRKLSWRDLWSMEENRIRFLVGATYDVLPTPQNLKLWVNEDPSCPLCSRTATLKHILSGCKVSLSQGRYTWRHNQVLKCLAAGIEGKRRQVNSEGVKDRGLVIQFVREGEKYRRDKLVRRQGCGRLEGACDWEMQVDLGGKLVVPQEIVCTRQRPDLVLWSVSQQIVYFIELTVPWEDSVEEAYERKKLRYADLGAEAEQRGWKTRICPVEVGCRGFIARSTVSLLGELGVRGQNLRKTVREMSDEAIKCSQFIYYRRNNVSWGPAGGTTKQGT

SEQ ID NO: 4195 - protein, 821 aa, Chelmon rostratus
MPPLGEVEQEMDVSPPRWREVVEVVRRAKASSAPGPNGVPYRVYKSAPGILRTLWRYLRIVWDKQSIPRAWRRAGGVFIPKERESSDFSQFRMISLLNVEGKIFFSIVAQRLANYLERNGMIDTTVQKAGIPGFAGYLEHTSMIWHQIQTAKREKRDLNVVFLDLANAFGSVSHNLIWNSFDYFKVPEIVVNLVKAYFQDIRLCASSTELTTGWQRLEVGIMAGCTVSPLAFTMAMEVIIRASKWVVGGERRQNGMRLPPIRAYMDDMTLLTSTVPCTRRLLDKVNQNLKWASMKIKPSKSRSISIYRGKVSDRKFAIDGEEIPTIREKSVKSLGRWYNVDLNDVEQVVQFRKDVAEGLERIDKSGLPGKLRLWCLQFGLYPRLMWPMSVYEVPLSVAERMERLVSSYIRKWLGAPRCLSNVALYGKGMLQLPVSSLTEEFKCTKVRTELLLSGSKDMLVSNVVPNPSGGRKWNPRAAVQEAEAALRHAEIVGNVQFGRGGLGLGPGKPVWNKAGLKEKRKLVVEQVRRQKELLRGAKAVGQAKQGQWLNWEGVEKRKLSWRDLWNMEEGRIKFLIGATYDVLPTLQNLSLWVQGNQSCPLCSGTASLKHILSGCRISLSQGRYTWRHNQVLRSLAGGIEERRKQVNSGSSRKERLDVQFVREGEKNRAAKSGRRQVGGCLVGADDWQMQVDFGGKLVVPQEIVYSNLRPDIVLWSMSKKTVFFIELTVPWENSVEAAYERKKTKYADLKTESEQRGWKTRVCPVEVGCRGFVAGSAVSLLRELGVHGQNLRKTVREMSDEAARSGQWIWIRRNNSRWGVK

SEQ ID NO: 4196 - protein, 1150 aa, Chelmon rostratus
MVTNRITDMTMPWIHDSVRDGGTDPSLRTRGSSTQVTGKATKESKSCAAEDKKLQVCPCGWQKITSIRGLRTHQGRRKCLAVEGQSGRIDQYFLRSQSNQSDEVQRQVETHSSQDISNTIPGEEEVWRGDAVGVEVNRPAKERSMEQKARVRWPRANDSKEWEAVDRDLSVILSRLRGDVVEKLDKIGDVIYSYGRERFGVLVKRKGERVQVGKSRRQREIEKLVKERRQLRKQWRKATEEEREGIKVLQEELRSRLAVLRRAEHLREKRKKKERARSAFFRNPFNFVKGLFNQEKGGQLKATKSEIEQYLKSTYSDSKENRNIGLPPDMPPLGEVEQEMDVSPPRWREVVEVVRRAKASSAPGPNGVPYRVYKSAPGILRTLWRYLRIVWEKQSIPRAWRRAGGVFIPKEKESSDLSQFRMISLLNVEGKIFFSIVAQRLAKYLERNGMIDTTVQKAGIPGFAGCLEHTSMIWHQIQTAKREKRDLNVVFLDLANAFGSVPHNLIWSSFDYFKVPEIVVNLVKAYFQDIRLCASIAELTTGWQRLEVGIMAGCTVSPLAFTMAMEVIIRASKWVVGGERRQNGMRLPPIRAYMDDMTLLTSTVPCTRRLLDKVNQNLKWASMKIKPSKSRSISIYRGKVSDRKFAIDGEEIPTIREKSVKSLGRWYNVDLNDVEQVVQFRKDVAEGLERIDKSGLPGKLRLWCLQFGLYPRLMWPMSVYEVPLSVAERMERLVSSYIRKWLGAPRCLSNVALYGKGMLQLPVSSLTEEFKCTKVRTELLLSGSKDMLVSNVVPNPSGGRKWNPRAAVQEAEAALRHAEIVGNVQFGRGGLGLGPGKPVWNKAGLKEKRKLVVEQVRRQEELLRGAKAVGQAKQGQWLNWEGVEKRKLSWRDLWNMEEGRIKFLIGATYDVLPTPQNLSLWVQGDQSCPLCSGIASLKHILSGCRISLSQGRYTWRHNQVLRSLAAGIEERRKQVNTGSSRKERLDVQFVREGEKNRAAKSGRKQVGGCLVGADDWQMQVDLGGKLVVPQEIVYSNLRPDIVLWSMSKKTVYFIELTVPWENSVEAAYERKKTKYADLKTESEQRGWKTRVCPVEVGCRGFVAGSAVSLLRELGVHGQNLRKTVREMSDEAARSSQWIWIRRNNSSWGVK

SEQ ID NO: 4197 - protein, 1006 aa, Chelmon rostratus
MEQKARVKWPRANDSKEWEAVDRDLSVILSRLRGDVVEKLDKIGDVIYSYGRERFGVLVKRKGERVQVGKCRRQREIEKLVKERRQLRKQWRKATEEEREGIKVLQEELRSRLAVLRRAEHLREKRKKKERARSAFFRNPFNFVKGLFNQEKGGQLKATKSEIEQYLKSTYSDSKENRNIGLPPDMPPLGEVEQEMDVGPPRWREVVEVVRRAKASSAPGPNGVPYRVYKSAPGILRTLWRYLRIVWEKQSIPRAWRRAGGVFIPKEKESSDLSQFRMISLLNVEGKIFFSIVAQRLAKYLERNGMIDTTVQKAGIPGFAGCLEHTSMIWHQIQTAKREKRDLNVVFLDLANAFGSVPHNLIWSSFDYFKVPEIVVNLVKAYFQDIRLCASIAELTTGWQRLEVGIMAGCTVSPLAFTMAMEVIIRASKWVVGGERRQNGMRLPPIRAYMDDMTLLTSTVPCTRRLLDKVNQNLKWASMKIKPSKSRSISIYRGKVSDRKFAIDGEEIPTIREKSVKSLGRWYNVDLNDVEQVVQFRKDVAEGLERIDNSGLPGKLRLWCLQFGLYPRLMWPMSVYEVPLSVAERMERLVSSYIRKWLGAPRCLSNVALYGKGMLQLPVSSLTEEFKCTKVRTELLLSGSKDMLVSNVVPNPSGGRKWNPRAAVQEAEAALRHAEIVGNVQFGRGGLGLGPGKPVWNKAGLKEKRKLVVEQVRRQEELLRGAKAVGQAKQGQWLNWEGVEKRKLSWRDLWNMEEGRIKFLIGATYDVLPTPQNLSLWVQGDQSCPLCSGTASLKHILSGCRISLSQGRYTWRHNQVLRSLAAGIEERRKQVNSGSSRKERLDVQFVREGEKNRAAKSGRKQGGGCLVGADDWQMQVDLAGQLVVPQEIVYSNLRPDIVLWSMSKKTVYFIELTVPWENSVEAAYERKKTKYADLKTESEQRGWKTRVCPVEVGCRGFVAGSAVSLLRELGVHGQNLRKTVREMSDEAARSSQWIWIRRNNSSWGVK

SEQ ID NO: 4198 - protein, 1150 aa, Chelmon rostratus
MVTNRITDITMPWIHDSVRDGGTDPSLRTRGSSTQVTGKATKESKSCAAEDKKLQVCPCGWQKITSIRGLRTHQGRRKCLAVEGQSGRIDQYFLRSQSNQSDEVQRQVETHSSQDISNTIPGEEEVWRGDAVGVEVNRPAKERSMEQKARVRWPRANDSKEWEAVDRDLSVILSRLGGDVVEKLDKIGDVIYSYGRERFDVLVKRKGERVQVGKSRRQREIEKLVKERRQLRKQWRKATEEEREGIKVLQEELRSRLAVLRRAEHLREKRKKKERARSAFFRNPFNFVKGLFNQEKGGQLKATKSEIEQYLKSTYSDSKENRNIGLPPDMPPLGEVEQEMDVSPPRWREVVEVVRRAKASSAPGPNGVPYRVYKSAPGILRTLWRYLRIVWEKQSIPRAWRRAGGVFIPKEKESSDLSQFRMISLLNVEGKIFFSIVAQRLAKYLERNGMIDTTVQKAGIPGFAGCLEHTSMIWHQIQTAKREKRDLNVVFLDLANAFGSVPHNLIWSSFDYFKVPEIVVNLVKAYFQDIRLCASIAELTTGWQRLEVGIMAGCTVSPLAFTMAMEVIIRASKWVVGGERRQNGMCLPPIRAYMDDMTLLTSTVPCTRRLLDKVNQNLKWASMKIKPSKSRSISIYRGKVSDRKFAIDGEEIPTIREKSVKSLGRWYNVDLNDVEQVVQFRKDVAEGLERIDKSGLPGKLRLWCLQFGLYPRSMWPMSVYEVPLSVAERMERLVSSYIRKWLGAPRCLSNVALYGKGMLQLPVSSLTEEFKCTKVRTELLLSGSKDMLVSNVVPNPSGGRKWNPRAAVQEAEAALRHAEIVGNVQFGRGGLGLGPGKPVWNKAGLKEKRKLVVEQVRRQEELLRGAKAVGQAKQGQWLNWEGVEKRKLSWRDLWNMEEGRIKFLIGATYEVLPTPQNLSLWVQGDQSCPLCSGTASLKHILSGCRISLSQGRYTWRHNQVLRSLAAGIEERRKQVNTGSSRKERLDVQFVREGEKNRAAKSGRKQVGGCLVGADDWQMQVDLGGKLVVPQEIVYSNLRPDIVLWSMSKKTVYFIELTVPWENSVEAAYERKKTKYADLKTESEQRGWKTRVCPVEVGCRGFVAGSAVSLLRELGVHGQNLRKTVREMSDEAARSSQWIWIRRNNSSWGVK

SEQ ID NO: 4199 - protein, 987 aa, Epinephelus lanceolatus
MSVILSRLRGNAIERLEKMGDIIYSYGVERFGLHERKRNERVQSGKSRWQREIEELVKERRQLRKMWRKATEEEREGIKVLQEELRSRLAVLRREEHLRKKRRKKEHVRTGFFRDPFKFVKGLFSQEKGGQLKTERLEVEEYLRNTYSDLEKNRIVGFPPDIPPLGGIEHEMDVRPPRWKEVQEVVRRAKASSAPGPNGVPYRVYKSAPDTLKFLWKQLRIVWEKQIIPRAWRRAGGVLIPKEKESVDLSQFRMISLLNVEGKIFFSVVAQRLASYLERNSLIDTMVQKAGIPGFSGCLEHTSMIWHQIQAAKINKRDLHVIFLDLANAFGSVPHSLIWSAFDYFRVPQVVVNLVKAYFQDIRLCLSTAGFTTGWQRLEIGIMAGCTISPLAFTMAMEVIIRASKWVVGGERRQNGLHLPPVRAYMDDMTLVTTTMPCTKRLLEKVNKNLKWASMKIKPSKSRSISICRGKLSDRKFVIDDEDIPTIREKSVKSLGRWYNVELNDKEQVVKFRKDVAEGLDRIDKSELPGKLKLWCLQFGLYPRLMWPLSVYEIPISVVERMERSVSSYIRKWLGAPRCLSSVALYGKGILQLPVSSLTEEFKCTKVRTELLLSGSKDVVVRSVVPNPTKGRKWNPRSAVQEAEAALRHAEIVGNVQFGRGGLGLGSGKPVWNTAGLKDKRKLVVEQIRRQEEIVRGAKVVAQAKQGQWLNWESVEKRKLSWRDLWSMEENRIRFLVGATYDVLPTPQNLKLWVNEDPSCPLCSRTATLKHILSGCKVSLSQGRYTWRHNQVLKCLAAGIEGKRRQVNSEGVKDRSLVIQFVREGEKHRRDKLVRRQGCGRLEGACDWEMQVDLGGKLVVPQEIVCTRQRPDLVLWSVSQRIVYFIELTVPWEDSVEEAYERKKLRYADLGAEAEQQGWKTRICPVEVGCRGFIARSAVSLLGELGVRGQSLRKTVREMSDEAARTSQFIYYRRNNVSWGPAGGTTM

SEQ ID NO: 4200 - protein, 972 aa, Epinephelus lanceolatus
MGDIMYSYGVERFGVHERKRSERVQSGKSRRQREIEKLVKERRQLRKQWKKATEEEREGIKVLQEELRSRLAVLRRAEHLRKKRRKKEYARTGFFRDPFKFVKGLFSQEKGGQLKAERLEVEEYLRNTYSDLEKNRIVGFPPDIPPLGGIEHEMDVRPPRWKEVQEVVRRAKASSAPGPNGVPYRVYKSAPDTLKFLWKQLRIVWEKQIIPRAWRRAGGVLIPKEKESVDLSQFRMISLLNVEGKIFFSVVAQRLASYLERNSLIDTMVQKAGIPGFSGCLEHTSMIWHQIQAAKINKRDLHVIFLDLANAFGSVPHSLIWSAFDYFRVPQVVVNLVKAYFQDIRLCLSTAGFTTGWQRLEIGIMAGCTISPLAFTMAMEVIIRASKWVVGGERRQNGLHLPPVRAYMDDMTLVTTTMPCTKRLLEKVNKNLKWASMKIKPSKSRSISICRGKLSDRKFVIDDEDIPTIREKSVKSLGRWYNVELNDKEQVVKFRKDVAEGLDRIDKSELPGKLKLWCLQFGLYPRLMWPLSVYEIPISVVERMERSVSSYIRKWLGAPRCLSSVALYGKGILQLPVSSLTEEFKCTKVRTELLLSGSKDVVVRSVVPNPTKGRKWNPRSAVQEAEAALRHAEIVGNVQFGRGGLGLGSGKPVWNTAGLKDKRKLVVEQIRRQEEIVRGAKVVAQAKQGQWLNWESVEKRKLSWRDLWSMEENRIRFLVGATYDVLPTPQNLKLWVNEDPSCPLCSRTATLKHILSGCKVSLSQGRYTWRHNQVLKCLAAGIEGKRRQVNSEGVKDRGLVIQFVREGEKYRRDKLVRRQGCGRLEGACDWEMQVDLGGKLVVPQEIVCTRQRPDLVLWSVSQQIVYFIELTVPWEDSVEEAYERKKLRYADLGAEAEQRGWKTRICPVEVGCRGFIARSTVSLLGELGVRGQNLRKTVREMSDEAIKCSQFIYYRRNNVSWGPAGGTTKQGT

SEQ ID NO: 4201 - protein, 904 aa, Chelmon rostratus
MMLQVELRSRLAVLRRAEHLREKRKKKERARSAFFRNPFNFVKGLFNQEKGGQLKATKSEIEQYLKSTYSDSKENRNIGLPPDMPPLGEVEQEMDVSPPRWREVVEVVRRAKASSAPGPNGVPYRVYRSAPGILRTLWRYLRIVWEKQSIPRAWRRAGGVFIPKEKESSDLSQFRMISLLNVEGKIFFSIVAQRLAKYLERNGMIDTTVQKAGIPGFAGCLEHTSMIWHQIQTAKREKRDLNVVFLDLANAFGSVPHNLIWSSFDYFKVPEIVVNLVKAYFQDIRLCASIAELTTGWQRLEVGIMAGCTVSPLAFTMAMEVIIRASKWVVGGERRQNGMRLPPIRAYMDDMTLLTSTVPCTRRLLDKVNQNLKWASMKIKPSKSRSISIYRGKVSDRKFAIDGEEIPTIREKSVKSLGRWYNVDLNDVEQVVQFRKDVAEGLERIDKSGLPGKLRLWCLQFGLYPRLMWPMSVYEVPLSVAERMERLVSSYIRKWLGAPRCLSNVALYGKGMLQLPVSSLTEEFKCTKVRTELLLSGSKDMLVSNVVPNPSGGRKWNPRAAVQEAEAALRHAEIVGNVQFGRGGLGLGPGKPVWNKAGLKEKRKLVVEQVRRQEELLRGAKAVGQVKQGQWLNWEGVEKRKLSWRDLWNMEEGRIKFLIGATYDVLPTPQNLSLWVQGDQSCPLCSGTASLKHILSGCRISLSQGRYTWRHNQVLRSLAAGIEERRKQVNSGSSRKERLDVQFVREGEKNRAAKSGRKQGGGCLVGADDWQMQVDLGGQLVVPQEIVYSNLRPDIVLWSMSKKTVYFIELTVPWENSVEAAYERKKTKYADLKTESEQRGWKTRVCPVEVGCRGFVAGSAVSLLRELGVHGQNLRKTVREMSDEAARSSQWIWIRRNNSSWGVK

SEQ ID NO: 4202 - protein, 1139 aa, Epinephelus lanceolatus
MYLNIVFKENDQLFTQGKVSASVEGKSSIVENKMLQVCPCGWQKVTSVKGLRTHQGKKKCVAKKGQSSRIDQYFLRSQSSQSDEVQRQVENHSSQDISNAATEEEGVVREDAGDTEASMLARERTMEQKVRVRWPRANDSKEWEIVNRDLSVILSRLRGNAIQRLEKMGDIMYSYGVERFGVHERKRSERVQSGKSRRQREIEKLVKERRQLRKQWKKATEEEREGIKVLQEELRSRLAVLRRAEHLRKKRRKKEYARTGFFRDPFKFVKGLFSQEKGGQLKAERLEVEEYLRNTYSDLEKNRIVGFPPDIPPLGGIEHEMDVRPPRWKEVQEVVRRAKASSAPGPNGVPYRVYKSAPDTLKFLWKQLRIVWEKQIIPRAWRRAGGVLIPKEKESVDLSQFRMISLLNVEGKIFFSVVAQRLASYLERNSLIDTMVQKAGIPGFSGCLEHTSMIWHQIQAAKINKRDLHVIFLDLANAFGSVPHSLIWSAFDYFRVPQVVVNLVKAYFQDIRLCLSTAGFTTGWQRLEIGIMAGCTISPLAFTMAMEVIIRASKWVVGGERRQNGLHLPPVRAYMDDMTLVTTTMPCTKRLLEKVNKNLKWASMKIKPSKSRSISICRGKLSDRKFVIDDEDIPTIREKSVKSLGRWYNVELNDKEQVVKFRKDVAEGLDRIDKSELPGKLKLWCLQFGLYPRLMWPLSVYEIPISVVERMERSVSSYIRKWLGAPRCLSSVALYGKGILQLPVSSLTEEFKCTKVRTELLLSGSKDVVVRSVVPNPTKGRKWNPRSAVQEAEAALRHAEIVGNVQFGRGGLGLGSGKPVWNTAGLKDKRKLVVEQIRRQEEIVRGAKVVAQAKQGQWLNWESVEKRKLSWRDLWSMEENRIRFLVGATYDVLPTPQNLKLWVNEDPSCPLCSRTATLKHILSGCKVSLSQGRYTWRHNQVLKCLAAGIEGKRRQVNSEGVKDRGLVIQFVREGEKYRRDKLVRRQGCGRLEGACDWEMQVDLGGKLVVPQEIVCTRQRPDLVLWSVSQQIVYFIELTVPWEDSVEEAYERKKLRYADLGAEAEQRGWKTRICPVEVGCRGFIARSTVSLLGELGVRGQNLRKTVREMSDEAIKCSQFIYYRRNNVSWGPAGGTTKQGT

SEQ ID NO: 4203 - protein, 819 aa, Epinephelus lanceolatus
MDVRPPRWKEVQEVVRRAKASSAPGPNGVPYRVYKSAPDTLKFLWKQLRIVWEKQIIPRAWRRAGGVLIPKEKESVDLSQFRMISLLNVEGKIFFSVVAQRLASYLERNSLIDTMVQKAGIPGFSGCLEHTSMIWHQIQAAKINKRDLHVIFLDLANAFGSVPHSLIWSAFDYFRVPQVVVNLVKAYFQDIRLCLSTAGFTTGWQRLEIGIMAGCTISPLAFTMAMEVIIRASKWVVGGERRQNGLHLPPVRAYMDDMTLVTTTMPCTKRLLEKVNKNLKWASMKIKPSKSRSISICRGKLSDRKFVIDDEDIPTIREKSVKSLGRWYNVELNDKEQVVKFRKDVAEGLDRIDKSELPGKLKLWCLQFGLYPRLMWPLSVYEIPISVVERMERSVSSYIRKWLGAPRCLSSVALYGKGILQLPVSSLTEEFKCTKVRTELLLSGSKDVVVRSVVPNPTKGRKWNPRSAVQEAEAALRHAEIVGNVQFGRGGLGLGSGKPVWNTAGLKDKRKLVVEQIRRQEEIVRGAKVVAQAKQGQWLNWESVEKRKLSWRDLWSMEENRIRFLVGATYDVLPTPQNLKLWVNEDPSCPLCSRTATLKHILSGCKVSLSQGRYTWRHNQVLKCLAAGIEGKRRQVNSEGVKDRGLVIQFVREGEKYRRDKLVRRQGCGRLEGACDWEMQVDLGGKLVVPQEIVCTRQRPDLVLWSVSQRIVYFIELTVPWEDSVEEAYERKKLRYADLGAEAEQRGWKTRICPVEVGCRGFIARSAVSLLGELGVRGQSLRKTVREMSDEAIKCSQFIYKRRSNVSWGPAGGTTKQGT

SEQ ID NO: 4204 - protein, 1152 aa, Cromileptes altivelis
MTTYWICDSVKDRGTDLSTRARISSTQGKASASVEDKSSTVENKMLQVCPCGWQKVTSVKGLRTHQGKKKCVAKKGQSSRIDQYFLRSQSSQSDEVQRQVENHSSQDISNAATEEEEEGVVREDAGDNEASVPVRERTMEQKVRVRWPRANDSKEWEIVNRDLSVILSRLRGNAIERLEKMGDIIYSYGVERFGLHERKRSERVQSGKSRQQREIEELVKERRQLRKVWRKATEEEREGINVLQEELRSRLAVLRRAEYLRKKRRKKEHVRTGFFRDPFKFVKGLFSQEKGGQLKAERLEVEEYLRNTYSDLEKNRIVGFPPDIPPLEGIEHEMDVRPPRWKEVQEVVRRAKASSAPGPNGVPYRVYKSAPDTLKFLWKQLRIVWEKQIIPRAWRRAGGVLIPKEKESVDLSQFRMISLLNVEGKIFFSVVAQRLASYLERNSLIDTMVQKAGIPGFSGCLEHTSMIWHQIQAAKIKKRDLHVVFLDLANAFGSVPHSLIWSAFDYFRVPQVVVNLVKAYFQDIRLCLSTAGFTTGWQRLEIGIMAGCTISPLAFTMAMEVIIRASKWVVGGERRQNRLHFPPVRAYMDDMTLVTTTMPCTKRLLEKVNKNLKWASMKIKPSKSRSISIHRGKLSDRKFVIDDEEIPTIREKPVKSLGRWYNVELNDEEQVVKFRKDVAEGLDRIDKSELPGKLKLWCLQFGLYPRLMWPLSIYEIPISVVERIERSVSSYIRKWLGAPRCLSSVALYGKGILQLPVSSLTEEFKCTKVRTELLLSGSKDMVVRSVVPNPTKGRKWNPRSAVQEAEAALRHAEIVGNVQFGRGGLGLGSGKPVWNKAGLKDKRKLVVEQIRRQEEMLRGAKVVAQAKQGQWLNWESVEKRKLSWRDLWSMEENRIRFLVGATYDVLPTPQNLKLWVNEDPSCPLCSRTATLKHILSGCKVSLSQGRYTWRHNQVLKCLAAGIEGKRRQVNSEGVKDRSLVIQFVREGEKYRRDKLVRRQGCGRLEGACDWEMQVDLGGKLVVPQEIVCTRQRPDLVLWSVSQRIVYFIELTVPWEDSVEEAYERKKLRYADLGAEAEQRGWKTRICPVEVGCRGFIARSAVSLLGELGVRGQSLRKTVREMSDEAIKCSQFIYKRRNNVSWGPAGGTTKQGT

SEQ ID NO: 4205 - protein, 1150 aa, Chelmon rostratus
MVTNRITDMTMPWIHDSVRDGGTDPSLRARGSSTQVTGKATKESKSCAAEDKKLQVCPCGWQKITSIRGLRTHQGRRKCLAVEGQSGRIDQYFLRSQSNQSDEVQRQVENHSSQDISNTIPGEEEVRRGDAVGVEGNRPAKERSMEQKARVKWPRANDSKEWEAVDRDLSVILSRLRGDVVEKLDKIGDVIYSYGRERFGVLVKRKGERVQVGKSRRQREIEKLVKERRQLRKQWRKATEEEREGIKVLQEELRSRLAVLRRAEHLREKRKKKERARSAFFRNPFNFVKGLFNQEKGGQLKATKSEIEQYLKSTYSDSKENRNIGLPPDMPPLGEVEQEMDVSPPRWREVVEVVRRAKASSAPGPNGVPYRVYKSAPGILRTLWRYLRIVWEKQSIPRAWRRAGGVFIPKEKESSDLSQFRMISLLNVEGKIFFSIVAQRLAKYLERNGMIDTTVQKAGIPGFAGCLEHTSMIWHQIQTAKREKRDLNVVFLDLANAFGSVPHNLIWSSFDYFKVPEIVVNLVKAYFQDIRLCASIAELTTGWQRLEVGIMAGCTVSPLAFTMAMEVIIRASKWVVGGERRQNGMRLPPIRAYMDDMTLLTSTVPCTRRLLDKVNQNLKWASMKIKPSKSRSISIYRGKVSDRKFAIDGEEIPTIREKSVKSLGRWYNVDLNDVEQVVQFRKDVAEGLERIDKSGLPGKLRLWCLQFGLYPRLMWPMSVYEVPLSVAERMERLVSSYIRKWLGAPRCLSNVALYGKGMLQLPVSSLTEEFKCTKVRTELLLSGSKDMLVSNVVPNPSGGRKWNPRAAVQEAEAALRHAEIVGNVQFGRGGLGLGPGKPVWNKAGLKEKRKLVVEQVRRQEELLRGAKAVGQAKQGQWLNWEGVEKRKLSWRDLWNMEEGRIKFLIGATYDVLPTPQNLSLWVQGDQSCPLCSGTASLKHILSGCRISLSQGRYTWRHNQVLRSLAAGIEERRKQVNSGSSRKERLDVQFVREGEKNRAAKSGRKQGGGCLVGADDWQMQVDLGGQLVVPQEIVYSNLRPDIVLWSMSKKTVYFIELTVPWENSVEAAYERKKTKYADLKTESEQRGWKTRVCPVEVGCRGFAAGSAVSLLRELGVHGQNLRKTVREMSDEAARSSQWIWIRRNNSSWGVK

SEQ ID NO: 4206 - protein, 1081 aa, Chelmon rostratus
MVTNRITDMTMPWIHDSVRDGGMDPSLRTRGSSTQVTGKATKESKSCAAEDKKLQVCPCGWQKITSIRGLRTHQGRRKCLAVEGQSGRIDQYFLRSQSNQSDEVQRQVETHSSQDISNTIPGEEEVWRGDAVGVEVNRPAKERSMEQKARVRWPRANDSKEWEAVDRDLSVILSRLRGDVVEKLDKIGDVIYSYGRERFGVLVKRKGERVQVGKSRRQREIEKLVKERRQLRKQWRKATEEEREGIKVLQEELRSRLAVLRKAEHLREKRKKKERARSAFFRNPFNFVKGLFNQEKGGQLKATKSEIEQYLKSTYSDSKENRNIGLPPDMPPLGEVEQEMDVSPPRWREVVEVVRRAKASSAPGPNGVPYCVYKSAPGILRTLWRYLRIVWEKQSIPRAWRRAGGVFIPKEKESSDLSQFRMISLLNVEGKIFFSIVAQRLAKYLERNGMIDTTVQKAGIPGFAGCLEHTSMIWHQIQTAKREKRDLNVVFLDLANAFGSVPHNLIWSSFDYFKVPEIVVNLVKAYFQDIRLCASIAELTTGWQRLEVGIMAGCTVSPLAFTMAMEVIIRASKWVVGGERRQNGMRLPPIRAYMDDMTLLTSTVPCTRRLLDKVNQNLKWASMKIKPSKSRIISIYRGKVSDRKFAIDGEEIPTIREKSVKSLGRWYNVDLNDVEQVVQFRKDVAEGLERIDKSGLPGKLRLWCLQFGLYPRLMWPMSVYEVPLSVAERMERLVSSYIRKWLGAPRCLSNVALYGKGMLQLPVSSLTEEFKCTKVRTELLLSGSKDMLVSNVVPNPSGGRKWNPRAAVQEAEAALRHAEIVGNVQFGRGGLGLGPGKPVWNKAGLKEKRKLVVEQVRRQEELLRGAKAVGQAKQGQWLNWEGVEKRKLSWRDLWNMEEGRIKFLIGATYDVLPTPQNLSLWVQGDQSCPLCSGTASLKHILSGCRISLSQGRYTWRHNQVLRSLAAGIEERRKQVNTGSSRKERLDVQFVREGEKNRAAKSGRKQVGGCLVGADDWQMQVDLGGKLVVPQEIVYSNLRPDIVLWSMSKKTVYFIELTVPWENSVEAAYERKKTKYAEDMHA

SEQ ID NO: 4207 - protein, 820 aa, Chelmon rostratus
MPPLGEVEQEMDVSPPRWREVVEVVRRAKASSAPGPNGVPYRVYKSAPGILRTLWRYLRIVWEKQSIPRAWRRAGGVFIPKEKESSDLSQFRMISLLNVEGKIFFSIVAQRLAKYLERNGMIDTTVQKAGIPGFAGCLEHTSMILHQIQTAKREKRDLNVVFLDLANAFGSVPHNLIWSSFDYFKVPEIVVNLVKAYFQDIRLCASIAELTTGWQRLEVGIMAGCTVSPLAFTMAMEVIIRASKWVVGGERRQNGMRLPPIRAYMDDMTLLTSTVPCTRRLLDKVNQNLKWASMKIKPSKSRSISIYRGKVSDRKFAIDGEEIPTIREKSVKSLGRWYNVDLNDVEQVVQFRKDVAEGLERIDKSGLPGKLRLWCLQFGLYPRLMWPMSVYEVPLSVAERMERLVSSYIRKWLGAPRCLSNVALYGKGMLQLPVSSLTEEFKCTKVRTELLLSGSKDMLVSNVVPNPSGGRKWNPRAAVQEAEAALRHAEIVGNVQFGRGGLGLGPGKPVWNKAGLKEKRKLVVEQVRRQEELLRGAKAVGQAKQGQWLNWEGVEKRKLSWRDLWNMEEGRIKFLIGATYDVLPTPQNLSLWVQGDQSCPLCSGTASLKHILSGCRISLSQGRYTWRHNQVLRSLAAGIEERRKQVNSGSSRKERLDVQFVREGEKNRAAKSGRKQVGGCLVGADDWQMQVDLGGKLVVPQEIVYSNLRPDIVLWSMSKKTVYFIELTVPWENSVEAAYERKNKYADLKTESEQRGWKTRVCPVEVGCRGFVAGSAVSLMRELGVHGQNLRKTVREMSDEAARSSQWIWIRRNNSSWGVK

SEQ ID NO: 4208 - protein, 1148 aa, Epinephelus lanceolatus
MTWICDSVKDRGTDLSTSARISSTQGKVSASVEDKSSTVENKMLQVCPCGWQKVTSVKGLRTHQGKKKCVAKKGQSSRIDQYFLRSQSSQSDEVQRQVENHSSQDISNAATEEEGVVREDAGDTEASMLARERTMEQKVRVRWPRANDSKEWEIVNRDLSVILSRLGGNAIERLEKMGDIMYSYGVDRFVVHERKRSERVQSGKSRWQRKKEKLVKERRQLRKQWKKATEEEREGIKVLQEELRSRLAVLRRAEHLRKKRRKKEYARTSFFRDPFKFVKGLFSQEKGGQLKAERLEVEEYLRNTYSDLEKNRIVGFPPDIPPLGGIEHEMDVRPPRWKEVQEVVRRAKASSAPGPNGVPYRVYKSAPDTLKFLWKQLRIVWEKQIIPRAWRRAGGVLIPKEKESVDLSQFRMISLLNVEGKIFFSVVAQRLASYLERNSLIDTMVQKAGIPGFSGCLEHTSMIWHQIQAAKINKRDLHVIFLDLANAFGSVPHSLIWSAFDYFRVPQVVVNLVKAYFQDIRLCLSTAGFTTGWQRLEIGIMAGCTISPLAFTMAMEVIIRASKWVVGGERRQNGLHLPPVRAYMDDMTLVTTTMPCTKRLLEKVNKNLKWASMKIKPSKSRSISICRGKLSDRKFVIDDEDIPTIREKSVKSLGRWYNVELNDKEQVVKFRKDVAEGLDRIDKSELPGKLKLWCLQFGLYPRLMWPLSVYEIPISVVERMERSVSSYIRKWLGAPRCLSSVALYGKGILQLPVSSLTEEFKCTKVRTELLLSGSKDVVVRSVVPNPTKGRKWNPRSAVQEAEAALRHAEIVGNVQFGRGGLGLGSGKPVWNTAGLKDKRKLVVEQIRRQEEIVRGAKVVAQAKQGQWLNWESVEKRKLSWRDLWSMEENRIRFLVGATYDVLPTPQNLKLWVNEDPSCPLCSRTATLKHILSGCKVSLSQGRYTWRHNQVLKCLAAGIEGKRRQVNSEGVKDRGLVIQFVREGEKYRRDKLVRRQGCGRLEGACDWEMQVDLGGKLVVPQEIVCTRQRPDLVLWSVSQQIVYFIELTVPWEDSVEEAYERKKLRYADLGAEAEQRGWKTRICPVEVGCRGFIARSTVSLLGELGVRGQNLRKTVREMSDEAIKCSQFIYYRRNNVSWGPAGGTTKQGT

SEQ ID NO: 4209 - protein, 1021 aa, Epinephelus lanceolatus
MLARERTMEQKVRVRWPRANDSKEWEIVNRDLSVILSRLRGNAIERLEKMGDIMYSYGVERFGVHERKRSERVQSGKSRRQREIEKLVKERRQLRKQWKKATEEEREGIKVLQEELRSRLAVLRRAEHLRKKRRKKEYARTGFFRDPFKFVKGLFSQEKGGQLKAERLEVEEYLRNTYSDLEKNRIVGFPPDIPPLGGIEHEMDVRPPRWKEVQEVVRRAKASSAPGPNGVPYRVYKSAPDTLKFLWKQLRIVWEKQIIPRAWRRAGGVLIPKEKESVDLSQFRMISLLNVEGKIFFSVVAQRLASYLERNSLIDTMVQKAGIPGFSGCLEHTSMIWHQIQAAKINKRDLHVIFLDLANAFGSVPHSLIWSAFDYFRVPQVVVNLVKAYFQDIRLCLSTAGFTTGWQRLEIGIMAGCTISPLAFTMAMEVIIRASKWVVGGERRQNGLHLPPVRAYMDDMTLVTTTMPCTKRLLEKVNKNLKWASMKIKPSKSRSISICRGKLSDRKFVIDDEDIPTIREKSVKSLGRWYNVELNDKEQVVKFRKDVAEGLDRIDKSELPGKLKLWCLQFGLYPRLMWPLSVYEIPISVVERMERSVSSYIRKWLGAPRCLSSVALYGKGILQLPVSSLTEEFKCTKVRTELLLSGSKDVVVRSVVPNPTKGRKWNPRSAVQEAEAALRHAEIVGNVQFGRGGLGLGSGKPVWNTAGLKDKRKLVVEQIRRQEEIVRGAKVVAQAKQGQWLNWESVEKRKLSWRDLWSMEENRIRFLVGATYDVLPTPQNLKLWVNEDPSCPLCSRTATLKHILSGCKVSLSQGRYTWRHNQVLKCLAAGIEGKRRQVNSEGVKDRGLVIQFVREGEKYRRDKLVRRQGCGRLEGACDWEMQVDLGGKLVVPQEIVCTRQRPDLVLWSVSQQIVYFIELTVPWEDSVEEAYERKKLRYADLGAEAEQRGWKTRICPVEVGCRGFIARSTVSLLGELGVRGQNLRKTVREMSDEAIKCSQFIYYRRNNVSWGPAGGTTKQGT

SEQ ID NO: 4210 - protein, 1150 aa, Chelmon rostratus
MVTNRITDMTMPWIHDSVRDGGTDPSLRARGSSTQVTGKATKESKSCAAEDKKLQVCPCGWQKITSIRGLRTHQGRRKCLAVEGQSGRIDQYFLRSQSNQSDEVQRQVENHSSQDISNTIPGEEEVRRGDAVGVEGNRPAKERSMEQKARVKWPRANDSKEWEAVDRDLSVILSRLRGDVVEKLDKIGDVIYSYGRERFGVLVKRKGERVQVGKSRRQREIEKLVKERRQLRKQWRKATEEEREGIKVLQEELRSRLAVLRRAEHLREKRKKKERARSAFFRNPFNFVKGLFNQEKGGQLKATKSEIEQYLKSTYSDSKENRNIGLPPDMPPLGEVEQEMDVSPPRWREVVEVVRRAKASSAPGPNGVPYHVYKSAPGILRTLWRYLRIVWEKQSIPRAWRRAGGVFIPKEKESSDLSQFRMISLLNVEGKIFFSIVAQRLAKYLERNGMIDTTVQKAGIPGFAGCLEHTSMIWHQIQTAKREKRDLNVVFLDLANAFGSVPHNLIWSSFDYFKVPEIVVNLVKAYFQDIRLCASIAELTTGWQRLEVGIMAGCTVSPLAFTMAMEVIIRASKWVVGGERRQNGMRLPPIRAYMDDMTLLTSTVPCTRRLLDKVNQNLKWASMKIKPSKSRSISIYRGKVSDRKFAIDGEEIPTIREKSVKSLGRWYNVDLNDVEQVVQFRKDVAEGLERIDKSGLPGKLRLWCLQFGLYPRLMWPMSVYEVPLSVAERMERLISSYIRKWLGAPRCLSNVALYGKGMLQLPVSSLTEEFKCTKVRTELLLSGSKDMLVSNVVPNPSGGRKWNPRAAVQEAEAALRHAEIVGNVQFGRGGLGLGPGKPVWNKAGLKEKRKLVVEQVRRQEELLRGAKAVGQAKQGQWLNWEGVEKRKLSWRDLWNMEEGRIKFLIGATYDVLPTPQNLSLWVQGDQSCPLCSGTASLKHILSGCRISLSQGRYTWRHNQVLRSLAAGIEERRKQVNSGSSRKERLDVQFVREGEKNRAAKSGRKQGGGCLVGADDWQMQVDLGGQLVVPQEIVYSNLRPDIVLWSMSKKTVYFIELTVPWENSVEAAYERKKTKYADLKTESEQRGWKTRVCPVEVGCRGFVAGSAVSLLRELGVHGQNLRKTVREMSDEAARSSQWIWIRRNNSSWGVK

SEQ ID NO: 4211 - protein, 909 aa, Epinephelus lanceolatus
MSTTMNRLSWWRKKRLLHGDTLDSGTATFNRKTCCLSVKVKVATSRGNTINLYQHLRRDMATLTTYSDLEKNRIVGFPPDIPPLGGIEHEMDVRPPRWKEVQEVVRRAKASSAPGPNGVPYRVYKSAPDTLKFLWKQLRIVWEKQIIPRAWRRAGGVLIPKEKESVDLSQFRMISLLNVEGKIFFSVVAQRLASYLERNSLIDTMVQKAGIPGFSGCLEHTSMIWHQIQAAKINKRDLHVIFLDLANAFGSVPHSLIWSAFDYFRVPQVVVNLVKAYFQDIRLCLSTAGFTTGWQRLEIGIMAGCTISPLAFTMAMEVIIRASKWVVGGERRQNGLHLPPVRAYMDDMTLVTTTMPCTKRLLEKVNKNLKWASMKIKPSKSRSISICRGKLSDRKFVIDDEDIPTIREKSVKSLGRWYNVELNDKEQVVKFRKDVAEGLDRIDKSELPGKLKLWCLQFGLYPRLMWPLSVYEIPISVVERMERSVSSYIRKWLGAPRCLSSVALYGKGILQLPVSSLTEEFKCTKVRTELLLSGSKDVVVRSVVPNPTKGRKWNPRSAVQEAEAALRHAEIVGNVQFGRGGLGLGSGKPVWNTAGLKDKRKLVVEQIRRQEEIVRGAKVVAQAKQGQWLNWESVEKRKLSWRDLWSMEENRIRFLVGATYDVLPTPQNLKLWVNEDPSCPLCSRTATLKHILSGCKVSLSQGRYTWRHNQVLKCLAAGIEGKRRQVNSEGVKDRGLVIQFVREGEKYRRDKLVRRQGCGRLEGACDWEMQVDLGGKLVVPQEIVCTRQRPDLVLWSVSQQIVYFIELTVPWEDSVEEAYERKKLRYADLGAEAEQRGWKTRICPVEVGCRGFIARSTVSLLGELGVRGQNLRKTVREMSDEAIKCSQFIYYRRNNVSWGPAGGTTKQGT

SEQ ID NO: 4212 - protein, 1080 aa, Chelmon rostratus
MWLAENNINRKCLAVEGQSGRIDQYFLRSQSNQSDEVQRQVENHSAQDISNTIPGEEEVRRGDAVGVEVNRPAKERSMEQKARVRWPRANDSKEWEAVDRDLSVILSRLRGDVVEKLDKIGDVIYSYGQERFGVLVKRKGERVQVGKSRRQREIEKLVKERRQLRKQWRKATEEEREGIKVLQEELRSRLAVLRRAEHLREKRKKKERARSAFFRNPFNFVKGLFNQEKGGQLKATKSEIEQYLKSTYSDSKENRNIGLPPDMPPLGEVEQEMDVSPPRWREVVEVVRRAKASSAPGPNGVPYRVYKSAPGILRTLWRYLRIVWEKQSIPRAWRRAGGVFIPKEKESSDLSQFRMISLLNVEGKIFFSIVAQRLAKYLERNGMIDTTVQKAGIPGFAGCLEHTSMIWHQIQTAKREKRDLNVVFLDLANAFGSVPHNLIWSSFDYFKVPEIVVNLVKAYFQDIRLCASIAELTTGWQRLEVGIMAGCTVSPLAFTMAMEVIIRASKWVVGGERRQNGMRLPPIRAYMDDMTLLTSTVPCTRRLLDKVNQNLKWASMKIKPSKSRSISIYRGKVSDRKFAIDGEEIPTIREKSVKSLGRWYNVDLNDVEQVVQFRKDVAEGLERIDKSGLPGKLRLWCLQFGLYPRLMWPMSVYEVPLSVAERMERLVSSYIRKWLGAPRCLSNVALYGKGMLQLPVSSLTEEFKCTKVRTELLLSGSKDMLVSNVVPNPSGGRKWNPRAAVQEAEAALRHAEIVGNVQFGRGGLGLGPGKPVWNKAGLKEKRKLVVEQVRRQEELLRGAKAVGQAKQGQWLNWEGVEKRKLSWRDLWNMEEGRIKFLIGATYDVLPTPQNLSLWVQGDQSCPLCSGTASLKHILSGCRISLSQGRYTWRHNQVLRSLAAERRKQVNSGSSRKERLDVQFVREGEKNRAAKSGRRQVGGCLVGADDWQMQVDLGGKLVVPQEIVYSNLRPDIVLWSMSKKTVFFIELTVPWENSVEAAYERKKTKYADLKTESEQRGWKTRVCPVEVGCRGFVAGSAVSLLRELGVHGQNLRKTVREMSDEAARSSQWIWIRRNNSSWGVK

SEQ ID NO: 4213 - protein, 1006 aa, Chelmon rostratus
MEQKARVKWPRANDSKEWEAVDRDLSVILSRLRGDVVEKLDKIGDVIYSYGRERFGVLVKRKGERVQVGKSRRQREIEKLVKERRQLRKQWRKATEEEREGIKVLQEELRSRLAVLRRAEHLREKRKKKERARSAFFRNPFNFVKGLFNQEKGGQLKATKSEIEQYLKSTYSDSKENRNIGLPPDMPPLGEVEQEMDVSPPRWREVVEVVRRAKASSAPGPNGVPYRVYKSAPGILRTLWRYLRIVWEKQSIPRAWRRAGGVFIPKEKESSDLSQFRMISLLNVEGKIFFSIVAQRLAKYLERNGMIDTTVQKAGIPGFAGCLEHTSMIWHQIQTAKREKRDLNVVFLDLANAFGSVPHNLIWSSFDYFKVPEIVVNLVKAYFQDIRLCASIAELTTGWQRLEVGIMAGCTVSPLAFTMAMEVIIRASKWVVGGERRQNGMRLPPIRAYMDDMTLLTSTVPCTRRLLDKVNQNLKWASMKIKPSKSRSISIYRGKVSDRKFAIDGEEIPTIREKAVKSLGRWYNVDLNDVEQVVQFRKDVAEGLERIDKSGLPGKLRLWCLQFGLYPRLMWPMSVYEVPLSVAERMERLVSSYIRKWLGAPRCLSNVALYGKGMLQLPVSSLTEEFKCTKVRTELLLSGSKDMLVSNVVPNPSGGRKWNPRAAVQEAEAALRHAEIVGNVQFGRGGLGLGPGKPVWNKAGLKEKRKLVVEQVRRQEELLRGAKAVGQAKQGQWLNWEGVEKRKLSWRDLWNMEEGRIKFLIGATYDVLPTPQNLSLWVQGDQSCPLCSGTASLKHILSGCRISLSQGRYTWRHNQVLRSLAAGIEERRKQVNSGSSRKERLDVQFVREGEKNKAAKSGRKQGGGCLVGADDWQMQVDLGGQLVVPQEIVYSNLRPDIVLWSMSKKTVYFIELTVPWENSVEAAYERKKTKYADLKTESEQRGWKTRVCPVEVGCRGFVAGSAVSLLRELGVHGQNLRKTVREMSDEAARSSQWIWIRRNNSSWGVK

SEQ ID NO: 4214 - protein, 1150 aa, Chelmon rostratus
MVTNRITDMTMPWIHDSVRDGGTDPSLRARGSSTQVTGKATKESKSCAAEDKKLQVCPCGWQKITSIRGLRAHQGRRKCLAVEGQSGRIDQYFLRSQSNQSDEVQRQVENHSSQDISNTIPGEEEVRRGDAVGVEGNRPAKERSMEQKARVKWPRANDSKEWEAVDRDLSVILSRLRGDVVEKLDKIGDVIYSYGRERFGVLVKRKGERVQVGKSRRQREIEKLVKERRQLRKQWRKATEEEREGIKVLQEELRSRLAVLRRAEHLREKRKKKERARSAFFRNPFNFVKGLFNQKKGGQLKATKSEIEQYLKSMYSDSKENRNIGLPPDMPPLGEVEQEMDVSPPRWREVVEVVRRAKASSAPGPNGVPYRVYKSAPGILRTLWRYLRIVWEKQSIPRAWRRAGGVFIPKEKESSDLSQFRMISLLNVEGKIFFSIVAQRLAKYLERNGMIDTTVQKAGIPGFAGCLEHTSMIWHQIQTAKREKRDLNVVFLDLANAFGSVPHNLIWSSFDYFKVPEIVVNLVKAYFQDIRLCASIAELTTGWQRLEVGIMAGCTVSPLAFTMAMEVIIRASKWVVGGERRQNGMRLPPIRAYMDDMTLLTSTVPCTRRLLDKVNQNLKWASMKIKPSKSRSISIYRGKVSDRKFAIDGEEIPTIREKSVKSLGRWYNVDLNDVEQVVQFRKDVAEGLERIDKSGLPGKLRLWCLQFGLYPRLMWPMSVYEVPLSVAERMERLVSSYIRKWLGAPRCLSNVALYGKGMLQLPVSSLTEEFKCTKVRTELLLSGSKDMLVSNVVPNPSGGRKWNPRAAVQEAEAALRHAEIVGNVQFGRGGLGLGPGKPVWNKAGLKEKRKLVVEQVRRQEELLRGAKAVGQAKQGQWLNWEGVEKRKLSWRDLWNMEEGRIKFLIGATYDVLPTPQNLSLWVQGDQSCPLCSGTASLKHILSGCRISLSQGRYTWRHNQVLRSLAAGIEERRKQVNSGSSRKERLDVQFVREGEKNKAAKSGRKQGGGCLVGADDWQMQVDLGGQLVVPQEIVYSNLRPDIVLWSMSKKTVYFIELTVPWENSVEAAYERKKTKYADLKTESEQRGWKTRVCPVEVGCRGFVAGSAVSLLRELGVHGQNLRKTVREMSDEAARSSQWIWIRRNNSSWGVK

SEQ ID NO: 4215 - protein, 1006 aa, Chelmon rostratus
MEQKARVKWPRANDSKEWEAVDRDLSVILSRLRGDVVEKLDKIGDVIYSYGRERFGVLVKRKGERVQVGKSRRQREIEKLVKERRQLRKQWRKATEEEREGIKVLQEELRSRLAVLRRAEHLREKRKKKERARSAFFRNPFNFVKGLFNQEKGGQLKATKSEIEQYLKSTYSDSKENRNIGLPPDMPPLGEVEQEMDVSPPRWREVVEVVRRAKASSAPGPNGVPYHVYKSAPGILRTLWRYLRIVWEKQSIPRAWRRAGGVFIPKEKESSDLSQFRMISLLNVEGKIFFSIVAQRLAKYLERNGMIDTTVQKAGIPGFAGCLEHTSMIWHQIQTAKREKRDLNVVFLDLANAFGSVPHNLIWSSFDYFKVPEIVVNLVKAYFQDIRLCASIAELTTGWQRLEVGIMAGCTVSPLAFTMAMEVIIRASKWVVGGERRQNGMRLPPIRAYMDDMTLLTSTVPCTRRLLDKVNQNLKWASMKIKPSKSRSISIYRGKVSDRKFAIDGEEIPTIREKSVKSLGRWYNVDLNDVEQVVQFRKDVAEGLERIDKSGLPGKLRLWCLQFGLYPRLMWPMSVYEVPLSVAERMERLVSSYIRKWLGAPRCLSNVALYGKGMLQLPVSSLTEEFKCTKVRTELLLSGSKDMLVSNVVPNPSGGRKWNPRAAVQEAEAALRHAEIVGNVQFGRGGLGLGPGKPVWNKAGLKEKRKLVVEQVRRQEELLRGAKAVGQAKQGQWLNWEGVEKRKLSWRDLWNMEEGRIKFLIGATYDVLPTPQNLSLWVQGDQSCPLCSGTASLKHILSGCRISLSQGRYTWRHNQVLRSLAAGIEERRKQVNSGSSRKERLDVQFVREGEKNRAAKSGRKQGGGCLVGADDWQMQVDLGGQLVVPQEIVYSNLRPDIVLWSMSKKTVYFIELTVPWENSVEAAYERKKTKYADLKTESEQRGWKTRVCPVEVGCRGFVAGSAVSLLRELGVHGQNLRKTVREMSDEAARSSQWIWIRRNNSSWGVK

SEQ ID NO: 4216 - protein, 1176 aa, Epinephelus lanceolatus
MTEREIRITSGVSFLRRVAGLSFRADTTMTWTGDSVKDRGTDLSTSARISSTQGKVSASVEGKSSIVENKMLQVCPCGWQKVTSVKGLRTHQGKKKCVAKKGQSSRIDQYFLRSQSSQSDEVQRQVENHSSQDISNAATEEEGVVREDAGDTEASMLARERTMEQKVRVRWPRANDSKEWEIVNRDLSVILSRLRGNAIQRLEKMGDIMYSYGVERFGVHERKRSERVQSGKSRRQREIEKLVKERRQLRKQWKKATEEEREGIKVLQEELRSRLAVLRRAEHLRKKRRKKEYARTGFFRDPFKFVKGLFSQEKGGQLKAERLEVEEYLRNTYSDLEKNRIVGFPPDIPPLGGIEHEMDVRPPRWKEVQEVVRRAKASSAPGPNGVPYRVYKSAPDTLKFLWKQLRIVWEKQIIPRAWRRAGGVLIPKEKESVDLSQFRMISLLNVEGKIFFSVVAQRLASYLERNSLIDTMVQKAGIPGFSGCLEHTSMIWHQIQAAKINKRDLHVIFLDLANAFGSVPHSLIWSAFDYFRVPQVVVNLVKAYFQDIRLCLSTAGFTTGWQRLEIGIMAGCTISPLAFTMAMEVIIRASKWVVGGERRQNGLHLPPVRAYMDDMTLVTTTMPCTKRLLEKVNKNLKWASMKIKPSKSRSISICRGKLSDRKFVIDDEDIPTIREKSVKSLGRWYNVELNDKEQVVKFRKDVAEGLDRIDKSELPGKLKLWCLQFGLYPRLMWPLSVYEIPISVVERMERSVSSYIRKWLGAPRCLSSVALYGKGILQLPVSSLTEEFKCTKVRTELLLSGSKDVVVRSVVPNPTKGRKWNPRSAVQEAEAALRHAEIVGNVQFGRGGLGLGSGKPVWNTAGLKDKRKLVVEQIRRQEEIVRGAKVVAQAKQGQWLNWESVEKRKLSWRDLWSMEENRIRFLVGATYDVLPTPQNLKLWVNEDPSCPLCSRTATLKHILSGCKVSLSQGRYTWRHNQVLKCLAAGIEGKRRQVNSEGVKDRGLVIQFVREGEKYRRDKLVRRQGCGRLEGACDWEMQVDLGGKLVVPQEIVCTRQRPDLVLWSVSQQIVYFIELTVPWEDSVEEAYERKKLRYADLGAEAEQRGWKTRICPVEVGCRGFIARSTVSLLGELGVRGQNLRKTVREMSDEAIKCSQFIYYRRNNVSWGPAGGTTKQGT

SEQ ID NO: 4217 - protein, 1150 aa, Chelmon rostratus
MVTNRITDMTMPWIHDSVRDGGTDPSLRARGSSTQVTGKATKESKSCAAEDKKLQVCPCGWQKITSIRGLRTHQGRRKCLAVEGQSGRIDQYFLRSQSNQSDEVQRQVENHSSQDISNTIPGEEEVRRGDAVGVEGNRPAKERSMEQKARVKWPRANDSKEWEAVDRDLSVILSRLRGDVVEKLDKIGDVIYSYGRERFGVLVKRKGERVQVGKCRRQREIEKLVKERRQLRKQWRKATEEEREGIKVLQEELRSRLAVLRRAEHLREKRKKKERARSAFFRNPFNFVKGLFNQEKGGQLKATKSEIEQYLKSTNSDSKENRNIGLPPDMPPLGEVEQEMDVSPPRWREVVEVVRRAKASSAPGPNGVPYRVYKSAPGILRTLWRYLRIVWEKQSIPRAWRRAGGVFIPKEKESSDLSQFRMISLLNVEGKIFFSIVAQRLAKYLERNGMIDTTVQKAGIPGFAGCLEHTSMIWHQIQTAKREKRDLNVVFLDLANAFGSVPHNLIWSSFDYFKVPEIVVNLVKAYFQDIRLCASIAELTTGWQRLEVGIMAGCTVSPLAFTMAMEVIIRASKWVVGGERRQNGMRLPPIRAYMDDMTLLTSTVPCTRRLLDKVNQNLKWASMKIKPSNSRSISIYRGKVSDRKFAIDGEEIPTIREKSVKSLGRWYNVDLNDVEQVVQFRKDVAEGLERIDKSGLPGKLRLWCLQFGLYPRLMWPMSVYEVPLSVAERMERLVSSYIRKWLGAPRCLSNVALYGKGMLQLPVSSLTEEFKCTKVRTELLLSGSKDMLVSNVVPNPSGGRKWNPRAAVQEAEAALRHAEIVGNVQFGRGGLGLGPGKPVWNKAGLKEKRKLVVEQVCRQEELLRGAKAVGQAKQGQWLNWEGVEKRKLSWRDLWNMEEGRIKFLIGATYDVLPTPQNLSLWVQGDQSCPLCSGTASLKHILSGCRISLSQGRYTWRHNQVLRSLAAGIEERRKQVNSGSSRKERLDVQFVREGEKNRAAKSGRKQGGGCLVGADDWQMQVDLGGQLVVPQEIVYSNLRPDIVLWSMSKKTVYFIELTVPWENSVEAAYERKKTKYADLKTESEQRGWKTRVCPVEVGCRGFVAGSAVSLLRELGVHGQNLRKTVREMSDEAARSSQWIWIRRNNSSWGVK

SEQ ID NO: 4218 - protein, 1157 aa, Chelmon rostratus
MVTNRITDMTMPWIHDSVRDGGTDPSLRARGSSTQVTGKATKESKSCAAEDKKLQVCPCGWQKITSIRGLRTHQGRRKCLAVEGQSGRIDQYFLRSQSNQSDEVQRQVENHSSQDISNTIPGEEEVRRGDAVGVEDNRPAKERSMEQKARVKWPRANDSKEWEAVDRDLSVILSRLRGDVVEKLDKIGDVHITTGDVIYSYGRERFGVLVKRKGERVQVGKSRRQREIEKLVKERRQLRKQWRKATEEEREGIKVLQEELRSRLAVLRRAEHLREKRKKKERARSAFFRNPFNFVKGLFNQEKGGQLKATKSEIEQYLKSTYSDSKENRNIGLPPDMPPLGEVEQEMDVSPPRWREVVEVVRRAKASSAPGPNGVPYRVYKSAPGILRTLWRYLRIVWEKQSIPRAWRRAGGVFIPKEKESSDLSQFRMISLLNVEGKIFFSIVAQRLAKYLERNGMIDTTVQKAGIPGFAGCLEHTSMIWHQIQTAKREKRDLNVVFLDLANAFGSVPHNLIWSSFDYFKVPEIVVNLVKAYFQDIRLCASIAELTTGWQRLEVGIMAGCTVSPLAFTMAMEVIIRASKWVVGGERRQNGMRLPPIRAYMDDMTLLTSTVPCTRRLLDKVNQNLKWASMKIKPSKSRSISIYRGKVSDRKFAIDGEEIPTIREKAVKSLGRWYNVDLNDVEQVVQFRKDVAEGLERIDKSGLPGKLWLWCLQFGLYPRLMWPMSVYEVPLSVAERMERLVSSYIRKWLGAPRCLSNVALYGKGMLQLPVSSLTEEFKCTKVRTELLLSGSKDMLVSNVVLNPSGGRKWNPRAAVQEAEAALRHAEIVGNVQFGRGGLGLGPGKPVWNKAGLKEKRKLVVEQVRRQEELLRGAKAVGQAKQGQWLNWEGVEKRKLSWRDLWNMEEGRIKFLIGATYDVLPTPQNLSLWVQGDQSCPLCSGTASLKHILSGCRISLSQGRYTWRHNQVLRSLAAGIEERRKQVNSGSSRKERLDVQFVREGEKNKAAKSGRKQGGGCLVGADDWQMQVDLGGQLVVPQEIVYSNLRPDIVLWSMSKKTVYFIELTVPWENSVEAAYERKKTKYADLKTESEQRGWKTRVCPVEVGCRGFVAGSAVSLLRELGVHGQNLRKTVREMSDEAARSSQWIWIRRNNSSWGVK

SEQ ID NO: 4219 - protein, 1033 aa, Chelmon rostratus
MLQHTATHNCAQDISNTIPGEEEVRRGDAVGVEVNRPAKERSMEQKARVRWPRANDSKEWEAVDRDLSVILSRLRGDVVEKLDKIGDVIYSYGRERFGVLVKRKGERVQVGKSRRQREIEKLVKEREGIKVLQEELRSRLAVLRRAEHLREKRKKKERARSAFFRNPFNFVKGLFNQEKGGQLKATKSEIEQYLKSTYSDSKENRNIGLPPDMPPLGEVEQEMDVSPPRWREVVEVVRRAKASSAPGPNGVPYRVYKSAPGILRTLWRYLRIVWEKQSIPRAWRRAGGVFIPKEKESSDLSQFRMISLLNVEGKIFFSIVAQRLANYLERNGMIDTTVQKAGIPGFAGCLEHTSMIWHQIQTAKREKRDLNVVFLDLANAFGSVPHNLIWSSFDYFKVPEIVVNLVKAYFQDIRLCASSAELTTGWQRLEVGIMAGCTVSPLAFTMAMEVIIRASKWVVGGERRQNGMRLPPIRAYMDDMTLLTSTVPCTRRLLDKVNQNLKWASMKIKPSKSRSISIYRGKVSDRKFAIDGEEIPTIREKSVKSLGRWYNVDLNDVEQVVQFRKDVAEGLERIDKSGLPGKLRLWCLQFGLYPRLMWPMSVYEVLLSVAERIERLVSSYIRKWLGAPRCLSDVALYGKGMLQLPVSSLTEEFKCTKVRTELLLSGSKDMLVSNVVPNPSGGRKWNPRAAVQEAEAALRHAEIVGNVQFGRGGLGLGPGKPVWNKAGLKEKRKLVVEQVRRQEELLRGAKAVGQAKQGQWLNWEGVEKRKLSWRDLWNMEEGRIKFLIGATYDVLPTPQNLSLWVQGDQSCPLCSGTASLKHILSGCRISLSQGRYTWRHNQVLRSLAAGIEERRKQVNSGSSRKERLDAQFVREGEKNRAAKSGRRQVGGCLVGADDWQMQVDLGGKLVVPQEIVYSNLRPVIVLWSMSKKTVFFIELTVPWENSVEAAYERKKTKYADLKTESEQRGWKTRVCPVEVGCRGFVAGSAVSLLRELGVQGQNLRKTVREMSDEAARSSQWIWIRGNNSSWGVK

SEQ ID NO: 4220 - protein, 1150 aa, Chelmon rostratus
MVTNRIRDMTMPWIHDSVRDGGTDPSLRARGSSTQVTGKATKESKSCAAEDKKLQVCPCGWQKITSIRGLRTHQGRRKCLAVEGQSGRIDQYFLRSQSNQSDEVQRQVENHSSQDISNTIPGEEEVRRGDAVGVEGNRPTKERSMEQKARVRWPRANDSKEWEAVDRDLSVILSRLRGDVVEKLDKIGDVIYSYGRERFGVLVKRKGKRVQVGKSRRQREIEKLVKERRQLRKQWRKATEEEREGIKVLQEELRSRLAVLRRAEHLREKRKKKERARSAFFRNPLNFVKGLFNQEKGGQLKATKSEIEQYLKSTYSDSKENRNIGLPPDMPPLGEVEQEMDVSPPRWREVVEVVRRAKASSAPGPNGVPYRVYKSAPGILRTLWRYLRIVWEKQSIPRAWRRAGGVFIPKEKESSDLSQFRMISLLNVEGKIFFSIVAQRLAKYLERNGMIDTTVQKAGIPGFAGCLEHTGMIWHQIQTAKREKRDLNVVFLDLANAFGSVPHNLIWSSFDYFKVPEIVVNLVKAYFQDIRLCASIAELTTGWQRLEVGIMAGCTVSPLAFTMAMEVIIRASKWVVGGERRQNGMRLPPIRAYMDDMTLLTSTVPCTRRLLDKVNQNLKWASMKIKPSKSRSISIYRGKVSDRKFAIDGEEIPTIREKSVKSLGRWYNVDLNDVEQVVQFRKDVAEGLERIDKSGLPGKLRLWCLQFGLYPRLMWPMSVYEVPLSVAERMERLVSSYIRKWLGAPRCLSNVALYGKGMLQLPVSSLTEEFKCTKVRTELLLSGSKDMLVSNVVPNPSGGRKWNPRAAVQEAEAALRHAEIVGNVQFGRGGLGLGPGKPVWNKAGLKEKRKLVVEQVRRQEELLRGAKAVGQAKQGQWLNWEGVEKRKLSWRDLWNMEEGRIKFLIGATYDVLPTPQNLSLWVQGDQSCPLCSGTASLKHILSGCRISLSQGRYTWRHNQVLRSLAAGIEERRKQVNSGSSRKERLDVQFVREGEKNRAAKSGRKQVGGCLVGADGWQMQVDLGGKLVVPQEIVYSNLRPDIVLWSMSKKTVYFIELTVPWENSVEAAYERKKTKYADLKTESEQRGWKTRVCPVEVGCRGFVAGSAVSLLRELGVHGQNLRKTVREMSDEAARSSQWIWIRRNNSSWGVK

SEQ ID NO: 4221 - protein, 1006 aa, Chelmon rostratus
MEQKARVKWPRANDSKEWEAVDRDLSVILSRLRGDVVEKLDKIGDVIYSYGRERFGVLVKRKGERVQVGKSRRQREIEKLVKERRQLRKQWRKATEEEREGIKVLQEELRSRLAVLRRAEHLREKRKKKERARSAFFRNPFNFVKGLFNQEKGGQLKATKSEIEQYLKSTYSDSKENRNIGLPPDMPPLGEVEQEMDVSPPRWREVVEVVRRAKASSAPGPNGVPYRVYKSAPGILRTLWRYLRIVWEKQSIPRAWRRAGGVFIPKEKESSDLSQFRMISLLNVEGKIFFSIVAQRLAKYLERNGMIDTTVQKAGIPGFAGCLEHTSMIWHQIQTAKREKRDLNVVFLDLANAFGSVPHNLIWSSFDYFKVPEIVVNLVKAYFQDIRLCASIAELTTGWQRLEVGIMAGCTVSPLAFTMAMEVIIRASKWVVGGERRQNGMRLPPIRAYMDDMTLLTSTVPCTRRLLDKVNQNLKWASMKIKPSKSRSISIYRGKVSDRKFAIDGEEIPTIREKSVKSLGRWYNVDLNDVEQVVQFRKDVAEGLERIDKSGLPGKLRLWCLQFGLYPRLMWPMSVYEVPLSVAERMERLVSSYIRKWLGAPRCLSNVALYGKGMLQLPVSSLTEEFKCTKVRTELLLSGSKDMLVSNVVPNPSGGRKWNPRAAVQEAEAALRHAEIVGNVQFGRGGLGLGPGKPVWNKAGLKEKRKLVVEQVRRQEELLRGAKAVGQAKQGQWLNWEGVEKRKLSWRDLWNMEEGRIKFLIGATYDVLPTPQNLSLWVQGDQSCPLCSGTASLKHILSGCRISLSQGRYTWRHNQVLRSLAAGIEERRKQVNSGSSRKERLDVQFVREGEKNRAAKSGRKQGGGCLVGADDWQMQVDLGGQLVVPQEIIYSNLRPDIVLWSMSKKTVYFIELTVPWENSVEAAYERKKTKYADLKTESEQRGWKTRVCPVEVGCRGFVAGSAVSLLRELGVHGQNLRKTVREMSDEAARSSQWIWIRRNNSSWGVK

SEQ ID NO: 4222 - protein, 1020 aa, Epinephelus fuscoguttatus
MLARERTMEQKVRVRWPRANDSKEWEIVNRDLSVILSRLRGNAMERLEKMGDIMYSYGVERFGVHERKRSERVQSGKSRRQREIEKLVKERRQLRKQWEKATEEEREGINVLKAELRSRLAVLKRAEHLRKKRRKKEHVRTGFFRDPLKFVKGLFSQEKGGQLKAERLEVEENLRNTYSDLEKNRKVGFTDIPPLGGIEHEMDVRPPRWKEVQEVVRRAKASSAPGPNGVPYRVYKSAPDTLKFLWKQLRIVWEKQIIPRAWRRAGGVLIPKEKESVDLSQFRMISLLNVEGKIFFSVVAQRLASYLERNSLIDTMVQKAGIPGFSGCLEHTSMIWHQIQAAKINKRDLHVVFLDLANAFGSVPHSLIWSAFDYFRVPQVVVNLVKAYFQDIRLCLSTAGFTTGWQRLEIGIMAGCTISPLAFTMAMEVIIRASKWVVGGERWQNGLHLPPVRAYMDDMTLVTTTMPCTKRLLEKVNKNLKWASMKIKPSKSRSISICRGKLSDRKFVIDDEDIPTIREKSVKSLGRLYNVELNDKEQVVKFRKDVAEGLDRIDKSELPGKLKLWCLQFGLYPRLIWPLSIYEIPITVVERIERLVSSYIRKWLGAPRCLNSVALYGKGILQLPVTSLTEEFKCTKVRTELLLAGSKDVVVRSVVPNPTKGRKWNPRSAVQEAEAALRHAEIVGNVQFGRGGLGLRSGKPVWNTAGLKDKRKLVVEQIRRQEEIVRGAKVVAQAKQGQWLNWESVEKRKLSWRDLWSMEENRIRFLIGATYDVLPTPQNLKLWVNEDPSCPLCSRIATLKHILSGCKVSLSQGRYTWRHNQVLKCLAAGIEGKRRQVNSEGVKDRSLVIQFVREGEKYRRDKLVRRQRCGRLEGACDWEMQVDLGGKLVVPQEIVCTRQRPDLVLWSVSQQIVYFIELTVPWEDSVEEAYERKKLRYADLGAEAEQRGWKTRICPVEVGCRGFIARSTVSLLGELGVRGQSLRKTVREMSDEAIKCSQFIYYRRNNVSWGPAGGTTKQGT

SEQ ID NO: 4223 - protein, 1158 aa, Epinephelus lanceolatus
MITDIGTDMTMHWICDSVKDRGTDLSTRARISSTQGKASASVEDKSSTVENKMLQVCPCGWQKVTSVKGLRTHQGKKKCVAKKGQSSRIDQYFLRSQSSQSDEVQRQVENHSSQDISNAATEEEGVVREDAGDTEASMLARERTMEQKVRVRWPRANDSKEWEIVNRDLSVILSRLRGNAIQRLEKMGDIMYSYGVERFGVHERKRSERVQSGKSRRQREIEKLVKERRQLRKQWKKATEEEREGIKVLQEELRSRLAVLRRAEHLRKKRRKKEYARTGFFRDPFKFVKGLFSQEKGGQLKAERLEVEEYLRNTYSDLEKNRIVGFPPDIPPLGGIEHEMDVRPPRWKEVQEVVRRAKASSAPGPNGVPYRVYKSAPDTLKFLWKQLRIVWEKQIIPRAWRRAGGVLIPKEKESVDLSQFRMISLLNVEGKIFFSVVAQRLASYLERNSLIDTMVQKAGIPGFSGCLEHTSMIWHQIQAAKINKRDLHVIFLDLANAFGSVPHSLIWSAFDYFRVPQVVVNLVKAYFQDIRLCLSTAGFTTGWQRLEIGIMAGCTISPLAFTMAMEVIIRASKWVVGGERRQNGLHLPPVRAYMDDMTLVTTTMPCTKRLLEKVNKNLKWASMKIKPSKSRSISICRGKLSDRKFVIDDEDIPTIREKSVKSLGRWYNVELNDKEQVVKFRKDVAEGLDRIDKSELPGKLKLWCLQFGLYPRLMWPLSVYEIPISVVERMERSVSSYIRKWLGAPRCLSSVALYGKGILQLPVSSLTEEFKCTKVRTELLLSGSKDVVVRSVVPNPTKGRKWNPRSAVQEAEAALRHAEIVGNVQFGRGGLGLGSGKPVWNTAGLKDKRKLVVEQIRRQEEIVRGAKVVAQAKQGQWLNWESVEKRKLSWRDLWSMEENRIRFLVGATYDVLPTPQNLKLWVNEDPSCPLCSRTATLKHILSGCKVSLSQGRYTWRHNQVLKCLAAGIEGKRRQVNSEGVKDRGLVIQFVREGEKYRRDKLVRRQGCGRLEGACDWEMQVDLGGKLVVPQEIVCTRQRPDLVLWSVSQQIVYFIELTVPWEDSVEEAYERKKLRYADLGAEAEQRGWKTRICPVEVGCRGFIARSTVSLLGELGVRGQNLRKTVREMSDEAIKCSQFIYYRRNNVSWGPAGGTTKQGT

SEQ ID NO: 4224 - protein, 1172 aa, Chelmon rostratus
MVTNRITDMTMPWIHDSVRDGGTDPSLRARGSSTQVTGKATKESKSCAAEDKKLQVCPCGWQKITSIRGLRTHQGRRKCLAVEGQSGRIDQYFLRSQSNQSDEVQRQVENHSSQDISNTIPGEEEVRRGDAVGVEGNRPAKERSMEQKARVKWPRANDSKEWEAVDRDLSVILSRLRGDVVEKLDKIGDVIYSYGRERFGVLVKRKGERVQVGKSRRQREIEKLVKERRQLRKQWRKATEEEREGIKVLQEELRSRLAVLRRAEHLREKRKKKERARSAFFRNPFNFVKGLFNQEKGGQLKATKSEIEQYLKSTYSDSKENRNIGLPPDMPPLGEVEQEMDVSPPRWREVVEVVRRAKASSAPGPNGVPYRAYKSAPGILRTLWRYLRIVWEKQSIPRAWRRAGGVFIPKEKESSDLSQFRMISLLNVEGKIFFSIVAQRLAKYLERNGMIDTTVQKAGIPGFAGCLEHTSMIWHQIQTAKREKRDLNVVFLDLANAFGSVPHNLIWSSFDYFKVPEIVVNLVKAYFQDIRLCASIAELTTGWQRLEVGIMAGCTVSPLAFTMAMEVIIRASKWVVGGERRQNGMRLPPIRAYMDDMTLLTSTVPCTRRLLDKVNQNLKWASMKIKPSKSRSISIYRGKVSDRKFAIDGEEIPTIREKSVKSLGRWYNVDLNDVEQVVQFRKDVAEGLERIDKSGLPGKLRLWCLQFGLYPRLMWPMSVYEVPLSVAERMERLVSSYIRKWLGAPRCLSNVALYGKGMLQLPVSSLTEEFKCTKVRTELLLSGSKDMLVSNVVPNPSGGRKWNPRAAVQEAEAALRHAEIVGNVQFGRGGLGLGPGKPVWNKAGLKEKRKLVVEQVRRQEELLRGAKAVGQAKQGQWLNWEGVEKRKLSWRDLWNMEEGRIKFLIGATYDVLPTPQNLSLWVQGDQSCPLCSGTASLKHILSGCRISLSQGRYTWRHNQVLRSLAAGIEERRKQVNSGSSRKERLDVQFVREGEKNRAAKSGRKQGGGCLVGADDWQMQVDLGGQLVVPQEIVYSNLRPDIVLWSMSKKTVYFIELTVPWENSVEAAYERKKTKYADLKTESEQRGWKTRVCPVEVGCRGFVAGSAVSLLRELGVHGQNLRKTVREMSDEAARSSQWIWIRRNNSSWGVKWGQWGGRQRTCMPNPAREEVKV

SEQ ID NO: 4225 - protein, 1150 aa, Chelmon rostratus
MVTNRITDMTMPWIHDSVRDGGTDPSLRARGSSTQVTGKATKESKSCAAEDKKLQVCPCGWQKITSVRGLRTHQGRRKCLAVEGQSGRIDQYFLRSQSNQSDEVQRQVENHSSQDISNTIPGEEEVRRGDAVGVEGNRPAKERSMEQKARVKWPRANDSKEWEAVDRDLSVILSRLRGDVVEKLDKIGDVIYSYGRERFGVLVKRKGERVQVGKSRRQREIEKLVKERRQLRKQWRKATEEEREGIKVLQEELRSRLAVLRRAEHLREKRKKKERARSAFFRNPFNFVKGLFNQEKGGQLKATKSEIEQYLKSTYSDSKENRNIGLPPDMPPLGEVEQEMDVSPPRWREVVEVVRRAKASSAPGPNGVPYRVYKSAPGILRTLWRYLRIVWEKQSIPRAWRRAGGVFIPKEKELSDLSQFRMISLLNVEGKIFFSIVAQRLAKYLERNGMIDTTVQKAGIPGFAGCLEHTSMIWHQIQTAKREKRDLNVVFLDLANAFGSVPHNLIWSSFDYFKVPEIVVNLVKAYFQDIRLCASIAELTTGWQRLEVGIMAGCTVSPLAFTMAMEVIIRASKWVVGGERRQNGMRLPPIRAYMDDMTLLTSTVPCTRRLLDKVNQNLKWASMKIKPSKSRSISIYRGKVSDRKFAIDGEEIPTIREKSVKSLGRWYNVDLNDVEQVVQFRKDVAEGLERIDKSGLPGKLRLWCLQFGLYPRLMWPMSVYEVPLSVAERMERLVSSYIRKWLGAPRCLSNVALYGKGMLQLPVSSLTEEFKCTKVRTELLLSGSKDMLVSNVVPNPSGGRKWNPRAAVQEAEAALRHAEIVGNVQFGRGGLGLGPGKPVWNKAGLKEKRKLVVEQVRRQEELLRGAKAVGQAKQGQWLNWEGVEKRKLSWRDLWNMEEGRIKFLIGATYDVLPTPQNLSLWVQGDQSCPLCSGTASLKHILSGCRISLSQGRYTWRHNQVLRSLAAGIEERRKQVNSGSSRKERLDVQFVREGEKNRAAKSGRKQGGGCLVGADDWQMQVDLGGQLVVPQEIVYSNLRPDIVLWSMSKKTVYFIELTVPWENSVEAAYERKKTKYADLKTESEQRGWKTRVCPVEVGCRGFVAGSAVSLLRELGVHGQNLRKTVREMSDEAARSSQWIWIRRNNSSWGVK

SEQ ID NO: 4226 - protein, 1150 aa, Chelmon rostratus
MVTNRITDMTMPWIHDSVRDGGTDPSLRARGSSTQVTGKATKESKSCAAEDKKLQVCPCGWQKITSIRGLRTHQGRRKCLAVEGQSGRIDQYFLRSQSNQSDEVQRQVENHSSQDISNTFPGEEEVRRGDAVGVEGNRPAKERSMEQKARVKWPRANDSKEWEAVDRDLSVILSRLRGDVVEKLDKIGDVIYSYGRERFGVLVKRKGERVQVGKSRRQREIEKLVKERRQLRKQWRKATEEEREGIKVLQEELRSRLAVLRRAEHLREKRKKKERARSAFFRNPFNFVKGLFNQEKGGQLKATKSEIEQYLKSTYSDSKENRNIGLPPDMPPLGEVEQEMDVSPPRWREVVEVVRRAKASSAPGPNGVPYRVYKSAPGILRTLWRYLRIVWEKQSIPRAWRRAGGVFIPKEKESSDLSQFRMISLLNVEGKIFFSIVAQRLAKYLERNGMIDTTVQKAGIPGFAGCLEHTSMIWHQIQTAKREKRDLNVVFLDLANAFGSVPHNLIWSSFDYFKVPEIVVNLVKAYFQDIRLCASIAELTTGWQRLEVGIMAGCTVSPLAFTMAMEVIIRASKWVVGGERRQNGMRLPPIRAYMDDMTLLTSTVPCTRRLLDKVNQNLKWASMKIKPSKSRSISIYRGKVSDRKFAIDGEEIPTIREKAVKSLGRWYNVDLNDVEQVVQFRKDVAEGLERIDKSGLPGKLRLWCLQFGLYPRLMWPMSVYEVPLSVAERMERLVSSYIRKWLGAPRCLSNVALYGKGMLQLPVSSLTEEFKCTKVRTELLLSGSKDMLVSNVVPNPSGGRKWNPRAAVQEAEAALRHAEIVGNVQFGRGGLGLGPGKPVWNKAGLKEKRKLVVEQVRRQEELLRGAKAVGQAKQGQWLNWEGVEKRKLSWRDLWNMEEGRIKFLIGATYDVLPTPQNLSLWVQGDQSCPLCSGTASLKHILSGCRISLSQGRYTWRHNQVLRSLAAGIEERRKQVNSGSSRKERLDVQFVREGEKNKAAKSGRKQGGGCLVGADDWQMQVDLGGQLVVPQEIVYSNLRPDIVLWSMSKKTVYFIELTVPWENSVEAAYERKKTKYADLKIESEQRGWKTRVCPVEVGCRGFVAGSAVSLLRELGVHGQNLRKTVREMSDEAARSSQWIWIRRNNSSWGVK

SEQ ID NO: 4227 - protein, 1047 aa, Epinephelus lanceolatus
MQYIQNYYATEEEGVVREDAGDTEASMLARERTMEQKVRVRWPRANDSKEWEIVNRDLSVILSRLRGNAIERLEKMGDIMYSYGVERFGVHERKRSERVQSGKSRRQREIEKLVKERRQLRKQWKKATEEEREGIKVLQEELRSRLAVLRRAEHLRKKRRKKEYARTGFFRDPFKFVKGLFSQEKGGQLKAERLEVEEYLRNTYSDLEKNRIVGFPPDIPPLGGIEHEMDVRPPRWKEVQEVVRRAKASSAPGPNGVPYRVYKSAPDTLKFLWKQLRIVWEKQIIPRAWRRAGGVLIPKEKESVDLSQFRMISLLNVEGKIFFSVVAQRLASYLERNSLIDTMVQKAGIPGFSGCLEHTSMIWHQIQAAKINKRDLHVIFLDLANAFGSVPHSLIWSAFDYFRVPQVVVNLVKAYFQDIRLCLSTAGFTTGWQRLEIGIMAGCTISPLAFTMAMEVIIRASKWVVGGERRQNGLHLPPVRAYMDDMTLVTTTMPCTKRLLEKVNKNLKWASMKIKPSKSRSISICRGKLSDRKFVIDDEDIPTIREKSVKSLGRWYNVELNDKEQVVKFRKDVAEGLDRIDKSELPGKLKLWCLQFGLYPRLMWPLSVYEIPISVVERMERSVSSYIRKWLGAPRCLSSVALYGKGILQLPVSSLTEEFKCTKVRTELLLSGSKDVVVRSVVPNPTKGRKWNPRSAVQEAEAALRHAEIVGNVQFGRGGLGLGSGKPVWNTAGLKDKRKLVVEQIRRQEEIVRGAKVVAQAKQGQWLNWESVEKRKLSWRDLWSMEENRIRFLVGATYDVLPTPQNLKLWVNEDPSCPLCSRTATLKHILSGCKVSLSQGRYTWRHNQVLKCLAAGIEGKRRQVNSEGVKDRGLVIQFVREGEKYRRDKLVRRQGCGRLEGACDWEMQVDLGGKLVVPQEIVCTRQRPDLVLWSVSQQIVYFIELTVPWEDSVEEAYERKKLRYADLGAEAEQRGWKTRICPVEVGCRGFIARSTVSLLGELGVRGQNLRKTVREMSDEAIKCSQFIYYRRNNVSWGPAGGTTKQGT

SEQ ID NO: 4228 - protein, 957 aa, Chelmon rostratus
MVERDLGVLVKRKGERVQVGKSRRQREIEKLVKERRQLRKQWRKATEEEREGIKVLQKELRSRFAVLRRAEHLREKRKKKERARSAFFRNPFNFVKGLFNQEKGGQLKATKSEIEQYLKSTYSDSKENRNIGLPPDMPPLGEVEQEMDVSPPRWREVVEVVRRAKASSAPGPNGVPYRVYKSAPGILRTLWRYLRIVWEKQSIPRAWRRAGGVFIPKEKESSDLSQFRMISLLNVEGKIFFSIVAQRLAKYLERNGMIDTTVQKAGIPGFAGCLEHTSMIWHQIQTAKREKRDLNVVFLDLANAFGSVPHNLIWSSFDYFKVPEIVVNLVKAYFQDIRLCASIAELTTGWQRLEVGIMAGCTVSPLAFTMAMEVIIRASKWVVGGERRQNGMRLPPIRAYMDDMTLLTSTVPCTRRLLDKVNQNLKWASMKIKPSKSRSISIYRGKVSDRKFAIDGEEIPTIREKSVKSLGRWYNVDLNDVEQVVQFRKDVAEGLERIDKSGLPGKLRLWCLQFGLYPRLMWPMSVYEVPLSVAERMERLVSSYIRKWLGAPRCLSNVALYGKGMLQLPVSSLTEEFKCTKVRTELLLSGSKDILVSNVVPNPSGGRKWNPRAAVQEAEAALRHAEIVGNVQFGRGGLGLGPGKPVWNKAGLKEKRKLVVEQVRRQEELLRGAKAVGQAKQGQWLNWEGVEKRKLSWRDLWNMEEGRIKFLIGATYDVLPTPQNLSLWVQGDQSCPLCSGTASLKHILSGCRISLSQGRYTWRHNQVLRSLAAGIEERRKQVNSGSSRKERLDVQFVREGEKNRAAKSGRKQGGGCLVGADDWQMQVDLGGQLVVPQEIVYSNLRPDIVLWSMSKKTVYFIELTVPWENSVEAAYERKKTKYADLKTESEQRGWKTRVCPVEVGCRGFVAGSAVSLLRELGVHGQNLRKTVREMSDEAARSSQWIWIRRNNSSWGVK

SEQ ID NO: 4229 - protein, 1006 aa, Chelmon rostratus
MEQKARVKWPRANDSKEWEAVDRDLSVILSRLRGDVVEKLDKIGDVIYSYGRERFGVLVKRKGERVQVGKCRRQREIEKLVKERRQLRKQWRKATEEEREGIKVLQEELRSRLAVLRRAEHLREKRKKKERARSAFFRNPFNFVKGLFNQEKGGQLKATKSEIEQYLKSTYSDSKENRNIGLPPDMPPLGEVEQEMDVGPPRWREVVEVVRRAKASSAPGPNGVPYRVYKSAPGILRTLWRYLRIVWEKQSIPRAWRRAGGVFIPKEKESSDLSQFRMISLLNVEGKIFFSIVAQRLAKYLERNGMIDTTVQKAGIPGFAGCLEHTSMIWHQIQTAKREKRDLNVVFLDLANAFGSVPHNLIWSSFDYFKVPEIVVNLVKAYFQDIRLCASIAELTTGWQRLEVGIMAGCTVSPLAFTMAMEVIIRASKWVVGGERRQNGMRLPPIRAYMDDMTLLTSTVPCTRRLLDKVNQNLKWASMKIKPSKSRSISIYRGKVSDRKFAIDGEEIPTIREKSVKSLGRWYNVDLNDVEQVVQFRKDVAEGLERIDKSGLPGKLRLWCLQFGLYPRLMWPMSVYEVPLSVAERMERLVSSYIRKWLGAPRCLSNVALYGKGMLQLPVSSLTEEFKCTKVRTELLLSGSKDMLVSNVVPNPSGGRKWNPRAAVQEAEAALRHAEIVGNVQFGRGGLGLGPGKPVWNKAGLKEKRKLVVEQVRRQEELLRGAKAVGQAKQGQWLNWEGVEKRKLSWRDLWNMEEGRIKFLIGATYNVLPTPQNLSLWVQGDQSCPLCSGTASLKHILSGCRISLSQGRFTWRHNQVLRSLAAGIEERRKQVNSGSSRKERLDVQFVREGEKNRAAKSGRKQGGGCLVGADDWQMQVDLGGQLVVPQEIVYSNLRPDIVLWSMSKKTVYFIELTVPWENSVEAAYERKKTKYADLKTESEQRGWKTRVCPVEVGCRGFVAGSAVSLLRELGVHGQNLRKTVREMSDEAARSSQWIWIRRNNSSWGVK

SEQ ID NO: 4230 - protein, 1150 aa, Chelmon rostratus
MVTNRITDMTMPWIHDSVRDGGTDPSLRARGSSTQVTGKATKESKSCAAEDKKLQVCPCGWQKITSIRGLRTHQGRRKCLAVEGQSGRIDQYFLRSQSNQSDEVQRQVENHSSQDISNTIPGEEEVRRGDAVGVEGNRPAKERSMEQKARVRWPRANDSKEWEGVDRDLSVILSRLRGDVVEKLDKIGDVIYSYGRERFGVLVKRKGERVQVGKSRRQREIEKLVKERRQLRKQWRKATEEEREGIKVLQEELRSRLAVLRGAEHLREKRKKKERARSAFFRNPFNFVKGLFNQEKGGQLKATKSEIEQYLKSTYSDSKENRNIGLPPDMPPLGEVEQEMDVSPPRWREVVEVVRRAKASSAPGPNGVPYRVYKSAPSILRTLWRYLRIVWEKQSIPRAWRRAGGVFIPKEKESSDLSQFRMISLLNVEGKIFFSIVAQRLAKYLEGNGMIDTTVQKAGIPGFAGCLEHTSMIWDQIQTAKREKRDLNVVFLDLANAFGSVPHNLIWSSFDYFKVPEIVVNLVKAYFQDIRLCASIAELTTGWQRLEVGIMAGCTVSPLAFTMAMEVIIRASKWVVGGERRQNGMRLPPIRAYMDDMTLLTSTMPCTRRLLDKVNQNLKWASMKIKPSKSRSISIYRGKVSDRKFAIDGEEIPTIREKSVKSLGRWYNVDLNDVEQVVQFRKDVAEGLERIDKSGLPGKLRLWCLQFGLYPRLMWPMSVYEVPLSVAERMERLVSSYIRKWLGAPRCLSNVALYGKGMLQLPVSSLTEEFKCTKVRTELLLSGSKDMLVSNVVPNPSGGRKWNPRAAVQEAEAALRHAEIVGNVQFGRGGLGLGPGKPVWNKAGLKEKRKLVVEQVRRQEELLRGAKAVGQAKQGQWLNWEGVEKRKLSWRDLWNMEEGRIKFLIGATYDVLPTPQNLSLWVQGDQSCPLCSGTASLKHILSGCRISLSQGRYTWRHNQVLRSLAAGIEERRKQVNSGSSRKERLDVQFVREGEKNKAAKSGRKQVGGCLVGADDWQMQVDLGGKLVVPQEIVYSNLRPDIVLWSMSKKTVYFIELTVPWENSVEAAYERKKTKYADLKTESEQRGWKTRVCPVEVGCRGFVAGSAVSLLRELGVHEQNLRKTVREMSDEAARSSQWIWIRRNNSSWGVK

SEQ ID NO: 4231 - protein, 1006 aa, Chelmon rostratus
MEQKARVKWPRANDSKEWEAVDRDLSVILSRLRGDVVEKLDKIGDVIYSYGRERFGVLVKRKGERVQVGKSRRQREIEKLVKERRQLRKQWRKATEEEREGIKVLQEELRSRLAVLRRAEHLREKRKKKERARSAFFRNPFNFVKGLFNQEKGGQLKATKSEIEQYLKSTYSDSKENRNIGLPPDMPPLGEVEQEMDVSPPRWREVVEVVRRAKASSAPGPNGVPYRVYKSAPGILRTLWRYLRIVWEKQSIPRAWRRAGGVFIPKEKESSDLSQFRMISLLNVEGKIFFSIVAQRLAKYLERNGMIDTTVQKAGIPGFAGCLAHTSMIWHQIQTAKREKRDLNVVFLDLANAFGSVPHNLIWSSFDYFKVPEIVVNLVKAYFQDIRLCASIAELTTGWQRLEVGIMAGCTVSPLAFTMAMEVIIRASKWVVGGERRQNGMRLPPIRAYMDDMTLLTSTVPCTRNLLDKVNQNLKWASMKIKPSKSRSISIYRGKVSDRKFAIDGEEIPTIREKSVKSLGRWYNVDLNDVEQVVQFRKDVAEGLERIDKSGLPGKLRLWCLQFGLYPRLMWPMSVYEVPLSVAERMERLVSSYIRKWLGAPRCLSNVALYGKGMLQLPVSSLTEEFKCTKVRTELLLSGSKDMLVSNVVPNPSGGRKWNPRAAVQEAEAALRHAEIVGNVQFGRGGLGLGPGKPVWNKAGLKEKRKLVVEQVRRQEELLRGAKAVGQAKQGQWLNWEGVEKRKLSWRDLWNMEEGRIKFLIGATYDVLPTPQNLSLWVQGDQSCPLCSGTASLKHILSGCRISLSQGRYTWRHNQVLRSLAAGIEERRKQVNSGSSRKERLDVQFVREGEKNRAAKSGRKQGGGCLVGADDWQMQVDLGGQLVVPQEIVYSNLRPDIVLWSMSKKTVYFIELTVPWENSVEAAYERKKTKYADLKTESEQRGWKTRVCPVEVGCRGFVAGSAVSLLRELGVHGQNLRKTVREMSDEAARSSQWIWIRRNNSSWGVK

SEQ ID NO: 4232 - protein, 1125 aa, Diretmoides pauciradiatus
MHWICDSVKDRGTDLSTRARISSTQGKASASVEDKSSTVENKMLQVCPCGWQKVTSVKGLRTHQGKKKCVAKKGQSSRIDQYFLRSQSSQSDEVQRQVENHSSQDISNTATEEEEEGVVREDAGDTEASMPVRERTMEQKVRVRWPRANDSKEWEIVNRDLSVILSRLRGNAIERLEKMGDIIYSYGVERFGVHERKRSERVQSGKSRRQREIEKLVKERRQLRKQWRKATEEEREGIKVLQEELRSRLAVLRRAEHLRKKRRKKEHVRTGFFRDPFKFVKGLFSQEKGGQLKAERLEVEEYLRNTYSDLEKNRIVGFPPDIPPLGGIEHEMDVRPPRWKEVQEVVRRAKASSAPGPNGVPYRVYKSAPDTLKFLWKQLRIVWEKQIIPRAWRRAGGVLIPKEKESVDLSQFRMISLLNVEGKIFFSVVAQRLASYLERNSLIDTTVQKAGIPGFSGCLEHTSMIWHQIQAAKNKKRDLHVIFLDLANAFGSVPHGLIWSAFDYFRVPQVVVNLVQAYFQDIRLCLSTAGFTTGWQRLEIGIMAGCTISPLAFTMAMEVIIRASKWVVGGERRQNGLHLPPVRAYMDDMTLVTTTMPCTRRLLEKVNKNLKWASMKIKPSKSRSISIRRGKLSDRKFVIDDEEIPTIREKSVKSLGRWYNVELNDEEQVVKFRKDVAEGLDRIDKSELPGKLKLWCLQFGLYPRLMWPLSVYEIPISVVERIERSVSSYIRKWLGAPRCLSSVALYGKGILQLPVSSLTEEFKCTKVRTELLLSGSKDVVVRSVVPNPTKGRKWNPRSAVQEAEAALRHAEIVGNVQFGRGGLGLGSGKPVWNKAGLKDKRKLVVEQIRRQEEMLRGAKVVAQAKQGQWLNWEGVEKRKLSWRDLWSMEENRIRFLVGATYDVLPTPQNLKLWVNEDPSCPLCSGTATLKHILSGCKVSLSQGRYTWRHNQVLKCLAAGIEGKRRQVNSEGVKDRSLVIQFVREGEKYRRDKLVRKQGCGRLEGACDWEMQVDLGGKLVVPQEIVCTRQRPDIVLWSVSQRIVYFIELTVPWEDSVEEAYERKKLRYADLGAEAEQRGWKTRICPVEVGCRGFIARSAVSLLGELGVRGQSLRKTVKEMSDEAAR

SEQ ID NO: 4233 - protein, 1151 aa, Epinephelus lanceolatus
MTWICDSVKDRGMDLSTRARISSTQGKASASVEDKSSTVESKMLQVCPCGWQKVTSVKGLRTHQGKKKCVAKKGQSSRIDQYFLRSQSSQSDEVQRQVENHSSQDISNAATEEEGVEGVVREDAGDTEASMPVRERTMEQKVRVRWPRANDSKEWEIVNRDLSVILSRLRGNAIQRLEKMGDIMYSYGVERFGVHERKRSERVQSGKSRRQREIEKLVKERRQLRKQWKKATEEEREGIKVLQEELRSRLAVLRRAEHLRKKRRKKEYARTGFFRDPFKFVKGLFSQEKGGQLKAERLEVEEYLRNTYSDLEKNRIVGFPPDIPPLGGIEHEMDVRPPRWKEVQEVVRRAKASSAPGPNGVPYRVYKSAPDTLKFLWKQLRIVWEKQIIPRAWRRAGGVLIPKEKESVDLSQFRMISLLNVEGKIFFSVVAQRLASYLERNSLIDTMVQKAGIPGFSGCLEHTSMIWHQIQAAKINKRDLHVIFLDLANAFGSVPHSLIWSAFDYFRVPQVVVNLVKAYFQDIRLCLSTAGFTTGWQRLEIGIMAGCTISPLAFTMAMEVIIRASKWVVGGERRQNGLHLPPVRAYMDDMTLVTTTMPCTKRLLEKVNKNLKWASMKIKPSKSRSISICRGKLSDRKFVIDDEDIPTIREKSVKSLGRWYNVELNDKEQVVKFRKDVAEGLDRIDKSELPGKLKLWCLQFGLYPRLMWPLSVYEIPISVVERMERSVSSYIRKWLGAPRCLSSVALYGKGILQLPVSSLTEEFKCTKVRTELLLSGSKDVVVRSVVPNPTKGRKWNPRSAVQEAEAALRHAEIVGNVQFGRGGLGLGSGKPVWNTAGLKDKRKLVVEQIRRQEEIVRGAKVVAQAKQGQWLNWESVEKRKLSWRDLWSMEENRIRFLVGATYDVLPTPQNLKLWVNEDPSCPLCSRTATLKHILSGCKVSLSQGRYTWRHNQVLKCLAAGIEGKRRQVNSEGVKDRGLVIQFVREGEKYRRDKLVRRQGCGRLEGACDWEMQVDLGGKLVVPQEIVCTRQRPDLVLWSVSQQIVYFIELTVPWEDSVEEAYERKKLRYADLGAETEQRGWKTRICPVEVGCRGFIARSTVSLLGELGVRGQNLRKTVREMSDKAIKCSQFIYYRRNNVSWGPAGGTTKQGI

SEQ ID NO: 4234 - protein, 972 aa, Epinephelus lanceolatus
MGDIIYSYGVERFGLHERKRSERVQSGKSRRQREIEELVKERRQLRKVWRKATEEEREGIKVLQEELRSRLAVLRRAEHLRKKRRKKEHVRTGFFRDPFKFVKGLFSQEKGGQLKAERLEVEEYLRNTYSDLEKNRIVGFPPDIPPLEGIEHEMDVRPPRWKEVQEVVRRAKASSAPGPNGVPYRVYKSAPDTLKFLWKQLRIVWEKQIIPRAWRRAGGVLIPKEKESVDLSQFRMISLLNVEGKIFFSVVAQRLASYLERNSLIDTMVQKAGIPGFSGCLEHTSMIWHQIQAAKINKRDLHVIFLDLANAFGSVPHSLIWSAFDYFRVPQVVVNLVKAYFQDIRLCLSTAGFTTGWQRLEIGIMAGCTISPLAFTMAMEVIIRASKWVVGGERRQNGLHLPPVRAYMDDMTLVTTTMPCTKRLLEKVNKNLKWASMKIKPSKSRSISICRGKLSDRKFVIDDEDIPTIREKSVKSLGRWYNVELNDKEQVVKFRKDVAEGLDRIDKSELPGKLKLWCLQFGLYPRLMWPLSVYEIPISVVERMERSVSSYIRKWLGAPRCLSSVALYGKGILQLPVSSLTEEFKCTKVRTELLLSGSKDVVVRSVVPNPTKGRKWNPRSAVQEAEAALRHAEIVGNVQFGRGGLGLGSGKPVWNTAGLKDKRKLVVEQIRRQEEIVRGAKVVAQAKQGQWLNWESVEKRKLSWRDLWSMEENRIRFLVGATYDVLPTPQNLKLWVNEDPSCPLCSRTATLKHILSGCKVSLSQGRYTWRHNQVLKCLAAGIEGKRRQVNSEGVKDRGLVIQFVREGEKYRRDKLVRRQGCGRLEGACDWEMQVDLGGKLVVPQEIVCTRQRPDLVLWSVSQQIVYFIELTVPWEDSVEEAYERKKLRYADLGAEAEQRGWKTRICPVEVGCRGFIARSTVSLLGELGVRGQNLRKTVREMSDEAIKCSQFIYYRRNNVSWGPAGGTTKQGT

SEQ ID NO: 4235 - protein, 1150 aa, Chelmon rostratus
MVTNRITDMTMPWIHDSVRDGGTDPSLRARGSSTQVTGKATKESKSCAAEDKKLQVCPCGWQKITSIRGLRTHQGRRKCLAVEGQSGRIDQYFLRSQSNQSDEVQRQVETHSSQDISNTIPGEEEVWRGDAVGVEVNRPAKERSMEQKARVRWPRANDSKEWEAVDRDLSVILSRLRGDVVEKLDKIGDVIYSYGRERFGVLVKRKGERVQVGKSRRQREIEKLVKERRQLRKQWRKATEEEREGIKVLQEELRSRLAVLRRAEHLREKRKKKERARSAFFRNPFNFVKGLFNQEKGGQLKATKSEIEQYLKSTYSDSKENRNIGLPPDMPPLGEVEQEMDVSPPRWREVVEVVRRAKASSAPGPNGVPYRVYKSAPGILRTLWRYLRIVWEKQSIPRAWRRAGGVFIPKEKESSDLSQFRMISLLNVEGKIFFSIVAQRLAKYLERNGMIDTTVQKAGIPGFAGCLEHTSMIWHQIQTAKREKRDLNVVFLDLANAFGSVPHNLIWSSFDYFKVPEIVVNLVKAYFQDIRLCASIAELTTGWQRLEVGIMAGCTVSPLAFTMAMEVIIRASKWVVGGERRQNGMRLPPIRAYMDDMTLLTSTVPCTRRLLDKVNQNLKWASMKIKPSKSRSISIYRGKVSDRKFAIDGEEIPTIREKSVKSLGRWYNVDLNDVEQVVQFRKDVAEGLERIDKSGLPGKLRLWCLQFGLYPRLMWPMSVYEVPLSVAERMERLVSSYIRKWLGAPRCLSNVALYGKGMLQLPVSSLTEEFKCTKVRTELLLSGSKDMLVSNVVPNPSGGRKWNPRAAVQEAEAALRHAEIVGNVQFGRGGLGLGPGKPVWNKAGLKEKRKLVVEQVRRQEELLRGAKAVGQAKQGQWLNWEGVEKRKLSWRDLWNMEEGRIKFLIGATYDVLPTPQNLSLWVQGDQSCPLCSGTASLKHILSGCRISLSQGRYTWRHNQVLRSLAAGIEERRKQVNTGSSRKERLDVQFVREGEKNRAAKSGRKQVGGCLVGADDWQMQVDLGGKLVVPQEIVYSNLRPDIVLWSMSKKTVYFIELTVPWENSVEAAYERKKTKYADLKTESEQRGWKTRVCPVEVGCRGFVAGSAVSLLRELGVHGQNLRKTVREMSDEAARSSQWIWIRRNNSSWGVK

SEQ ID NO: 4236 - protein, 1148 aa, Chelmon rostratus
MVTNRITDMTMPWIHDSVRDGGTDPSLRARGSSTQVTGKATKESKSCAAEDKKLQVCPCGWQKITSIRGLRTHQGRRKCLAVEGQSGRIDQYFLRSQSNQSDEVQRQVENHSSQDISNTIPGEEEVRRGDAVGVEGNRPAKERSMEQKARVRWPRANDSKEWEAVDRDLSVILSRLRGDVVEKLDKIGDVIYSYGRERFGVLVKRKGERVQVGKSRRQREIEKLVKERRQLRKQWRKATEEEREGIKVLQEELRSRLAVLRRAEHLREKRKKKERARSAFFRNPFNFVKGLFNQEKGGQLKATKSEIEQYLKSTYSDSKENRNIGLPPDMPPLGEVEQEMDVSPPRWREVVEVVRHAKASSAPGPNGVPYRVYKSAPGILRTLWRYLRIVWEKQSIPRAWRRAGGVFIPKEKESSDLSQFRMISLLNVEGKIFFSIVAQRLAKYLERNGMIDTTVQKAGIPGFAGGLEHTSMIWHQIQTAKREKRDLNVVFLDLANAFGSVPHNLIWSSFDYFKVPEIVVNLVKAYFQDIRLCASIAELTTGWQRLEVGIMAGCTVSLLAFTMAMEVIIRASKWVVGGERRQNGMRLPPIRAYMDDMTLLTSTVPCTRRLLDKVNQNLKWASMKIKPSKSRSISIYRGKVSDRKFAIDGEEIPTIREKSVKSLGRWYNVDLNDVEQVVQFRKDVAEGLERIDKSGLPGKLRLWCLQFGLYPRLMWPMSVYEVPLSVAERMERLVSSYIRKWLGAPRCLSNVALYGKGMLQLPVSSLTEEFKCTKVRTELLLSGSKDMLVSNVVPNPSGGRKWNPRAAVQEAEAALRHAEIVGNVQFGRGGLGLGPGKPVWNKAGLKEKRKLVVEQVRRQEELLRGAKAVGQAKQGQWLNWEGVEKRKLSWRDLWNMEEGRIKFLIGATYDVLPTPQNLSLWVQGDQSCPLCSGTASLKHILSGCRISLSQGRYTWRHNQVLRSLAAGIEERRKQVNSGSSRKERLDVQFVREGEKNRAAKSGRKQVGGCLVGADDWQMQVDLGGKLVVPQEIVYSNLRPDIVLWSMSKKTVYFIELTVPWENSVEAAYERKKTKYADLKTESEQRGWKTRVCPVEVGCRGFVAGSAVSLLRELGVHGQNLRKTVREMSDEAARSSQWIWIRRIIVVGG

SEQ ID NO: 4237 - protein, 1150 aa, Chelmon rostratus
MVTNRITDMTMSWIHDSVRDGGTDPSLRARGSSTQVTGKATKESKSCAAEDKKLQVCPCGWQKITSIRGLRTHQGRRKCLAVEGQSGRIDQYFLRSQSNQSDEVQRQVENHSSQDISNTIPGEEEVRRGDAVGVEGNRPAKERSMEQKARVKWPRANDSKEWEAVDRDLSVILSRLRGDVVEKLDKIGDVIYSYGRERFGVLVKRKGERVQVGKSRRQREIEKLVKERRQLRKQWRKATEEEREGIKVLQEELRSRLAVLRRAEHLREKRKKKERARSAFFRNPFNFVKGLFNQEKGGQLKATKSEIEQYLKSTYSDSKENRNIGLPPDMPPLGEVEQEMDVSPPRWREVVEVVRRAKASSAPGPNGVPYRVYKSAPGILRTLWRYLRIVWEKQSIPRAWRRAGGVFIPKEKESSDLSQFRMISLLNVEGKIFFSIVAQRLAKYLERNGMIDTTVQKAGIPGFAGCLEHTSMIWHQIQTAKREKRDLNVVFLDLANAFGSVPHNLIWSSFDYFKVPEIVVNLVKAYFQDIRLCASIAELTTGWQRLEVGIMAGCTVSPLAFTMAMEVIIRASKWVVGGERRQNGMRLPPIRAYMDDMTLLTSTVPCTRRLLDKVNQNLKWASMKIKPSKSRSISIYRGKVSDRKFAIDGEEIPTIREKSVKSLGRWYNVDLNDVEQVVQFRKDVAEGLERIDKSGLPGKLRLWCLQFGLYPRLMWPMSVYEVPLSVAERMERLVSSYIRKWLGAPRCLSNVALYGKGMLQLPVSSLTEEFKCTKVRTELLLSGSKDMLVSNVVPNPSGGRKWNPRAAVQEAEAALRHAEIVGNVQFGRGGLGLGPGKPVWNKAGLKEKRKLVVEQVRRQEELLRGAKAVGQAKQGQWLNWEGVEKRKLSWRDLWNMEEGRIKFLIGATYDVLPTPQNLSLWVQGDQSCPLCSGTASLKHILSGCRISLSQGRYTWRHNQVLRSLAAGIEERRKQVNSGSSRKERLDVQFVREGEKNKAAKSGRKQGGGCLVGADDWQMQVDLGGQLVVPQEIVYSNLRPDIVLWSMSKKTVYFIELTVPWENSVEAAYERKKTKYADLKTESEQRGWKTRVCPVEVGCRGFVAGSAVSLLRELGVHGQNLRKTVREMSDEAARSSQWIWIRRNNSSWGVK

SEQ ID NO: 4238 - protein, 1150 aa, Chelmon rostratus
MVTNRITDMTMPWIHDSVRDGGTDPSLRARGSSTQVTGKATKESKSCAAEDKKLQVCPCGWQKITSIRGLRTHQGRRKCLAVEGQSGRIDQYFLRSQSNQSDEVQRQVENHSSQDISNTIPGEEEVRRGDAVGVEGNRPAKERSMEQKARVKWPRANDSKEWEAVDRDLSVILSRLRGDVVEKLDKIGDVIYSYGRERFGVLVKRKGERVQVGKSRRQREIEKLVKERRQLRKQWRKATEEEREGIKVLQEELRSRLAVLRRAEHLREKRKKKERARSAFFRNPFNFVKGLFNQEKGGQLKATKSEIEQYLKSTYSDSKENRNIGLPPDMPPLGEVEQEMDVSPPRWREVVEVVRRAKASSAPGPNGVPYRVYKSAPGILRTLWRYLRIVWEKQSIPRAWRRAGGVFIPKEKESSDLSQFRMISLLNVEGKIFFSIVAQRLAKYLERNGMIDTTVQKAGIPGFAGCLEHTSMIWHQIQTAKREKRDLNVVFLDLANAFGSVPHNLIWSSFDYFKVPEIVVNLVKAYFQDIRLCASIAELTTGWQRLEVGIMAGCTVSPLAFTMAMEVIIRASKWVVGGERRQNGMRLPPIRAYMDDMTLLTSTVPCTRRLLDKVNQNLKWASMKIKPSKSRSISIYRGKVSDRKFAIDGEEIPTIREKAVKSLGRWYNVDLNDVEQVVQFRKDVAEGLERIDKSGLPGKLRLWCLQFGLYPRLMWPMSVYEVPLSVAERMERLVSSYIRKWLGAPRCLSNVALYGKGMLQLPVSSLTEEFKCTKVRTELLLSGSKDMLVSNVVPNPSGGRKWNPRAAVQEAEAALRHAEIVGNVQFGRGGLGLGPGKPVWNKAGLKEKRKLVVEQVRRQEELLRGAKAVGQAKQGQWLNWEGVEKRKLSWRDLWNMEEGRIKFLIGATYDVLPTPQNLSLWVQGDQSCPLCSGTASLKHILSGCRISLSQGRYTWRHNQVLRSLAAGIEERRKQVNSGSSRKERLDVQFVREGEKNKAAKSGRKQGGGCLVGADDWQMQVDLGGQLVVPQEIVYSKLRPDIVLWSMSKKTVYFIELTVPWENSVEAAYERKKTKYADLKTESEQRGWKTRVCPVEVGCRGFVAGSAVSLLRELGVHGQNLRKTVREMSDEAARSSQWIWIRRNNSSWGVK

SEQ ID NO: 4239 - protein, 1150 aa, Chelmon rostratus
MVTNRITDMTMPWIHDSVRDGGTDPSLRARGSSTQVTGKATKESKSCAAEDKKLQVCPCGWQKITSIRCLRTHQGRRKCLAVEGQSGRIDQYFLRSQSNQSDEVQRQVENHSSQDISNTIPGEEEVRRGDAVGVEGNRPAKERSMEQKARVRWPRANDSKEWEAVDRDLSVILSRLRGDVVEKLDKIGDVIYSYGRERFGVLVKRKGERVQVGKSRRQREIEKLVKERRQLRKQWRKATEEEREGIKVLQEELRSRLAVLRRAEHLREKRKKKERARSAFFRNPFNFVKGLFNQEKGGQLKATKSEIEQYLKSTYSDSKENRNIGLPPDMPPLGEVEQEMDVSPPRWREVVEVVRRAKASSAPGPNGVPYRVYKSAPGILRTLWRYLRIVWEKQSIPRAWRRAGGVFIPKEKESSDLSQFRMISLLNVEGKIFFSIVAQRLAKYLERNGMIDTTVQKAGIPGFAGCLEHTSMIWHQIQTAKREKRDLNVVFLDLANAFGSVPHNLIWSSFDYFKVPEIVVNLVKAYFQDIRLCASIAELTTGWQRLEVGIMAGCTVSPLAFTMAMEVIIRASKWVVGGERRQNGMRLPPIRAYMDDMTLLTSTVPCTRRLLDKVNQNLKWASMKIKPSKSRSISIYRGKVSDRKFAIDGEEIPTIREKSVKSLGRWYNVDLNDVEQVVQFRKDVAEGLERIDKSGLPGKLRLWCLQFGLYPRLMWPMSVYEVPLSVAERMERLVSSYIRKWLGAPRCLSNVALYGKGMLQLPVSSLTEEFKCTKVRTELLLSGSKDMLVSNVVPNPSGGRKWNPRAAVQEAEAALRHAEIVGNVQFGRGGLGLGPGKPVWYKAGLKEKRKLVVEQVRRQEELLRGAKAVGQAKQGQWLNWEGVEKRKLSWRDLWNMEEGRIKFLIGATYDVLPTPQNLSLWVQGDQSCPLCSGTASLKHILSGCRISLSQGRYTWRHNQVLRSLAAGIEERRKQVNSGSSRKERLDVQFVREGEKNRAAKSGRKQVGGCLVGADDWQMQVDLGGKLVVPQEIVYSNLRPDIVLWSMSKKTVYFIELTVPWENSVEAAYERKKTKYADLKTESEQRGWKTRVCPVEVGCRGFVAGSAVSLLRELGVHGQNLRKTVREMSDEAARSSQWIWIRRNNSSWGVK

SEQ ID NO: 4240 - protein, 1120 aa, Chelmon rostratus
MQPLAIMYIHHLQLHCEYMVSNSNLQSGPQCLTLTSIRGLRTHQGRRKCLAVEGQSGRIDQYFLRSQSNQSDEVQRQVENHSSQDISNTIPGEEEVRRGDAVGVEGNRPAKERSMEQKARVKWPRANDSKEWEAVDRDLSVILSRLRGDVVEKLDKIGDVIYSYGRERFGVLVKRKGERVQVGKSRRQREIEKLVKERRQLRKQWRKATEEEREGIKVLQEELRSRLAVLRRAEHLREKRKKKERARSAFFRNPFNFVKGLFNQEKGGQLKATKSEIEQYLKSTYSDSKENRNIGLPPDMPPLGEVEQEMDVSPPRWREVVEVVRRAKASSAPGPNGVPYRVYKSAPGILRTLWRYLRIVWEKQSIPRAWRRAGGVFIPKEKESSDLSQFRMISLLNVEGKIFFSIVAQRLAKYLERNGMIDTTVQKAGIPGFAGCLEHTSMIWHQIQTAKREKRDLNVVFLDLANAFGSVPHNLIWSSFDYFKVPEIVVNLVKAYFQDIRLCASIAELTTGWQRLEVGIMAGCTVSPLAFTMAMEVIIRASKWVVGGERRQNGMRLPPIRAYMDDMTLLTSTVPCTRRLLDKVNQNLKWASMKIKPSKSRSISIYRGKVSDRKFAIDGEEIPTIREKAVKSLGRWYNVDLNDVEQVVQFRKDVAEGLERIDKSGLPGKLRLWCLQFGLYPRLMWPMSVYEVPLSVAERMERLVSSYIRKWLGAPRCLSNVALYGKGMLQLPVSSLTEEFKCTKVRTELLLSGSKDMLVSNVVPNPSGGRKWNPRAAVQEAEAALRHAEIVGNVQFGRGGLGLGPGKPVWNKAGLKEKRKLVVEQVRRQEELLRGAKAVGQAKQGQWLNWEGVEKRKLSWRDLWNMEEGRIKFLIGATYDVLPTPQNLSLWVQGDQSCPLCSGTASLKHILSGCRISLSQGRYTWRHNQVLRSLAAGIEERRKQVNSGSSRKERLDVQFVREGEKNKAAKSGRKQGGGCLVGADDWQMQVDLGGQLVVPQEIVYSNLRPDIVLWSMSKKTVYFIELTVPWENSVEAAYERKKTKYADLKTESEQRGWKTRVCPVEVGCRGFVAGSAVSLLRELGVHGQNLRKTVREMSDEAARSSQWIWIRRNNSSWGVK

SEQ ID NO: 4241 - protein, 1192 aa, Chelmon rostratus
MPTTKSTMLFCLLQPDLATTNIRKIPQESARAGVEDDSQVDCMVTNRITDMTMPWIHDSVRDGGTDQSLRARGSSTQVTGKATKESKSCAAEDKKLQVCPCGWQKITSIRGLRTHQGRRKCLAVEGQSGRIDQYFLRSQSNQSDEVQRQVENHSSQDISNTIPGEEEVRRGDAVGVEGNRPAKERSMEQKARVKWPRANDSKEWEAVDRDLSVILSRLRGDVVEKLDKIGDVIYSYGRERFGVLVKRKGERVQVGKSRRQREIEKLVKERRQLRKQWRKATEEEREGIKVLQEELRSRLAVLRRAEHLREKRKKKERARSAFFRNPFNFVKGLFNQEKGGQLKATKSEIEQYLKSTYSDSKENRNIGLPPDMPPLGEVEQEMDVSPPRWREVVEVVRRAKASSAPGPNGVPYRVYKSAPGILRTLWRYLRIVWEKQSIPRAWRRAGGVFIPKEKESSDLSQFRMISLLNVEGKIFFSIVAQRLAKYLERNGMIDTTVQKAGIPGFAGCLEHTSMIWHQIQTAKREKRDLNVVFLDLANAFGSVPHNLIWSSFDYFKVPEIVVNLVKAYFQDIRLCASIAELTTGWQRLEVGIMAGCTVSPLAFTMAMEVIIRASKWVVGGERRQNGMRLPPIRAYMDDMTLLTSTVPCTRRLLDKVNQNLKWASMKIKPSKSRSISIYRGKVSDRKFAIDGEEIPTIREKSVKSLGRWYNVDLNDVEQVVQFRKDVAEGLERIDKSGLPGKLRLWCLQFGLYPRLMWPMSVYEVPLSVAERMERLVSSYIRKWLGAPRCLSNVALYGKGMLQLPVSSLTEEFKCTKVRTELLLSGSKDMLVSNVVPNPSGGRKWNPRAAVQEAEAALRHAEIVGNVQFGRGGLGLGPGKPVWNKAGLKEKRKLVVEQVRRQEELLRGAKAVGQAKQGQWLNWEGVEKRKLSWRDLWNMEEGRIKFLIGATYDVLPTPQNLSLWVQGDQSCPLCSGTASLKHILSGCRISLSQGRYTWRHNQVLRSLAAGIEERRKQVNSGSSRKERLDVQFVREGEKNRAAKSGRKQGGGCLVGADDWQMQVDLGGQLVVPQEIVYSNLRPDIVLWSMSKKTVYFIELTVPWENSVEAAYERKKTKYADLKTESEQRGWKTRVCPVEVGCRGFVAGSAVSLLRELGVHGQNLRKTVREMSDEAARSSQWIWIRRNNSSWGVK

SEQ ID NO: 4242 - protein, 1148 aa, Epinephelus lanceolatus
MTWTGDSVKDRGTDLSTSARISSTQGKVSASVEGKSSIVENKMLQVCPCGWQKVTSVKGLRTHQGKKKCVAKKGQSSRIDQYFLRSQSSQSDEVQRQVENHSSQDISNAATEEEGVVREDAGDTEASMLARERTMEQKVRVRWPRANDSKEWEIVNRDLSVILSRLRGNAIQRLEKMGDIMYSYGVERFGVHERKRSERVQSGKSRRQREIEKLVKERRQLRKQWKKATEEEREGIKVLQEELRSRLAVLRRAEHLRKKRRKKEYARTGFFRDPFKFVKGLFSQEKGGQLKAERLEVEEYLRNTYSDLEKNRIVGFPPDIPPLGGIEHEMDVRPPRWKEVQEVVRRAKASSAPGPNGVPYRVYKSAPDTLKFLWKQLRIVWEKQIIPRAWRRAGGVLIPKEKESVDLSQFRMISLLNVEGKIFFSVVAQRLASYLERNSLIDTMVQKAGIPGFSGCLEHTSMIWHQIQAAKINKRDLHVIFLDLANAFGSVPHSLIWSAFDYFRVPQVVVNLVKAYFQDIRLCLSTAGFTTGWQRLEIGIMAGCTISPLAFTMAMEVIIRASKWVVGGERRQNGLHLPPVRAYMDDMTLVTTTMPCTKRLLEKVNKNLKWASMKIKPSKSRSISICRGKLSDRKFVIDDEDIPTIREKSVKSLGRWYNVELNDKEQVVKFRKDVAEGLDRIDKSELPGKLKLWCLQFGLYPRLMWPLSVYEIPISVVERMERSVSSYIRKWLGAPRCLSSVALYGKGILQLPVSSLTEEFKCTKVRTELLLSGSKDVVVRSVVPNPTKGRKWNPRSAVQEAEAALRHAEIVGNVQFGRGGLGLGSGKPVWNTAGLKDKRKLVVEQIRRQEEIVRGAKVVAQAKQGQWLNWESVEKRKLSWRDLWSMEENRIRFLVGATYDVLPTPQNLKLWVNEDPSCPLCSRTATLKHILSGCKVSLSQGRYTWRHNQVLKCLAAGIEGKRRQVNSEGVKDRGLVIQFVREGEKYRRDKLVRRQGCGRLEGACDWEMQVDLGGKLVVPQEIVCTRQRPDLVLWSVSQQIVYFIELTVPWEDSVEEAYERKKLRYADLGAEAEQRGWKTRICPVEVGCRGFIARSTVSLLGELGVRGQSLRKTVREMSDEAVRCSQWIWMRKNNVSWGPAGGTTKQGT

SEQ ID NO: 4243 - protein, 1106 aa, Epinephelus lanceolatus
MLQVCPCGWQKVTSVKGLRTHQGKKKCVAKKGQSSRIDQYFLRSQSSQSDEVQRQVENHSSQDISNAATEEEGVVREDAGDTEASMLARERTMEQKVRVRWPRANDSKEWEIVNRDLSVILSRLRGNAIQRLEKMGDIMYSYGVERFGVHERKRSERVQSGKSRRQREIEKLVKERRQLRKQWKKATEEEREGIKVLQEELRSRLAVLRRAEHLRKKRRKKEYARTGFFRDPFKFVKGLFSQEKGGQLKAERLEVEEYLRNTYSDLEKNRIVGFPPDIPPLGGIEHEMDVRPPRWKEVQEVVRRAKASSAPGPNGVPYRVYKSAPDTLKFLWKQLRIVWEKQIIPRAWRRAGGVLIPKEKESVDLSQFRMISLLNVEGKIFFSVVAQRLASYLERNSLIDTMVQKAGIPGFSGCLEHTSMIWHQIQAAKINKRDLHVIFLDLANAFGSVPHSLIWSAFDYFRVPQVVVNLVKAYFQDIRLCLSTAGFTTGWQRLEIGIMAGCTISPLAFTMAMEVIIRASKWVVGGERRQNGLHLPPVRAYMDDMTLVTTTMPCTKRLLEKVNKNLKWASMKIKPSKSRSISICRGKLSDRKFVIDDEDIPTIREKSVKSLGRWYNVELNDKEQVVKFRKDVAEGLDRIDKSELPGKLKLWCLQFGLYPRLMWPLSVYEIPISVVERMERSVSSYIRKWLGAPRCLSSVALYGKGILQLPVSSLTEEFKCTKVRTELLLSGSKDVVVRSVVPNPTKGRKWNPRSAVQEAEAALRHAEIVGNVQFGRGGLGLGSGKPVWNTAGLKDKRKLVVEQIRRQEEIVRGAKVVAQAKQGQWLNWESVEKRKLSWRDLWSMEENRIRFLVGATYDVLPTPQNLKLWVNEDPSCPLCSRTATLKHILSGCKVSLSQGRYTWRHNQVLKCLAAGIEGKRRQVNSEGVKDRGLVIQFVREGEKYRRDKLVRRQGCGRLEGACDWEMQVDLGGKLVVPQEIVCTRQRPDLVLWSVSQQIVYFIELTVPWEDSVEEAYERKKLRYADLGAEAEQRGWKTRICPVEVGCRGFIARSTVSLLGELGVRGQNLRKTVREMSDEAIKCSQFIYYRRNNVSWGPAGGTTKQGT

SEQ ID NO: 4244 - protein, 938 aa, Chelmon rostratus
MEQKARVRWPRANDSKEWEAVDRDLSVILSRLRGDVVEKLDKIGDVIYSYGRERFGVLVKRKGERVQVGKSRRQREIEKLIKERRQLRKQWKKATEEEREGIKVLQEELRSRLAVLRRAEHLREKRKKKERARSAFFRNPFNFVKGLFNQEKGGQLKATKSEIEQYLKSTYSDSKNRNIGLPPDMPPLGEVEQEMDVSPPRWREVVEVVRRAKASSAPGPNGVPYRVYKSAPGILKTLWRYLRIVWEKQSMRAWRRAGGVFIPKEKESSDLSQFRMISLLNVEGKIFFSIVAQRLANYLERNGMIDTTVQKAGIPGFVECLEHTSMIWHQIQTAKREKRDLNVVFLDLANAFGSVPHNLIWSSFDYFKVPEIVVNLVKAYFQDIRLCASSAELTTGWQRLEVGIMAGCTVSPLAFTMAMEVIIRASKWVVGGEIRQNGMRLPPIRAYIDDLTLLTSTVPCTRRLLDKVNQNLKWASMKIKPSKSRSISIYRGKVSDRKFAIDGEEIPTIREKSVKSLGRWYNVDLNDVEQVVQFRKDVAEGLERIDKSGLPGKLRLWCLQFGLYPRLMWPMSVYEVPLSVAERMERLVSSYISKWLGAPRCLSNVALYGKGMLQLPVSSLTEEFKCTKVRTELLLSGSKDMLVSNVVPNPSGGRKWNPRPAVQEAEAALRHAEIVGNVQFGQGGLGLGPGKPVWNKACLKEKRKLVVEQVRRQEELLRGAKAVGQAKQGQWLNWEGVEKRKLSWRDLWNMEEGRIKFLIGATYDVLPSLKHILSGCRISLSQGRYTWRHNQVLRSLAAGIEERRKQVNSGSSRKERLDVQFVREGEKNRAAKSGRRQVGGCLVGADDWQMQVDLGGKLVVPQEIVYSNLRPDIVLWSMSKKTVFFIELTVPWENSVEAAYERKKTKYADLKTESEQRGWKTRVCPVEALLSSSVPLSR

SEQ ID NO: 4245 - protein, 1006 aa, Chelmon rostratus
MEQKARVRWPRANDSKEWEAVDRDLSVILSRLRGDVVEKLDKIGDVIYSYGRERFGVLVKRKGERVQVGKSRRQREIEKLVKERRQLRKQWRKATEEEREGIKVLQEELRSRLAVLRRAEHLREKRKKKERARSAFFRNPFNFVKGLFNQEKGGQLKATKSEIEQYLKSTYSDSKENRNIGLPPDMPPLGEVEQEMDVSPPRWREVVEVVRRAKASSAPGPNGVPYHVYKSAPGILRTLWRYLRIVWEKQSIPRAWRRAGGVFIPKEKESSDLSQFRMISLLNVEGKIFFSIVAQRLAKYLERNGMIDTTVQKAGIPGFAGCLEHTSMIWHQIQTAKREKRDLNVVFLDLANAFGSVPHNLIWSSFDYFKVPEIVVNLVKAYFQDIRLCASSAELTTGWQRLEVGIMAGCTVSPLAFTMAMEVIIRASKWVVGGERRQNGMRLPPIRAYMDDMTLLTSTVPCTRRLLDKVNQNLKWASMKIKPSRSRSISIYRGKVSDRKFAIDGEEIPTIREKSVKSLGRWYNVDLNDVEQVVQFRKDVAEGLERIDKSGLPGKLRLWCLQFGLYPRLMWPMSVYEVPLSVAERMERLVSSYIRKWLGAPRCLSNVALYGKGMLQLPVSSLTEDFKCTKVRTELLLSGSKDMLVSNVVPNPSGGRKWNPRAAVQEAEAALRHAEIVGNVQFGQGGLGLGPGKPVWNKAGLKEKRKLVVEQVCRQEELLRGAKAVGQAKQGQWLNWEGVEKRKLSWRDLWNMEEGRIKFLIGATYDVLPTPQNLSLWVQGDQSCPLCSGTASLKHILSGCRISLSQGRYTWRHNQVLRSLAAGIEERRKQVNSGSSRKERLDVQFVREGEKNRAAKSGRKQVGGCLVGADDWQMQVDLGGKLVVPQEIVYSNLRLDIVLWSMSKKTVYFIELTVPWENSVEAAYERKKTKYADLKTESEQRGWKTRVCPVEVGCRGFVAGSAVSLLRELGVHGQNLRKTVREMSDEAARSSQWIWIRRNNSSWGVK

SEQ ID NO: 4246 - protein, 1150 aa, Chelmon rostratus
MVTNRITDMTMPWIHDSVRDGGTDPSLRARGSSTQVTGKATKESKSCAAEDKKLQVCPCGWQKITSIRGLRTHQGRRKCLAVEGQSGRIDQYFLRSQSNQSDEVQRQVENHSSQDISNTIPGEEEVRRGDAVGVEGNRPAKERSMEQKARVKWPRANDSKEWEAVDRDLSVILSRLRGDVVEKLDKIGDVIYSYGRERFGVLVKRKGERVQVGKSRRQREIEKLVKERRQLRKQWRKATEEEREGIKVLQEELRSRLAVLRRAEHLREKRKKKERARSAFFRNPFNFVKGLFNQEKGGQLKATKSEIEQYLKSTYSDSKENRNIGLPPDMPPLGEVEQEMDVSPPRWREVVEVVRRAKASSAPGPNGVPYRVYKSAPGILRTLWRYLRIVWEKQSIPRAWRRAGGVFIPKEKESSDLSQFRMISLLNVEGKIFFSIVAQRLAKYLERNGMIDTTVQKAGIPGFAGCLEHTSMIWHQIQTAKREKRDLNVVFLDLANAFGSVPHNLIWSSFDYFKVPEIVVNLVKAYFQDIRLCASIAELTTGWQRLEVGIMAGCTVSPLAFTMAMEVIIRASKWVVGGERRQNGMRLPPIRAYMDDMTLLTSTVPCTRRLLDKVNQNLKWASMKIKPSKSRSISIYRGKVSDRKFAIDGEEIPTIREKSVKSLGRWYNVDLNDVEQVVQFRKDVAEGLERIDKSGLPGKLRLWCLQFGLYPRLMWPMSVYEVPLSVAERMERLVSSYIRKWLGAPRCLSNVALYGKGMLQLPVSSLTEEFKCTKVRTELLLSGSKDMLVSNVVPNPSGGRKWNPRAAVQEAEAALRHAEIVGNVQFGRGGLGLGPGKPVWNKAGLKEKRKLVVEPVRRQEELLRGAKAVGQAKQGQWLNWEGVEKRKLSWRDLWNMEEGRIKFLIGATYDVLPTPQNLSLWVQGDQSCPLCSGTASLKHILSGCRISLSQGRYTWRHNQVLRSLAAGIEERRKQVNSGSSRKERLDVQFVREGEKNRAAKSGRKQGGGCLVGADDWQMQVDLGGQLVVPQEIVYINLRPDIVLWSMSKKTVYFIELTVPWENSVEAAYERKKTKYADLKTESEQRGWKTRVCPVEVGCRGFVAGSAVSLLRELGVHGQNLRKTVREMSDEAARSSQWIWIRRNNSSWGVK

SEQ ID NO: 4247 - protein, 1150 aa, Chelmon rostratus
MVTNRITDMTMPWIHDSVRDGGTDPSLRARGSSTQVTGKATKESKSCAAEDKKLQVCPCGWQKITSIRGLRTHQGRRKCLAVEGQSGRIDQYFLRSQSNQSDEVQRQVENHSSQDISNTIPGEEEVRRGDAVGVEGNRPAKERSMEQKARVKWPRANDSKEWEAVDRDLSVILSRLRGDVVEKLDKIGDVIYSYGRERFGVLVKRKGERVQVGKSRRQREIEKLVKERRQLRKQWRKATEEEREGIKVLQEELRSRLAVLRRAEHLREKRKKKERARSAFFRNPFNFVKGLFNQEKGGQLKATKSEIEQYLKSTYSDSKENRNIGLPPDMPPLGEVEQEMDVSPPRWREVVEVVRRAKASSAPGPNGVPYRVYKSAPGILRTLWRYLRIVWEKQSIPRAWRRAGGVFIPKEKESSDLSQFRMISLLNVEGKIFFSIVAQRLAKYLERNGMIDTTVQKAEIPGFAGCLEHTSMIWHQIQTAKREKRDLNVVFLDLANAFGSVPHNLIWSSFDYFKVPEIVVNLVKAYFQDIRLCASIAELTTGWQRLEVGIMAGCTVSPLAFTMAMEVIIRASKWVVGGERRQNGMRLPPIRAYMDDMTLLTSTVPCTRRLLDKVNQNLKWASMKIKPSKSRSISIYRGKVSDRKFAIDGEEIPTIREKAVKSLGRWYNVDLNDVEQVVQFRKDVAEGLERIDKSGLPGKLRLWCLQFGLYPRLMWPMSVYEVPLSVAERMERLVSSYIRKWLGAPRCLSNVALYGKGMLQLPVSSLTEEFKCTKVRTELLLSGSKDMLVSNVVPNPSGGRKWNPRAAVQEAEAALRHAEIVGNVQFGRGGLGLGPGKPVWNKAGLKEKRKLVVEQVRRQEELLRGAKAVGQAKQGQWLNWEGVEKRKLSWRDLWNMEEGRIKFLIGATYDVLPTPQNLSLWVQGDQSCPLCSGTASLKHILSGCRISLSQGRYTWRHNQVLRSLAAGIEERRKQVNSGSSRKERLDVQFVREGEKNKAAKSGRKQGGGCLVGADDWQMQVDLGGQLVVPQEIVYSNLRPDIVLWSMSKKTVYFIELTVPWENSVEAAYERKKTKYADLKTESEQRGWKTRVCPVEVGCRGFVAGSAVSLLRELGVHGQNLRKTVREMSDEAARSSQWIWIRRNNSSWGVK

SEQ ID NO: 4248 - protein, 1015 aa, Chelmon rostratus
MQLVLRATGQPRREAWSRKLEHDSKEWEAVDRDLSVILSRLRGDVVEKLDKIGDVIYSYGRERFGVLVKRKGERVQVGKSRRQREIEKLVKERRQLRKQWRKATEEEREGIKVLQEELRSRLAVLRRAEHLREKRKKKERARSAFFRNPFNFVKGLFNQEKGGQLKATKSEIEQYLKSTYSDSKENRNIGLPPDMPPLGEVEQEMDVSPPRWREVVEVVRRAKASSAPGPNGVPYRVYKSAPGILRTLWRYLRIVWEKQSIPRAWRRAGGVFIPKEKESSDLSQFRMISLLNVEGKIFFSIVAQRLAKYLERNGMIDTTVQKAGIPGFAGCLEHTGMIWHQIQTAKREKRDLNVVFLDLANAFGSVPHNLIWSSFDYFKVPEIVVNLVKAYFQDIRLCASIAELTTGWQRLEVGIMAGCTVSPLAFTMAMEVIIRASKWVVGGERRQNGMRLPPIGAYMDDMTLLTSTVPCTRRLLDKVNQNLKWASMKIKPSKSRSISIYRGKVSDRKFAIDGEEIPTIREKSVKSLGRWYNVDLNDVEQVVQFRKDVAEGLERIDKSGLPGKLRLWCLQFGLYPRLMWPMSVYEVPLSVAERMERLVSSYIRKWLGAPRCLSNVALYGKGMLQLPVSSLTEEFKCTKVRTELLLSGSKDMLVSNVVPNPSGGRKWNPRAAVQEAEAALRHAEIVGNVQFGRGGLGLGPGKPVWNKAGLKEKRKLVVEQVRRQEELLRGAKAVGQAKQGQWLNWEGVEKRKLSWRDLWNMEEGRIKFLIGATYDVLPTPQNLSLWVQGDQSCPLCSGTASLKHILSGCRISLSQGRYTWRHNQVLRSLAAGIEERRKQVNSGSSRKERLEMQFVREGEKNRAAKSGRKQGGGCLVGADDWQMQVDLGGQLVVPQEIVYSNLRPDIVLWSMSKKTVYFIELTVPWENSVEAAYERKKTKYADLKTESEQRGWKTRVCPVEVGCRGFVAGSAVSLLRELGVHGQNLRKTVREMSDEAARSSQWIWIRRNNSSWGVK

SEQ ID NO: 4249 - protein, 1148 aa, Epinephelus lanceolatus
MTWTGDSVKDRGTDLSTSARISSTQGKVSTSVEGKSSIVENKMLQVCPCGWQKVTSVKGLRTHQGKKKCVAKKGQSSRIDQYFLRSQSSQSDEVQRQVENHSSQDISNAATEEEGVVREDAGDTEASMLARERTMEQKVRVRWPRANDSKEWEIVNRDLSVILSRLRGNAIQRLEKMGDIMYSYGVERFGVHERKRSERVQSGKSRRQREIEKLVKERRQLRKQWKKATEEEREGIKVLQEELRSRLAVLRRAEHLRKKRRKKEYARTGFFRDPFKFVKGLFSQEKGGQLKAERLEVEEYLRNTYSDLEKNRIVGFPPDIPPLGGIEHEMDVRPPRWKEVQEVVRRAKASSAPGPNGVPYRVYKSAPDTLKFLWKQLRIVWEKQIIPRAWRRAGGVLIPKEKESVDLSQFRMISLLNVEGKIFFSVVAQRLASYLERNSLIDTMVQKAGIPGFSGCLEHTSMIWHQIQAAKINKRDLHVIFLDLANAFGSVPHSLIWSAFDYFRVPQVVVNLVKAYFQDIRLCLSTAGFTTGWQRLEIGIMAGCTISPLAFTMAMEVIIRASKWVVGGERRQNGLHLPPVRAYMDDMTLVTTTMPCTKRLLEKVNKNLKWASMKIKPSKSRSISICRGKLSDRKFVIDDEDIPTIREKSVKSLGRWYNVELNDKEQVVKFRKDVAEGLDRIDKSELPGKLKLWCLQFGLYPRLMWPLSVYEIPISVVERMERSVSSYIRKWLGAPRCLSSVALYGKGILQLPVSSLTEEFKCTKVRTELLLSGSKDVVVRSVVPNPTKGRKWNPRSAVQEAEAALRHAEIVGNVQFGRGGLGLGSGKPVWNTAGLKDKRKLVVEQIRRQEEIVRGAKVVAQAKQGQWLNWESVEKRKLSWRDLWSMEENRIRFLVGATYDVLPTPQNLKLWVNEDPSCPLCSRTATLKHILSGCKVSLSQGRYTWRHNQVLKCLAAGIEGKRRQVNSEGVKDRGLVIQFVREGEKYRRDKLVRRQGCGRLEGACDWEMQVDLGGKLVVPQEIVCTRQRPDLVLWSVSQQIVYFIELTVPWEDSVEEAYERKKLRYADLGAEAEQRGWKTRICPVEVGCRGFIARSTVSLLGELGVRGQNLRKTVREMSDEAIKCSQFIYYRRNNVSWGPAGGTTKQGT

SEQ ID NO: 4250 - protein, 1074 aa, Epinephelus lanceolatus
MTWTGDSVKDRGTDLSTSARISSTQGKVSASVEGKSSIVENKMLQVCPCGWQKVTSVKGLRTHQGKKKCVAKKGQSSRIDQYFLRSQSSQSDEVQRQVENHSSQDISNAATEEEGVVREDAGDTEASMLARERTMEQKVRVRWPRANDSKEWEIVNRDLSVILSRLRGNAIQRLEKMGDIMYSYGVERFGVHERKRSERVQSGKSRRQREIEKLVKERRQLRKQWKKATEEEREGIKVLQEELRSRLAVLRRAEHLRKKRRKKEYARTGFFRDPFKFVKGLFSQEKGGQLKAERLEVEEYLRNTYSDLEKNRIVGFPPDIPPLGGIEHEMDVRPPRWKEVQEVVRRAKASSAPGPNGVPYRVYKSAPDTLKFLWKQLRIVWEKQIIPRAWRRAGGVLIPKEKESVDLSQFRMISLLNVEGKIFFSVVAQRLASYLERNSLIDTMVQKAGIPGFSGCLEHTSMIWHQIQAAKINKRDLHVIFLDLANAFGSVPHSLIWSAFDYFRVPQVVVNLVKAYFQDIRLCLSTAGFTTGWQRLEIGIMAGCTISPLAFTMAMEVIIRASKWVVGGERRQNGLHLPPVRAYMDDMTLVTTTMPCTKRLLEKVNKNLKWASMKIKPSKSRSISICRGKLSDRKFVIDDEDIPTIREKSVKSLGRWYNVELNDKEQVVKFRKDVAEGLDRIDKSELPGKLKLWCLQFGLYPRLMWPLSVYEIPISVVERMERSVSSYIRKWLGAPRCLSSVALYGKGILQLPVSSLTEEFKCTKVRTELLLSGSKDVVVRSVVPNPTKGRKWNPRSAVQEAEAALRHAEIVGNVQFGRGGLGLGSGKPVWNTAGLKDKRKLVVEQIRRQEEIVRGAKVVAQAKQGQWLNWESVEKRKLSWRDLWSMEENRIRFLVGATYDVLPTPQNLKLWVNEDPSCPLCSRTATLKHILSGCKVSLSQGRYTWRHNQVLKCLAAGIEGKRRQVNSEGVKDRGLVIQFVREGEKYRRDKLVRRQGCGRLEGACDWEMQVDLGGKLVVPQEIVCTKQRPDIVLWSVSQRIVYFTELTVPWEDSVEEAYERKKLKYADLGAEAEQ

SEQ ID NO: 4251 - protein, 1142 aa, Chelmon rostratus
MTMPWIHDSVRDGGTDPSLRARGSSTQVTGKATKESKSCAAEDKKLQVCPCGWQKITSIRGLRTHQGRRKCLAVEGQSGRIDQYFLRSQSNQSDEVQRQVENHSSQDISNTIPGEEEVRRGDAVGVEGNRPAKERSMEQKARVKWPRANDSKEWEAVDRDLSVILSRLRGDVVEKLDKIGDVIYSYGRERFGVLVKRKGERVQVGKSRRQREIEKLVKERRQLRKQWRKATEEEREGIKVLQEELRSRLAVLRRAEHLREKRKKKERARSAFFRNPFNFVKGLFNQEKGGQLKATKSEIEQYLKSTYSDSKENRNIGLPPDMPPLGEVEQEMDVSPPRWREVVEVVRRAKASSAPGPNGVPYRVYKSAPGILRTLWRYLRIVWEKQSIPRAWRRAGGVFIPKEKESSDLSQFRMISLLNVEGKIFFSIVAQRLAKYLERNGMIDTTVQKAGIPGFAGCLEHTSMIWHQIQTAKREKRDLNVVFLDLANAFGSVPHNLIWSSFDYFKVPEIVVNLVKAYFQDIRLCASIAELTTGWQRLEVGIMAGCTVSPLAFTMAMEVIIRASKWVVGGERRQNGMRLPPIRAYMDDMTLLTSTVPCTRRLLDKVNQNLKWASMKIKPSKSRSISIYRGKVSDRKFAIDGEEIPTIREKAVKSLGRWYNVDLNDVEQVVQFRKDVAEGLERIDKSGLPGKLRLWCLQFGLYPRLMWPMSVYEVPLSVAERMERLVSSYIRKWLGAPRCLSNVALYGKGMLQLPVSSLTEEFKCTKVRTELLLSGSKDMLVSNVVPNPSGGRKWNPRAAVQEAEAALRHAEIVGNVQFGRGGLGLGPGKPVWNKAGLKEKRKLVVEQVRRQEELLRGAKAVGQAKQGQWLNWEGVEKRKLSWRDLWNMEEGRIKFLIGATYDVLPTPQNLSLWVQGDQSCPLCSGTASLKHILSGCRISLSQGRYTWRHNQVLRSLAAGIEERRKQVNSGSSRKERLDVQFVREGEKNKAAKSGRKQGGGCLVGADDWQMQVDLGGQLVVPQEIVYSNLRPDIVLWSMSKKTVYFIELTVPWENSVEAAYERKKTKYADLKTESEQRGWKTRVCPVEVGCRGFVAGSAVSLLRELGVHGQNLRKTVREMSDEAARSSQWIWIRRNNSSWGVK

SEQ ID NO: 4252 - protein, 1150 aa, Chelmon rostratus
MVTNRITDMTMPWIHDSVRDGGTDPSLRARGSSTQVTGKATKESKSCAAEDKKLQVCPCGWQKITSIRGLRTHQGRRKCLAVEGQSGRIDQYFLRSQSNQSDEVQRQVENHSSQDISNTIPGEEEVRRGDAVGVEGNRPAKERSMEQKARVKWPRANDSKEWEAVDRDLSVILSRLRGDVVEKLDKIGDVIYSYGRERFGVLVKRKGERVQVGKSRRQREIEKLVKERRQLRKQWRKATEEEREGIKVLQEELRSRLAVLRRAEHLREKRKKKERARSAFFRNPFNFVKGLFNQEKGGQLKATKSEIEQYLKSTYSDSKENRNIGLPPDMPPLGEVEQEMDVSPPRWREVVEVVRRAKASSAPGPNGVPYRVYKSAPGILRTLWRYLRIVWEKQSIPRAWRRAGGVFIPKEKESSDLSQFRMISLLNVEGKIFFSIVAQRLAKYLERNGMIDTTAQKAGIPGFAGCLEHTSMIWHQIQTAKREKRDLNVVFLDLANAFGSVPHNLIWSSFDYFKVPEIVVNLVKAYFQDIRLCASIAELTTGWQRLEVGIMAGCTVSPLAFTMAMEVIIRASKWVVGGERRQNGMRLPPIRAYMDDMTLLTSTVPCTRRLLDKVNQNLKWASMKIKPSKSRSISIYRGKVSDRKFAIDGEEIPTIREKSVKSLGRWYNVDLNDVEQVVQFRKDVAEGLERIDKSGLPGKLRLWCLQFGLYPRLMWPMSVYEVPLSVAERMERLVSSYIRKWLGAPRCLSNVALYGKGMLQLPVSSLTEEFKCTKVRTELLLSGSKDMLVSNVVPNPSGGRKWNPRAAVQEAEAALRHAEIVGNVQFGRGGLGLGPGKPVWNKAGLKEKRKLVVEQVRRQEELLRGAKAVGQAKQGQWLNWEGVEKRKLSWRDLWNMEEGRIKFLIGATYDVLPTPQNLSLWVQGDQSCPLCSGTASLKHILSGCRISLSQGRYTWRHNQVLRSLAAGIEERRKQVNSGSSRKERLDVQFVREGEKNRAAKSGRKQGGGCLVGADDWQMQVDLGGQLVVPQEIVYSNLRPDIVLWSMSKKTVYFIELTVPWENSVEAAYERKKTKYADLKTESEQRGWKTRVCPVEVGCRGFVAGSAVSLLRELGVHGQNLRKTVREMSDEAARSSQWIWIRRNNSSWGVK

SEQ ID NO: 4253 - protein, 1150 aa, Chelmon rostratus
MVTNRITDMTMPWIHDSVRDGGTDPSLRARGSSTQVTGKATKESKSCAAEDKKLQVCPCGWQKITSIRGLRTHQGRRKCLAVEGQSGRIDQYFLRSQSNQSDEVQRQVENHSSQDISNTIPGEEEVRRGDAVGVEGNRPAKERSMEQKARVKWPRANDSKEWEAVDRDLSVILSRLRGDVVEKLDKIGDVIYSYGRERFGVLVKRKGERVQVGKSRRQREIEKLVKERRQLRKQWRKATEEEREGIKVLQEELRSRLAVLRRAEHLREKRKKKERARSAFFRNPFNFVKGLFNQEKGGQLKATKSEIEQYLKSTYSDSKENRNIGLPPDMPPLGEVEQEMDVSPPRWREVVEVVRRAKASSAPGPNGVPYRVYKSAPGILRTLWRYLRIVWEKQSIPRAWRRAGGVFIPKEKESSDLSQFRMISLLNVEGKIFFSIVAQRLAKYLERNGMIDTTVQKAGIPGFAGCLEHTSMIWHQIQTAKREKRDLNVVFLDLANAFGSVPHNLIWSSFDYFKVPEIVVNLVKAYFQDIRLCASIAELTTGWQRLEVGIMAGCTVSPLAFTMAMEVIIRASKWVVGGERRQNGMRLPPIRAYMDDMTLLTSTVPCTRRLLDKVNQNLKWASMKIKPSKSRSISIYRGKVSDRKFAIDGEEIPTIREKSVKSLGRWYNVDLNDVEQVVQFRKDVAEGLERIDKSGLPGKLRLWCLQFGLYPRLMWPMSVYEVPLSVAERMERLVSSYIRKWLGAPRCLSNVALYGKGMLQLPVSSLTEEFKCTKVRAELLLSGSKDMLVSNVVPNPSGGRKWNPRAAVQEAEAALRHAEIVGNVQFGRGGLGLGPGKPVWNKAGLKEKRKLVVEQVRRQEELLRGAKAVGQAKQGQWLNWEGVEKRKLSWRDLWNMEEGRIKFLIGATYDVLPTPQNLSLWVQGDQSCPLCSGTASLKHILSGCRISLSQGRYTWRHNQVLRSLAAGIEERRKQVNSGSSRKERLDVQFVREGEKNRAAKSGRKQGGGCLVGADDWQMQVDLGGQLVVPQEIVYSNLRPDIVLWSMSKKTVYFIELTVPWENSVEAAYERKKTKYADLKTESEQRGWKTRVCPVEVGCRGFVAGSAVSLLRELGVHGQNLRKTVREMSDEAARSSQWIWIRRNNSSWGVK

SEQ ID NO: 4254 - protein, 1150 aa, Chelmon rostratus
MVTNRITDMTMPWIHDSVRDGGTDPSLRARGSSTQVTGKATKESKSCAAEDKKLQVCPCGWQKITSIRGLRTHQGRRKCLAVEGQSGRIDQYFLRSQSNQSDEVQRQVENHSSQDISNTIPGEEEVRRGDAVGVEGNRPAKERSMEQKARVKWPRANDSKEWEAVDRDLSVILSRLRGDVVEKLDKIGDVIYSYGRERFGVLVKRKGERVQVGKSRRQREIEKLVKERRQLRKQWRKATEEEREGIKVLQEELRSRLAVLRRAEHLREKRKKKERARSAFFRNPFNFVKGLFNQEKGGQLKATKSEIEQYLKSTYSDSKENRNIGLPPDMPPLGEVEQEMDVSPPRWREVVEVVRRAKASSAPGPNGVPYRVYKSAPGILRTLWRYLRIVWEKQSIPRAWRRAGGVFIPKEKESSDLSQFRMISLLNVEGKIFFSIVAQRLAKYLERNGMIDTTVQKAGIPGFAGCLEHTSMIWHQIQTAKREKRDLNVVFLDLANAFGSVPHNLIWSSFDYFKVPEIVVNLVKAYFQDIRLCASIAELTTGWQRLEVGIMAGCTVSPLAFTMAMEVIIRASKWVVGGERRQIGMRLPPIRAYMDDMTLLTSTVPCTRRLLDKVNQNLKWASMKIKPSKSRSISIYRGKVSDRKFAIDGEEIPTIREKSVKSLGRWYSVDLNDVEQVVQFRKDVAEGLERIDKSGLPGKLRLWCLQFGLYPRLMWPMSIYEVPLSVAERMERLVSSYIRKWLGAPRCLSNVALYGKGMLQLPVSSLTEEFKCTKVRTELLLSGSKDMLVSNVVPNPSGGRKWNPRAAVQEAEAALRHAEIVGNVQFGRGGLGLGPGKPVWNKAGLKEKRKLVVEQVRRQEELLRGAKAVGQAKQGQWLNWEGVEKRKLSWRDLWNMEEGRIKFLIGATYDVLPTPQNLSLWVQGDQSCPLCSGTASLKHILSGCRISLSQGRYTWRHNQVLRSLAAGIEERRKQVNSGSSRKERLDVQFVREGEKNKAAKSGRKQGGGCLVGADDWQMQVDLGGQLVVPQEIVYSNLRPDIVLWSMSKKTVYFIELTVPWENSVEAAYERKKTKYADLKTESEQRGWKTRVCPVEVGCRGFVAGSAVSLLRELGVHGQNLRKTVREMSDEAARSSQWIWIRRNNSSWGVK

SEQ ID NO: 4255 - protein, 1150 aa, Chelmon rostratus
MVTNRIADMTMPWIHDSVRDGGTDPSLRARGSSTQVTGKATKESKSCAAEDKKLQVCPCGWQKITSIRGLRTHQGRRKCLAVEGQSGRIDQYFLRSQSNQSDEVQRQVENHSSQDISNTIPGEEEVRRGDAVGVEGNRPAKERSMEQKARVKWPRANDSKEWEAVDRDLSVILSRLRGDVVEKLDKIGDVIYSYGRERFGVLVKRKGERVQVGKSRRQREIEKLVKERRQLRKQWRKATEEEREGIKVLQEELRSRLAVLRRAEHLREKRKKKERARSAFFRNPFNFVKGLFNQEKGGQLKATKSEIEQYLKSTYSDSKENRNIGLPPDMPPLGEVEQEMDVSPPRWREVVEVVRRAKASSAPGPNGVPYRVYKSAPGILRTLWRYLRIVWEKQSIPRAWRRAGGVFIPKEKESSDLSQFRMISLLNVEGKIFFSIVAQRLAKYLERNGMIDTTVQKAGIPGFAGCLEHTSMIWHQIQTAKREKRDLNVVFLDLANAFGSVPHNLIWSSFDYFKVPEIVVNLVKAYFQDIRLCASIAELTTGWQRLEVGIMAGCTVSPLAFTMAMEVIIRASKWVVGGERRQNGMRLPPIRAYMDDMTLLTSTVPCTRRLLDKVNQNLKWASMKIKPSKSRSISIYRGKVSDRKFAIDGEEIPTIREKSVKSLGRWYNVDLNDVEQVVQFRKDVAEGLERIDKSGLPGKLRLWCLQFGLYPRLMWPMSVYEVPLSVAERMERLVSSYIRKWLGAPRCLSNVALYGKGMLQLPVSSLTEEFKCTKVRTELLLSGSKDMLVSNVVPNPSGGRKWNPRAAVQEAEAALRHAEIVGNVQFGRGGLGLGPGKPVWNKAGLKEKRKLVVEQVRRQEELLRGAKAVGQAKQGQWLNWEGVEKRKLSWRDLWNMEEGRIKFLIGATYDVLPTPQNLSLWVQGDQSCPLCSGTASLKHILSGCRISLSQGRYTWRHNQVLRSLAAGIEERRKQVNSGSSRKERLDVQFVREGEKNKAAKSGRKQGGGCLVGADDWQMQVDLGGQLVVPQEIVYSNLRPDIVLWSMSKKTVYFIELTVPWENSVEAAYERKKTKYADLKTESEQRGWKTRVCPVEVGCRGFVAGSAVSLLRELGVHGQNLRKTVREMSDEAARSSQWIWIRRNNSSWGVK

SEQ ID NO: 4256 - protein, 1021 aa, Epinephelus coioides
MLARERTMEQKVRVRWPRANDSKEWEIVNRDLSVILSRLRGNAIERLEKMGDIMYSYGVERFGVHERKRSERVQAGKSRWQREIEKLVKERRQLRKQWKKATEEEREGIKVLQEELRSRLAVLRRAEHLRKKRKKKEYARTGFFRDPFKFVKGLFSQEKGGQLKAERLEVEEYLRNTYSDLEKNRIVGFPPDIPPLGGIEHEMDVRPPRWKEVQEVVRRAKASSAPGPNGVPYRVYKSAPDTLKFLWKQLRIVWEKQIIPRAWCRAGGVLIPKEKESVDLSQFRMISLLNVEGKIFFSVVVQRLASYLERNSLIDTMVQKAGIPGFSGCLEHTSMIWHQIQAAKINKRDLHVVFLDLANAFGSVPHSLIWSAFDYFRVPQVVVNLVKAYFQDIRLCLSTAGFTTGWQRLEIGIMAGCTISPLAFTMAMEVIIRASKWVVGGERRQNGLHLPPVRAYMDDMTLVTTTMPCTKRLLEKVNKNLKWASMKIKPSKSRSISIHRGKLSDRKFVIDDEDIPTIREKSVKSLGRWYNVELNDEEQVIKFRKDVAEGLDRIDKSELPGKLKLWCLQFGLYPRLMWPLSVYEIPISVVERIERSVSSYIRKWLGAPRCLSSVALYGKGILQLPVCSLTEEFKCTKVRTELLLSGSKDVVVRSVVPNPTKGRKWNPRSAVQEAEAALRHAEIVGNVQFGRGGLGLGSGKPVWNTAGLKDKRKLVVEQIRRQEEIVRGAKLVAQAKQGQWLNWESVEKRKLNWRDLWSMEENRIRFLVGATYDVLPTPQNLKLWVNEDPLCPLCSGTATLKHILSGCKVSLSQGRYTWRHNQVLKCLAAGIEGKRRQVNSEGVKDRSLAIQFVREGEKYRRDKLVRRQGCGRLEGACDWEMQVDLGGKLVVPQEIVCTRQRPDLVLWSVSQRIVYFIELTVPWEDSVEEAYERKKLRYADLGAEAEQRGWKTRICPVEVGCRGFIARSAVSLLGELGVRGQNLRKTVREMSDEAIKCSQFIYYRRNNVSWGPAGGTTKQGT

SEQ ID NO: 4257 - protein, 920 aa, Epinephelus lanceolatus
MWKKSFWAPGHLMVDVITLFGHSLRNWLRKKRRKKEYARTGFFRDPFKFVKGLFSQEKGGQLKAERLEVEEYLRNTYSDLEKNRIVGFPPDIPPLGGIEHEMDVRPPRWKEVQEVVRRAKASSAPGPNGVPYRVYKSAPDTLKFLWKQLRIVWEKQIIPRAWRRAGGVLIPKEKESVDLSQFRMISLLNVEGKIFFSVVAQRLASYLERNSLIDTMVQKAGIPGFSGCLEHTSMIWHQIQAAKINKRDLHVIFLDLANAFGSVPHSLIWSAFDYFRVPQVVVNLVKAYFQDIRLCLSTAGFTTGWQRLEIGIMAGCTISPLAFTMAMEVIIRASKWVVGGERRQNGLHLPPVRAYMDDMTLVTTTMPCTKRLLEKVNKNLKWASMKIKPSKSRSISICRGKLSDRKFVIDDEDIPTIREKSVKSLGRWYNVELNDKEQVVKFRKDVAEGLDRIDKSELPGKLKLWCLQFGLYPRLMWPLSVYEIPISVVERMERSVSSYIRKWLGAPRCLSSVALYGKGILQLPVSSLTEEFKCTKVRTELLLSGSKDVVVRSVVPNPTKGRKWNPRSAVQEAEAALRHAEIVGNVQFGRGGLGLGSGKPVWNTAGLKDKRKLVVEQIRRQEEIVRGAKVVAQAKQGQWLNWESVEKRKLSWRDLWSMEENRIRFLVGATYDVLPTPQNLKLWVNEDPSCPLCSRTATLKHILSGCKVSLSQGRYTWRHNQVLKCLAAGIEGKRRQVNSEGVKDRGLVIQFVREGEKYRRDKLVRRQGCGRLEGACDWEMQVDLGGKLVVPQEIVCTRQRPDLVLWSVSQQIVYFIELTVPWEDSVEEAYERKKLRYADLGAEAEQRGWKTRICPVEVGCRGFIARSTVSLLGELGVRGQNLRKTVREMSDEAIKCSQFIYYRRNNVSWGPAGGTTKQGT

SEQ ID NO: 4258 - protein, 1150 aa, Chelmon rostratus
MVTNRITDMTMPWIHDSVRDGGTDPSLRTRGSSTQVTGKATKESKSCAAEDKKLQVCPCGWQKITSIRGLRTHQGRRKCLAVEGQSGRIDQYFLRSQSNQSDEVQRQVETHSSQDISNTIPGEEEVWRGDAVGVEVNRPAKERSMEQKARVRWPRANDSKEWEAVDRDLSVILSRLRGDVVEKLDKIGDVIYSYGRERFGVLVKRKGERVQVGKSRRQREIEKLVKERRQLRKQWRKATEEEREGIKVLQEELRSRLAVLRRAEHLREKRKKKERARSAFFRNPFNFVKGLFNQEKGGQLKATKSEIEQYLKSTYSDSKENRNIGLPPDMPPLGEVEQEMDVSPPRWREVVEVVRRAKASSAPGPNGVPYRVYKSAPGILRTLWRYLRIVWEKQSIPRAWRRAGGVFIPKEKESSDLSQFQMISLLNVEGKIFFSIVAQRLAKYLERNGMIDTTVQKAGIPGFAGCLEHTSMIWHQIQTAKREKRDLNVVFLDLANAFGSVPHNLIWSSFDYFKVPEIVVNLVKAYFQDIRLCASIAELTTGWQRLEVGIMAGCTVSPLAFTMAMEVIIRASKWVVGGERRQNGMRLPPIRAYMDDMTLLTSTVPCTRRLLDKVNQNLKWASMKIKPSKSRSISIYRGKVSDRKFAIDGEEIPTIREKSVKSLGRWYNVDLNDVEQVVQFRKDVAEGLERIDKSGLPGKLRLWCLQFGLYPRLMWPMSVYEVPLSVAERMERLVSSYIRKWLGAPRCLSNVALYGKGMLQLPVSSLTEEFKCTKVRTELLLSGSKDMLVSNVVPNPSGGRKWNPRAAVQEAEAALRHAEIVGNVQFGRGGLGLGPGKPVWNKAGLKEKRKLVVEQVRRQEELLRGAKAVGQAKQGQWLNWEGVEKRKLSWRDLWNMEEGRIKFLIGATYDVLPTPQNLSLWVQGDQSCPLCSGTASLKHILSGCRISLSQGRYTWRHNQVLRSLAAGIEERRKQVNTGSSRKERLDVQFVREGEKNRAAKSGRKQVGGCLVGADDWQMQVDLGGKLVVPQEIVYSNLRPDIVLWSMSKKTVYFIELTVPWENSVEAAYERKKTKYADLKTESEQRGWKTRVCPVEVGCRGFVAGSAVSLLRELGVHGQNLRKTVREMSDEAARSSQWIWIRRNNSSWGVK

SEQ ID NO: 4259 - protein, 1150 aa, Chelmon rostratus
MVTNRITDMTMPWIHDSVRDGGTDPSLRARGSSTQVTGKATKESKSCAAEDKKLQVCPCGWQKITSIRGLRTHQGRRKCLAVEGQSGRIDQYFLRSQSNQSDEVQRQVENHSSQDISNTIPGEEEVRRGDAVGVEGNRPAKERSMEQKARVKWPRANDSKEWEAVDRDLSVILSRLRGDVVEKLDKIGDVIYSYGRERFGVLVKRKGERVQVGKSRRQREIEKLVKERRQLRKQWRKATEEEREGIKVLQEELRSRLAVLRRAEHLREKRKKKERARSAFFRNPFNFVKGLFNQEKGGQLKATKSEIEQYLKSTYSDSKENRNIGLPPDMPPLGEVEQEMDVSPPRWREVVEVVRRAKASSAPGPNGVPYRVYKSAPGILRTLWRYLRIVWEKQSIPRAWRRAGGVFIPKEKESSDLSQFRMISLLNVEGKIFFSIVAQRLAKYLERNGMIDTTVQKAGIPGFAGCLEHTSMIWHQIQTAKREKRDLNVVFLDLANAFGSVPHNLIWSSFDYFKVPEIVVNLVKAYFQDIRLCASIAELTTGWQRLEVGIMAGCTVSPLAFTMAMEVIIRASKWVVGGERRQNGMRLPPIRAYMDDMTLLTSTVPCTRRLLDKVNQNLKWASMKIKPSKSRSISIYRGKVSDRKFAIDGEEIPTITEKSVKSLGRWYNVDLNDVEQVVQFRKDVTEGLERIDKSGLPGKLRLWCLQFGLYPRLMWPMSVYEVPLSVAERMERLVSSYIRKWLGAPRCLSNVALYGKGMLQLPVSSLTEEFKCTKVRTELLLSGSKDMLVSNVVPNPSGGRKWNPRAAVQEAEAALRHAEIVGNVQFGRGGLGLGPGKPVWNKAGLKEKRKLVVEQVRRQEELLRGAKAVGQAKQGQWLNWEGVEKRKLSWRDLWNMEEGRIKFLIGATYDVLPTPQNLSLWVQGDQSCPLCSGTASLKHILSGCRISLSQGRYTWRHNQVLRSLAAGIEERRKQVNSGSSRKERLDVQFVREGEKNRAAKSGRKQGGGCLVGADDWQMQVDLGGKLVVPQEIVYSNLRPDIVLWSMSKKTVYFIELTVPWENSVEAAYERKKTKYADLKTESEQRGWKTRVCPVEVGCRGFVAGSAVSLLRELGVHGQNLRKTVREMSDEAARSSQWIWIRRNNSSWGVK

SEQ ID NO: 4260 - protein, 1006 aa, Chelmon rostratus
MEQKARVRWPRANDSKEWEAVDRDLSVILSRLRGDVVEKLDKIGDVIYSYGRERFGVLVKRKGERVQVGKSRRQREIEKLVKERRQLRKQWRKATEEEREGIKVLQEELRSRLAVLRRAEHLREKRKKKERARSAFFRNPFNFVKGLFNQEKGGQLKATKSEIEQYLKSTYSDSKENRNIGLPPDMPPLGEVEQEMDVSPPRWREVVEVVRRAKASSAPGPNGVPYRVYKSAPGILRTLWRYLRIVWEKQSIPRAWRRAGGVFIPKEKESSDLSQFRMISLLNVEGKIFFSIVAQRLAKYLERNGMIDTTVQKAGIPGFAGCLEHTSMIWHQIQTAKREKRDLNVVFLDLANAFGSVPHNLIWSSFDYFKVPEIVVNLVKAYFQDIRLCASIAELTTGWQRLEVGIMAGCTVSPLAFTMAMEVIIRASKWVVGGERRQNGMRLPPIRAYMDDMTLLTSTVPCTRRLLDKVNQNLKWASMKIKPSKSRSISIYRGKVSDRKFAIDGEEIPTIREKSVKSLGRWYNVDLNDVEQVVQFRKDVAEGLERIDKSGLPGKLRLWCLQFGLYPRLMWPMSVYEVPLSVAERMERLVSSYIRKWLGAPRCLSNVALYGKGMLQLPVSSLTEEFKCTKVRTELLLSGSKDMLVSNVVPNPSGGRKWNPRAAVQEAEAALRHAEIVGNVQFGRGGLGLGPGKPVWNKAGLKEKRKLVVEQVRRQEELLRGAKAVGQAKQGQWLNWEGVEKRKLSWRDLWNMEEGRIKFLIGATYDVLPTPQNLSLWVQGDQSCPLCSGTASLKHILSGCRISLSQGRYTWRHNQVLRSLAAGIEERRKQVNTGSSRKERLDVQFVREGEKNRAAKSGRKQVGGCLVGADDWQMQVDLGGKLVVPQEIVYSNLRPDIVLWSMSKKAVYFIELTVPWENSVEAAYERKKTKYADLKTESEQRGWKTRVCPVEVGCRGFVAGSAVSLLRELGVHGQNLRKTVREMSDEAARSSQWIWIRRNNSSWGVK

SEQ ID NO: 4261 - protein, 1148 aa, Epinephelus coioides
MTWTGDSVKDRGTDLSTSARISSTQGKVSASVEGKSSIVENKMFQVCPCGWQKVTSVKGFRTHQGKKKCVAKKGQSSRIDQYFLRSQSSQSDEVQRQVENHSSQDISNAATEEEGVVREDAGDTEASMLARERTMEQKVRVRWPRANDSKEWEIVNRDLSVILSRLRGNAIERLEKMGDIMYSYGVERFGVHERKRSERVQAGKSRRQREIEKLVKERRQLRKQWKKATEEEREGIKVLQEELRSRLAVLRRAEHLRKKRKKKEYARTGFFRDPFKFVKGLFSQEKGGQLKAERLEVEEYLRNTNSDLEKNRIVGFPPDIPPLGGIEHEMDVRPPRWKEVQEVVRRAKASSAPGPNGVPYRVYKSAPDTLKFLWKQLRIVWEKQVIPRAWRRAGGVLIPKEKESVDLNQFRMISLLNVEGKIFFSVVAQRLASYLERNSLIDTMVQKAGIPGFSGCLEHTSMIWHQIQAAKINKRDLHVIFLDLANAFGSVPHSLIWTAFDYFRVPQVVVNLVKAYFQDIRLCLSTAGFTTGWQRLEIGIMAGCTISPLAFTMAMEVIIRASKWVVGGERRQNGLHLPPVRAYMDDMTLVTTTMPCTKRLLEKVNKNLKWASMKIKPSKSRSISICRGKLSDRKFVIDDEDIPTIREKSVKSLGRWYNVELNDKEQVVKFRKDVAEGLDRIDKSELPGKFKLWCLQFGLYPRLMWPLSVYEIPISVVERMERSVSSYIRKWLGAPRCLSSVALYGKGILQLPVSSLTEEFKCTKVRTELLLSGSKDVVVRSVVPNPTKGRKWNPRSAVQEAEAALRHAEIVGNVQFGRGGLGLGSGKPVWNTAGLKDKRKLVVEQIRRQEEIVRGAKVVAQAKQGQWLNWESVEKRKLSWRDLWSMEENRIRFLVGATYDVLPTPQNLKLWVNEDPSCPLCSRTATLKHILSGCKVSLSQGRYTWRHNQVLKCLAAGIEGKRRQVNSEGGKDRSLVIQFVREGEKYRRDKLVRRQGCGRLEGACDWEMQVDLGGKLVVPQEIACTRQRPDLVLWSVSQQIVYFIELTVPWEDSVEEAYERKKLRYADLGTEAEQRGWKTRICPVEVGCRGFIARSTVSLLGELGVRGQNLRKTVREMSDEAIKCSQFIYYRRNNVSWGPAGGTTKQGT

SEQ ID NO: 4262 - protein, 1014 aa, Epinephelus lanceolatus
MEQKVRVRWPRANDSKEWKIVNRDLSVILSRLSGNAIERLEKMGDIIYSYGVKRFGLHERKRSERVQSGKSRRQREIEELVKERRQLRKVWRKATEEEWEGINVLQEELRSRLAVLRRAEYLRKKRRKKEHVRTGFFRDPFKFVKGLFSQEKGGQLKAERLEVEEYLRNTYSDLEKNRIVGFPPDIPPLEGIEHEMDVRPPRWKEVQEVVRRAKASSAPGPNGVPYRVYKSAPDTLKFLWKQLRIVWEKQIIPRAWRRAGGVLIPKEKESVDLSQFRMISLLNVEGKIFFSVVAQRLASYLERNSLIDTMVQKAGIPGFSGCLEHTSMIWHQIQAAKIKKRDLHVVFLDLANAFGSVPHSLIWSAFDYFRVPQVVVNLVKAYFQDIRLCLSTAGFTTGWQRLEIGIMAGCTISPLAFTMAMEVIIRASKWVVGGERRQNGLHLPPVRAYMDDMTLVTTTMPCTKRLLEKVNKNLKWASMKIKPSKSRSISICRGKLSDRKFVIDDEDIPTIREKSVKSLGRWYNVELNDKEQVVKFRKDVAEGLDRIDKSELPGKLKLWCLQFGLYPRLMWPLSVYEIPISVVERMERSVSSYIRKWLGAPRCLSSVALYGKGILQLPVSSLTEEFKCTKVRTELLLSGSKDVVVRSVVPNPTKGRKWNPRSAVQEAEAALRHAEIVGNVQFGRGGLGLGSGKPVWNTAGLKDKRKLVVEQIRRQEEIVRGAKVVAQAKQGQWLNWESVEKRKLSWRDLWSMEENRIRFLVGATYDVLPTPQNLKLWVNEDPSCPLCSRTATLKHILSGCKVSLSQGRYTWRHNQVLKCLAAGIEGKRRQVNSEGVKDRGLVIQFVREGEKYRRDKLVRRQGCGRLEGACDWEMQVDLGGKLVVPQEIVCTRQRPDLVLWSVSQQIVYFIELTVPWEDSVEEAYERKKLRYADLGAEAEQRGWKTRICPVEVGCRGFIARSAVSLLGELGVRGQSLRKTVREMSDEAIKCSQFIYKTRSNVSWGPAGGTTKQGT

SEQ ID NO: 4263 - protein, 1150 aa, Chelmon rostratus
MVTNRITDMTMPWIHDSVRDGGTDPSLRTRGSSTQVTGKATKESKSCAAEDKKLQVCPCGWQKITSIRGLRTHQGRRKCLAVEGQSGRIDQYFLRSQSNQSDEVQRQVETHSSQDISNTIPGEEEVWRGDAVGVEVNRPAKERSMEQKARVRWPRANDSKEWEAVDRDLSVILSRLRGDVVEKLDKIGDVIYSYGRERFGVLVKRKGERVQVGKSRRQREIEKLVKERRQLRKQWRKATEEEREGIKVLQEELRSRLAVLRRAEHLREKRKKKERARSAFFRNPFNFVKGLFNQEKGGQLKATKSEIEQYLKSTYSDSKENRNIGLPPDMPPLGEVEQEMDVSPPRWREVVEVVRRAKASSAPGPNGVPYRVYKSAPGILRTLWRYLRIVWEKQSIPRAWRRAGGVFIPKEKESSDLSQFRMISLLNVEGKIFFSIVAQRLAKYLERNGMIDTTVQKAGIPGFAGCLEHTSMIWHQIQTAKREKRDLNVVFLDLANAFGSVPHNLIWSSFDYFKVPEIVVNLVKAYFQDIRLCASIAELTTGWQRLEVGIMAGCTVSPLAFTMAMEVIIRASKWVVGGERRQNGMRLPPIRAYMDDMTLLTSTVPCTRRLLDKVNQNLKWASMKIKPSKSRSISIYRGKVSDRKFAIDGEEIPTIREKSVKSLGRWYNVDLNDVEQVVQFRKDVAEGLERIDKSGLPGKLRLWCLQFGLYPRLMWPMSVYEVPLSVAERMERLVSSYIRKWLGAPRCLSNVALYGKGMLQLPVSSLTEEFKCTKVRTELLLSGSKDMLVSNVVPNPSGGRKWNPRAAVQEAEAALRHAEIVGNVQFGRGGLGLGPGKPVWNKAGLKEKRKLVVEQVRRQEELLRGAKAVGQAKQGQWLNWEGVEKRKLSWRDLWNMEEGRIKFLIGATYDVLPTPQNLSLWVQGDQSCPLCSGTASLKHILSGCRISLSQGRYTWRHNQVLRSLAAGIEERRKQVNTGSSRKERLDVQFVREGEKNRAAKSGRKQVGGCLVGADDWQMQVDLGGKLVVPQEIVYSNLRPDIVLWSMSKKTVYFIELTVPWENSVEAAYERKKTKYADLKTESEQRGWKTRVCPVEVGCRGFVAGSAVSLLRELGVHGQNLRKTVREMSDEAARSSQWIWIRRNNSSWGVK

SEQ ID NO: 4264 - protein, 821 aa, Chelmon rostratus
MPPLGEVEQEMDVSPPRWREVVEVVRRAKASSAPGPNGVPYHVYKSAPGILRTLWRYLRIVWEKQSIPRAWRRAGGVFIPKEKESSDLSQFRMISLLNVEGKIFFSIVAQRLAKYLERNGMIDTTVQKAGIPGFAGCLEHTSMIWHQIQTAKREKRDLNVVFLDLANAFGSVPHNLIWSSFDYFKVPEIVVNLVKAYFQDIRLCASIAELTTGWQRLEVGIMAGCTVSPLAFTMAMEVIIRASKWVVGGERRQNGMRLPPIRAYMDDMTLLTSTVPCTRRLLDKVNQNLKWASMKIKPSKSRSISIYRGKVSDRKFAIDGEEIPTIREKSVKSLGRWYNVDLNDVEQVVQFRKDVAEGLERIDKSGLPGKLRLWCLQFGLYPRLMWPMSVYEVPLSVAERMERLVSSYIRKWLGAPRCLSNVALYGKGMLQLPVSSLTEEFKCTKVRTELLLSGSKDMLVSNVVPNPSGGRKWNPRAAVQEAEAALRHAEIVGNVQFGRGGLGLGPGKPVWNKAGLKEKRKLVVEQVRRQEELLRGAKAVGQAKQGQWLNWEGVEKRKLSWRDLWNMEEGRIKFLIGATYDVLPTPQNLSLWVQGDQSCPLCSGTASLKHILSGCRISLSQGRYTWRHNQVLRSLAAGIEERRKQVNSGSSRKERLDVQFVREGKKNRAAKSGRKQGGGCLVGADDWQMQVDLGGQLVVPQEIVYSNLRPDIVLWSMSKKTVYFIELTVPWENSVEAAYERKKTKYADLKTESEQRGWKTRVCPVEVGCRGFVAGSAVSLLRELGVHGENLRKTVREMSDEAARSSQWIWIRRNNSSWGVK

SEQ ID NO: 4265 - protein, 821 aa, Chelmon rostratus
MPPLGEVEQEMDVSPPRWREVVEVVRRAKASSAPEPNGVPYRVYKSAPGILRTLWRYLRIVWEKQSIPRAWRRAGGVFIPKEKESSDLSQFRMISLLNVEGKIFFSIVAQRLAKYLERNGMIDTTVQKAGIPGFAGCLEHTSMIWHQIQTAKREKRDLNVVFLDLANAFGSVPHNLIWSSFDYFKVPEIVVNLVKAYFQDIRLCASIAELTTGWQRLEVGIMAGCTVSPLAFTMAMEVIIRASKWVVGGERRQNGMRLPPIRAYMDDMTLLTSTVPCTRRLLDKVNQNLKWASMKIKPSKSRSISIYRGKVSDRKFAIDGEEIPTIREKSVKSLGRWYNVDLNDVEQVVQFRKDVAEGLERIDKSGLPGKLRLWCLQFGLYPRLMWPMSVYEVPLSVAERMERLVSSYIRKWLGAPRCLSNVAMYGKGMLQLPVSSLTEEFKCTKVRTELLLSGSKDMLVSNVVPNPSGGRKWNPRAAVQEAEAALRHAEIVGNVQFGRGGLGLGPGKPVWNKAGLKEKRKLVVEQVRRQEELLRGAKAVGQAKQGQWLNWEGVEKRKLSWRDLWNMEEGRIKFLIGATYDVLPTPQNLSLWVQGDQSCPLCSGTASLKHILSGCRISLSQGRYTWRHNQVLRSLAAGIEERRKQVNSGSSRKERLDVQFVREGEKNRAAKSGRKQVGGCLVGADDWQMQVDLGGKLVVPQEIVYSNLRPDIVLWSMSKKTVYFIELTVPWENSVEAAYERKKTKYADLKTESEQRGWKTRVCPVEVGCRGFVAGSAVSLLRELGVHGQNLRKTVREMSDEAARSSQWIWIRRNNSSWGVK

SEQ ID NO: 4266 - protein, 1148 aa, Epinephelus coioides
MTWTGDSVKDRGTDLSTSARISSTQGKVSASVEGKSSIVENKMLQVCPCGWQKVTSVKGLRTHQGKKKCVAKKGQSSRIDQYFLRSQSSQSDEVQRQVENHSSQDISNAATEEEGVVREDAGDTEASMLARERTMEQKVRVRWPRANDSKEWEIVNRDLSVILSRLRGNAIERLEKMGDIMYSYGVERFGVHERKRSERVQAGKSRRQREIEKLVKERRQLRKQWKKATEEEREGIKVLQEELRSRLAVLRRAEHLRKKRKKKEYARTGFFRDPFKFVKGLFSQEKGGQLKAERLEVEEYLRNTYSDLEKNRIVGFPPDIPPLGGIEHEMDVRPPRWKEVQEVVRRAKASSAPGPNGVPYRVYKSAPDTLKFLWKQLRIVWEKQVIPRAWRRAGGVLIPKEKESVDLSQFRMISLLNVEGKIFFSVVAQRLASYLERNSLIDTMVQKAGIPGFSGCLEHTSMIWHQIQAAKINKRDLHVIFLDLANAFGSVPHSLIWSAFDYFRVPQVVVNLVKAYFQDIRLCLSTAGFTTGWQRLEIGIMAGCTISPLAFTMAMEVIIRASKWVVGGERRQNGLHLPPVRAYMDDMTLVTTTMPCTKRLLEKVNKNLKWASMKIKPSKSRSISICRGKLSDRKFVIDDEDIPTIREKSVKSLGRWYNVELNDKEQVVKFRKDVAEGLDRIDKSELPGKLKLWCLQFGLYPRLMWPLSVYEIPISVVERMERSVSSYIRKWLGAPRCLSSVALYGKGILQLPVSSLTEEFKCTKVRTELLLSGSKDVVVRSVVPNPTKGRKWNPRSAVQEAEAALRHAEIVGNVQFGRGGLGLGSGKPVWNTAGLKDKRKLVVEQIRRQEEIVRGAKVVAQAKQGQWLNWESVEKRKLSWRDLWSMEENRIRFLVGATYDVLPTPQNLKLWVNEDPSCPLCSRTATLKHILSGCKVSLSQGRYTWRHNQVLKCLAAGIEGKRRQVNSEGGKDRSLVIQFVREGEKYRRDKLVRRQGCGRLEGACDWEMQVDLGGKLVVPQEIACTRQRPDLVLWSVSQQIVYFIELTVPWEDSVEEAYERKKLRYADLGAEAEQRGWKTRICPVEVGCRGFIARSTVSLLGELGVRGQNLRKTVREMSDEAIKCSQFIYYRRNNVSWGPAGGTTKQGT

SEQ ID NO: 4267 - protein, 1147 aa, Epinephelus lanceolatus
MTWICDSVKDRGTDLSTSARISSTQDKVSASVEDKSSTVENKMLQVCPCVWQKVTSVKGLRTHQGKKCVAKKGQSSRIDQYFLRSQLSQLDEVQRQVENHSSQDISNAATEEEGVVREDAGDTEASMLARERTMEQKVRVRWPRANDSKEWEIVNRDLSVILSRLGGNAIERLEKMGDIMYSYGVERFGVHERKRSERVQSGKSRRQREIEKLVKERRQLRKQWKKATEEEREGIKVLQEELRSRLAVLRRAEHLRKKRRKKEYARTGFFRDPFKFVKGLFSQEKGGQLKAERLEVEEYLRNTYSDLEKNRIVGFPPDIPPLGGIEHEMDVRPPRWKEVQEVVRRAKASSAPGPNGVPYRVYKSAPDTLKFLWKQLRIVWEKQIIPRAWRRAGGVLIPKEKESVDLSQFRMISLLNVEGKIFFSVVAQRLASYLERNSLIDTMVQKAGIPGFSGCLEHTSMIWHQIQAAKINKRDLHVIFLDLANAFGSVPHSLIWSAFDYFRVPQVVVNLVKAYFQDIRLCLSTAGFTTGWQRLEIGIMAGCTISPLAFTMAMEVIIRASKWVVGGERRQNGLHLPPVRAYMDDMTLVTTTMPCTKRLLEKVNKNLKWASMKIKPSKSRSISICRGKLSDRKFVIDDEDIPTIREKSVKSLGRWYNVELNDKEQVVKFRKDVAEGLDRIDKSELPGKLKLWCLQFGLYPRLMWPLSVYEIPISVVERMERSVSSYIRKWLGAPRCLSSVALYGKGILQLPVSSLTEEFKCTKVRTELLLSGSKDVVVRSVVPNPTKGRKWNPRSAVQEAEAALRHAEIVGNVQFGRGGLGLGSGKPVWNTAGLKDKRKLVVEQIRRQEEIVRGAKVVAQAKQGQWLNWESVEKRKLSWRDLWSMEENRIRFLVGATYDVLPTPQNLKLWVNEDPSCPLCSRTATLKHILSGCKVSLSQGRYTWRHNQVLKCLAAGIEGKRRQVNSEGVKDRGLVIQFVREGEKYRRDKLVRRQGCGRLEGACDWEMQVDLGGKLVVPQEIVCTRQRPDLVLWSVSQQIVYFIELTVPWEDSVEEAYERKKLRYADLGAEAEQRGWKTRICPVEVGCRGFIARSTVSLLGELGVRGQNLRKTVREMSDEAIKCSQFIYYRRNNVSWGPAGGTTKQGT

SEQ ID NO: 4268 - protein, 1021 aa, Epinephelus lanceolatus
MLARERTMEQKVRVRWPRANDSKEWEKVKRELSVILRRLRGNAIQRLEKMGDIMYSYGVERFGVHERKRSERVQSGKSRRQREIEKLVKERRQLRKQWKKATEEEREGIKVLQEELRSRLAVLRRAEHLRKKRRKKEYARTGFFRDPFKFVKGLFSQEKGGQLKAERLEVEEYLRNTYSDLEKNRIVGFPPDIPPLGGIEHEMDVRPPRWKEVQEVVRRAKASSAPGPNGVPYRVYKSAPDTLKFLWKQLRIVWEKQIIPRAWRRAGGVLIPKEKESVDLSQFRMISLLNVEGKIFFSVVAQRLASYLERNSLIDTMVQKAGIPGFSGCLEHTSMIWHQIQAAKINKRDLHVIFLDLANAFGSVPHSLIWSAFDYFRVPQVVVNLVKAYFQDIRLCLSTAGFTTGWQRLEIGIMAGCTISPLAFTMAMEVIIRASKWVVGGERRQNGLHLPPVRAYMDDMTLVTTTMPCTKRLLEKVNKNLKWASMKIKPSKSRSISICRGKLSDRKFVIDDEDIPTIREKSVKSLGRWYNVELNDKEQVVKFRKDVAEGLDRIDKSELPGKLKLWCLQFGLYPRLMWPLSVYEIPISVVERMERSVSSYIRKWLGAPRCLSSVALYGKGILQLPVSSLTEEFKCTKVRTELLLSGSKDVVVRSVVPNPTKGRKWNPRSAVQEAEAALRHAEIVGNVQFGRGGLGLGSGKPVWNTAGLKDKRKLVVEQIRRQEEIVRGAKVVAQAKQGQWLNWESVEKRKLSWRDLWSMEENRIRFLVGATYDVLPTPQNLKLWVNEDPSCPLCSRTATLKHILSGCKVSLSQGRYTWRHNQVLKCLAAGIEGKRRQVNSEGVKDRGLVIQFVREGEKYRRDKLVRRQGCGRLEGACDWEMQVDLGGKLVVPQEIVCTRQRPDLVLWSVSQQIVYFIELTVPWEDSVEEAYERKKLRYADLGAEAEQRGWKTRICPVEVGCRGFIARSTVSLLGELGVRGQNLRKTVREMSDEAIKCSQFIYYRRNNVSWGPAGGTTKQGT

SEQ ID NO: 4269 - protein, 1150 aa, Chelmon rostratus
MVTNRTTDMTMPWIHDSVRDGGTDPSLRTRGSSTQVTGKATKESKSCASEDKKLQVCPCGWQKITSIRGLRTHQGRRKCLAVEGQSGRIDQYFLRSQSNQSDEVQRQVENHSSQDISNTIPGEEEVRRGDAVGVEVNRPAKERSMEQKARVRWPRANDSKEWEAVDRDLSVILSRLRGDVVEKLDKIGDVIYSYGRERFGVLVKRKGERVQVGKSRRQREIEKLVKERRQLRKQWRKATEEEREGIKVLQEELRSRLAVLRRAEHLREKRKKKERARSAFFRNPFNFVKGLFNQEKGGQLKATKSEIEQYLKSTYSDSKENRNIGLPPDMPPLGEVEQEMDVSPPRWREVVEVVRRAKASSAPGPNGVPYRLYKSAPGILRTLWRYLRIVWEKQSIPRAWRRAGGVFIPKEKESSDLSQFRMISLLNVEGKIFFSIVAQRLAKYLERNGMIDTTVQKAGIPGFAGCLEHTSMIWHQIQTAKREKRDLNVVFLDLANAFGSVPHNLIWSSFDYFKVPEIVVNLVKAYFQDIRLCASIAELTTGWQRLEVGIMAGCTVSPLAFTMAMEVIIRASKWVVGGERRQNGMRLPPIRAYMDDMTLLTSTVPCTRRLLDKVNQNLKWASMKIKPSKSRSISIYRGKVSDRKFAIDGEEIPTIREKSVKSLGRWYNVDLNDVEQVVQFRKDVAEGLERIDKSGLPGKLRLWCLQFGLYPRLMWPMSVYEVPLSVAERMKRLVSSYIRKWLGAPRCLSNVALYGKGMLQLPVSSLTEEFKCTKVRTELLLSGSKDMLVSNVVPNPSGGRKWNPRAAVQEAEAALRHAEIVGNVQFGRGGLGLGPGKPVWNKAGLKEKRKLVVEQVRRQEELLRGAKAVGQAKQGQWLNWEGVEKRKLSWRDLWNMEEGRIKFLIGATYDVLPTPQNLSLWVQGDQSCPLCSGTASLKHILSGCRISLSQGRYTWRHNQVLRSLAAGIEERRKQVNSGSSRKERLDVQFVREGEKNRAAKSGTKQVGGCLVGADDWQMQVDLGGKLVVPQEIVYSNLRPDIVLWSMSKKTVYFIELTVPWENSVEAAYERKKTKYADLKTESEQRGWKTRVCPVKVGCRGFVAGSAVSLLRELGVHGQNLRKTVREMSDEAARSSQWIWIRRNNSSWGVK

SEQ ID NO: 4270 - protein, 1150 aa, Chelmon rostratus
MVTNRITDMTMPWIHDSVRDGGTDPSLRTRGSSTQVTGKATKESKSCAAEDKKLQVCPCGWQKITSIRGLRTHQGRRKCLAVEGQSGRIDQYFLRSQSNQSDEVQRQVETHSSQDISNTIPGEEEVWRGDAVGVEVNRPAKERSMEQKARVRWPRANDSKEWEAVDRDLSVILSRLRGDVVEKLDKIGDVIYSYGRERFGVLVKRKGERVQVGKSRRQREIEKLVKERRQLRKQWRKATEEEREGIKVLQEELRSRLAVLRRAEHLREKRKKKERARSAFFRNPFNFVKGLFNQEKGGQLKATKSEIEQYLKSTYSDSKENRNIGLPPDMPPLGEVEQEMDVSPPRWREVVEVVRRAKASSAPGPNGVPYCVYKSAPGILRTLWRYLRIVWEKQSIPRAWRRAGGVFIPKEKESSDLSQFRMISLLNVEGKIFFSIVAQRLAKYLERNGMIDTTVQKAGIPGFAGCLEHTSMIWHQIQTAKREKRDLNVVFLDLANAFGSVPHNLIWSSFDYFKVPEIVVNLVKAYFQDIRLCASIAELTTGWQRLEVGIMAGCTVSPLAFTMAMEVIIRASKWVVGGERRQNGMRLPPIRAYMDDMTLLTSTVPCTRRLLDKVNQNLKWASMKIKPSKSRSISIYRGKVSDRKFAIDGEEIPTIREKSVKSLGRWYNVDLNDVEQVVQFRKDVAEGLERIDKSGLPGKLRLWCLQFGLYPRLMWPMSVYEVPLSVAERMERLVSSYIRKWLGAPRCLSNVALYGKGMLQLPVSSLTEEFKCTKVRTELLLSGSKDMLVSNVVPNPSGGRKWNPRAAVQEAEAALRHAEIVGNVQFGRGGLGLGPGKPVWNKAGLKEKRKLVVEQVRRQEELLRGAKAVGQAKQGQWLNWEGVEKRKLSWRDLWNMEEGRIKFLIGATYDVLPTPQNLSLWVQGDQSCPLCSGTATLKHILSGCRISLSQGRYTWRHNQVLRSLAAGIEERRKQVNTGSSRKERLDVQFVREGEKNRAAKSGRKQVGGCLVGADDWQMQVDLGGKLVVPQEIVYSNLRPDIVLWSMSKKTVYFIELTVPWENSVEAAYERKKTKYADLKTESEQRGWKTRVCPVEVGCRGFVAGSAVSLLRELGVHGQNLRKTVREMSDEAARSSQWIWIRRNNSSWGVK

SEQ ID NO: 4271 - protein, 1150 aa, Chelmon rostratus
MVTNRITDMTMPWIHDSVRDWGTDPSLRARGSSTQVTVKATKESKSCAAEDKKLQVCPCGWQKITSIRGLRTHQGRRKCLAVEGQSGRIDQYFLRSQSNQSDEVQRQVENHSSQDISNTIPGEEEVRRGDAVGVEVNRPAKERSMEQKARVRWPRANNSKEWEAVDRDLSVILSRLRGDVVEILDKIGDVIYSYGRERFGVLVKRKGERVQVSKSRRQREIEKLVKERRQLRKQWRKATEEEREGIKVLQEELRSRLAVLRRAEHLREKRKKKERAGSAFFRNPFNFVKGLFNQEKGGQLKATKSEIEQYLKSTYSDSKKNRNIGLPPDMPPLGEVEQEMDVSPPRWREVVEVVRRAKASSAPGPNGVPYRVYKSAPGILRTLWRYLRIVWEKQSIPRAWRRAGGVFIPKEKESSDLSQFRMISLLNVEGKIFFSIVAQRLANYLERNGMIDTTVQKAGIPGFAGCLEHTRMIWHQIQTAKREKRDLNVVFLDLANAFGSVPHNLIWSSFDYFKVPEIVVNLVKAYFQDIRLCASSAELTTGWQRLEVGIMAGCTVSPLAFTMAMEVIIRASKWVVGGERRQNGMRLPPIRAYMDDMTLLTSTVPCTRRLLDKVNQNLKWASMKIKPSKSRSISIYRGKVSDRKFAIDDEEIPTIREKSVKSLGRWYNVDLNDVEQVVQFRKDVAEGLERIDKSGLPGKLRLWCLQFGLYPRLMWPMSVYEVPLSVAERMERLVSSYIRKWLGAPRCLSNVALNGKGMLQLPVSSLTEEFKCTKFRTELLLSGSKDMLVSNVVPNPSGGRKWNPRAAVQEAEAALRHAEIVGNVQFGRGGLGLGPGKPVWNKAGLKEKRKLVVEQVRRQEELLRGAKAVGQAKQGQWLNWEGVEKRKLSWRDLWNMEEGRIKFLIGATYNVLPTPQNLSLWVQGDQSCPLCSGTASLKHILSGCRISLSQGRYTWRHNQVLRSLAAGIEERRKQVNSGSSRKKRLDVQFVREGEKNRAAKSGRRQVGGCLVGADDWQMQVDLGGKLVVPQELVYSNLRPDIVLWSMSKKTVFFIELTVPWENSVEAAYERKKTKYADLKTESEQRGWKTRVCPVEVGCRGFVAGSAVSLLRELGVHGQNLRKTVREMSDEAARSSQWIWIRRNNSSWGVK

SEQ ID NO: 4272 - protein, 1060 aa, Epinephelus coioides
MDEAQRQVENHSSQDISNAATEEEEEGVVREDAGDTEAGMLARERTMEQKVRVRWPRANDSKAWEIVNRDLSVILSRLRGNAVERLEKMGDIMYSYGVERFGVHERKRSERVQAGKSRRQREIEKLVKERRQLRKQWKKATEEEREGIKVLQEELRSRLAVLRRAEHLRKKRKKKEYARTGFFRDPFKFVKGLFSQEKGGQLKAERLEVEEYLRNTYSDLEKNRIVGFPPDIPPLGGIEHEMDVRPPRWKEVQEVVRRAKASSAPGPNGVPYRVYKSAPDTLKFLWKQLRIVWEKQVIPRAWRRAGGVLIPKEKESVDLSQFRMISLLNVEGKIFFSVVAQRLASYLERNSLIDTMVQKAGIPGFSGCLEHTSMIWHQIQAAKINKRDLHVIFLDLANAFGSVPHSLIWSAFDYFRVPQVVVNLVKAYFQDIRLCLSTAGFTTGWQRLEIGIMAGCTISPLAFTMAMEVIIRASKWVVGGERRQNGLHLPPVRAYMDDMTLVTTTMPCTKRLLEKVNKNLKWASMKIKPSKSRSISICRGKLSDRKFVIDDEDIPTIREKSVKSLGRWYNVELNDKEQVVKFRKDVAEGLDRIDKSELPGKLKLWCLQFGLYPRLMWPLSVYEIPISVVERMERSVSSYIRKWLGAPRCLSSVALYGKGILQLPVSSLTEEFKCTKVRTELLLSGSKDVVVRSVVPNPTKGRKWNPRSAVQEAEAALRHAEIVGNVQFGRGGLGLGSGKPVWNTAGLKDKRKLVVEQIRRQEEIVRGAKVVAQAKQGQWLNWESVEKRKLSWRDLWSMEENRIRFLVGATYDVLPTPQNLKLWVNEDPSCPLCSRTATLKHILSGCKVSLSQGRYTWRHNQVLKCLAAGIEGKRRQVNSEGGKDRSLVIQFVREGEKYRRDKLVRRQGCGRLEGACDWEMQVDLGGKLVVPQEIACTRQRPDLVLWSVSQRIVYFIELTVPWEDSVEEAYERKKLRYADLGAEAEQRGWKTRICPVEVGCRGFIARSTVSLLGELGVRGQNLRKTVREMSDEAIKCSQFIYYRRNNVSWGPAGGTTKQGT

SEQ ID NO: 4273 - protein, 1148 aa, Epinephelus lanceolatus
MTWIYDSVKDRGTNLSTRARISSTQGKASASVEDKSSTVENKMLKVCPCGWQKVTSVKGLRTHQGKKKCVAKKGQSSRIDQYFLRSQSSQSDEVQRQVENHSSQDISNAATEEEGVVREDAGDTEASMPVRERTMEQKVRVRWPRANDSKEWEIVNRDLSVILSRLRGNAIERLEKMGDIMYSYGVERFGVHERKRSERVQSGKSRRQREIEKLVKERRQLRKQWKKATEEEREGIKVLQEELRSRLAVLRRAEHLRKKRRKKEYARTGFFRDPFKFVKGLFSQEKGGQLKAERLEVEEYLRNTYSDLEKNRIVGFPPDIPPLGGIEHEMDVRPPRWKEVQEVVRRAKASSAPGPNGVPYRVYKSAPDTLKFLWKQLRIVWEKQIIPRAWRRAGGVLIPKEKESVDLSQFRMISLLNVEGKIFFSVVAQRLASYLERNSLIDTMVQKAGIPGFSGCLEHTSMIWHQIQAAKINKRDLHVIFLDLANAFGSVPHSLIWSAFDYFRVPQVVVNLVKAYFQDIRLCLSTAGFTTGWQRLEIGIMAGCTISPLAFTMAMEVIIRASKWVVGGERRQNGLHLPPVRAYMDDMTLVTTTMPCTKRLLEKVNKNLKWASMKIKPSKSRSISICRGKLSDRKFVIDDEDIPTIREKSVKSLGRWYNVELNDKEQVVKFRKDVAEGLDRIDKSELPGKLKLWCLQFGLYPRLMWPLSVYEIPISVVERMERSVSSYIRKWLGAPRCLSSVALYGKGILQLPVSSLTEEFKCTKVRTELLLSGSKDVVVRSVVPNPTKGRKWNPRSAVQEAEAALRHAEIVGNVQFGRGGLGLGSGKPVWNTAGLKDKRKLVVEQIRRQEEIVRGAKVVAQAKQGQWLNWESVEKRKLSWRDLWSMEENRIRFLVGATYDVLPTPQNLKLWVNEDPSCPLCSRTATLKHILSGCKVSLSQGRYTWRHNQVLKCLAAGIEGKRRQVNSEGVKDRGLVIQFVREGEKYRRDKLVRRQGCGRLEGACDWEMQVDLGGKLVVPQEIVCTRQRPDLVLWSVSQQIVYFIELTVPWEDSVEEAYERKKLRYADLGAEAEQRGWKTRICPVEVGCRGFIARSTVSLLGELGVRGQNLRKTVREMSDEAIKCSQFIYYRRNNVSWGPAGGTTKQGT

SEQ ID NO: 4274 - protein, 1150 aa, Chelmon rostratus
MVTNRITDMTMPWIHDSVRDGGTDPSLRARGSSTQVTGKATKESKSCAAEDKKLQVCPCGWQKITSIRGLRTHQGRRKCLAVEGQSGRIDQYFLRSQSNQSDEVQRQVENHSSQDISNTIPGEEEVRRGDAVGVEGNRPAKERSMEQKARVKWPRANDSKEWEAVDRDLSVILSRLRGDVVEKLDKIGDVIYSYGRERFGVLVKRKGERVQVGKSRRQREIEKLVKERRQLRKQWRKATEEEREGIKVLQEELRSRLAVLRRAEHLREKRKKRERARSAFFRNPFNFVKGLFNQEKGGQLKATKSEIEQYLKSTYSDSKENRNIGLPPDMPPLGEVEQEMDVSPPRWREVVEVVRRAKASSAPGPNGVPYRVYKSAPGILRTLWRYLRIVWEKQSIPRAWRRAGGVFIPKEKESSDLSQFRMISLLNVEGKIFFSIVAQRLAKYLERNGMIDTTVQKAGIPGFAGCLEHTSMIWHQIQTAKREKRDLNVVFLDLANAFGSVPHNLIWSSFDYFKVPEIVVNLVKAYFQDIRLCASIAELTTGWQRLEVGIMAGCTVSPLAFTMAMEVIIRASKWVVGGERRQNGMRLPPIRAYMDDMTLLTSTVPCTRRLLDKVNQNLKWASMKIKPSKSRSISIYRGKVSDRKFAIDGEEIPTIREKAVKSLGRWYNVDLNDVEQVVQFRKDVAEGLERIDKSGLPGKLRLWCLQFGLYPRLMWPMSVYEVPLSVAERMERLVSSYIRKWLGAPRCLSNVALYGKGMLQLPVSSLTEEFKCTKVRTELLLSGSKDMLVSNVVPNPSGGRKWNPRAAVQEAEAALRHAEIVGNVQFGRGGLGLGPGKPVWNKAGLKEKRKLVVEQVRRQEELLRGAKAVGQAKQGQWLNWEGVEKRKLSWRDLWNMEEGRIKFLIGATYDVLPTPQNLSLWVQGDQSCPLCSGTASLKHILSGCRISLSQGRYTWRHNQVLRSLAAGIEERRKQVNSGSSRKERLDVQFVREGEKNKAAKSGRKQGGGCLVGADDWQMQVDLGGQLVVPQEIVYSNLRPDIVLWSMSKKTVYFIELTVPWENSAEAAYERKKTKYADLKTESEQRGWKTRVCPVEVGCRGFVAGSAVSLLRELGVHGQNLRKTVREMSDEAARSSQWIWIRRNNSSWGVK

SEQ ID NO: 4275 - protein, 1150 aa, Chelmon rostratus
MVTNRITDMTMPWIHDSVRDGGTDPSLRARGSSTQVTGKATKESKSCAAEDKKLQVCPCGWQKITSIRGLRTHQGRRKCLAVEGQSGRIDQYFLRSQSNQSDEVQRQVENHSSQDISNTIPGEEEVRRGDADGVEGNRPAKERSMEQKARVKWPRANDSKEWEAVDRDLSVILSRLRGDVVEKLDKIGDVIYSYGRERFGVLVKRKGERVKVGKSRRQREIEKLVKERRQLRKQWRKATEEEREGIKVLQEELRSRLAVLRRAEHLREKRKKKERARSAFFRNPFNFVKGLFNQEKGGQLKATKSEIEQYLKSTYSDSKENRNIGLPPDMPPLGEVEQEMDVSPPRWREVVEVVRRAKASSAPGPNGVPYRVYKSAPGILRTLWRYLRIVWEKQSIPRAWRRAGGVFIPKEKESSDLSQFRMISLLNVEGKIFFSIVAQRLAKYLERNGMIDTTVQKAGIPGFAGCLEHTSMIWHQIQTAKREKRDLNVVFLDLANAFGSVPHNLIWSSFDYFKVPEIVVNLVKAYFQDIRLCASIAELTTGWQRLEVGIMAGCTVSPLAFTMAMEVIIRASKWVVGGERRQNGMRLPPIRAYMDDMTLLTSTVPCTRRLLDKVNQNLKWASMKIKPSKSRSISIYRGKVSDRKFAIDGEEIPTIREKSVKSLGRWYNVDLNDVEQVVQFRKDVAEGLERIDKSGLPGKLRLWCLQFGLYPRLMWPMSVYEVPLSVAERMERLVSSYIRKWLGAPRCLSNVALYGKGMLQLPVSSLTEEFKCTKVRTELLLSGSKDMLVSNVVPNPSGGRKWNPRAAVQEAEAALRHAEIVGNVQFGRGGLGLGPGKPVWNKAGLKEKRKLVVEQVRRQEELLRGAKAVGQAKQGQWLNWEGVEKRKLSWRDLWNMEEGRIKFLIGATYDVLPTPQNLSLWVQGDQSCPLCSGTASLKHILSGCRISLSQGWYTWRHNQVLRSLAAGIEERRKQVNSGSSRKERLDVQFVREGEKNKAAKSGRKQGGGCLVGADDWQMQVDLGGQLVVPQEIVYSNLRPDIVLWSMSKKTVYFIELTVPWENSVEAAYERKKTKYADLKTESEQRGWKTRVCPVEVGCRGFVAGSAVSLLRELGVHGQNLRKTVREMSDEAARSSQWIWIRRNNSSWGVK

SEQ ID NO: 4276 - protein, 1150 aa, Chelmon rostratus
MVTNRITDMTMPWIHDSVRDGGTDPSLRARGSSTQVTGKATKESKSCAAEDKKLQVCPCGWQKITSIRGLRTHQGRRKCLAVEGQSGRINQYFLRSQSNQSDEVQRQVENHSSQDISNTIPGEEEVRRGDAVGVEGNRPAKERSMEQKARVKWPRANDSKEWEAVDRDLSVILSRLRGDVVEKLDKIGDVIYSYGRERFGVLVKRKGERVQVGKSRRQREIEKLVKERRQLRKQWRKATEEEREGIKVLQEELRSRLAVLRRAEHLREKRKKKERARSAFFRNPFNFVKGLFNQEKGGQLKATKSEIEQYLKSTYSDSKENRNIGLPPDMPPLGEVEQEMDVSPPRWREVVEVVRRAKASSAPGPNGVPYRVYKSAPGILRTLWRYLRIVWEKQSILRAWRRAGGVFIPKEKESSDLSQFRMISLLNVEGKIFFSIVAQRLAKYLERNGMIDTTVQKAGIPGFAGCLEHTSMIWHQIQTAKREKRDLNVVFLDLANAFGSVPHNLIWSSFDYFKVPEIVVNLVKAYFQDIRLCASIAELTTGWQRLEVGIMAGCTVSPLAFTMAMEVIIRASKWVVGGERRQNGMRLPPIRAYMDDMTLLTSTVPCTRRLLDKVNQNLKWASMKIKPSKSRSISIYRGKVSDRKFAIDGEEIPTIREKSVKSLGRWYNVDLNDVEQVVQFRKDVAEGLERIDKSGLPGKLRLWCLQFGLYPRLMWPMSVYEVPLSVAERMERLVSSYIRKWLGAPRCLSNVALYGKGMLQLPVSSLTEELKCTKVRTELLLSGSKDMLVSNVVPNPSGGRKWNPRAAVQEAEAALRHAEIVGNVQFGRGGLGLGPGKPVWNKAGLKEKRKLVVEQVRRQEELLRGAKAVGQAKQGQWLNWEGVEKRKLSWRDLWNMEEGRIKFLIGATYDVLPTPQNLSLWVQGDQSCPLCSGTASLKHILSGCRISLSQGRYTWRHNQVLRSLAAGIEERRKQVNSGSSRKERLDVQFVREGEKNKAAKSGRKQGGGCLVGADDWQMQVDLGGQLVVPQEIVYSNLRPDIVLWSMSKKTVYFIELTVPWENSVEAAYERKKTKYADLKTESEQRGWKTRVCPVEVGCRGFVAGSAVSLLRELGVHGQNLRKTVREMSDEAARSSQWIWIRRNNSSWGVK

SEQ ID NO: 4277 - protein, 821 aa, Chelmon rostratus
MPPLGEVEQEMDVSPPRWREVVEVVRRAKASSAPGPNGVPYRVYKSAPGILRTLWRYLRIVWEKQSIPRAWRRAGGVFIPKEKESSDLSQFRMISLLNVEGKIFFSIVAQRLAKYLERNGMIDTTVQKAGIPGFAGCLEHTSMIWHQIQTAKREKRDLNVVFLDLANAFGSVPHNLIWSSFDYFKVPEIVVNLVKAYFQDIRLCASIAELTTGWQRLEVGIMAGCTVSPLAFTMAMEVIIRASKWVVGGERRQNGMRLPPIRAYMDDMTLLTSTVPCTRRLLDKVNQNLKWASMKIKPSKSRSISIYRGKVSDRKFAIDGEEIPTIREKSVKSLGRWYNVDLNDVEQVVQFRKDVAEGLERIDKSGLPGKLRLWCLQFGLYPRLMWPMSVYEVPLSVAERMERLVSSYIRKWLGAPRCLSNVALYGKGMLQLPVSSLTEEFKCTKVRTELLLSGSKDMLVSNVVPNPSGGRKWNPRAAVQEAEAALRHAEIVGNVQFGRGGLGLGPGKPVWNKAGLKEKRKLVVEQVRRQEELLRGAKAVGQAKQGQWLNWEGVEKRKLSWRDLWNMEEGRIKFLIGATYDVLPTPQNLSLWVQGDQSCPLCSGTASLKHILSGCRISLSQGRYTWRHNQVLRSLAAGIEERRKQVNSGSSRKERLDVQFVREGEKNKAAKSGRKQGGGCLVGADDWQMQVDLGGQLVVPQEIVYSNLRPDIVLWSMSKKTVYFIELTVPWENSVEAAYERKKTKYADLKTESEQRGWKTRVCPVEVGCRGFVAGSAVSLLRELGVHGQNLRKTVREMSDEAARSSQWIWIRRNNSSWGVK

SEQ ID NO: 4278 - protein, 1148 aa, Epinephelus lanceolatus
MTWICDSVKDRGTDLSTSARISSTQGKVSASVEGKSSIVENKMLQVCPCGWQKVTSVKGLRTHQGKKKCVAKKGQSSRIDQYFLRSQSSQSDEVQRQVENHSSQDISNAATEEEGVVREDAGDTEASMLARERTMEQKVRVRWPRANDSKEWEIVNRDLSVILSRLRGNAIQRLEKMGDIMYSYGVERFGVHERKRSERVQSGKSRRQREIEKLVKERRQLRKQWKKATEEEREGIKVLQEELRSRLAVLRRAEHLRKKRRKKEYARTGFFRDPFKFVKGLFSQEKGGQLKAERLEVEEYLRNTYSDLEKNRIVGFPPDIPPLGGIEHEMDVRPPRWKEVQEVVRRAKASSAPGPNGVPYRVYKSAPDTLKFLWKQLRIVWEKQIIPRAWRRAGGVLIPKEKESVDLSQFRMISLLNVEGKIFFSVVAQRLASYLERNSLIDTMVQKAGIPGFSGCLEHTSMIWHQIQAAKINKRDLHVIFLDLANAFGSVPHSLIWSAFDYFRVPQVVVNLVKAYFQDIRLCLSTAGFTTGWQRLEIGIMAGCTISPLAFTMAMEVIIRASKWVVGGERRQNGLHLPPVRAYMDDMTLVTTTMPCTKRLLEKVNKNLKWASMKIKPSKSRSISICRGKLSDRKFVIDDEDIPTIREKSVKSLGRWYNVELNDKEQVVKFRKDVAEGLDRIDKSELPGKLKLWCLQFGLYPRLMWPLSVYEIPISVVERMERSVSSYIRKWLGAPRCLSSVALYGKGILQLPVSSLTEEFKCTKVRTELLLSGSKDVVVRSVVPNPTKGRKWNPRSAVQEAEAALRHAEIVGNVQFGRGGLGLGSGKPVWNTAGLKDKRKLVVEQIRRQEEIVRGAKVVAQAKQGQWLNWESVEKRKLSWRDLWSMEENRIRFLVGATYDVLPTPQNLKLWVNEDPSCPLCSRTATLKHILSGCKVSLSQGRYTWRHNQVLKCLAAGIEGKRRQVNSEGVKDRGLVIQFVREGEKYRRDKLVRRQGCGRLEGACDWEMQVDLGGKLVVPQEIVCTRQRPDLVLWSVSQQIVYFIELTVPWEDSVEEAYERKKLRYADLGAEAEQRGWKTRICPVEVGCRGFIARSTVSLLGELGVRGQNLRKTVREMSDEAIKCSQFIYYRRNNVSWGPAGGTTKQGT

SEQ ID NO: 4279 - protein, 1150 aa, Chelmon rostratus
MVTNRITDMTMPWIHDSVRDGGTDPSLRARGSSTQVTGKATKESKSCAAEDKKLQVCPCGWQKITSIRGLRTHQGRRKCLAVEGQSGRIDQYFLRSQSNQSDEVQRQVENHSSQDISNTIPGEEEVRRGDAVGVEGNRPAKERSMEQKARVKWPRANDSKEWEAVDRDLSVILSRLRGDVVEKLDKIGDVIYSYGRERFGVLVKRKGERVQVGKSRRQREIEKLVKERRQLRKQWRKATEEEREGIKVLQEELRSRLAVLRRAEHLREKRKKKERARSAFFRNPFNFVKGLFNQEKGGQLKATKSEIEQYLKSTYSDSKENRNIGLPPDMPPLGEVEQEMDVSPPRWREVVEVVRRAKASSAPGPNGVPYRVYKSAPGILRTLWRYLRIVWEKQSIPRAWRRAGGVFIPKEKESSDLSQFRMISLLNVEGKIFFSIVAQRLAKYLERNGMIDTTVQKAGIPGFAGCLEHTSMIWHQIQTAKREKRDLNVVFLDLANAFGSVPHNLIWSSFDYFKVPEIVVNLVKAYFQDIRLCASIAELTTGWQRLEVGIMAGCTVSPLAFTMAMEVIIRASKWVVGGERRQNGMRLPPIRAYMDDMTLLTSTVPCTRRLLDKVNQNLKWASMKIKPSKSRSISIYRGKVSDRKFAIDGEEIPTIREKSVKSLGRWYNVDLNDVEQVVQFRKDVAEGLERIDKSGLPGKLRLWCLQFGLYPRLMWPMSVYEVPLSVAERMERLVSSYIRKWLGAPRCLSNVALYGKGMLQLPVSSLTEEFKCTKVRTELLLSGSKDMLVSNVVPNPSGGRKWNPRAAVQEAEAALRHAEIVGNVQFGRGGLGLGPGKPVWNKAGLKEKRKLVVEQVRRQEELLRGAKAVGQAKQGQWLNWEGVEKRKLSWRDLWNMEEGRIKFLIGATYDVLPTPQNLSLWVQGDQSCPLCSGTASLKHILSGCRISLSQGRYTWRHNQVLRSLAAGIEERRKQVNSGSSRKERLDVQFVREGEKNKAAKSGRKQGGGCLVGADDWQMQVDLGGQLVVPQEILYSNLRPDIVLWSMSKKTVYFIELTVPWENSVEAAYERKKTKYADLKTESEQRGWKTRVCPVEVGCRGFVAGSAVSLLRELGVHGQNLRKTVREMSDEAARSSQWIWIRRNNSSWGVK

SEQ ID NO: 4280 - protein, 1142 aa, Chelmon rostratus
MTMPWIHDSVRDGGTDPSLRARGSSTQVTGKATKESKSCAAEDKKLQVCPCGWQKITSIRGLRTHQGRRKCLAVEGQSGRIDQYFLRSQSNQSDEVQRQVENHSSQDISNTIPGEEEVRRGDADGVEGNRPAKERSMEQKARVKWPRANDSKEWEAVDRDLSVILSRLRGDVVEKLDKIGDVIYSYGRERFGVLVKRKGERVQVGKSRRQREIEKLVKERRQLRKQWRKATEEEREGIKVLQEELRSRLAVLRRAEHLREKRKKKERARSAFFRNPFNFVKGLFNQEKGGQLKATKSEIEQYLKSTYSDSKENRNIGLPPDMPPLGEVEQEMDVSPPRWREVVEVVRRAKASSAPGPNGVPYRVYKSAPGILRTLWRYLRIVWEKQSIPRAWRRAGGVFIPKEKESSDLSQFRMISLLNVEGKIFFSIVAQRLAKYLERNGMIDTTVQKAGIPGFAGCLEHTSMIWHQIQTAKREKRDLNVVFLDLANAFGSVPHNLIWSSFDYFKVPEIVVNLVKAYFQDIRLCASIAELTTGWQRLEVGIMAGCTVSPLAFTMAMEVIIRASKWVVGGERRQNGMRLPPIRAYMDDMTLLTSTVPCTRRLLDKVNQNLKWASMKIKPSKSRSISIYRGKVSDRKFAIDGEEIPTIREKAVKSLGRWYNVDLNDVEQVVQFRKDVAEGLERIDKSGLPGKLRLWCLQFGLYPRLMWPMSVYEVPLSVAERMERLVSSYIRKWLGAPRCLSNVALYGKGMLQLPVSSLTEEFKCTKVRTELLLSGSKDMLVSNVVPNPSGGRKWNPRAAVQEAEAALRHAEIVGNVQFGRGGLGLGPGKPVWNKAGLKEKRKLVVEQVRRQEELLRGAKAVGQAKQGQWLNWEGVEKRKLSWRDLWNMEEGRIKFLIGATYDVLPTPQNLSLWVQGDQSCPLCSGTASLKHILSGCRISLSQGRYTWRHNQVLRSLAAGIEERRKQVNSGSSRKERLDVQFVREGEKNKAAKSGRKQGGGCLVGADDWQMQVDLGGQLVVPQEIVYSNLRPDIVLWSMSKKTVYFIELTVPWENSVEAAYERKKTKYADLKTESEQRGWKTRVCPVEVGCRGFVAGSAVSLLRELGVHGQNLRKTVREMSDEAARSSQWIWIRRNNSSWGVK

SEQ ID NO: 4281 - protein, 1150 aa, Chelmon rostratus
MVTNRITDMTMPWIHDSVRDGGTDPSLRTRGSSTQVTGKATKESKSCAAEDKKLQVCPCGWQKITSIRGLRTHQGRRKCLAVEGQSGRIDQYFLRSQSNQSDEVQRQVETHSSQDISNTIPGEEEVWRGDAVGVEVNRPAKERSMEQKARVRWPRANDSKEWEAVDRDLSVILSRLRGDVVEKLDKIGDVIYSYGRERFGVLVKRKGERVQVGKSRRQREIEKLVKERRQLRKQWRKATEEEREGIKVLQEELRSRLAVLRRAEHLREKRKKKERARSAFFRNPFNFVKGLFNQEKGGQLKATKSEIEQYLKSTYSDSKENRNIGLPPDMPPLGEVEQEMDVSPPRWREVVEVVRRAKASSAPGPNGVPYRVYKSAPGILRTLWRYLRIVWEKQSIPRAWRRAGGVFIPKEKESSDLSQFRMISLLNVEGKIFFSIVAQRLAKYLERNGMIDTTVQKAGIPGFAGCLEHTSMIWHQIQTAKREKRDLNVVFLDLANAFGSVPHNLIWSSFDYFKVPEIVVNLVKAYFQDIRLCASIAELTTGWQRLEVGIMAGCTVSPLAFTMAMEVIIRASKWVVGGERRQNGMRLPPIRAYMDDMTLLTSTVPCTRRLLDKVNQNLKWASMKIKPSKSRSISIYRGKVSDRKFAIDGEEIPTIREKSVKSLGRWYNVDLNDVEQVVQFRKDVAEGLERIDKSGLPGKLRLWCLQFGLYPRLMWPMSVYEVPLSVAERMERLVSSYIRKWLGAPRCLSNVALYGKGMLQLPVSSLTEEFKCTKVRTELLLSGSKDMLVSNVVPNPSGGRKWNPRAAVQEAEAALRHAEIVGNVQFGRGGLGLGPGKPVWNKAGLKEKRKLVVEQVRRQEELLRGAKAVGQAKQGQWLNWEGVEKRKLSWRDLWNMEEGRIKFLIGATYDVLPTPQNLSLWVQGDQSCPLCSGTASLKHILSGCRISLSQGRYTWRHNQVLRSLAAGIEERRKQVNTGSSRKERLDVQFVREGEKNRAAKSGRKQVGGCLVGADDWQMQVDLGGKVVVPQEIVYSNLRPDIVLWSMSKKTVYFIELTVPWENSVEAAYERKKTKYADLKTESEQRGWKTRVCPVEVGCRGFVAGSAVSLLRELGVHGQNLRKTVREMSDEAARSSQWIWIRRNNSSWGVK

SEQ ID NO: 4282 - protein, 1152 aa, Epinephelus lanceolatus
MDTTMTWICDSVKDRGTDLSTSARISSTQGKVSASVEDKSSTVENKMLQVCPCGWQKVTSVKGLRTHQGKKKCVAKKGQSSRIDQYFLRSQSSQSDEVQRQVENHSSQDISNAATEEEGVVREDAGDTEASMLARERTMEQKVRVRWPRANDSKEWEIVNRDLSVILSRLRGNAIQRLEKMGDIMYSYGVERFGVHERKRSERVQSGKSRRQREIEKLVKERRQLRKQWKKATEEEREGIKVLQEELRSRLAVLRRAEHLRKKRRKKEYARTGFFRDPFKFVKGLFSQEKGGQLKAERLEVEEYLRNTYSDLEKNRIVGFPPDIPPLGGIEHEMDVRPPRWKEVQEVVRRAKASSAPGPNGVPYRVYKSAPDTLKFLWKQLRIVWEKQIIPRAWRRAGGVLIPKEKESVDLSQFRMISLLNVEGKIFFSVVAQRLASYLERNSLIDTMVQKAGIPGFSGCLEHTSMIWHQIQAAKINKRDLHVIFLDLANAFGSVPHSLIWSAFDYFRVPQVVVNLVKAYFQDIRLCLSTAGFTTGWQRLEIGIMAGCTISPLAFTMAMEVIIRASKWVVGGERRQNGLHLPPVRAYMDDMTLVTTTMPCTKRLLEKVNKNLKWASMKIKPSKSRSISICRGKLSDRKFVIDDEDIPTIREKSVKSLGRWYNVELNDKEQVVKFRKDVAEGLDRIDKSELPGKLKLWCLQFGLYPRLMWPLSVYEIPISVVERMERSVSSYIRKWLGAPRCLSSVALYGKGILQLPVSSLTEEFKCTKVRTELLLSGSKDVVVRSVVPNPTKGRKWNPRSAVQEAEAALRHAEIVGNVQFGRGGLGLGSGKPVWNTAGLKDKRKLVVEQIRRQEEIVRGAKVVAQAKQGQWLNWESVEKRKLSWRDLWSMEENRIRFLVGATYDVLPTPQNLKLWVNEDPSCPLCSRTATLKHILSGCKVSLSQGRYTWRHNQVLKCLAAGIEGKRRQVNSEGVKDRGLVIQFVREGEKYRRDKLVRRQGCGRLEGACDWEMQVDLGGKLVVPQEIVCTRQRPDLVLWSVSQQIVYFIELTVPWEDSVEEAYERKKLRYADLGAEAEQRGWKTRICPVEVGCRGFIARSTVSLLGELGVRGQNLRKTVREMSDEAIKCSQFIYYRRNNVSWGPAGGTTKQGT

SEQ ID NO: 4283 - protein, 972 aa, Epinephelus lanceolatus
MGDIMYSYGVERFGVHETKRSERVQSGKSRRQREIEKLVKERRQLRKQWKKATEEEREGIKVLQEELRSRLAVLRRAEHLRKKRRKKEYARTGFFRDPFKFVKGLFSQEKGGQLKAERLEVEEYLRNTYSDLEKNRIVGFPPDIPPLGGIEHEMDVRPPRWKEVQEVVRRAKASSAPGPNGVPYRVYKSAPDTLKFLWKQLRIVWEKQIIPRAWRRAGGVLIPKEKESVDLSQFRMISLLNVEGKIFFSVVAQRLASYLERNSLIDTMVQKAGIPGFSGCLEHTSMIWHQIQAAKINKRDLHVIFLDLANAFGSVPHSLIWSAFDYFRVPQVVVNLVKAYFQDIRLCLSTAGFTTGWQRLEIGIMAGCTISPLAFTMAMEVIIRASKWVVGGERRQNGLHLPPVRAYMDDMTLVTTTMPCTKRLLEKVNKNLKWASMKIKPSKSRSISICRGKLSDRKFVIDDEDIPTIREKSVKSLGRWYNVELNDKEQVVKFRKDVAEGLDRIDKSELPGKLKLWCLQFGLYPRLMWPLSVYEIPISVVERMERSVSSYIRKWLGAPRCLSSVALYGKGILQLPVSSLTEEFKCTKVRTELLLSGSKDVVVRSVVPNPTKGRKWNPRSAVQEAEAALRHAEIVGNVQFGRGGLGLGSGKPVWNTAGLKDKRKLVVEQIRRQEEIVRGAKVVAQAKQGQWLNWESVEKRKLSWRDLWSMEENRIRFLVGATYDVLPTPQNLKLWVNEDPSCPLCSRTATLKHILSGCKVSLSQGRYTWRHNQVLKCLAAGIEGKRRQVNSEGVKDRGLVIQFVREGEKYRRDKLVRRQGCGRLEGACDWEMQVDLGGKLVVPQEIVCTRQRPDLVLWSVSQQIVYFIELTVPWEDSVEEAYERKKLRYADLGAEAEQRGWKTRICPVEVGCRGFIARSTVSLLGELGVRGQNLRKTVREMSDEAIKCSQFIYYRRNNVSWGPAGGTTKQGT

SEQ ID NO: 4284 - protein, 1144 aa, Chelmon rostratus
MVTNRITDMTMPWIHDSVRDGGTDPSLRARGSSTQVTMKATKESKSCAAEDKKLQVCSCGWQKITSIRGLRTHQGRRKCLAVEGQSGRIDQYFLRSQSNQSDEVQRQVENHSAQDISNTIPGEEEVRRGDAVGVEVNRPAKERSMEQKARVRWLRANDSKEWEAVDRDLSVILSRLRGDVVDKLDKIGDVIYSYGRERFGVLVKRKGERVQVGKSRRQREIEKLVKERRQLRKQWRKATEEEREGIKVLQEELRSRLAVLRRAEHLRERRKKKERARSAFFRNPFNFVKGLFNQEKGGQLKATKSEIEQYLKSTYSDSKENRNIGLPPDMPPLGEVEQEMDVSPPRWKEVVEVVRRAKASSAPGPNGVPYRVYKSAPGILRTLWRYLRIVWEKQSIPRAWRRAGGVFIPKEKESSDLSQFRMISLLNVEGKIFFSIVAQRLANYLERNGMIDTTVQKAGIPGFAGCLEHTSMIWHQIQTAKREKRDLNVVFLDLANAFGSVPHNLIWSSFDYFKVPEIVVNLVKAYFQDISLCASSAELTTGWQRLEVGIMAGCTVSPLAFTMAMEVIIRASKWVVGGERQQNGMRLPPIRAYMDDMTLLTSTVPCTRRLLDKVNQNLKWASIKIKPSKSRSISIYRGKVSDRKFAIDGEEIPTIREKSVKSLGRWYNVDLNDVEQVVQFRKDVAEGLERIDKSGLPGKLRLWCLQFGLYPRLMWPMSVYEVPLSVAERMERLVSSYISKWLGAPRCLSNVALYGKGMLQLPVSSLTEEFKCTKVRTELLLSGSKDMLVSNVVPNPSGGRKWNPRAAVQEAEAALRHAEIVGNVQFGRGGLGLGPGKPVWNKAGLKEKRKRRQEELLRGAKAVGQAKQGQWLNWEGVEKRKLSWRDLWNMEEGRIKFLIGATYDVLPTPQNLSLWVQGDQSCPLCSGTASLKHILSGCRISLSQGRYTWRHNQVLRSLAAGIEERRKQVNSGSSRKERLDVQFVREGEKNRAAKSGRRQVGGCLVGADDWQMQVDLGGKLVVPQEIVYINLRPDIVLWSMSKKTVFFIELTVPWENSVEAAYERKKTKYADLKTESEQRGWKTRVCPVEVGCRGFVAGSAVSLLRELGVHGQNLRKTVREMSDEAARSSQWIWIRRNNSSWGLK

SEQ ID NO: 4285 - protein, 1005 aa, Chelmon rostratus
MEQKARVRWPRANDSKEWEAVDRDLSVILSRLRGDVVEKLDKIGDVIYSYGRERFGVLVKRKGERVQVGKSRRQREIEKLVKERRQLRKQWRKATEEEREGIKVLQEELRSRLAVLRRAEHLREKRKKKERARSAFFRNPFNFVKGLFNQEKGGQLKATKSEIEQYLKSTYSDSKENRNIGLPPDMPPLGEVEQEMDVSPPRWREVVEVVRRAKASSAPGPNGVPYRVYKSAPGILRTLWRYLRIVWEKQSIPRAWRRAGGVFIPKEKESSDLSQFRMISLLNVEGKIFFSIVAQRLAKYLEGNGMIDTTVQKAGIPGFAGCLEHTSMIWHQIQTAKREKRDLNVVFLDLANAFGSVPHNLIWSSCDYFKVPEIVVNLVKAYFQDIRLCASIAELTTGWQRLEVGIMAGCTVSPLAFTMAMEVIIRASKWVVGGERRQNGMRLPPIRAYMDDMTLLTSTMPCTRRLDKVNQNLKWASMKIKPSKSRSISIYRGKVSDRKFAIDGEEIPTIREKSVKSLGRWYNVDLNDVEQVVQFRKDVAEGLERIDKSGLPGKLRLWCLQFGLYPRLMWPMSVYEVPLSVAERMERLVSSYIRKWLGAPRCLSNVALYGKGMLQLPVSSLTEEFKCTKVRTELLLSGSKDMLVSNVVPNPSGGRKWNPRAAVQEAEAALRHAEIVGNVQFGRGGLGLGPGKPVWNKAGLKEKRKLVVEQVRRQEELLRGAKAVGQAKQGQWLNWEGVEKRKLSWRDLWNMEEGRIKFLIGATYDVLPTLQNLSLWVQGDQSCPLCSGTASLKHILSGCRISLSQGRYTWRHNQVLRSLAAGIEERRKQVNSGSSRKERLDVQFVREGEKNKAAKSGRKQVGGCLVGADDWQMQVDLGGKLVVPQEIVYSNLRPDIVLWSMSKKTVYFIELTVPWENSVEAAYERKKTKYADLKTESEQRGWKTKVCPVEVGCRGFVAGSAVSLLRELGVHGQNLRKTVREMSDEAARSSQWIWIRRNNSSWGVK

SEQ ID NO: 4286 - protein, 803 aa, Chelmon rostratus
MPPLGEVEQEMDVSPPRWREVVEVVRRAKASSAPGPNGVPYRVYKSAPGILRTLWRYLRIVWEKQSIPRAWRRAGGVFIPKERESSDLSQFRMISLLNVEGKIFFSIVAQRLANYLERNGMIDTTVQKAGIPGFAGYLEHTSMIWHQIQTAKREKRDLNVVFLDLANAFGSVSHNLIWNSFDYFKVPEIVVNLVKAYFQDIRLCASSTELTTGWQRLEVGIMAGCTVSPLAFTMAMEVIIRASKWVVGGERRQNGMRLPPIRAYMDDMTLLTSTVPCTRRLLDKVNQNLKWASMKIKPSKSRSISIYRGKVSDRKFAIDGEEIPTIREKSVKSLGRWYNVDLNDVEQVVQFRKDVAEGLERIDKSGLPGKLRLWCLQFGLYPRLMLVSSYIRKWLGAPRCLSNVALYGKGMLQLPVSSLTEEFKCTKVRTELLLSGSKDMLVSNVVPNPSGGRKWNPRAAVQEAEAALRHAEIVGNVQFGRGGLGLGPGKPVWNKAGLKEKRKLVVEQVRRQEELLRGAKAVGQAKQGQWLNWEGVEKRKLSWRDLWNMEEGRIKFLIGATYDVLPTLQNLSLWVQGNQSCPLCSGTASLKHILSGCRISLSQGRYTWRHNQVLRSLAGGIEERRKQVNSGSSRKERLDVQFVREGEKNRAAKSGRRQVGGCLVGADDWQMQVDFGGKLVVPQEIVYSNLRPDIVLWSMSKKTVFFIELTVPWENSVEAAYERKKTKYADLNTESEQRGWKTRVCPVEVGCRGFVAGSAVSLLRELGVHGQNLRKTVREMSDEAARSGQWIWIRRNNSRWGVK

SEQ ID NO: 4287 - protein, 1175 aa, Seriola rivoliana
MTMTRICDSVKDRGTDLFSRIRTGQNSSQGDMSVAGENKNVRLEGNKLQICPCGWQKVTSVRGLRMHQGRKRCVAKERQCGRIDRYFLRSQSNKSDEVQRQVESHSSKDINNTATEGEEETTRGDAAETEVNRPVRERNMEQKTRVKWPRANSKKEWESVNRDLSLILSRLGGNASDRLEKMGDIIYSYGAERFGVQDRKRVERVQLVKSRRQREMEKLVKERRQLRKQWKRAKEEERGGIDVLQEDLRGRLAVLRRAEYLRKKRKKKEYVRTAFYRDPFKFVKGLFNQEKGGQLKATKLEVQKYLRNTYSDLEQNKVVGLPPDMPPLGQIVHEMDVRPPRWKEVEEVVRRAKASSAPGPNGVPYRVYKSAPDILKFLWRQLRIVGEKQVIPRAWRRAGGVFIPKEKESSDLSQFRMISLLNVEGNIFFSIVARRLASYLERNSLIDTAVQKAGIPGFAGCIEHTSMIWHQIQAAKTEKRDWHVIFLDLANAFGSVPHSLIWEAFDYFRVPGVVVNLVRSYFQDIKLCVSTAGFTTGWQRLEIGIMAGCTISPLAFTMAREVIIRASKWVVGGERRQDGMRLTPIRAYMDDMTLITTTVPCMKRVLERLNKNLKLASMKIKPSKSRSISLSRGKLSDRKFVIDEEEIPIMREKSVKSLGRWYKADLNDGEQVVQFRKDVAEGLDRIDKSGLPGKLKLWCLQFGLFPRLMWPMSVYEIPLSAAEKMERLVSFYIRKWLGAPRCLSTVALYGKGILQLPVTSLVEEFKCTKVRTELLLSGSKDVVVRKVVPNPIKGRKWNPRMAVQEAEATLRHTEIVGNVQISQGGLGLGPGKPVWSRAGPKEKRKLVVEQVRRQEEILRGAKAVAQAKQGQWLNWEGVGKKKLSWKELWSMEESSIRFLIGATYDVLPTPQNLKLWVNGAPLCALCSGTATLKHILSGCKVSLSQGRYTWRHNQVLKSLAAGIEDLRRQANLGGSKTKRVAIKFVQEGEKVGKTTRRQGSLGDACDWEMQVDLGGKLVVPQEIASTKLGPDIVLWSRSRMKVYFIELTVPWEASVEEAYERKKLRYAELGAEAEQRGWKVRVCPVEVGCRGFIARSVVSLVRELGASGQSVRKIVKDMSDEAARSSQWIWIRRSNGSWGPAGGALRIDRLLGEARKKIQEEEVFLSGGCGLCEPL

SEQ ID NO: 4288 - protein, 1145 aa, Seriola quinqueradiata
MTMSWLCDSVKDRGTDLFSRTRTGQNSFQGDVRVAGENKNDRPEGNKLQICPCGWQKVTSVRGLRMHQGRKRCVAKERQCGRIDRYFLRSQSNKSDEVQRQVENHSSKDINNTATEEEEESTRGDAAETEVNRPVKERNMEQKTRVKWPRANSKKEWESVNRDLSAILGRLRGNASDRLEKMGDIIYSYGAERFGVQDRKRVERAQLVKSRRQREMEKLVKERRQLRKQWKRATEEERGGINVLQEDLRGRLAVLRRAEYLRKKRKNKEYVRTAFYRDPFKFAKGLFNQEKGGQLKATKLEVEKYLRNTYSDFEQNRVIGLPPDMPPVGKIDHEMDVRPPRWKEVEEVVRRAKASSAPGPNGVPYRVYKSAPDILKFLWRQLRIVWEKQVIPRVWRRAGGVFIPKEKESSDLSQFRMISLLNVEGKIFFSIVARRLTSYLERNSLIDTAVQKAGIPGFAGCLEHTSMIWHQIQAAKTEKRDLNVIFLDLANAFGSVPHSLIWEAFDYFKVPGVVVNLVKLYFQDIRLCLSTAGFTTGWQRLEIGIMAGCTISPLAFTMAMEVIIRASKWVVGGERRQDGVRLTPIRAYMDDMTLITTTVPCMKRILERLNKNLKWASMKIKPSKSRSISISRGKLSDRKFVIDEEEIPIIREKSVKSLGRWYKADLNDGEQVVQFRKDVAEGLDRIDKSGLPRKLKLWCLQFGLFPRLMWPMSVYEIPISTAEKMEKLVSFYIRKWLGVPRCLSTVALYGKGILQLPVTSLVEEFKCTKVRTELLLSGSKDAVVSKVVPNPIKGRKWNPRIAVQEAEAMLRHTEIVGNVQIGRGGLGLGPGKPVWSRAGPKEKRKLVVEQVRRQEELLRGAKAVAQAKQGQWVNWEGVDKKKLSWKELWSMEESSIRFLIGATYDVLPTPQNLKLWVNGDPLCSLCSGTATLKHILSGCKVSLSQGRYTWRHNQVLKSLAAGIEELRRQANLGGPKTKKGAIKFVQEGEKVVKTTRRQGSLEGACDWEMQVDLGGKLLVPQEIAITKLRPDIVLWSRSRMKVYFIELTVPWEALVEEAYERKKLRYAELGAEAEQRGWKVRICPVEVGCRGFVARSVVSLVRELGASGQSVRKIVKDMSDEAARSSQWIWMRRSNGSWGPSRGST

SEQ ID NO: 4289 - protein, 1114 aa, Seriola rivoliana
MSVAGENKNVRLEGNKLQICPCGWQKVTSVRGLRMHQGRKRCVAKERQCGRIDRYFLRSQSNKSDEVQRQVESHSSKDINNTATEGEEETTRGDAAETEVNRPVRERNMEQKTRVKWPRANSKKEWESVNRDLSLILSRLGGNASDRLEKMGDIIYSYGAERFGVQDRKRVERVQLVKSRRQREMEKLVKERRQLRKQWKRATEEERGGIDVLQEDLRGRLAVLRRAEYLRKKRKKKEYVRTAFYRDPFKFVKGLFNQEKGGQLKATKLEVQKYLRNTYSDLEQNKVVGLPPDMPPLGQIVHEMDVRPPRWKEVEEVVRRAKASSAPGPNGVPYRVYKSAPDILKFLWRQLRIVWEKQVIPRAWRRAGGVFIPKEKESSDLSQFRMISLLNVEGKIFFSIVARRLASYLERNSLIDTAVQKAGIPGFAGCIEHTSMIWHQIQAAKTEKRDLHVIFLDLANAFGSVPHSLIWEAFDYFRVPGVVVNLVRSYFQDIKLCVSTAGFTTGWQRLEIGIMAGCTISPLAFTMAMEVIIRASKWVVGGERRQDGMRLTPIRAYMDDMTLITTTVPCMKRVLERLNKNLKWASMKIKPSKSRSISLSRGKLSDRKFVIDEEEIPIIREKSVKSLGRWYKADLKDGEQVVQFRKDVAEGLDRIDKSGLPGKLKLWCLQFGLFPRLMWPMSVYEIPLSAAEKMERLVSFYIRKWLGVPRCLSTVALYGKGILQLPVTSLVEEFKCTKVRTELLLSGSKDVVVSKVVPNPIKGRKWNPRMAVQEAEATLRHTEIVGNVQIGRGGLGLGPGKPVWSRAGPKEKRKLVVEQVRRQEEILRGAKAVAQAKQGQWLNWEGVDKKKLSWKELWSMEESSIRFLIGATYDVLPTPQNLKLWVNGDPLCALCSGTATLKHILSGCKVSLSQGRYTWRHNQVLKSLAAGIEDLRRQANLGGSKTKRVAIKFVQEGEKVGKTTRRQGSLEDACDWEMQVDLGGKLVVPQEIASTKLRPDIVLWSRSRMKVYFIELTVPWEASVEEAYERKKLRYAELGAEAEQRGWKVRICPVEVGCRGFIARSVVSLVRELGASGQSVRKIVKDMSDEAARSSQWIWIRRSNGSWGPSRGST

SEQ ID NO: 4290 - protein, 957 aa, Seriola quinqueradiata
MVQKDLGCKTERGGERAQLVKSRRQREKEKLVKERRQLRKQWKRATEEERGGINVLQEDLRGRLAVLRRAEYLRKKRKNKEYVRTAFYRDPFKFAKGLFNQEKGGQLKATKLEVEKYLRNTYSDFEQNRVIGLPPDMPPVGKIDHEMDVRPPRWKEVEEVVRRAKASSAPGPNGVPYRVYKSAPDILKFLWRQLRIVWEKQVIPRVWRRAGGVFIPKEKESSDLSQFRMISLLNVEGKIFFSIVARRLTSYLERNSLIDTAVQKAGIPGFAGCLEHTSMIWHQIQAAKTEKRDLNVIFLDLANAFGSVPHSLIWEAFDYFKVPGVVVNLVKLYFQDIRLCLSTAGFTTGWQRLEIGIMAGCTISPLAFTMAMEVIIRASKWVVGGERRQDGVRLTPIRAYMDDMTLITTTVPCMKRILERLNKNLKWASMKIKPSKSRSISISRGKLSDRKFVIDEEEIPIIREKSVKSLGRWYKADLNDGEQVVQFRKDVAEGLDRIDKSGLQGKLKLWCLQFGLFPRLMWPMSVYEIPISTAEKMEKLVSFYIRKWLGVPRCLSTVALYGKGILQLPVTSLVEEFKCTKVRTELLLSGSKDAVVSKVVPNPIKGRKWNPRIAVQEAEAMLRHTEIVGNVQIGRGGLGLGPGKPVWSRAGPKEKRKLVVEQVRRQEELLRGAKAVAQAKQGQWVNWEGVDKKKLSWKELWSMEESSIRFLIGATYDVLPTPQNLKLWVNGDPLCSLCSGTATLKHILSGCKVSLSQGRYTWRHNQVLKSLAAGIEELRRQANLGGPKTKKGAIKFVQEGEKVVKTTRRQGSLEGACDWEMQVDLGGKLLVPQEIAITKLRPDIVLWSRSRMKVYFIELTVPWEALVEEAYERKKLRYAELGAEAEQRGWKVRICPVEVGCRGFVARSVVSLVRELGASGQSVRKIVKDMSDEAARSSQWIWMRRSNGSWGPSRGST

SEQ ID NO: 4291 - protein, 1006 aa, Seriola rivoliana
MEQKTRVKWPRANSKKEWESVNRDLSLILSRLGGNASDRLEKMGDIIYSYGAERFGVQDRKRVERVQLVKSRRQREMEKLVKERRQLRKQWKRATEEERGGIDVLQEDLRGRLAVLRRAEYLRKKRKKKEYVRTAFYRDPFKFVKGLFNQEKGGQLKATKLEVQKYLRNTYSDLEQNKVVGLPPDMPPLGQIVHEMDVRPPRWKEVEEVVRRAKASSAPGPNGVPYRVYKSAPDILKFLWRQLRIVWEKQVIPRAWRRAGGVFIPKEKESSDLSQFRKISLLNVEGKIFFSIVARRLASYLERNSLIDTAVQKAGIPGFAGCIEHTSMIWHQIQAAKTEKRDLHIIFLDLANAFGSVPHSLIWEAFDYFRVPGVVVNLVRSYFQDIKLCVSTAGFTTGWQRLEIGIMAGCTISPLAFTMAMEVIIRASKWVVGGERRQDGMRLTPIRAYMDDMTLITTTVPCMKRVLERLNKNLKWASMKIKPSKSRSISLSRGKLSDRKFVIDEEEIPIIREKSVKSLGRWYKADLKDGEQVVQFRKDVAEGLDRIDKSGLPGKLKLWCLQFGLFPRLMWPMSVYEIPLSAAEKMERLVSFYIRKWLGVPRCLSMVALYGKGILQLPVTSLVEEFKCTKVRTELLLSGSKDVVVSKVVPNPIKGRKWNPRMAVQEAEATLRHTEIVGNVQIGRGGLGLGPGKPVWSRAGPKEKRKLVVEQVRRQEEILRGAKAVAQAKQGQWLNWEGVDKKKLSWKELWSMEESSIRFLIGATYDVLPTPQNLKLWVNGDPLCALCSGTATLKHILSGCKVSLSQGRYTWRHNQVLKSLAAGIEDLRRQANLGGSKTKRVAIKFVQEGEKVGKTARRQGSLEDACDWEMQVDLGGKLVVPQEIASTKLRPDIVLWSRSRMKVYFIELTVPWEASVEEAYERKKLRYAELGAEAEQRGWKVRICPVEVGCRGFIARSVVSLVRELGASGQSVRKIVKDMSDEAARSSQWIWIRRSNGSWGPSRGST

SEQ ID NO: 4292 - protein, 1081 aa, Seriola quinqueradiata
MTSSGLFSLFAKERQCGRIDRYFLRSQSNKSDEVQRQVENHSSKDINNTATEEEEESTRGDAAETEVNRPVKERNMEQKTRVKWPRANSKKEWESVNRDLSAILGRLRGNASDRLEKMGDIIYSYGAERFGVQDRKRVERAQLVKSRRQREMEKLVKERRQLRKQWKRATEEERGGINVLQEDLRGRLAVLRRAEYLRKKRKNKEYVRTAFYRDPFKFAKGLFNQEKGGQLKATKLEVEKYLRNTYSDFEQNRVIGLPPDMPPVGKIDHEMDVRPPRWKEVEEVVRRAKASSAPGPNGVPYRVYKSAPDILKFLWRQLRIVWEKQVIPRVWRRAGGVFIPKEKESSDLSQFRMISLLNVEGKIFFSIVARRLTSYLERNSLIDTAVQKAGIPGFAGCLEHTSMIWHQIQAAKTEKRDLNVIFLDLANAFGSVPHSLIWEAFDYFKVPGVVVNLVKLYFQDIRLCLSTAGFTTGWQRLEIGIMAGCTISPLAFTMAMEVIIRASKWVVGGERRQDGVRLTPIRAYMDDMTLITTTVPCMKRILERLNKNLKWASMKIKPSKSRSISISRGKLSDRKFVIDEEEIPIIREKSVKSLGRWYKADLNDGEQVVQFRKDVAEGLDRIDKSGLPGKLKLWCLQFGLFPRLMWPMSVYEIPISTAEKMEKLVSFYIRKWLGVPRCLSTVALYGKGILQLPVTSLVEEFKCTKVRTELLLSGSKDAVVSKVVPNPIKGRKWNPRIAVQEAEAMLRHTEIVGNVQIGRGGLGLGPGKPVWSRAGPKEKRKLVVEQVRRQEELLRGAKAVAQAKQGQWVNWEGVDKKKLSWKELWSMEESSIRFLIGATYDVLPTPQNLKLWVNGDPLCSLCSGTATLKHILSGCKVSLSQGRYTWRHNQVLKSLAAGIEELRRQANLGGPKTKKGAIKFVQEGEKVVKTTRRQGSLEGACDWEMQVDLGGKLLVPQEIAITKLRPDIVLWSRSRMKVYFIELTVPWEALVEEAYERKKLRYAELGAEAEQRGWKVRICPVEVGCRGFVARSVVSLVRELGASGQSVRKIVKDMSDEAARSSQWIWMRRSNGSWGPSRGST

SEQ ID NO: 4293 - protein, 1080 aa, Seriola rivoliana
MHQGRKRCVAKERQCGRIDRYFLRSQSNKSDEVQRQVESHSSKDINNTATEGEEETTRGDAAETEVNRPVRERNMEQKTRVKWPRANSKKEWESVNRDLSLILSRLGGNASDRLEKMGDIIYSYGAERFGVQDRKRVERVQLVKSRRQREMEKLVKERRQLRKQWKRATEEERGGIDVLQEDLRGRLAVLRRAEYLRKKRKKKEYVRTAFYRDPFKFVKGLFNQEKGGQLKATKLEVQKYLRNTYSDLEQNKVVGLPPDMPPLGQIVHEMDVRPPRWKEVEEVVRRAKASSAPGPNGVPYRVYKSAPDILKFLWRQLRIVWEKQVIPRAWRRAGGVFIPKEKESSDLSQFRMISLLNVEGKIFFSIVARRLASYLERNSLIDTAVQKAGIPGFAGCIEHTSMIWHQIQAAKTEKRDLHVIFLDLANAFGSVPHSLIWEAFDYFRVPGVVVNLVRSYFQDIKLCVSTAGFTTGWQRLEIGIMAGCTISPLAFTMAMEVIIRASKWVVGGERRQDGMRLTPIRAYMDDRTLITTTVPCMKRVLERLNKNLKWASMKIKPSKSRSISLSRGKLSDRKFVIDEEEIPIIREKSVKSLGRWYKADLKDGEQVVQFRKDVAEGLDRIDKSGLPGKLKLWCLQFGLFPRLMWPMSVYEIPLSAAEKMERLVSFYIRKWLGVPRCLSTVALYGKGILQLPVTSLVEEFKCTKVRTELLLSGSKDVVVSKVVPNPIKGRKWNPRMAVQEAEATLRHTEIVGNVQIGRGGLGLGPGKPVWSRAGPKEKRKLVVEQVRRQEEILRGAKAVAQAKQGQWLNWEGVDKKKLSWKELWSMEESSIRFLIGATYDVLPTPQNLKLWVNGDPLCALCSGTATLKHILSGCKVSLSQGRYTWRHNQVLKSLAAGIEDLRRQANLGGSKTKRVAIKFVQEGEKVGKTTRRQGSLGDACDWEMQVDLGGKLVVPQEIASTKLRPDIVLWSRSRMKVYFIELTVPWEASVEEAYERKKLRYAELGAEAEQRGWKVRICPVEVGCRGFIARSVVSLVRELGASGQSVRKIVKDMSDEAARSSQWIWIRRSNGSWGPSRGST

SEQ ID NO: 4294 - protein, 1145 aa, Seriola quinqueradiata
MTMSWICDSVKDRGTDLFSRTRTGQNSFQGDVRVVGENKNDRPEGNKLQICPCGWQKVTSVRGLRMHQGRKRCVAKERQCGRIDRYFLRSQSNKSDEVQRQVENHSSKDINNTATEEEEESTRGDAAETEVNRPVKERNMEQKTRVKWPRANSKKEWESVNRDLSAILGRLRGNASDRLEKMGDIIYSYGAERFGVQDRKRFERAQLLKSRRQREMEKLVKERRQLRKQWKRATEEERGGINVLQEDLRGRLAVLRRAEYLRKKRKNKEYVRTAFYRDPFKFAKGLFNQEKGGQLKATKLEVEKYLRNTYSDFEQNRVIGLPPDMPPVGKIDHEMDVRPPRWKEVEEVVRRAKASSAPGPNGVPYRVYKSAPDILKFLWRQLRIVWEKQVIPRVWRRAGGVFIPKEKESSDLSQFRMISLLNVEGKIFFSIVARRLTSYLERNSLIDTAVQKAGIPGFAGCLEHTSMIWHQIQAAKTEKRDLNVIFLDLANAFGSVPHSLIWEAFDYFKVPGVVVNLVKLYFQDIRLCLSTAGFTTGWQRLEIGIMAGCTISPLAFTMAMEVIIRASKWVVGGERRQDGVRLTPIRAYMDDMTLITTTVPCMKRILERLNKNLKWASMKIKPSKSRSISISRGKLSDRKFVIDEEEIPIIREKSVKSLGRWYKADLNDGEQVVQFRKDVAEGLDRIDKSGLPGKLKLWCLQFGLFPRLMWPMSVYEIPISTAEKMEKLVSFYIRKWLGVPRCLSTVALYGKGILQLPVTSLVEEFKCTKVRTELLLSGSKDAVVSKVVPNPIKGRKWNPRIAVQEAEAMLRHTEIVGNVQIGRGGLGLGPGKPVWSRAGPKEKRKLVVEQVRRQEELLRGAKAVAQAKQGQWVNWEGVDKKKLSWKELWSMEESSIRFLIGATYDVLPTPQNLKLWVNGDPLCSLCSGTATLKHILSGCKVSLSQGRYTWRHNQVLKSLAAGIEELRRQANLGGPKTKKGAIKFVQEGEKVVKTTRRQGSLEGACDWEMQVDLGGKLLVPQEIAITKLRPDIVLWSRSRMKVYFIELTVPWEALVEEAYERKKLRYAELGAEAEQRGWKVRICPVEVGCRGFVARSVVSLVRELGASGQSVRKIVKDMSDEAARSSQWIWMRRSNGSWGPSRGST

SEQ ID NO: 4295 - protein, 1145 aa, Seriola rivoliana
MTMTRICDSVKDRGTDLFSRIRTGQNSSQGDMSVAGENKNVRLEGNKLQICPCGWQKVTSVRGLRMHQGRKRCVAKERQCGRIDRYFLRSQSNKSDEVQRQVESHSSKDINNTATEGEEETTRGDAAETEVNRPVRERNMEQKTRVKWPRANSKKEWESVNRDLSLILSRLGGNASDRLEKMGDIIYSYGAERFGVQDRKRVERVQLVKSRRQREMEKLVKERRQLRKQWKRATEEERGGIDVLQEDLRGRLAVLRRAEYLRKKRKKKEYVRTAFYRDPFKFVKGLFNQEKGGQLKATKLEVQKYLRNTYSDLEQNKVVGLPPDMPPLGQIVHEMDVRPPRWKEVEEVVRRAKASSAPGPNGVPYRVYKSAPDILKFLWRQLRIVWEKQVIPRAWRRAGGVFIPKEKESSDLSQFRMISLLNVEGKIFFSIVARRLASYLERNSLIDTAVQKAGIPGFAGCIEHTSMIWHQIQAAKTEKRDLHVIFLDLANAFGSVPHSLIWEAFDYFRVPGVVVNLVRSYFQDIKLCVSTAGFTTGWQRLEIGIMAGCTISPLAFTMAMEVIIRASKWVVGGERRQDGMRLTPIRAYMDDMTLITTTVPCMKRVLERLNKNLKWASMKIKPSKSRSISLSRGKLSDRKFVIDKEEIPIIREKSVKSLGRWYKADLKDGEQVVQFRKDVAEGLDRIDKSGLPGKLKLWCLQFGLFPRLMWPMSVYEIPLSAAEKMERLVSFYIRKWLGVPRCLSTVALYGKGILQLPVTSLVEEFKCTKVRTELLLSGSKDVVVSKVVPNPIKGRKWNPRMAVQEAEATLRHTEIVGNVQIGRGGLGLGPGKPVWSRAGPKEKRKLVVEQVRRQEEILRGAKAVAQAKQGQWLNWEGVDKKKLSWKELWSMEESSIRFLIGATYDVLPTPQNLKLWVNGDPLCALCSGTATLKHILSGCKVSLSQGRYTWRHNQVLKSLAAGIEDLRRQANLGGSKTKRVAIKFVQEGEKVGKTARRQGSLEDACDWEMQVDLGGKLVVPQEIASTKLRPDIVLWSRSRMKVYFIELTVPWEASVEEAYERKKLRYAELGAEAEQRGWKVRICPVEVGCRGFIARSVVSLVRELGASGQSVRKIVKDMSDEAARSSQWIWIRRSNGSWGPSRGST

SEQ ID NO: 4296 - protein, 1006 aa, Seriola quinqueradiata
MEQKTRVKWPRANSKKEWESVNRDLSAILGRLRGNASDRLEKMGDIIYSYGAERFGVQDRKRVERAQLVKSRRQREMEKLVKERRQLRKQWKRATEEERGGINVLQEDLRGRLAVLRRAEYLRKKRKNKEYVRTAFYRDPFKFAKGLFNQEKGGQLKATKLEVEKYLRNTYSDFEQNRVIGLPPDMPPVGKIDHEMDVRPPRWKEVEEVVRRAKASSAPGPNGVPYRVYKSAPDILKFLWRQLRIVWEKQVIPRVWRRAGGVFIPKEKESSDLSQFRMISLLNVEGKIFFSIVARRLTSYLERNSLIDTAVQKAGIPGFAGCLEHTSMIWHQIQAAKTEKRDLNVIFLDLANAFGSVPHSLIWEAFDYFKVPGVVVNLVKLYFQDIRLCLSTAGFTTGWQRLEIGIMAGCTISPLAFTMAMEVIIRASKWVVGGERRQDGVRLTPIRAYMDDMTLITTTVPCMKRILERLNKNLKWASMKIKPSKSRSISISRGKLSDRKFVIDEEEIPIIREKSVKSLGRWYKADLNDGEQVVQFRKDVAEGLDRIDKSGLPGKLKLWCLQFGLFPRLMWPMSVYEIPISTAEKMEKLVSFYIRKWLGVPRCLSTVALYGKGILQLPVTSLVEEFKCTKVRTELLLSGSKDAVVSKVVPNPIKGRKWNPRIAVQEAEAMLRHTEIVGNVQIGRGGLGLGPGKPVWSRAGPKEKRKLVVEQVRRQEELLRGAKAVAQAKQGQWVNWEGVDKKKLSWKELWSMEESSIRFLIGATYDVLPTPQNLKLWVNGDPLCSLCSGTATLKHILSGCKVSLSQGRYTWRHNQVLKSLAAGIEELRRQANLGGPKTKKGAIKFVQEGEKVVKTTRRQGSLEGACDWEMQVDLGGKLLVPQEIAITKLRPDIVLWSRSRMKVYFIELTVPWEALVEEAYERKKLRYAELGAEAEQRGWKVRICPVEVGCRGFVARSVVSLVRELGASGQSVRKIVKDMSDEAARSSQWIWMRRSNGSWGPSRGST

SEQ ID NO: 4297 - protein, 1145 aa, Seriola rivoliana
MTMTRICDSVKDRGTDLFSRIRTGQNSSQGDMSVAGENKNVRLEGNKLQICPCGWQKVTSVRGLRMHQGRKRCVAKERQCGRIDRYFLRSQSNKSDEVQRQVESHSSKDINNTATEGEEEMTRGDAAETEVNRPVRERNMEQKTRVKWPRANSKKEWESVNRDLSLILSRLGGNASDRLEKMGNIIYSYGAERFGVQDRKRVERVQLVKSRRQREMEKLVKERRQLRKQWKRATEEERGGIDVLQEDLRGRLAVLRRAEYLRKKRKKKEYVRTAFYRDPFKFVKGLFNQEKGGQLKATKLEVQKYLRNTYSDLEQNKVVGLPPDMPPLGQIVHEMDVRPPRWKEVEEVVRRAKASSAPGPNGVPYRVYKSAPDILKFLWRQLRIVWEKQVIPRAWRRAGGVFIPKEKESSDLSQFRMISLLNVEGKIFFSIVARRLASYLERNSLIDTAVQKAGIPGFAGCIEHTSMIWHQIQAAKTEKRDLHVIFLDLANAFGSVPHSLIWEAFDYFRVPGVVVNLVRSYFQDIKLCVSTAGFTTGWQRLEIGIMAGCTISPLAFTMAMEVIIRASKWVVGGERRQDGMRLTPIRAYMDDMTLITTTVPCMKRVLERLNKNLKWASMKIKPSKSRSISLSRGKLSDRKFVIDEEEIPIIREKSVKSLGRWYKADLKDGEQVVQFRKDVAEGLDRIDKSGLPGKLKLWCLQFGLFPRLMWPMSVYEIPLSAAEKMERLVSFYIRKWLGVPRCLSTVALYGKGILQLPVTSLVEEFKCTKVRTELLLSGSKDVVVSKVVPNPIKGRKWNPRMAVQEAEATLRHTEIVGNVQIGRGGLGLGPGKPVWSRAGPKEKRKLVVEQVRRQEEILRGAKAVAQAKQGQWLNWEGVDKKKLSWKELWSMEESSIRFLIGATYDVLPTPQNLKLWVNGDPLCALCSGTATLKHILSGCKVSLSQGRYTWRHNQVLKSLAAGIEDLRRQANLGGSKTKRVAIKFVQEGEKVGKTARRQGSLEDACDWEMQVDLGGKLVVPQEIASTKLRPDIVLWSRSRMKVYFIELTVPWEASVEEAYERKKLRYAELGAEAEQRGWKVRICPVEVGCRGFIARSVVSLVRELGASGQSVRKIVKDMSDEAARSSQWIWIRRSNGSWGPSRGST

SEQ ID NO: 4298 - protein, 1145 aa, Seriola quinqueradiata
MTMSWICDSVKDRGTDLFSRTRTGQNSFQGDVRVAGENKSDRPEGNKLQICPCGWQKVTSVRGLRMHQGRKRCVAKERQCGRIDRYFLRSQSNKSDEVQRQVENHSSKDINNTATEEEEESTRGDAAETEVNRPVKERNMEQKTRVKWPRANSKKEWESVNRDLSAILGRLRGNASDRLEKMGDIIYSYGAERFGVQDRKRGERAQLVKSRRQREMEKLVKERRQLRKQWKRATEEERGGINVLQEDLRGRLAVLRRAECLRKKRKNKEYVRTAFYRDPFKFAKGLFNREKGGQLKATKLEVEKYLRNTYSDFEQNRVIGLPPDMPPVGKIDHEMDVRPPRWKEVEEVVRRAKASSAPGPNGVPYRVHKSAPDILKFLWRQLRIVWEKQVIPRVWRRAGGVFIPKEKESSDLSQFRMISLLNVEGKIFFSIVARRLTSYLERNSLIDTAVQKAGIPGFAGCLEHTSMIWHQIQAAKTEKRDLNVIFLDLANAFGSVPHSLIWEAFDYFKVPGVVVNLVKLYFQDIRLCLSTAGFTTGWQRLEIGIMAGCTISPLAFTMAMEVIIRASKWVVGGERRQDGVRLTPIRAYMDDMTLITTTVPCMKRILERLNKNLKWASMKIKPSKSRSISISGGKLSDRKFVIDEEEIPIIREKSVKSLGRWYKADLNDGEQVVQFRKDVAEGLDRIDKSGLQGKLKLWCLQFGLFPRLMWPMSVYEIPISTAEKMEKLVSFYIRKWLGVPRCLSTVALYGKGILQLPVTSLVEEFKCTKVRTELLLSGSKDAVVSKVVPNPIKGRKWNPRIAVQEAEAMLRHTEIVGNVQIGRGGLGLGPGKPVWSRAGPKEKRKLVVEQVRRQEELLRGAKAVAQAKQGQWVNWEGVDKKKLSWKELWSMEESSIGFLIGATYDVLPTPQNLKLWVNGDPLCSLCSGTATLKHILSGCKVSLSQGRYTWRHNQVLKSLAAGIEELRRQANVGGPKTKKGAIKFVQEGEKVVKTTRRQGSLEGACDWEMQVDLGGKLLVPQEIAITKLRPDIVLWSRSRMKVYFIELTVPWEALVEEAYERKKLRYAELGAEAEQRGWKVRICPVEVGCRGFAARSVVSLVRELGASGQSVRKIVKDMSDEAARSSQWIWMRRSNGSWGPSRGST

SEQ ID NO: 4299 - protein, 1145 aa, Seriola rivoliana
MTMTWICDSVKDRGTDLFSRIRTGQNSSQGDMSVAGENKNVRLEGNKLQICPCGWQKVTSVRGLRMHQGRKRCVAKERQCGRIDRYFLRSQSNKSDEVQRQVESHSSKDINNTATEGEEETTRGDAAETEVNRPVRERNMEQKTRVKWPRANSKKEWESVNRDLSLILSRLGGNASDRLEKMGNIIYSYGAERFGVQDRKRVERVQLVKSRRQREMEKLVKERRQLRKQWKRATEEERGGIDVLQEDLRGRLAVLRRAEYLRKKRKKKEYVRTAFYRDPFKFVKGLFNQEKGGQLKATKLEVQKYLRNTYSDLEQNKVVGLPPDMPPLGQIVHEMDVRPPRWKEVEEVVRRAKASSAPGPNGVPYRVYKSAPDILKFLWRQLRIVWEKQVIPRAWRRAGGVFIPKEKESSDLSQFRMISLLNVEGKIFFSIVARRLASYLERNSLIDTAVQKAGIPGFAGCIEHTSMIWHQIQAAKTEKRDLHVIFLDLANAFGSVPHSLIWEAFDYFRVPRVVVNLVRSYFQDIKLCVSTAGFTTGWQRLEIGIMAGCTISPLAFTMAMEVIIRASKWVVGGERRQDGMRLTPIRAYMDDMTLITTTVPCMKRVLERLNKNLKWASMKIKPSKSRSISLSRGKLSDRKFVIDEEEIPIIREKSVKSLGRWYKADLKDGEQVVQFRKDVAEGLDRIDKSGLPGKLKLWCLQFGLFPRLMWPMSVYEIPLSAAEKMERLVSFYIRKWLGVPRCLSTVALYGKGILQLPVTSLVEEFKCTKVRTELLLSGSKDVVVSKVVPNPIKGRKWNPRMAVQEAEATLRHTEIVGNVQIGRGGLGLGPGKPVWSRAGPKEKRKLVVEQVRRQEEILRGAKAVAQAKQGQWLNWEGVDKKKLSWKELWSMEESSIRFLIGATYDVLPTPQNLKLWVNGDPLCALCSGTATLKHILSGCKVSLSQGRYTWRHNQVLKSLAAGIEDLRRQANLGGSKTKRVAIKFVQEGEKGGKTARRQGSLEDACDWEMQVDLGGKLVVPQEIASTKLRPDIVLWSRSRMKVYFIELTVPWEASVEEAYERKKLRYAELGAEAEQRGWKVRICPVEVGCRGFVARSVVSLVRELGASGQSVRKIVKDMSDEAARSSQWIWIRRSNGSWGLSRGST

SEQ ID NO: 4300 - protein, 966 aa, Seriola rivoliana
MGDIIYSYGAERFGVQDRKRVERVQLVKSRRQREMEKLVKERRQLRKQWKRATEEERGGIDVLQEDLRGRLAVLRRAEYLRKKRKKKEYVRTAFYRDPFKFVKGLFNQEKGGQLKATKLEVQKYLRNTYSDLEQNKVVGLPPDMPPLGQIVHEMDVRPPRWKEVEEVVRRAKASSAPGPNGVPYRVYKSAPDILKFLWRQLRIVGEKQVIPRAWRRAGGVFIPKEKESSDLSQFRMISLLNVEGKIFFSIVARRLASYLERNSLIDTAVQKAGIPGFTGCIEHTSMIWHQIQAAKTEKRDLHVIFLDLANAFGSVPHSLIWEAFDYFRVPGVVVNLVRSYFQDIKLCVSTAGFTTGWQRLEIGIMAGCTISPLAFTMAMEVIIRASKWVVGGERRQDGMRLTPIRAYMDDMTLITTTVPCMKRVLERLNKNLKWASMKIKPSKSRSISLSRGKLSDRKFVIDEEEIPIIREKSVKSLGRWYKADLNDGEQVVQFRKDVAEGLDRIDKSGLPGKLKLWCLQFGLFPRLMWPMSVYEIPLSAAEKMERLVSFYIRKWLGVPRCLSTVALYGKGILQLPVTSLVEEFKCTKVRTELLLSGSKDVVVSKVVPNPIKGRKWNPRMAVQEAEATLRHTEIVGNVQIGRGGLGLGPGKPVWSRAGPKEKRKLVVEQVRRQEEILRGAKAVAQAKQGQWLNWEGVDKKKLSWKELWSMEESSIRFLIGATYDVLPTPQNLKLWVNGDPLCALCSGTATLKHILSGCKVSLSQGRYTWRHNQVLKSLAAGIEDLRRQANLGGSKTKRVAIKFVQEGEKVGKTARRQGSLEDACDWEMQVDLGGKLVVPQEIASTKLRPDIVLWSRSRMKVYFIELTVLWEASVEEAYERKKPRYVELGAEAEQRGWKVRICPVEVGCRGFVARSVVSLVRELGASGQSVRKIVKDMSDEAARSSQWIWIRRNNGSWGPSRGEHLG

SEQ ID NO: 4301 - protein, 1100 aa, Seriola quinqueradiata
MTMSWICDSVKDRGTDLFSRTRTGQNSFQGDVRVAGENKSERPEGNKLQICPCGWQKVTSVRGLRMHQGRKRCVAKERQCGRIDRYFLRSQSNKSDEVQRQVENHSSKDINNTATEEEEESTRGDAAETEVNRPVKERNMEQKTRVKWPRANSKKEWESVNRDLSAILGRLRGNASDRLEKMGDIIYSYGAERFGVQDRKRGERAQLVKSRRQREMEKLVKERRQLRKQWKRATEEERGGINVLQEDLRGRLAVLRRAECLRKKRKNKEYVRTAFYRDPFKFAKGLFNREKGGQLKATKLEVEKYLRNTYSDFEQNRVIGLPPDMPPVGKIDHEMDVRPPRWKEVEEVVRRAKASSAPGPNGVPYRVHKSAPDILKFLWRQLRIVWEKQVIPRVWRRAGGVFIPKEKESSDLSQFRMISLLNVEGKIFFSIVARRLTSYLERNSLIDTAVQKAGIPGFAGCLEHTSMIWHQIQAAKTEKRDLNVIFLDLANAFGSVPHSLIWEAFDYFKVPGVVVNLVKLYFQDIRLCLSTAGFTTGWQRLEIGIMAGCTISPLAFTMAMEVIIRASKWVVGGERRQDGVRLTPIRAYMDDMTLITTTVPCMKRILERLNKNLKWASMKIKPSKSRSISISGGKLSDRKFVIDEEEIPIIREKSVKSLGRWYKADLNDGEQVVQFRKDVAEGLDRIDKSGLQGKLKLWCLQFGLFPRLMWPMSVYEIPISTAEKMEKLVSFYIRKWLGVPRCLSTVALYGKGILQLPVTSLVEEFKCTKVRTELLLSGSKDAVVSKVVPNPIKGRKWNPRIAVQEAEAMLRHTEIVGNVQIGRGGLGLGPGKPVWSRAGPKEKRKLVVEQVRRQEELLRGAKAVAQAKQGQWVNWEGVDKKKLSWKELWSMEESSIGFLIGATYDVLPTPQNLKLWVNGDPLCSLCSGTATLKHILSGCKVSLSQGRYTWRHNQVLKSLAAGIEELRRQANVGGPKTKKGAIKFVQEGEKVVKTTRRQGSLEGACDWEMQVDLGGKLLVPQEIAITKLRPDIVLWSRSRMKVYFIELTVPWEALVEEAYERKKLRYAELGAEAEQRGWKVRICPVEVGCRGFEQGLLSLW

SEQ ID NO: 4302 - protein, 930 aa, Seriola quinqueradiata
MEKLVKERRQLRKQWKRATEEERGGINVLQEDLRGRLAVLRRAEYLRKKRKNKEYVRTAFYRDPFKFAKGLFNQEKGGQLKATKLEVEKYLRNTYSDFEQNRVIGLPPDMPPVGKIDHEMDVRPPRWKEVEEVVRRAKASSAPGPNGVPYRVYKSAPDILKFLWRQLRIVWEKQVIPRVWRRAGGVFIPKEKESSDLSQFRMISLLNVEGKIFFSIVARRLTSYLERNSLIDTAVQKAGIPGFAGCLEHTSMIWHQIQAAKTEKRDLNVIFLDLANAFGSVPHSLIWEAFDYFKVPGVVVNLVKLYFQDIRLCLSTAGFTTGWQRLEIGIMAGCTISPLAFTMAMEVIIRASKWVVGGERRQDGVRLTPIRAYMDDMTLITTTVPCMKRILERLNKNLKWASMKIKPSKSRSISISRGKLSDRKFVIDEEEIPIIREKSVKSLGRWYKADLNDGEQVVQFRKDVAEGLDRIDKSGLPGKLKLWCLQFGLFPRLMWPMSVYEIPISTAEKMEKLVSFYIRKWLGVPRCLSTVALYGKGILQLPVTSLVEEFKCTKVRTELLLSGSKDAVVSKVVPNPIKGRKWNPRIAVQEAEAMLRHTEIVGNVQIGRGGLGLGPGKPVWSRAGPKEKRKLVVEQVRRQEELLRGAKAVAQAKQGQWVNWEGVDKKKLSWKELWSMEESSIRFLIGATYDVLPTPQNLKLWVNGDPLCSLCSGTATLKHILSGCKVSLSQGRYTWRHNQVLKSLAAGIEELRRQANLGGPKTKKGAIKFVQEGEKVVKTTRRQGSLEGACDWEMQVDLGGKLLVPQEIAITKLRPDIVLWSRSRMKVYFIELTVPWEALVEEAYERKKLRYAELGAEAEQRGWKVRICPVEVGCRGFVARSVVSLVRELGASGQSVRKIVKDMSDEAARSSQWIWMRRSNGSWGPSRGST

SEQ ID NO: 4303 - protein, 1145 aa, Seriola quinqueradiata
MTMSWICDSVKDRGTDLFSRTRTGQNSFQGDVRVAGENKNDRPEGNKLQICPCGWQKVTSVRGLRMHQGRKRCVAKERQCGRIDRYFLRSQSNKSDEVQRQVENHSSKDINNTATEEEEESTRGDAAETEVNRPVKERNMEQKTRVKWPRANSKKEWESVNRDLSAILGRLRGNASDRLEKMGDIIYSYGAERFGVQDRKRVERAQLVKSRRQREMEKLVKERRQLRKQWKRATEEERGGINVLQEDLRGRLAVLRRAEYLRKKRKNKEYVRTAFYRDPFKFAKGLFNQEKGGQLKATKLEVEKYLRNTYSDFEQNRVIGLPPDMPPVGKIDHEMDVRPPRWKEVEEVVRRAKASSAPGPNGVPYRVYKSAPDILKFLWRQLRIVWEKQVIPRVWRRAGGVFIPKEKESSDLSQFRMISLLNVEGKIFFSIVARRLTSYLERNSLIDTAVQKAGIPGFAGCLEHTSMIWHQIQAAKTEKRDLNVIFLDLANAFGSVPHSLIWEAFDYFKVPGVVANLVKLYFQDIRLCLSTAGFTTGWQRLEIGIMAGCTISPLAFTMAMEVIIRASKWVVGGERRQDGVRLTPIRAYMDDMTLITTTVPCMKRILERLNKNLKWASMKIKPSKSRSISISRGKLSDRKFVIDEEEIPIIREKSVKSLGRWYKADLNDGEQVVQFRKDVAEGLDRIDKSGLPGKLKLWCLQFGLFPRLMWPMSVYEIPISTAEKMEKLVSFYIRKWLGVPRCLSTVALYGKGILQLPVTSLVEEFKCTKVRTELLLSGSKDAVVSKVVPNPIKGRKWNPRIAVQEAEAMLRHTEIVGNVQIGRGGLGLGPGKPVWSRAGPKEKRKLVVEQIRRQEELLRGAKAVAQAKQGQWVNWEGVDKKKLSWKELWSMEESSIRFLIGATYDVLPTPQNLKLWVNGDPLCSLCSGTATLKHILSGCKVSLSQGRYTWRHNQVLKSLAAGIEELRRQANLGGPKTKKGAIKFVQEGEKIVKTTRRQGSLEGACDWEMQVDLGGKLLVPQEIAITKLRPDIVLWSRSRMKVYFIELTVPWEALVEEAYERKKLRYAELGAEAEQRGWKVRICPVEVGCRGFVARSVVSLVRELGASGQSVRKIVKDMSDEAARSSQWIWMRRSNGSWGPSRGST

SEQ ID NO: 4304 - protein, 1145 aa, Seriola quinqueradiata
MTMSWICDSVKDRGTDLFSRTRTGQNSFQGDVRVAGENKNDRPEGNKLQICPCGWQKVTSVRGLRMHQGRKRCVAKERQCGRIDRYFLRSQSNKSDEVQRQVENHSSKDINNTATEEEEESTRGDAAETEVNRPVKERNMEQKTRVKWPRANSKKEWESVNRDLSAILGRLRGNASDRLEKMGDIIYSYGAERFGVQDRKRVERAQLVKSRRQREMEKLVKERRQLRKQWKRATEEERGGINVLQEDLRGRLAVLRRAEYLRKKRKNKEYVRTAFYRDPFKFAKGLFNQEKGGQLKATKLEVEKYLRNTYSDFEQNRVIGLPPDMPPVGKIDHEMDVRPPRWKEVEEVVRRAKASSAPGPNGVPYRVYKSAPDILKFLWRQLRIVWEKQVIPRVWRRAGGVFIPKEKESSDLSQFRMISLLNVEGKIFFSIVARRLTSYLERNSLIDTAVQKAGIPGFAGCLEHTSMIWHQIQAAKTEKRDLNVIFLDLANAFGSVPHSLIWEAFDYFKVPGVVANLVKLYFQDIRLCLSTAGFTTGWQRLEIGIMAGCTISPLAFTMAMEVIIRASKWVVGGERRQDGVRLTPIRAYMDDMTLITTTVPCMKRILERLNKNLKWASMKIKPSKSRSISISRGKLSDRKFVIDEEEIPIIREKSVKSLGRWYKADLNDGEQVVQFRKDVAEGLDRIDKSGLPGKLKLWCLQFGLFPRLMWPMSVYEIPISTAEKMEKLVSFYIRKWLGVPRCLSTVALYGKGILQLPVTSLVEEFKCTKVRTELLLSGSKDAVVSKVVPNPIKGRKWNPRIAVQEAEAMLRHTEIVGNVQIGRGGLGLGPGKPVWSRAGPKEKRKLVVEQVRRQEELLRGAKAVAQAKQGQWVNWEGVDKKKLSWKELWSMEESSIRFLIGATYDVLPTPQNLKLWVNGDPLCSLCSGTATLKHILSGCKVSLSQGRYTWRHNQVLKSLAAGIEELRRQANLGGPKTKKGAIKFVQEGEKVVKTTRRQGSLEGACDWEMQVDLGGKLLVPQEIAITKLRPDIVLWSRSRMKVYFIELTVPWEALVEEAYERKKLRYAELGAEAEQRGWKVRICPVEVGCRGFVARSVVSLVRELGASGQSVRKIVKDMSDEAARSSQWIWMRRSNGSWGPSRGST

SEQ ID NO: 4305 - protein, 1187 aa, Seriola quinqueradiata
MAPKMSPFSLFLHTHTHTQYFVQLFNHSDSQADYTATDTGTDMTMSWICDSVKDRGTDLFSRTRTGQNSFQGDVRVAGENKNDRPEGNKLQICPCGWQKVTSVRGLRMHQGRKRCVAKERQCGRIDRYFLRSQSNKSDEVQRQVENHSSKDINNTATEEEEESTRGDAAETEVNRPVKERNMEQKTRVKWPRANSKKEWESVNRDLSAILGRLRGNASDRLEKMGDIIYSYGAERFGVQDRKRVERAQLVKSRRQREMEKLVKERRQLRKQWKRATEEERGGINVLQEDLRGRLAVLRRAEYLRKKRKNKEYVRTAFYRDPFKFAKGLFNQEKGGQLKATKLEVEKYLRNTYSDFEQNRVIGLPPDMPPVGKIDHEMDVRPPRWKEVEEVVRRAKASSAPGPNGVPYRVYKSAPDILKFLWRQLRIVWEKQVIPRVWRRAGGVFIPKEKESSDLSQFRMISLLNVEGKIFFSIVARRLTSYLERNSLIDTAVQKAGIPGFAGCLEHTSMIWHQIQAAKTEKRDLNVIFLDLANAFGSVPHSLIWEAFDYFKVPGVVVNLVKLYFQDIRLCLSTAGFTTGWQRLEIGIMAGCTISPLAFTMAMEVIIRASKWVVGGERRQDGVRLTPIRAYMDDMTLITTTVPCMKRILERLNKNLKWASMKIKPSKSRSISISRGKLSDRKFVIDEEEIPIIREKSVKSLGRWYKADLNDGEQVVQFRKDVAEGLDRIDKSGLPGKLKLWCLQFGLFPRLMWPMSVYEIPISTAEKMEKLVSFYIRKWLGVPRCLSTVALYGKGILQLPVTSLVEEFKCTKVRTELLLSGSKDAVVSKVVPNPIKGRKWNPRIAVQEAEAMLRHTEIVGNVQIGRGGLGLGPGKPVWSRAGPKEKRKLVVEQVRRQEELLRGAKAVAQAKQGQWVNWEGVDKKKLSWKELWSMEESSIRFLIGATYDVLPTPQNLKLWVNGDPLCSLCSGTATLKHILSGCKVSLSQGRYTWRHNQVLKSLAAGIEELRRQANLGGPKTKKGAIKFVQEGEKVVKTTRRQGSLEGACDWEMQVDLGGKLLVPQEIAITKLRPDIVLWSRSRMKVYFIELTVPWEALVEEAYERKKLRYAELGAEAEQRGWKVRICPVEVGCRGFVARSVVSLVRELGASGQSVRKIVKDMSDEAARSSQWIWMRRSNGSWGPSRGST

SEQ ID NO: 4306 - protein, 1145 aa, Seriola quinqueradiata
MTMSWICDSVKDRGTDLFSRTRTGQNSFQGDVRVAGENKNDRPEGNKLQICPCGWQKVTSVRGLRMHQGRKRCVAKERQCGRIDRYFLRSQSNKSDEVQRQVENHSSKDINNTATEEEEESTRGDAAETEVNRPVKERNMEQKTRVKWPRANSKKEWESVNRDLSAILGRLRGNASDRLEKMGDIIYSYGAERFGVQDRKRVERAQLVKSRRQREMEKLVKERRQLRKQWKRATEEERGGINVLQEDLRGRLAVLRRAEYLRKKRKNKEYVRTAFYRDPFKFAKGLFNQEKGGQLKATKLEVEKYLRNTYSDFEQNRVIGLPPDMPPVGKIDHEMDVRPPRWKEVEEVVRRAKASSAPGPNGVPYRVYKSAPDILKFLWRQLRIVWEKQVIPRVWRRAGGVFIPKEKESSDLSQFRMISLLNVEGKIFFSIVARRLTSYLERNSLIDTAVQKAGIPGFAGCLEHTSMIWHQIQAAKTEKRDLNVIFLDLANAFGSVPHSLIWEAFDYFKVPGVVVNLVKLYFQDIRLCLSTAGFTTGWQRLEIGIMAGCTISPLAFTMAMEVIIRASKWVVGGERRQDGVRLTPIRAYMDDMTLITTTVPCMKRILERLNKNLKWASMKIKPSKSRSISISRGKLSDRKFVIDEEEIPIIREKSVKSLGRWYKADLNDGEQVVQFRKDVAEGLDRIDKSGLPGKLKLWCLQFGLFPRLMWPMSVYEIPISTAEKMEKLVSFYIRKWLGVPRCLSTVALYGKGILQLPVTSLVEEFKCTKVRTELLLSGSKDAVVSKVVPNPIKGRKWNPRIAVQEAEAMLRHTEIVGNVQIGRGGLGLGPGKPVWSRAGPKEKRKLVVEQVRRQEELLRGAKAVAQAKQGQWVNWEGVDKKKLSWKELWSMEESSIRFLIGATYDVLPTPQNLKLWVNGDPLCSLCSGTATLKHILSGCKVSLSQGRYTWRHNQVLKSLAAGIEELRRQANLGGPKTKKGAIKFVQEGEKIVKTTRRQGSLEGACDWEMQVDLGGKLLVPQEIAITKLRPDIVLWSRSRMKVYFIELTVPWEALVEEAYERKKLRYAELGAEAEQRGWKVRICPVEVGCRGFVARSVVSLVRELGASGQSVRKIVKDMSDEAARSSQWIWMRRSNGSWGPSRGST

SEQ ID NO: 4307 - protein, 1145 aa, Seriola quinqueradiata
MTMSWICDSVKDRGTDLFSRTRTGQNSFQGDVRVAGENKNDRPEGNKLQICPCGWQKVTSVRGLRMHQGRKRCVAKERQCGRIDRYFLRSQSNKSDEVQRQVENHSSKDINNTATEEEEESTRGDAAETEVNRPVKERNMEQKTRVKWPRANSKKEWESVNRDLSAILGRLRGNASDRLEKMGDIIYSYGAERFGVQDRKRVERAQLVKSRRQREMEKLVKERRQLRKQWKRATEEERGGINVLQEDLRGRLAVLRRAEYLRKKRKNKEYVRTAFYRDPFKFAKGLFNQEKGGQLKATKLEVEKYLRNTYSDFEQNRVIGLPPDMPPVGKIDHEMDVRPPRWKEVEEVVRRAKASSAPGPNGVPYRVYKSAPDILKFLWRQLRIVWEKQVIPRVWRRAGGVFIPKEKESSDLSQFRMISLLNVEGKIFFSIVARRLTSYLERNSLIDTAVQKAGIPGFAGCLEHTSMIWHQIQAAKTEKRDLNVIFLDLANAFGSVPHSLIWEAFDYFKVPGVVVNLVKLYFQDIRLCLSTAGFTTGWQRLEIGIMAGCTISPLAFTMAMEVIIRASKWVVGGERRQDGVRLTPIRAYMDDMTLITTTVPCMKRILERLNKNLKWASMKIKPSKSRSISISRGKLSDRKFVIDEEEIPIIREKSVKSLGRWYKADLNDGEQVVQFRKDVAEGLDRIDKSGLPGKLKLWCLQFGLFPRLMWPMSVYEIPISTAEKMEKLVSFYIRKWLGVPRCLSTVALYGKGILQLPVTSLVEEFKCTKVRTELLLSGSKDAVVSKVVPNPIKGRKWNPRIAVQEAEAMLRHTEIVGNVQIGRGGLGLGPGKPVWSRAGPKEKRKLVVEQVRRQEELLRGAKAVAQAKQGQWVNWEGVDKKKLSWKELWSMEESSIRFLIGATYDVLPTPQNLKLWVNGDPLCSLCSGTATLKHILSGCKVSLSQGRYTWRHNQVLKSLAAGIEELRRQANLGGPKTKKGAIKFVQEGEKVVKTTRRQGSLEGACDWEMQVDLGGKLLVPQEIAITKLRPDIVLWSRSRMKVYFIELTVPWEALVEEAYERKKLRYAELGAEAEQRGWKVRICPVEVGCRGFVARSVVSLVRELGASGQSVRKIVKDMSDEAARSSQWIWMRRSNGSWGPSRGST

SEQ ID NO: 4308 - protein, 1144 aa, Seriola quinqueradiata
MTMSWICDSVKDRGTDLFSRTRTGQNSFQGDVRVAGENKNDRPEGNKLQICPCGWQKVTSVRGLRMHQGRKRCVAKERQCGRIDRYFLRSQSNKSDEVQRQVENHSSKDINNTATEEEEESTRGDAAETEVNRPVKERNMEQKTRVKWPRANSKKEWESVNRDLSAILGRLRGNASDRLEKMGDIIYSYGAERFGVQDRKRVERAQLVKSRRQREMEKLVKERRQLRKQWKRATEEERGGINVLQEDLRGRLAVLRRAEYLRKKRKNKEYVRTAFYRDPFKFAKGLFNQEKGGQLKATKLEVEKYLRNTYSDFEQNRVIGLPPDMPPVGKIDHEMDVRPPRWKEVEEVVRRAKASSAPGPNGVPYRVYKSAPDILKFLWRQLRIVWEKQVIPRVWRRAGGVFIPKEKESSDLSQFRMISLLNVEGKIFFSIVARRLTSYLERNSLIDTAVQKAGIPGFAGCLEHTSMIWHQIQAAKTEKRDLNVIFLDLANAFGSVPHSLIWEAFDYFKVPGVVVNLVKLYFQDIRLCLSTAGFTTGWQRLEIGIMAGCTISPLAFTMAMEVIIRASKWVVGGERRQDGVRLTPIRAYMDDMTLITTTVPCMKRILERLNKNLKWASMKIKPSKSRSISISRGKLSDRKFVIDEEEIPIIREKSVKSLGRWYKADLNDGEQVVQFRKDVAEGLDRIDKSGLPGKLKLWCLQFGLFPRLMWPMSVYEIPISTAEKMEKLVSFYIRKWLGVPRCLSTVALYGKGILQLPVTSLVEEFKCTKVRTELLLSGSKDAVVSKVVPNPIKGRKWNPRIAVQEAEAMLRHTEIVGNVQIGRGGLGLGPGKPVWSRAGPKEKRKLVVEQVRRQEELLRGAKAVAQAKQGQWVNWEGVDKKKLSWKELWSMEESSVRFLIGATYDVLPTPQNLKLWVNGDPLCSLCSGTATLKHILSGCKVSLSQGRYTWRHNQVLKSLAAGIEELRRQANLGGPKTKKGAIKFVQEGEKVKTTRRQGSLEGACDWEMQVDLGGKLVVPQEIAITKLRPDIVLWSRSRMKVYFIELTVPWEALVEEAYERKKLRYAELGAEAEQRGWKVRICPVEVGCRGFVARSVVSLVRELGASGQSVRKIVKDMSDEAARSSQWIWMRRSNGSWGPSRGST

SEQ ID NO: 4309 - protein, 1080 aa, Seriola quinqueradiata
MHQGRKRCVAKERQCGRIDRYFLRSQSNKSDEVQRQVENHSSKDINNTATEEEEESTRGDAAETEVNRPVKERNMEQKTRVKWPRANSKKEWESVNRDLSAILGRLRGNASDRLEKMGDIIYSYGAERFGVQDRKRVERAQLVKSRRQREMEKLVKERRQLRKQWKRATEEERGGINVLQEDLRGRLAVLRRAEYLRKKRKNKEYVRTAFYRDPFKFAKGLFNQEKGGQLKATKLEVEKYLRNTYSDFEQNRVIGLPPDMPPVGKIDHEMDVRPPRWKEVEEVVRRAKASSAPGPNGVPYRVYKSAPDILKFLWRQLRIVWEKQVIPRVWRRAGGVFIPKEKESSDLSQFRMISLLNVEGKIFFSIVARRLTSYLERNSLIDTAVQKAGIPGFAGCLEHTSMIWHQIQAAKTEKRDLNVIFLDLANAFGSVPHSLIWEAFDYFKVPGVVVNLVKLYFQDIRLCLSTAGFTTGWQRLEIGIMAGCTISPLAFTMAMEVIIRASKWVVGGERRQDGVRLTPIRAYMDDMTLITTTVPCMKRILERLNKNLKWASMKIKPSKSRSISISRGKLSDRKFVIDEEEIPIIREKSVKSLGRWYKADLNDGEQVVQFRKDVAEGLDRIDKSGLPGKLKLWCLQFGLFPRLMWPMSVYEIPISTAEKMEKLVSFYIRKWLGVPRCLSTVALYGKGILQLPVTSLVEEFKCTKVRTELLLSGSKDAVVSKVVPNPIKGRKWNPRIAVQEAEAMLRHTEIVGNVQIGRGGLGLGPGKPVWSRAGPKEKRKLVVEQVRRQEELLRGAKAVAQAKQGQWVNWEGVDKKKLSWKELWSMEESSIRFLIGATYDVLPTPQNLKLWVNGDPLCSLCSGTATLKHILSGCKVSLSQGRYTWRHNQVLKSLAAGIEELRRQANLGGPKTKKGAIKFVQEGEKIVKTTRRQGSLEGACDWEMQVDLGGKLLVPQEIAITKLRPDIVLWSRSRMKVYFIELTVPWEALVEEAYERKKLRYAELGAEAEQRGWKVRICPVEVGCRGFVARSVVSLVRELGASGQSVRKIVKDMSDEAARSSQWIWMRRSNGSWGPSRGST

SEQ ID NO: 4310 - protein, 821 aa, Seriola rivoliana
MPPLGQIVHEMDVRPPRWKEVEEVVRRAKASSAPGPNGVPYRVYKSAPDILKFLWRQLRIVWEKQVIPRAWRRAGGVFIPKEKESSDLSQFRMISLLNVEGKIFFSIVAQRLASYLERNSLIDTGVQKAGIPGFAGCLEHTSMIWHQIQAAKTEKRDLHVIFLDLANAFGSVPHSLIWEAFDYFRVPGVVVNLVRSYFQDIKLCVSTAGFTTGWQRLEIGIMAGCTISPLAFTMAMEVIIRASKWVVGGERRQDGMRLTPIRAYMDDMTLITTTVPCMKRVLERLNKNLKWASMKIKPSKSRSISLSRGKLSDRKFVIDEEEIPIIREKSVKSLGRWYKADLKDGEQVVQFRKDVAEGLDRIDKSGLPGKLKLWCLQFGLFPRLMWPMSVYEIPLSAAEKMERLVSFYIRKWLGVPRCLSTVALYGKGILQLPVTSLVEEFKCTKVRTELLLSGSKDVVVSKVVPNPIKGRKWNPRMAVQEAEATLRHTEIVGNVQIGRGGLGLGPGKPVWSRAGPKEKRKLVVEQVRRQEEILRGAKAVAQAKQGQWLNWEGVDKKKLSWKELWSMEESSIRFLIGATYDVLPTPQNLKLWVNGDPLCALCSGTATLKHILSGCKVSLSQGRYTWRHNQVLKSLAAGIEDLRRQANLGGSKTKRVAIKFVQEGEKVGKTARRQGSLEDACDWEMQVDLGGKLVVPQEIASTKLRPDIVLWSRSRMKVYFIELTVPWEASVEEAYERKKLRYAELGAEAEQQGWKVRICPVEVGCRGFIARSVVSLVRELGASGQSVRKIVKDMSDEAARSSQWIWIRRSNGSWGPSRGST

SEQ ID NO: 4311 - protein, 821 aa, Seriola rivoliana
MPPLGQIVHEMDVRPPRWKEVEEVVRRAKASSAPGPNGVPYRVYKSAPDILKFLWRQLRIVWEKQVIPRTWRRAGGVFIPKEKESSDLSQFRMISLLNVEGKIFFSIVARRLASYLERNSLIDTAVQKAGIPGFAGCIEHTSMIWHQIQAAKTEKRDLHVIFLDLANAFGSVPHSLIWEAFDYFRVPGVVVNLVRSYFQDIKLCVSTAGFTTGWQRLEIGIMAGCTISPLAFTMAMEVIIRASKWVVGGERRQDGMRLTPIRAYMDDMTLITTTVPCMKRVLERLNKNLKWASMKIKPSKSRSISLSRGKLSDRKFVIDEEEIPIIREKSVKSLGRWYKADLKDGEQVVQFRKDVAEGLDRIDKSGLPGKLKLWCLQFGLFPRLMWPMSVYEIPLSAAEKMERLVSFYIRKWLGVPRCLSTVALYGKGILQLPVTSLVEEFKCTKVRTELLLSGSKDVVVSKVVPNPIKGRKWNPRMAVQEAEATLRHTEIVGNVQIGRGGLGLGPGKPVWSRAGPKEKRKLVVEQVRRQEEILRGAKAVAQAKQGQWLNWEGVDKKKLSWKELWSMEESSIRFLIGATYDVLPTPQNLKLWVNGDPLCALCSGTATLKHILSGCKVSLSQGRYTWRHNQVLKSLAAGIEDLRRQANLGGSKTKRGAIKFVQEGEKVGKTARRQGSLEDACDWEMQVDLGGKLVVPQEIASTKLRPDIVLWSRSRMKVYFIELTVPWEASVEEAYERKKLRYAELGAEAEQRGWKVRICPVEVGCRGFIASSVVSLVRELGASGQSVRKIVKDMSDEAARSSQWIWIRRSNGSWGPSRGST

SEQ ID NO: 4312 - protein, 930 aa, Seriola dumerili
MEKLVKERRQLRKQWKRATEEERGGIDVLQEDLRGRLTVLRRAEYLRKKRKKKEYVRTAFYRDPFKFVKGLFNQEKGGQLKATKSEVEKYLRNTYSDLEQNRVVGLPPDMQPLGKKDHEMDVRPPRWKEVEEVVRRAKASSAPGPNGVPYRVYKSAPDILKFLWRQLRIVWEKQVIPRAWRRAGGVFIPKEKESSDLSQFRMISLLNVEGKIFFSIVARRLASYLERNSLIDTAVQKAGIPGFAGCIEHTSMIWHQIQAAKTEKRDLHVIFLDLANAFGSVPHSLIWEAFDYFRVPGVVVKLVRSYFQDIRLCLSTAGFTTGWQRLEIGIMAGCTISPLAFTMAMEVIIRASKWVVGGERRQDGMRLTPIRAYMDDMTLITTTVPCMKRVLERLNKNLKWASMKIKPSKSRSISISRGKLSDRKFVIDEEEIPIIREKSVKSLGRWYKADLNDGEQVVQFRKDVAEGLDRIDKSGLPGKLKLWCLQFGLFPRLMWPLSVYEIPLSAAEKMERLVSFYIRKWLGVPRCLSTVALYGKGILQLPVTSLVEEFKCTKVRTELLLSGSKDVVVSKVVPNPIKGRKWNPRMAVQEAEATLRHTEIVGNVQIGRGGLGLGPGKPVWSRAGPKEKRKLVVEQVRRQEEILRGAKAVAQAKQGQWLNWEGVDKKKLSWKELWSMEESSIRFLIGATYDVLPTPQNLKLWVNGDPLCSLCSGTATLKHILSGCKVSLSQGRYTWRHNQVLKSLAAGIEDLRRQANLGGSKIKRVAIKFVQEGEKVGKTARRQGSLEDACDWEMQVDLGGKLVVPQEIASTKLRPDIVLWSRSRMKVYFIELTVPWEASVEEAYERKKLRYVELGAEAEQRGWKVRICPVEVGCRGFVARSVVSLVRELGGSGQSVRKIVKDMSDEAVRSSQWIWMRRSNGSWGPSRGST

SEQ ID NO: 4313 - protein, 930 aa, Seriola rivoliana
MEKLVKERRQLRKQWKRATEEEGGGIDVLQEDLRGRLAVLRRAEYLRKKRKKKEYVRTAFYRDPFKFVKGLFNQEKGGQLKATKLEVQKYLRNTYSDLEQNKVVGLPPDMPPLGQIVHEMDVRPPRWKEVEEVVRRAKASSAPGPNGVPYRVYKSAPDILKFLWRQLRIVWEKQVIPRAWRRAGGVFIPKEKESSDLSQFRMISLLNVEGKIFFSIVARRLASYLERNSLIDTAVQKAGIPGFAGCIEHTSMIWHQIQAAKTEKRDLHVIFLDLANTFGSVPHSLIWEAFDYFRVPGVVVNLVRSYFQDIKLCLSTAGFTTGWQRLEIGIMAGCTISPLAFTMAMEVIIRASKWVVGGERRQDGMRLTPIRAYMDDMTLITTTVPCMKRVLERLNKNLKWASMKIKPSKSRSISLSRGKLSDRKFVIDEEEIPIIREKSVKSLGRWYKADLKDGEQVVQFRKDVAEGLDRIDKSGLPGKLKLWCLQFGLFPRLMWPMSVYEIPLSAAEKMERLVSFYIRKWLGVPRCLSTVALYGKGILQLPVTSLVEEFKCTKVRTELLLSGSKDVVVSKVVPNPIKGRKWNPRMAVQEAEATLRHTEIVGNVQIGRGGLGLGPGKPVWSRAGPKKKRKLVVEQVRRQEEILRGAKAVAQAKQGQWLNWEGVDKKKLSWKELWSMEESSIRFLIGATYDVLPTPQNLKLWVNGDPLCALCSGTATLKHILSGCKVSLSQGRYTWRHNQVLKSLAAGIEDLRRQANLGGSKTKRVAIKFVQEGEKVGKTARRQGSLEDACDWEMQVDLGGKLVVPQEIASTKLRPDIVLWSRSRMKVYFIELTVPWEASVEEAYERKKLRYAELGAEAEQRGWKVRICPVEVGCRGFIARSVVSLVRELGASGQSVRKIVKDMSDEAARSSQWIWIRRSNGSWGPSRGST

SEQ ID NO: 4314 - protein, 821 aa, Seriola dumerili
MPPLGQIVHEMDVRPPRWKEVEEVVRRAKASSAPGPNGVPYRVYKSAPDILKFLWRQLRIVWEKQVIPRAWRRAGGVFIPKEKESSDLSQFRMISLLNVEGKIFFSIVARRLASYLERNSLIDTAVQKAGIPGFAGCIEHTSMIWHQIQAAKTEKRDLHVIFLDLANAFGSVPHSLIWEAFDYFRVPGVVVNLVRSYFQDIKLCVSTAGFTTGWQRLEIGIMAGCTISPLAFTMAMEVIIRASKWVVGGERRQDGMRLTPIRAYMDDMTLITTTVPCMKRVLERLNKNLKWASMKIKPSKSRSISLSRGKLSDRKFVIDEEEIPIIREKSVKSLGRWYKADLKDGEQVVQFRKDVAEGLDRIDKSGLPGKLKLWCLQFGLFPRLMWPMSVYEIPLSAAEKMERLVSFYIRKWLGVPRCLSTVALYGKGILQLPVTSLVEEFKCTKVRTELLLSGSKDVVVSKVVPNPIKGRKWNPRMAVQEAEATLRHTEIVGNVQIGRGGLGLGPGKPVWSRAGPKEKRKLVVEQVRRQEEILRGAKAVAQAKQGQWLNWEGVDKKKLSWKELWSMEESSIRFLIGATYDVLPTPQNLKLWVNGDPLCALCSGTATLKHILSGCKVSLSQGRYTWRHNQVLKSLAAGIEDLRRQANLGGSKTKRVAIKFVQEGEKVGKTARRQGSLEDACDWEMQVDLGGKLVVPQEIASTKLRPDIVLWSRSRMKVYFIELTVPWEASVEEAYERKKLRYVELEAEAEQRGWKVRICPVEVGCRGFVARSVVSLVRELGASGQSVRKIVKDMSDEAARSSQWIWIRRSNGSWGPSRGST

SEQ ID NO: 4315 - protein, 1006 aa, Seriola rivoliana
MEQKTRVKWPRANSKKEWESVNRDLSVILSRLGGNESDRLEKMEDIIYSYGAERFGVQDRKRVEKVQLVKSRRQREMEKLVKERRQLRKQWKRATEEERGGINVLQEDLRGRLAVLRRAEYLRKKRKKKEYVRTAFYRDPFKFVKGLFNQEKGGQLKATKLEVQKYLRNTYSDLEQNKVVGLPPDMPPLGQIVHEMDVRPPRWKEFEEVVRRAKASSAPGPNGVPYRVYKSTPDILKFLWRQLRIVWEKQVIPRAWRRAGGVFIPKEKESSDLSQFRMISLLNVEGKIFFSIVARRLASYLERNSLIDTAVQKAGIPGFAGCLEHTSMIWHQIQAAKTEKRDLHVIFLDLANAFGSVPHSLIWEAFDYFRVPGVVVNLVRSYFQDIKLCVSTAGFTTGWQRLEIGIMAGCTISPLAFTMAMEVIIRVSKWVVGGERRQDGMHLTPIRAYMDDMTLITTTVPCMKRVLERLNKNLKWASMKIKPSKSRSISLSRGKLSDRKFVIDEEEIPIIREKSVKSLGRWYKADLKDGEQVVQFRKDVAEGLDRIDKSGLPGKLKLWCLQFGLFPRLMWPMSVYEIPLSAAEKMERLVSFYIRKWLGVPRCLSTVALYGKGILQLPVTSLVEEFKCTKVRTELLLSGSKDVVVSKVVPNPIKGRKWNPRMAVQEAEATLRHTEIVGNVQIGRGGLGLGPGKPVWSRAGPKEKRKLVVEQVRRQEEILRGAKAVAQAKQGQWLNWEGVDKKKLSWKELWSMEESSIRFLIGATYDVLPTPQNLKLWVNGDPLCALCSGTATLKHILSGCKVSLSQGRYTWRHNQVLKSLAAGIEDLRRQANLGGSKTKRVAIKFVQEGEKVGKTARRQGSLEDACDWEMQVDLGGKLVVPQEIASTKLRPDIVLWSRSRMKVYFIELTVPWEASVEEAYERKKLRYAELGAEAEQRGWKVRICPVEVGCRGFIARSVVSLVRELGASGQSVRKIVKDMSDEAARSSQWIWIRRSNGSWGPSRGST

SEQ ID NO: 4316 - protein, 1080 aa, Seriola dumerili
MHQGRKRCVAKERQCGYIDRYFLRSQSNKSDEVQWQVENHSSKDINNTATEGEEETTRGDAAETEVNRPVRERNMEQKTRVKWPRANSKKEWESVNRDLSVILRRLGGNASDRLEKMGDIIYSYGAERFGVQDRKRVERAQLVKSRRQREIEKLVKERRQLRKQWKRATEEERGEINVLQEDLRGRLAVLRRAEYLRKKRKKKEYVRTAFYRDPFKFVKGLFNQEKGGQLKATKLEVQKYLRNTYSDLEQNKVVGLPPDMPPLGQIVHEMDVRPPRWKEVEEVVRRAKASSAPGPNGVPYRVYKSAPDILKFLWRQLRIVWEKQVIPRAWRRAGGVFIPKEKESSDLSQFRMISLLNVEGKIFFSIVARRLASYLERNSLIDTAVQKAGIPGFAGCIEHTSMIWHQIQAAKTEKRDLHVIFLDLANAFGSVPHSLIWEAFDYFRVPGVVVNLVRSYFQDIKLCVSTAGFTTGWQRLEIGIMAGCTISPLAFTMAMEVIIRASKWVVGGERRQDGMRLTPIRAYMDDMTLITTTVPCMKRVLERLNKNLKWASMKIKPSKSRSISLSRGKLSDRKFVIDEEEIPIIREKSVKSLGRWYKADLKDGEQVVQFRKDVAEGLDRIDKSGLPGKLKLWCLQFGLFPRLMWPMSVYEIPLSAAEKMERLVSFYIRKWLGVPRCLSTVALYGKGILQLPVTSLVEEFKCTKVRTELLLSGSKDVVVSKVVPNPIKGRKWNPRMAVQEAEATLRHTEIVGNVQIGRGGLGLGPGKPVWSRAGPKEKRKLVVEQVRRQEEILRGAKAVAQAKQGQWLNWEGVDKKKLSWKELWSMEESSIRFLIGATYDVLPTPQNLKLWVNGDPLCALCSGTATLKHILSGCKVSLSQGRYTWRHNQVLKSLAAGIEDLRRQANLGGSKTKRVAIKFVQEGEKVGKTARRQGSLEDACDWEMQVDLGGKLVVPQEIASTKLRPDIVLWSRSRMKVYFIELTVPWEASVEEAYERKKLRYVELGAEAEQRGWKVRICPVEVGCRGFVARSVVSLVRELGGSGQSVRKIVKDMSDEAARSSQWIWIRRSNGSWGPSRGST

SEQ ID NO: 4317 - protein, 1145 aa, Seriola rivoliana
MTMTRICDSVKDRGTDLFSRIRTGQSSSQGDMSVAGENKNVRLEGNKLQICPCGWQKVTSVRGLRMHQGRKRCVAKERQCGHIDRYFLRSRSNKSDEVQRQVESHSSKDINNTATEGEEETTRGDAAETEVNRPVRERNMEQKTRVKWPRANSKKEWESVNRDLSLILSRLGGNASDRLEKMGDIIYSYGAERFGVQDRKRVERVQLVKSRRQREMEKLVKERRQLRKQWKRATEEERGGIDVLQEDLRGRLAVLRRAEYLRKKRKKKEYVRTAFYRDPFKFVKGLFNQEKGGQLKATKLEVQKYLRNTYSDLKQNKVVGLPPDMPPLGQIVHEMDVRPPRWKEVEEVVRRAKASSAPGPNGVPYRVYKSAPDILKFLWRQLRIVWEKQVIPRAWRRAGGVFIPKEKESSDLSQFRMISLLNVEGKIFFSIVARRLASYLERNSLIDTGVQKAGIPGFAGCIEHTSMIWHQIQAAKTEKRDLHVIFLDLANAFGSVPHSLIWEAFDYFRVPGVVVNLVRSYFQDIKLCISTAGFTTGWQRLEIGIMAGCTISPLAFTMAMEVIIRASKWVVGGERRQGGMRLTPIRAYMDDMTLITTTVPCMKRVLERLNKNLKWASMKIKPSKSRSISLSRGKLSDRKFVIDEEEIPIIREKSVKSLGRWYKADLKDGEQVVQFRKDVAEGLDRIDKSGLPGKLKLWCLQFGLFPRLMWPMSVYEIPLSAAEKMERLVSFYIRKWLGVPRCLSTVALYGKGILQLPVTSLVEEFKCTKVRTELLLSGSKDVVVSKVVPNPIKGRKWNPRMAVQEAEATLRHTEIVGNVQIGRGGLGLGPGKPVWSRAGPKEKRKLVVEQVRRQEETLRGAKAVAQAKQGQWLNWEGVDKKKLSWKELWSMEESSIRFLIGATYDVLPTPQNLKLWVNGDPLCALCSGTATLKHILSGCKVSLSQGRYTWRHNQVLKSLAAGIEDLRRQANLGGSKTKRGAIKFVQEGEKVGKTARRQGSLEDACDWEMQVDLGGKLVVPQEIASTKLRPDIVLWSRSRMKVYFIELTVPWEASVEEVYERKKLRYAELGAEAEQRGWKVRICPVEVGCRGFVARSVVSLVRELGASGQSVRKIVKDMSDEAARSSQWIWIRRSNGSWGPSRGST

SEQ ID NO: 4318 - protein, 956 aa, Seriola dumerili
MGDIIYSYGAERFGVQDRKRVERAQLVKSRRQREMEKLVKERRQLRKQWKRATVLQEELRGRLAVLRRAEYLRKKRKKKEYVRTAFYRDAFKFVKGLFNQEKGGQLKATKLEVEKYLRNTYSDFEQNRVVGLPPDMPPVGKIDCEMDVRPPRWKEVEEVVRRAKASSAPGPNGVPYRVYKSAPDILKFLWKQLRIVWEKQVIPRAWRRAGGVFIPKEKESSDLSQFRMISLLNVEGKIFFSIVARRLASYLERNSLIDTAVQKAGIPGFAGCLEHTSMIWHQIQAAKTEKRDLHVIFLDLANAFGSVPHSLIWEAFDYFRVPGVVVNLVRSYFQDIKLCVSTAGFTTGWQRLEIGIMAGCTISPLAFTMAMEVIIRASKWVVGGERRQDGMRLTPIRAYMDDMTLITTTVPCMKRVLERLNKNLKWASMKIKPSKSRSISISRGKLSDRKFVIDEEEIPIIREKSVKSLGRWYKADLKDGEQVVQFRKDVAEGLDRIDKSGLPGKLKLWCLQFGLFPRLMWPMSVYEIPLSAAEKMERLVSFYIRKWLGVPRCLSTVALYGKGILQLPVTSLVEEFKCTKVRTELLLSGSKDVVVSKVVPNPIKGRKWNPRMAVQEAEATLRHTEIVGNVQIGRGGLGLGPGKPVWSRAGPKEKRKLVVEQVRRQEEILRGAKAVAQAKQGQWLNWEGVDKKKLSWKELWSMEESSIRFLIGATYDVLPTPQNLKLWVNGDPLCALCSGTATLKHILSGCKVSLSQGRYTWRHNQVLKSLAAGIEDLRRQANLGGSKTKRVAIKFVQEGEKVGKTARRQGSLEDACDWEMQVDLGGKLVVPQEIASTKLRPDIVLWSRSRMKVYFIELTVPWEASVEEAYERKKLRYAELGAEAEQRGWKVRICPVEVGCRGFVARSVVSLVRELGASGQSVRKIVKDMSDEAARSSQWIWIRRSNGSWGPSRGST

SEQ ID NO: 4319 - protein, 891 aa, Seriola rivoliana
MMDNNILSLDYPKDTPSHRQSFPEHYIMIKGLFNQEKGGQLKATKLEVQKYLRNTYSDLEQNKVVGLPPDMPPLGQIVHEMDVRPPRWKEVEEVVRRAKASSAPGPNGVPYRVYKSAPDILKFLWRQLRIVWEKQVIPRAWRRAGGVFIPKEKESSDLSQFRMISLLNVEGKIFFSIVARRLASYLERNSLIDTAVQKAGIPGFAGCIEHTSMIWHQIQAAKTEKRDLHVIFLDLANAFGSVPHSLIWEAFDYFRVPGVVVNLVRSYFQDIKLCVSTAGFTTGWQRLEIGIMAGCTISPLAFTMAMEVIIRASKWVVGGERRQDGMRLTPIRAYMDDMTLITTTVPCMKRVLERLNKNLKWASMKIKPSKSRSISLSRGKLSDRKFVIDEEEIPIIREKSVKSLGRWYKADLKDGEQVVQFRKDVAEGLDRIDKSGLPGKLKLWCLQFGLFPRLMWPMSVYEIPLSAAEKMERLVSFYIRKWLGVPRCLSTVALYGKGILQLPVTSLVEEFKCTKVRTELLLSGSKDVVVSKVVPNPIKGRKWNPRMAVQEAEATLRHTEIVGNVQIGRGGLGLGPGKPVWSRAGPKEKRKLVVEQVRRQEEILRGAKAVAQAKQGQWLNWEGVDKKKLSWKELWSMEESSIRFLIGATYDVLPTPQNLKLWVNGDPLCALCSGTATLKHILSGCKVSLSQGRYTWRHNQVLKSLAAGIEDLRRQANLGGSKTKRVAIKFVQEGEKVGKTARRQGSLEDACDWEMQVDLGGKLVVPQEIASTKLRPDIVLWSRSRMKVYFIELTVPWEASVEEAYERKKLRYTELGAEAAQRGWKVRICPVEVGCRGFIARSVVSLVRELGASGQSVRKIVKDMSDEAARSSQWIWIRRSNGSWGPSRGST

SEQ ID NO: 4320 - protein, 1114 aa, Seriola dumerili
MSGAGENKNVRLEGNKLQTCPCGWQKVTSVRGLRMHQGRKRCVAKERQCGRIDRYFVRSQSNKSDEVQRQVESHSSKDINNTATEGEEETTRGDAAETEVNRPVRERNMEQKTRVKWPRANSKKEWESVNRDLSLILSRLGGNASDRLEKMGDIIYSYGAERFGVQDRKRVERVQLVKSRRQREMEKLVKERRQLRKQWKRATEEERGGIDVLQEDLRGRLAVLRRAEYLRKKRKKKEYVRTAFYRDPFKFVKGLFNQEKGGQLKATKLEVQKYLRNTYSDLEQNKVVGLPPDMPPLGQIVHEMDVRPPRWKEVEEVVRRAKASSAPGPNGVPYRVYKSAPDILKFLWRQLRIVWEKQVIPRAWRRAGGVFIPKEKESSDLSQFRMISLLNVEGKIFFSIVARRLASYLERNSLIDTAVQKAGIPGFAGCIEHTSMIWHQIQAAKTEKRDLHVIFLDLANAFGSVPHSLIWEAFDYFRVPGVVVNLVRSYFQDIKLCVSTAGFTTGWQRLEIGIMAGCTISPLAFTMAMEVIIRASKWVVGGERRQDGMRLTPIRAYMDDMTLITTTVPCMKRVLERLNKNLKWASMKIKPSKSRSISLSRGKLSDRKFVIDEEEIPIIREKSVKSLGRWYKADLKDGEQVVQFRKDVAEGLDRIDKSGLPGKLKLWCLQFGLFPRLMWPMSVYEIPLSAAEKMERLVSFYIRKWLGVPRCLSTVALYGKGILQLPVTSLVEEFKCTKVRTELLLSGSKDVVVSKVVPNPIKGRKWNPRMAVQEAEATLRHTEIVGNVQIGRGGLGLGPGKPVWSRAGPKEKRKLVVEQVRRQEEILRGAKAVAQAKQGQWLNWEGVDKKKLSWKELWSMEESSIRFLIGATYDVLPTPQNLKLWVNGDPLCALCSGTATLKHILSGCKVSLSQGRYTWRHNQVLKSLAAGIEDLRRQANLGGSKTKRVAIKFVQEGEKVGKTARRQGSLEDACDWEMQVDLGGKLVVPQEIASTKLRPDIVLWSRSRMKVYFIELTVPWEASVEEAYERKKLRYVELGAEAEQRGWKVRICPVEVGCRGFVARSVVSLVRELGASGQSVRKIVKDMSDEAARSSQWIWIRRSNGSWGPSRGST

SEQ ID NO: 4321 - protein, 1030 aa, Seriola rivoliana
MWVSIFKRLKEDLEDVARQKATLVQNHKWSDIENLPRPDKLVFETWNAIPDTYINMKKYAFDRLEKMGNIIYSYGAERFGVQDRKRVERVQLVKSRRQREMEKLVKERRQLRKQWKRATEEERGGIDVLQEDLRGRLAVLRRAEYLRKKRKKKEYVRTAFYRDPFKFVKGLFNQEKGGQLKATKLEVQKYLRNTYSDLEQNKVVGLPPDMPPLGQIVHEMDVRPPRWKEVEEVVRRAKASSAPGPNGVPYRVYKSTPDILKFLWRQLRIVWEKQVIPRAWRRAGGVFIPKEKESSDLSQFRMISLLNVEGKIFFSIVARRLASYLERNSLIDTAVQKAGIPGFAGCIEHTSMIWHQIQAAKTEKRDLHVIFLDLANAFGSVPHSLIWEAFDYFRVPGVVVNLVRSYFQDIKLCVSTAGFTTGWQRLEIGIMAGCTISPLAFTMAMEVIIRASKWVIGGERRQDGMRLTPIRAYMDDMTLITTTVPCMKRVLERLNKNLKWASMKIKPSKSRSISLSRGKLSDRKFVIDEEEIPIIREKSVKSLGRWYKADLKDGEQVVQFRKDVAEGLDRIDKSGLPGKLKLWCLQFGLFPRLMWPMSVYEIPLSAAEKMERLVSFYIRKWLGVPRCLSTVALYGKGILQLPVTSLVEEFKCTKVRTEPLLSGSKDVVVSKVVPNPIKGRKWNPRMAVQEAEATLRHTEIVGNVQIGRGGLGLGPGKPVWSRAGPKEKRKLVVEQVRRQEEILRGAKAVAQAKQGQWLNWEGVDKKKLSWKELWSMEESSIRFLIGATYDVLPTPRNLKLWVNGDLLCALCSGTATLKHILSGCKVSLSQGRYTWRHNHVLKSLAAGIEDLRRQANLGGSKTKRVAIKFVQEGEKVGKTARRQGSLEDACDWEMQVDLGGKLVVPQEIASTKLRPDIVLWSRSRMKVYFIELTVPWEASVEEAYERKKLRYAELGAEAEQRGWKVRICPVEVGCRGFIARSVVSLVRELGASGQSVRKIVKDMSDEAARSSQWIWIRRSNGSWGPSRGST

SEQ ID NO: 4322 - protein, 1145 aa, Seriola dumerili
MTMTRICDSVKDRGTDLFSRIRTGQNSSQGDMSVAGENKNVRLEGNKLQICHCGWQKVTSVRGLRMHQGRKRCVAKERQCGRIDRYFLRSQSNKSDEVQRQVESHSSKDINNTATEGEEETTRGDAAETEVNRPVRERNMEQKTRVKWPRANSKKEWESVNRDLSLILSRLGGNASDRLEKMGDIIYSYGAERFGVQDRKRVERVQLVKSRRQREMEKLVKERRQLRKQWKRATEEERGGIDVLQEDLRGRLAVLRRAEYLRKKRKKKEYVRTAFYRDPFKFVKGLFNQEKGGQLKATKLEVQKYLRNTYSDLEQNKVVGLPPDMPPLGQIVHEMDVRPPRWKEVEEVVRRAKASSAPGPNGVPYRVYKSAPDILKFLWRQLRIVWEKQVIPRAWRRAGGVFIPKEKESSDLSQFRMISLLNVEGKIFFSIVARRLASYLERNSLIDTAVQKAGIPGFAGCIEHTSMIWHQIQAAKTEKRDLHVIFLDLANAFGSVPHSLIWEAFDYFRVPGVVVNLVRSYFQDIKLCVSTAGFTTGWQRLEIGIMAGCTISPLAFTMAMEVIIRASKWVVGGERRQDGMRLTPIRAYMDDMTLITTTVPCMKRVLERLNKNLKWASMKIKPSKSRSISLSRGKLSDRKFVIDEEEIPIIREKSVKSLGRWYKADLKDGEQVVQFRKDVAEGLDRIDKSGLPGKLKLWCLQFGLFPRLMWPMSVYEIPLSAAEKMERLVSFYIRKWLGVPRCLSTVALYGKGILQLPVTSLVEEFKCTKVRTELLLSGSKDVVVSKVVPNPIKGRKWNPRMAVQEAEATLRHTEIVGNVQIGRGGLGLGPGKPVWSRAGPKEKRKLVVEQVRRQEEILRGAKAVAQAKQGQWLNWEGVDKKKLSWKELWSMEESSIRFLIGATYDVLPTPQNLKLWVNGDPLCALCSGTATLKHILSGCKVSLSQGRYTWRHNQVLKSLAAGIEDLRRQANLGGSKTKRVAIKFVQEGEKVGKTARRQGSLEDACDWEMQVDLGGKLVVPQEIASTKLRPDIVLWSRSRMKVYFIELTVPWEASVEEAYERKKLRYAELGAEAEQRGWKVRICPVEVGCRGFVARSVVSLVRELGASGQSVRKIVKDMSDEAARSSQWIWIRRSNGSWGPSRGST

SEQ ID NO: 4323 - protein, 883 aa, Seriola rivoliana
MGKLVKERRQLRKQWKRATEEERGGINVLQEDLRGRLAVLRRAEYLRKKRTKKEYVRTAFYRDPFKFVKGLFNQEKGGQLKATKLEVEMYLRNTYSDFEQNRVVGLPPDMPPLGKIDHEMDVRPPRWKEVEEVVRRAKASSAPGPNGVPYRVYKSAPDILKFLWRQLRIVWEKQFIPRAWRRAGGVFIPKEKESSDLSQFRMISLLNVEGKIFFSVVARRLASYLERNSLILQYRRQEYQGFAGCLEHTSMIWHQIQSAKTEKRDLHVIFLDLANAFGSVPHSLIWEAFDYFRVPGVVVNLVRSYFQDIRLCLSTAGFTTGWQRLEIGIMAGCTISPLAFTMAMEVIIRASKWVVGGERRQDGMRFTPIRAYMNDITLITTTVPCMKRVLERLNKNLKWASLKIKPSKSRSISLSRGKLSDRKFVIDEEEIPIIREKSVKSLGRWCKADLTDGEQVVQFQKDVAEGLARIDKSGLPGKLKLWCLQFGLFPRLMWPLSVYEIPLSAAEKMERLVSFYIRKWLGVPRCLSTVALYGKGILQLPVINLVEEFKCTKVRTELLLSGSKDVVVSKVVPNPIKGRKWNPRMAVQEAEATLRHTEIVGNVQIGRGGLGLGPGKPVWSRAGSKEKRKLVEEQVCRQEEILSGAKAVAEAKQGQWLNWEGVDKKKLSWKELWSMEESSIRFLIGATYDVLPTPQNLKLWVNGDPLCSLCSGTATLKHILSGCKFSLSQGRYTWRHNQVLKSLAAGIEDLRRQANLGGSKIKRVAIKFVQEGEKVSKTARRQGSLEDACDWVMQVDLGGRLVVPQEIASTKLRPDIVLWSRSRMRVYFIELTVPWEASVVEAYERKKLRYVELRAEAEQQGWKVRICSVEVGCRGFVARSVVS

SEQ ID NO: 4324 - protein, 1075 aa, Seriola dumerili
MTMSWICDSVKDRGTDLFSRTIARQSSSQGDVSVAGENKNVRLEGNKLQICPCGWQKVTSVRGLRMHQGRKKCVAKERQCGRIDRYFLRSQSNKSDEVQRQVENHSSKDINNTATEGEEETTRGDAADIEVNRPVRERNMEQKARVKWPRANSKKEWESVNRDLSVILSRLGGNASDRLEKMGDIIYSYGAERFGVQDRKRVERVQLVKSRRQREMEKLVKERRQLRKQWKRATEEERGGIDVLQEDLRGRLAVLRRAEYLRKKRKKKEYVRTAFYRDPFKFVKGLFNQEKGGQLKATKSEVEKYLRNTYSDFEQNRVVGLPPDMPPLGKIDHEMDVRPPRWKEVEEVVRRAKASSAPGPNGVPYRVYKSAPDILKFLWRQLRIVWEKQVIPRAWRRAGGVFIPKEKESSDLSQFRMISLLNVEGKIFFSIVARRLASYLERNSLIDTAVQKAGIPGFAGCIEHTSMIWHQIQAAKTEKRDLHVIFLDLANAFGSVPHSLIWEAFDYFRVPGVVVKLVRSYFQDIRLCLSTAGFTTGWQRLEIGIMAGCTISPLAFTMAMEVIIRASKWVVGGERRQDGMRLTPIRAYMDDMTLITTTVPCMKRVLERLNKNLKWASMKIKPSKSRSISISRGKLSDRKFVIDEEEIPIIREKSVKSLGRWYKADLNDGEQVVQFRKDVAEGLDRIDKSGLPGKLKLWCLQFGLFPRLMWPLSVYEIPLSAAEKMERLVSFYIRKWLGVPRCLSTVALYGKGILQLPVTSLVEEFKCTKVRTELLLSGSKDVVVSKVVPNPIKGRKWNPRMAVQEAEATLRHTEIVGNVQIGRGGLGLGPGKPVWSRAGPKEKRKLVVEQVRRQEEILRGAKAVAQAKQGQWLNWEGVDKKKLSWKELWSMEESSIRFLIGATYDVLPTPQNLKLWVNGDLLCSLCSGTATLKHILSGCKVSLSQGRYTWRHNQVLKSLAAGIEDLRRQANLGGSKIKRVAIKFVQEGEKVSKTARRQGSLEDACDWEMQVDLGGKLVVPQEIASTKLRPDIVLWSRSRMRVYFIELTVPWEASVEEAYERKKLRYVELGAEAEQ

SEQ ID NO: 4325 - protein, 1148 aa, Seriola dumerili
MDMTMTRICDSVKDRGTDLFSRIRTGQSSSQGDMSVAGENKNVRLEGNKLQICPCGWQKVTVSVRGLRMHQGRKRCVAKERQCGRIDRYFLRSQSNKSDEVQRQVESHSSKDINNTATEGEEETTRGDAAETEVNRPVRERNMEQKTRVKWPRANSKKEWESVNRDLSLILSRLGGNASDRLEKMGDIIYSYGAERFGVQDRKRVERVQLVKSRRQREMEKLVKERRQLRKQWKRATEEERGGIDVLQEDLRGRLAVLRRAEYLRKKRKKKEYVRTAFYRDPFKFVKGLFNQEKGGQLKATKLEVQKYLRNTYSDLEQNKVVGLPPDMPPLGQIVHEMDVRPPRWKEVEEVVRRAKASSAPGPNGVPYRVYKSAPDILKFLWRQLRIVWEKQVIPRAWRRAGGVFIPKEKESSDLSQFRMISLLNVEGKIFFSIVARRLASYLERNSLIDTAVQKAGIPGFAGCIEHTSMIWHQIQAAKTEKRDLHVIFLDLANAFGSVPHSLIWEAFDYFRVPGVVVNLVRSYFQDIKLCVSTAGFTTGWQRLEIGIMAGCTISPLAFTMAMEVIIRASKWVVGGERRQDGMRLTPIRAYMDDMTLITTTVPCMKRVLERLNKNLKWASMKIKPSKSRSISLSRGKLSDRKFVIDEEEIPIIREKSVKSLGRWYKADLKDGEQVVQFRKDVAEGLDRIDKSGLPGKLKLWCLQFGLFPRLMWPMSVYEIPLSAAEKMERLVSFYIRKWLGVPRCLSTVALYGKGILQLPVTSLVEEFKCTKVRTELLLSGSKDVVVSKVVPNPIKGRKWNPRMAVQEAEATLRHTEIVGNVQIGRGGLGLGPGKPVWSRAGPKEKRKLVVEQVRRQEEILRGAKAVAQAKQGQWLNWEGVDKKKLSWKELWSMEESSIRFLIGATYDVLPTPQNLKLWVNGDPLCALCSGTATLKHILSGCKVSLSQGRYTWRHNQVLKSLAAGIEDLRRQANLGGSKTKRVAIKFVQEGEKVGKTARRQGSLEDACDWEMQVDLGGKLVVPQEIASTKLRPDIVLWSRSRMKVYFIELTVPWEASVEEAYERKKLRYAELGAEAEQRGWKVRICPVEVGCRGFVARSVVSLVRELGASGQSVRKIVKDMSDEAARSSQWIWIRRSNGSWGPSRGST

SEQ ID NO: 4326 - protein, 1080 aa, Seriola rivoliana
MHQGRKRCVAKERQCGRIDRYFLRSKSNKSDEVQRQVESHSSKDINNTATEGEEETTRGDAAETEVNRPVRERNMEQKTRVKWPRANSKKEWESVNRDLSLILSRLGGNASDRLEKMGDIISSYGAERFGVQDRKRVERVQLVKSRRQREMEKLVKERRQLRKQWKRATEEERGGIDVLQEDLRDRLAVLRRAEYLRKKRKKKEYVRTAFYRDPFKFVKGLFNQEKGGQLKATKLEVQKYLRNTYSDLKQNKVVGLPPDMPPLGKIVHEMDVRPPRWKEVEEVVRRAKASSAPGPNGVPYRVYKSAPDILKFLWRQLRRVWEKQVIPRAWRRAGGVFIPKEKESSDLSQFRMISLLNVEGKIFFSIVARRLASYLERNSLIDTGVQKAGIPGFAGCIEHTSMIWHQIQAAKTEKRDLHVIFLDLANAFGSVPHSLIWEAFDYFRVPGVVVNLVRSYFQDIKLCVSTAGFTTGWQRLEIGIMAGCTISPLAFTMAMEVIIRASKWVVGGERRQGGMRLTPIRAYMDDMTLITTTVPCMKRVLERLNKNLKWASMKIKPSKSRSISLSRGKLSDRKFVIDEEEIPIIREKSVKSLGRWYKADLKDGEQVVQFRKDVAEGLDRIDKSGLPGKLKLWCLQFGLFPRLMWPMSVYEIPLSAAEQMERLVSFYIRKWLGVPRCLSTVALYGKGILQLSVTSLVEEFKCTKVRTELLLSGSKDVVVSKVVPNPIPGRKWNPRMAVQEAEATLRHTEIVGNVQIGRGGLGLGPGKPVWSRAGPKEKRKLVVEQGRRQEEILRGAKAVAQAKQGQWLNWEGVDKKKLSWKELWSMEESSIRFLIGATYDVLPTPQKLKLWVNGDPLCALCSGTATLKHILSGCKVSLSQGRYTWRHNPVLKSLAAGIEDLRRQANLGGSKTKRGAIKFVQEGEKVGKTARRQGSVEDACDWEMQVDLGGKLVVPQEIASTKLRPDIVLWSRSRMKVYFIALTVPWEASVEEAYERKKLRYAELGAEAEQRGWKVRICPVEVGCRGFVARSVVSLVRELGASGQSVRKIVKDMSDEAARSSQWIWIRRSHGSWGPSRGST

SEQ ID NO: 4327 - protein, 1145 aa, Seriola dumerili
MTMTRICDSVKDRGTDLFSRIRTGQNSSQGDMSVAGENKNVRLEGNKLQICPCGWQKVTSVRGLRMHQGRKRCVAKERQCGRIDRYFLRSQSNKSDEVQRQVESHSSKDINNTATEGEEETTRGDAAETEVNRPVRERNMEQKTRVKWPRANSKKEWESVNRDLSLILSRLGGNASDRLEKMGDIIYSYGAERFGVQDRKRVERVQLVKSRRQREMEKLVKERRQLRKQWKRATEEERGGIDVLQEDLRGRLAVLRRAEYLRKKRKKKEYVRTAFYRDPFKFVKGLFNQEKGGQLKATKLEVQKYLRNTYSDLEQNKVVGLPPDMPPLGQIVHEMDVRPPRWKEVEEVVRRAKASSAPGPNGVPYRVYKSAPDILKFLWRQLRIVWEKQVIPRAWRRAGGVFIPKEKESSDLSQFRMISLLNVEGKIFFSIVARRLASYLERNSLIDTAVQKAGIPGFAGCIEHTSMIWHQIQAAKTEKRDLHVIFLDLANAFGSVPHSLIWEAFDYFRVPGVVVNLVRSYFQDIKLCVSTAGFTTGWQRLEIGIMAGCTISPLAFTMAMEVIIRASKWVVGGERRQDGMRLTPIRAYMDDMTLITTTVPCMKRVLERLNKNLKWASMKIKPSKSRSISLSRGKLSDRKFVIDEEEIPIIREKSVKSLGRWYKADLKDGEQVVQFRKDVAEGLDRIDKSGLPGKLKLWCLQFGLFPRLMWPMSVYEIPLSAAEKMERLVSFYIRKWLGVPRCLSTVALYGKGILQLPVTSLVEEFKCTKVRTELLLSGSKDVVVSKVVPNPIKGRKWNPRMAVQEAEATLRHTEIVGNVQIGRGGLGLGPGKPVWSRAGPKEKRKLVVEQVRRQEEILRGAKAVAQAKQGQWLNWEGVDKKKLSWKELWSMEESSIRFLIGATYDVLPTPQNLKLWVNGDPLCALCSGTATLKHILSGCKVSLSQGRYTWRHNQVLKSLAAGIEDLRRQANLGGSKTKRVAIKFVQEGEKVGKTARRQGSLEDACDWEMQVDLGGKLVVPQEIASTKLRPDIVLWSRSRMKVYFIELTVPWEASVEEAYERKKLRYAELGAEAEQRGWKVRICPVEVGCRGFVARSVVSLVRELGASGQSVRKIVKDMSDEAARSSQWIWIRRSNGSWGPSRGST

SEQ ID NO: 4328 - protein, 1145 aa, Seriola rivoliana
MTMTRICDSVKDRGTDLFSRIRTGQSSSQGDMSVAGENKNVRLEGNKLQICPCGWQKVTSVRGLRMHQGRKRCVAKERQCGRIDRYFLRSQSNKSDEVQRQVESHSSKDINNTATEGEEETTRGDAAETEVNRPVRERNMEQKTRVKWPRANSKKEWESVNRDLSLILSRLGGNASDRLEKMGDIIYSYGAERFGVQDRKRVERVQLVKSRRQREMEKLVKERRQLRKQWKRATEEERGGIDVLQEDLRGRLAVLRRAEYLRKKRKKKEYVRTAFYRDPFKFVKGLFNQEKGGQLKATKLEVQKYLRNTYSDLEQNKVVGLPPDMPPLGQIVHEMDVRPPRWKEVEEVVRRAKASSAPGPNGVPYRVYKSAPDILKFLWRQLRIVWEKQVIPRAWRRAGGVFIPKEKESSDLSQFRMISLLNVEGKIFFSIVARRLASYLERNSLIDTGVQKAGIPGFAGCIEHTSMIWHQIQAAKTEKRDLHVIFLDLANAFGSVPHSLIWEAFDYFRVPGVVVNLVRSYFQDIKLCISTAGFTTGWQRLEIGIMAGCTISPLAFTMAMEVIIRASKWVVGGERRQGGMRLTPIRAYMDDMTLITTTVPCMKRVLERLNKNLKWASMKIKPSKSRSISLSRGKLSDRKFVIDEEEIPIIREKSVKSLGRWYKADLKDGEQVVQFRKDVAEGLDRIDKSGLPGKLKLWCLQFGLFPRLMWPMSVYEIPLSAAEKMERLVSFYIRKWLGVPRCLSTVALYGKGILQLPVTSLVEEFKCTKVRTELLLSGSKDVVVSKVVPNPIKGRKWNPRMAVQEAEATLRHTEIVGNVQIGRGGLGLGPGKPVWSRAGPKEKRKLVVEQVRRQEETLRGAKAVAQAKQGQWLNWEGVDKKKLSWKELWSMEESSIRFLIGATYDVLPTPQNLKLWVNGDPLCALCSGTATLKHILSGCKVSLSQGRYTWRHNQVLKSLAAGIEDLRRQANLGGSKTKRVAIKFVQEGEKVGKTARRQGSLEDACDWEMQVDLGGKLVVPQEIASTKLRPDIVLWSRSRMKVYFIELTVPWEASVEEAYERKKLRYVELGAEAEQRGWKVRICPVEVGCRGFVARSVVSLVRELGASGQSVRKIVKDMSDEAARSSQWIWIRRSNGSWGPSRGST

SEQ ID NO: 4329 - protein, 1143 aa, Seriola dumerili
MTRICDSVKDRGTDLFSRIRTGQNSSQGDVSVAGENKNVRLEGNKLQICPCGWQKVTSVRGLRMHQGRKRCVAKERQCGRIDRYFLRSQSNKSDEVQRQVENHSSKDINNTATEGEEETTRGDAAETEVNRPVRERNMDQKTRVKWPRANSKKEWESVNRDLSLILSRLGGNASDRLEKMGDIIYSYGAERFGVQDRKRVERVQLVKSRRQREMEKLVKERRQLRKQWKRATEEERGGIDVLQEDLRGRLAVLRRAEYLRKKRKKKEYVRTAFYRDPFKFVKGLFNQEKGGQLKATKLEVQKYLRNTYSDLEQNKVVGLPPDMPPLGQIVHEMDVRPPRWKEVEEVVRRAKASSAPGPNGVPYRVYKSAPDILKFLWRQLRIVWEKQVIPRAWRRAGGVFIPKEKESSDLSQFRMISLLNVEGKIFFSIVARRLASYLERNSLIDTAVQKAGIPGFAGCIEHTSMIWHQIQAAKTEKRDLHVIFLDLANAFGSVPHSLIWEAFDYFRVPGVVVNLVRSYFQDIKLCVSTAGFTTGWQRLEIGIMAGCTISPLAFTMAMEVIIRASKWVVGGERRQDGMRLTPIRAYMDDMTLITTTVPCMKRVLERLNKNLKWASMKIKPSKSRSISLSRGKLSDRKFVIDEEEIPIIREKSVKSLGRWYKADLKDGEQVVQFRKDVAEGLDRIDKSGLPGKLKLWCLQFGLFPRLMWPMSVYEIPLSAAEKMERLVSFYIRKWLGVPRCLSTVALYGKGILQLPVTSLVEEFKCTKVRTELLLSGSKDVVVSKVVPNPIKGRKWNPRMAVQEAEATLRHTEIVGNVQIGRGGLGLGPGKPVWSRAGPKEKRKLVVEQVRRQEEILRGAKAVAQAKQGQWLNWEGVDKKKLSWKELWSMEESSIRFLIGATYDVLPTPQNLKLWVNGDPLCALCSGTATLKHILSGCKVSLSQGRYTWRHNQVLKSLAAGIEDLRRQANLGGSKTKRVAIKFVQEGEKVGKTARRQGSLEDACDWEMQVDLGGKLVVPQEIASTKLRPDIVLWSRSRMKVYFIELTVPWEASVEEAYERKKLRYAELGAEAEQRGWKVRICPVEVGCRGFVARSVVSLVRELGASGQSVRKIVKDMSDEAARSSQWIWIRRSNGSWGPSRGST

SEQ ID NO: 4330 - protein, 1145 aa, Seriola rivoliana
MTMTRICDSVKDRGTDLFSRIRTGQNSSQGDMSVAGENKNVRLEANKLQICPCGWQKVTSVRGLRMHQGRKRCVAKERQCGRIDRYFLRSQSNKSDEVQRQVESHRSKDINNTATEGEEETTRGDAAETEVNRPVRERNMEQKTRVKWPRANSKKEWESVNRYLSLILSRLGGNASDRLEKMGDIIYSYGAERFGVQDRKRVERVQLVKSRRQREMEQLVKERRQLRKQWKRATEEERGGIDVLQEDLRGRLAVLRRAEYLRKKRKKKEYVRTAFYRDAFKFVKGLFNQEKGGQLKATKLEVQKYLRNTYSDLKQNKVVGLPPDMPPLGQIVHEMDVRPPRWKEGEEVVRRAKASSAPGPNGVPYRVYKSAPDILKFLWRQLRIVWEKQVIPRAWRRAGGVFIPKEKESSDLSQFRMISLLNVEGKIFFSIVARRLASYLERNSLIDTGVQKAGIPGFAGCIEHTSMIWHQIQAAKTEKRDLHVIFLDLANAFGSVPHSLIWEAFDYFRVPGVVVNLVRSYFQDIKLCISTAGFTTGWQRLEIGIMAGCTISPLAFTMAMEVIIRASKWVVGGERRQGGMRLTPIRAYMDDMTLITTTVPCMKRVLERLNKNLKWASMKIKPSKSRSISLSRGKLSDRKFVIDEEEIQIIREKSVKSLGRWYKADLKDGEQVVQFRKDVAEGLDRIDKSGLQGKLKLWCLQFGLFPRLMWPMSVYEIPLSAAEKMERLVSFYIRKWLGVPRCLSTVALYGKGILQLPVTSLVEEFKCTKVRTELLLSGSKDVVVSKVVPNPIKGRKWNPRMAVQEAEATLRHTEIVGNVQIGRGGLGLGPGKAVWSRAGPKEKRKLVVEQVRRQEETLRGAKAVAQAKQGQWLNWEGVDKKKLSWKELWSMEESSIRFLIGATYDVLPTPQKLKLWVNGDPLCALCSGTATLKHILSGCKVSLSQGRYTWRHNQVLKSLAAGIEDLRRQANLGGSKTKRVAIKFVQEGEKVGKTARRQGSLEDACDWEMQVDLGGKLVVPQEIASTKVRPDIVLWSRSRMKVYFIELTVPWEASVEEAYERKKLRYVEVGAEAEQRGWKVRICPVEVGCRGFVARSVVSLVRELGASGQSVRKIVKDVSDEAARSSQWIWIRRSNGSWGPSRGST

SEQ ID NO: 4331 - protein, 1145 aa, Seriola quinqueradiata
MTMSWICDSVKDRGTDLFSRTRTGQNSFQGDVRVAGENKNDRPEGNKLQICPCGWQKVTSVRGLRMHQGRKRCVAKERQCGRIDRYFLRSQSNKSDEVQRQVENHSSKDINNTATEEEEESTRGDAAETEVNRPVKERNMEQKTRVKWLRANSKKEWESFNRDLSAILGRLRGNASDRLEKMGDIIYSYGAERFGVQDRKRVERAQLVKSRRQREMEKLVKERRQLRKQWKRATEEERGGINVLQEDLRGRLAVLRRAEYLRKKRKNKEYVRTAFYRDPFKFAKGLFNQEKGGQLKATKLEVEKYLRNTYSDFEQNRVIGLPPDMPPVGKIDHEMDVRPPRWKEVEEVVRRAKASSAPGPNGVPYRVYKSAPDILKFLWRQLRIVWEKQVIPRVWRRAGGVFIPKEKESSDLSQFRMISLLNVEGKIFFSIVAQRLTSYLERNSLIDTAVQKAGIPGFAGCLEHTSMIWHQIQAAKTEKRDLNVIFLDLANAFGSVPHSLIWEAFDYFKVPGVVVNLVKLYFQDIRLCLSTAGFTTGWQRLEIGIMAGCTISPLAFTMAMEVIIRASKWVVGGERRQDGMRLTPIRAYMDDMTLITTTVPCMKRILERLNKNLKWASMKIKPSKSRSISISRGKLSDRKFVIDEEEIPIIREKSVKSLGRWYKADLNDGEQVVQFRKDVAEGLDRIDKSGLPGKLKLWCLQFGLFPRLMWPMSVYEIPISTAEKMEKLVSFYIRKWLGVPRCLSTVALYGKGILQLPVTSLVEEFKCTKVRTELLLSGSKDAVVSKVVPNPIKGRKWNPRIAVQEAEAMLRHTEIVGNVQIGRGGLGLGPGKPVWSRAGPKEKRKLVVEQVRRQEELLRGAKAVAQAKQGQWVNWEGVDKKKLSWKELWSMEESSIRFLIGATYDVLPTPQNLKLWVNGDPLCSLCSGTATLKHILSGCKVSLSQGRYTWRHNQVLKSLAAGIEELRRQANLGGPKTKKGAIKFVQEGEKVVKTTRRQGSLEGACDWEMQVDLGGKLLVPQEIAITKLRPDIVLWSRSRMKVYFIELTVPWEALVEEAYERKKLRYAELGAEAEQRGWKVRICPVEVGCRGFVARSVVSLVRELGASGQSVRKIVKDMSDEAARSSQWIWMRRSNGSWGPSRGST

SEQ ID NO: 4332 - protein, 1114 aa, Seriola rivoliana
MSVAGENKNVRLEGNKLQICPCGWQKVTSVRGLRMHQGRKRCVAKERQCGRIDRYFLRSQSNKSDEVQRQVESHSSKDINNTATEGEEETTRGDAAETEVNRPVRERNMEQKTRVKWPRANSKKEWESVNRDLSLILSRLGGNASDRLEKMGNIIYSYGAERFGVQDRKRVERVQLVKSRRQREMEKLVKERRQLRKQWKRATEEERGGIDVLQEDLRGRLAVLRRAEYLRKKRKKKEYVRTAFYRDPFKFVKGLFNQEKGGQLKATKLEVQKYLRNTYSDLEQNKVVGLPPDMPPLGQIVHEMDIRPPRWKEVEEVVRRAKASSAPGPNGVPYRVYKSAPDILKFLWRQLRIVWEKQVIPRAWRRAGGVFIPKEKESSDLSQFRMISLLNVEGKIFFSIVARRLASYLERNSLIDTAVQKAGIPGFAGCIEHTSMIWHQIQAAKTEKRDLHVIFLDLANAFGSVPHSLIWEAFDYFRVPGVVVNLVRSYFQDIKLCVSTAGFTTGWQRLEIGIMAGCTISPLAFTMAMEVIIRASKWVVGGERRQDGMRLTPIRAYMDDMTLITTTVPCMKRVLERLNKNLKWASMKIKPSKSRSISLSRGKLSDRKFVIDEEEIPIIREKSVKSLGRWYKADLKDGEQVVQFRKDVAEGLDRIDKSGLPGKLKLWCLQFGLFPRLMWPMSVYEIPLSAAEKMERLVSFYIRKWLGVPRCLSTVALYGKGILQLPVTSLVEEFKCTKVRTELLLSGSKDVVVSKVVPNPIKGRKWNPRMAVQEAEATLRHTEIVGNVQIGRGGLGLGPGKPVWSRAGPKEKRKLVVEQVRRQEEILRGAKAVAQAKQGQWLNWEGVDKKKLSWKELWSMEESSIRFLIGATYDVLPTPQNLKLWVNGDPLCALCSGTATLKHILSDCKVSLSQGRYMWRHNQVLKSLAAGIEDLRRQANLGGSKTKRVAIKFVQEGEKGGKTARRQGSLEDACDWEMQVDLGGKLVVPQEIASTKLRPDIVLWSRSRMKVYFIELTVPWEASVEEAYERKKLRYAELGAEAEQRGWKVRICPVEVGCRGFIARSVVSLVRELGASGQSVRKIVKDMSDEAARSSQWIWIRRSNGSWGPSRGST

SEQ ID NO: 4333 - protein, 1080 aa, Seriola quinqueradiata
MHQGRKRCVAKERQCGRIDRYFLRSQSNKSDEVQRQVENHSSKDINNTATEEEEESTRGDAAETEVNRPVKERNMEQKTRVKWPRANSKKEWESVNRDLSAILGRLRGNASDRLEKMGDIIYSYGAERFGVQDRKRVERAQLVKSRRQREMEKLVKERRQLRKQWKRATEEERGGINVLQEDLRGRLAVLRRAEYLRKKRKNKEYVRTAFYRDPFKFAKGLFNQEKGGQLKATKLEVEKYLRNTYSDFEQNRVIGLPPDMPPVGKIDHEMDVRPPRWKEVEEVVRRAKASSAPGPNGVPYRVYKSAPDILKFLWRQLRIVWEKQVIPRVWRRAGGVFIPKEKESSDLSQFRMISLLNVEGKIFFSIVARRLTSYLERNSLIDTAVQKAGIPGFAGCLEHTSMIWHQIQAAKTEKRDLNVIFLDLANAFGSVPHSLIWEAFDYFKVPGVVVNLVKLYFQDIRLCLSTAGFTTGWQRLEIGIMAGCTISPLAFTMAMEVIIRASKWVVGGERRQDGVRLTPIRAYMDDMTLITTTVPCMKRILERLNKNLKWASMKIKPSKSRSISISRGKLSDRKFVIDEEEIPIIREKSVKSLGRWYKADLNDGEQVVQFRKDVAEGLDRIDKSGLPGKLKLWCLQFGLFPRLMWPMSVYEIPISTAEKMEKLVSFYIRKWLGVPRCLSTVALYGKGILQLPVTSLVEEFKCTKVRTELLLSGSKDAVVSKVVPNPIKGRKWNPRIAVQEAEAMLRHTEIVGNVQIGRGGLGLGPGKPVWSRAGPKEKRKLVVEQVRRQEELLRGAKAVAQAKQGQWVNWEGVDKKKLSWKELWSMEESSIRFLIGATYDVLPTPQNLKLWVNGDPLCSLCSGTATLKHILSGCKVSLSQGRYTWRHNQVLKSLAAGIEELRRQANLGGPKTKKGAIKFVQEGEKVVKTTRRQGSLEGACDWEMQVDLGGKLLVPQEIAITKLRPDIVLWSRSRMKVYFIELTVPWEALVEEAYERKKLRYAELGAEAEQRGWKVRICPVEVGCRGFVARSVVSLVRELGASGQSVRKIVKDMSDEAARSSQWIWMRRSNGSWGPSRGST

SEQ ID NO: 4334 - protein, 1145 aa, Seriola rivoliana
MTMTRICDSVKDRGTDLFSRIRTGQSSSQGDMSIAGENKNVRLEGNKLQICPCGWQKVTSVRGLRMHQGRKRCVAKERQCGRIDRYFLRSQSNKSDEVQRQVESHSSKDINNTATEGEEETTRGDAAETEVNRPVRERNMEQKTRVKWPRANSKKEWESVNRDLSLILSRLGGNASDRLEKMGDIIYSYGAERFGVQDRKRVERVQLVKSRRQREMEKLVKERRQLRKQWKRATEEERGGIDVLQEDLRGRLAVLRRAEYLRKKRKKKEYVRTAFYRDPFKFVKGLFNQEKGGQLKATKLEVQKYLRNMYSDLEQNKVVGLPPDMPPVGQIVHEMDVRPPRWKEVEEVVRRAKASSAPGPNGVPYRVYKSAPDILKFLWRQLRIVWEKQVIPRAWRRAGGVFIPKEKESSDLSQFRMISLLNVEGKIFFSIVARRLASYLERNSLIDTAVQKAGIPGFAGCIEHTSMIWHQIQAAKTEKRDLHVIFLDLANAFGSVPHSLIWEAFDYFRVPGVVVNLVRSYFQDIKLCVSTAGFTTGWQRLEIGIMAGCTISPLAFTMAMEVIIRASKWVVGGERRQDGMRLTPIRAYMDDMTLITTTVPCMKRVLERLNKNLKWASMKIKPSKSRSISLSRGKLSDRKFVIDEEEIPIIREKSVKSLGRWYKADLKDGEQVVQFRKDVAEGLDRIDKSGLPGKLKLWCLQFGLFPRLMWPMSVYEIPLSAAEKMERLVSFYIRKWLGVPRCLSTVALYGKGILQLPVTSLVEEFKCTKVRTELLLAGSKDVVVSKVVPNPIKGRKWNPRMAVQEAEATLRHTEIVGNVQIGRGGLGLGPGKPVWSRAGPKEKRKLVVEQVRRQEEILRGAKAVAQAKQGQWLNWEGVDKKKLSWKELWSMEESSIRFLIGATYDVLPTPQNLKLWVNGDPLCALCSGTATLKHILSGCKVSLSQGRYTWRHNQVLKSLAAGIEDLRRQANLGGSKTKRGAIKFVQEGEKVGKTARRQGSLEDACDWEMQVDLGGKLVVPQEIASTKLRPDIVLWSRSRMKVYFIELTVPWEASVEEAYERKKLRYAELGAEAEQRGWKVRICPVEVGCRGFVARSVVSLVRELGASGQSVRKIVKDMSDEAARSSQWIWIRRSNGSWGPSRGST

SEQ ID NO: 4335 - protein, 821 aa, Seriola quinqueradiata
MPPVGKIDHEMDVRPPRWKEVEEVVRRAKASSAPGPNGVPYRVYKSAPDILKFLWRQLRIVWEKQVIPRAWRRAGGVFIPKEKESSDLSQFRMISLLNVEGKIFFSVVARRLTSYLERNSLIDTAVQKAGIPGFAGCLEHTSMIWHQIQAAKTEKRDLNVIFLDLANAFGSVPHSLILEAFDYFKVPGVVVNLVKLYFQDIRLCLSTTGFTTGWQRLEIGIMAGCTISPLAFTMAMEVIIRASKWVVGGEKRQDGIRLTPIRAYMDDMTLITTTVPCMKRVLERLNKNLKWASMKIKPSKSRSISISRGKLSDRKFVIDEEEIPIIREKSVKSLGRWYKADLNDGEQVVQFRKDVAEGLDRIDKSGLPGKLKLWCLQFGLFPRLMWPLSVYEIPISTAEKMEKLVSFYIRKWLGVPRCLSTVALYGKGILQLPVTSLVEEFKCTKVRTELLLSGSKDAVVSKVVPNPIKGRKWNPRIAVQEAEAMLRHTEIVGNVQIGRGGLGLGPSKPVWSRAGPKEKRKLVVEQVRRQEELLRGAKAVAQAKQGQWVNWEGVDKKKLSWKELWSMEESSIRFLIGATYDVLPTPQNLKLWVNGDPLCSLCSGTATLKHILSGCKVSLSQGRYTWRHNQVLKSLAAGIEELRRQANLGGPKTKKVAIKFVQEGEKVGKTTRRQGSLEGACDWEMQVDLGGKFVVPQEIAITKLRPDIVLWSRSRMKVYFIELTVPWEALVEEAYERKKLRYAELGAEAEQRGWKVRICPVEVGCRGFVARSVVSLVRELGASGQSVRKIVKDMSDEAARSSQWIWMRRCNGSWGPSRGST

SEQ ID NO: 4336 - protein, 1006 aa, Seriola rivoliana
MEQKTRVKWPRANSKKEWESVNRDLSLILSRLGGNASDRLEKMGDIIYSYGAERFGVQDRKRVERVQLVKSRRQREMEKLVKERRQLRKQWKRATEEERGGIDVLQEDLRGRLAVLRRAEYLRKKRKKKEYVRTAFYRDPFKFVKGLFNQEKGGQLKATKLEVQKYLRNTYSDLEQNKVVGLPPDMPPLGQIVHEMDVRPPRWKEVEEVVRRAKASSAPGPNGVPYRVYKSAPDILKFLWRQLRIVWEKQVIPRAWRRAGGVFIPKEKESSDLSQFRMISLLNVEGKIFFSIVARRLASYLERNSLIDTAVQKAGIPGFAGCIEHTSMIWHQIQAAKTEKRDLHVIFLDLANAFGSVPHSLIWEAFDYFRVPGVVVNLVRSYFQDIKLCVSTAGFTTGWQRLEIGIMAGCTISPLAFTMAMEVIIRASKWVVGGERRQDGMRLTPIRAYMDDMTLITTTVPCMKRVLERLNKNLKWASMKIKPSKSRSISLSRGKLSDRKFVIDEEEIPIIREKSVKSLGRWYKADLKDGEQVVQFRKDVAEGLDRIDKSGLPGKLKLWCLQFGLFPRLMWPMSVYEIPLSAAEKMERLVSFYIRKWLGVPRCLSTVALYGKGILQLPVTSLVEEFKCTKVRTELLLSGSKDVVVSKVVPNPIKGRKWNPRMAVQEAEATLRHTEIVGNVQIGRGGLGLGPGKPVWSRAGPKEKRKLVVEQVRRQEEILRGAKAVAQAKQGQWLNWEGVDKKKLSWKELWSMEESSIRFLIGATYDVLPTPQNLKLWVNGDPLCALCSGTATLKHILSGCKVSLSQGRYTWRHNQVLKSLAAGIEDLRRQANLGGSKTKRVAIKFVQEGEKVGKTARRQGSLEDACDWEMQVDLGGKLVVPQEIASTKLRPDIVLWSRSRMKVYFIELTVPWEASVEEAYERKKLRYAELGAEAEQRGWKVRICPVEVGCRGFIARSVVSLVRELGASGQSVRKIVKDMSDEAARSSQWIWIRRSNGSWGPSRGST

SEQ ID NO: 4337 - protein, 1006 aa, Seriola quinqueradiata
MEQKTRVKWPRANSKKEWESVNRDLSAILGRLRGNASDRLEKMGDIIYSYGAERFGVQDRKRVERAQLVKSRRQREMEKLVKERRQLRKQWKRATEEERGGINVLQEDLRGRLAVLRRAEYLRKKRKNKEYVRTAFYRDPFKFAKGLFNQEKGGQLKATKLEVEKYLRNTYSDFEQNRVIGLPPDMPPVGKIDHEMDVRPPRWKEVEEVVRRAKASSAPGPNGVPYRVYKSAPDILKFLWRQLRIVWEKQVIPRVWRRAGGVFIPKEKESSDLSQFRMISLLNVEGKIFFSIVARRLTSYLERNSLIDTAVQKAGIPGFAGCLEHTSMIWHQIQAAKTEKRDLNVIFLDLANAFGSVPHSLIWEAFDYFKVPGVVVNLVKLYFQDIRLCLSTAGFTTGWQRLEIGIMAGCTISPLAFTMAMEVIIRASKWVVGGERRQDGVRLTPIRAYMDDMTLITTTVPCMKRILERLNKNLKWASMKIKPSKSRSISISRGKLSDRKFVIDEEEIPIIREKSVKSLGRWYKADLNDGEQVVQFRKDVAEGLDRIDKSGLPGKLKLWCLQFGLFPRLMWPMSVYEIPISTAEKMEKLVSFYIRKWLGVPRCLSTVALYGKGILQLPVTSLVEEFKCTKVRTELLLSGSKDAVVSKVVPNPIKGRKWNPRIAVQEAEAMLRHTEIVGNVQIGRGGLGLGPGKPVWSRAGPKEKRKLVVEQVRRQEELLRGAKAVAQAKQGQWVNWEGVDKKKLSWKELWSMEESSIRFLIGATYDVLPTPQNLKLWVNGDPLCSLCSGTATLKRILSGCKVSLSQGRYTWRHNQVLKSLAAGIEELRRQANLGGPKTKKGAIKFVQEGEKVVKTTRRQGSLEGACDWEMQVDLGGKLLVPQEIAITKLRPDIVLWSRSRMKVYFIELTVPWEALVEEAYERKKLRYAELGAEAEQRGWKVRICPVEVGCRGFVARSVVSLVRELGASGQSVRKIVKDMSDEAARSSQWIWMRRSNGSWGPSRGST

SEQ ID NO: 4338 - protein, 1006 aa, Seriola rivoliana
MEQKTRVKWPRANSKKEWESVNRDLSLILSRQGGNASDRLEKMGDIIYSYGAERFGVHDRKRVERVQLVKSRRQREMEKLVKERRQLRKQWKRATEEERGGIDVLQDDLRGRLAVLRRAEYLRKKRKKKEYVRTAFYRDPFKVVKGLFNQEKGGQLKATKLEVQKYLRNTYSDLEQNKVVGLPPDMPPLGQIVHEMDVRPPRWKEVEEVVRCAKASSAPGPNGVPYRVYKSAPDILKFLWRQLRIVWEKQVIPRAWRRAGGVFIPKEKESSDLSQFRMISLLNVEGKIFFSIVARRLASYLDRNSLIDTAVQKAGIPGFAGCIEHTSMIWHQIQAAKTEKRDLHVIFLDLANAFGSVPHSLIWEAFDYFRVPGVVVNLVRSYFQDIKLCVSTAGFTTGWQRLEIGIMAGCTISPLAFTMAMEVIIRASKWVVGGERRQDGMRLTSIRAYMDDMTLITTTVPCMKRVLERLNKNLKWASMKIKPSKSRSISLSRGKLSDRKFVIDEEEIPIIREKSVKSLGRWYKADLKDGEQVVQFRKDVAEGLDRIDKSGLPGKLKLWCLQFGLFPRLMWPMSVYEIPLSAAEKMERLVSFYIRKWLGVPRCLSTVALYGKGILQLPVTSLVEEFKCTKVRTELLLSGSKDVVVSKVVPNPIKGRKWNPRMAVQEAEATLRHTEIVGNVQIGRGGLGLGPGKPGWSRAGPKEKRKLVVEQVRRQEEILRGAKAVAQAKQGQWLNWEGVDKKKLSWKELWSMEESSIRFLIGATYDVLPTPQNLKLWVNGDPLCALCSGTATLKHILSGCKVSLSQGRYTWRHNQVLKSLAAGIEDLRRQANLGGSKTKRVAINFVQEGEKVGKTARRQGSLEDACDWEMQVDLGGKLVVPQEIASTKLRPDIVLWSRSRMKVYFIELTVPWEASVEEAYERKKLRYAELGAEAEQRGWKVRICPVEVGCRGFVARSVVSLVRELGASGQSVRKIVKDMSDEAARSSQWIWIRRSNGSWGPSRGST

SEQ ID NO: 4339 - protein, 1080 aa, Seriola rivoliana
MHQGRKRCVAKERQCGRIDRYFLRSQSNKSDEVQRQVESHSSKDINNTATEGEEETTRGDAAETEVNRPVRERNMEQKTRVKWPRANSKKEWGSVNRDLSLILNRLGGNASNRLEKMGDIIYSYGAERFGVQDRKRVERVQLVKSRRQREMEKLVKERRQLRKQWKRTTEEERGGIDVLQEDLRGRLAILRRAEYLRKKRKKKEYVRTAFYRDPFKFVKGLFNQKKGGQLKATKLEVQKYLKNTYSDLEQNKVVGLPPDMPPLGQIVHEMDVRPPTWKEVEEVVRRAKASSAPGPNGVPYQVYKSAPDILKFLWRQLRIVWEKQVIPRAWRRAGGVFIPKEKESSDLSQFRMISLLNVEGKIFLSIVARRLASYLERNSLIDTAVQKAGIPGFAGCIEHTSMIWHQIQAAKTEKRDLHVIFLDLANAFGSVPHSLIWEAFDYFRVPGVVVNLVRSYFQDIKLCVSTAGFTTGWQRLEIGIMAGCTISPLAFTMAMEVIIRASKWVVGGERRQDGMRLTPIRAYMDDMTLITTTVPCMKRVLERLNKNLKWASMKIKPSKSRSISLNRGKLSDRKFVIDEQEIPIIREKSVKSLGRWYKADLKDGEQVVQFRKDVAEGLDRIDKSGLPGKLKLWCLQFGLFPRLMWPMSVYEIPLSAAEKMERLVSFYIRKWLGVPRCLSTVALYGKGILQLPVTSLVEEFKCTKVRTELLLSGSKDVVVSKVVPNPIKGRKWNPRMAVQEAEATLRHTEIVGNVQIGRGGLGLGPGKPVWSRAGPKEKRKLVVEQVRRQEEILRGAKAVAQAKQGQWLNWEGVDKKKLSWKELWSMEESSIRFLIGATYDVLPTPQNLKLWVNGDPLCALCSGMATLKHILSGCKVSLSQGRYTWRHNQVLKSLAAGIEDLRRQANLGGSKTKRVAIKFVQEGEKVGKTARRQGSLEDACDWEMQVDLGGKLVVPQEIASTNLRPDIVLWSRSRMKVYFIELTVPWEASVEEAYERKKLRYAELGAEAEQRGWKVRICPVEVGCRGFVARSVVSLVRELGASGQSVRKIVKDMSDEAARSSQWIWIRRSNGSWGPSRGST

SEQ ID NO: 4340 - protein, 903 aa, Formica exsecta
MAREEALAIRRGVRFVNQHLLTVVPNRTLEAIKGMRRSDRYRRLVIAAREVLSEESSDDYLSASSTEAGEEEASSTDAGESRHSMSPTSQRSAFNDHRAAIEQLLRVVEDMQGWDSQCLTTLARDVVDGAPVDGERIARWIAGVFPPQPQRRRPPRYQLVNPRRGVRRRMEYASVQRMYRFNMSRCIKNILDGDGGRDAAVPDVATMAEHWGPFVSQASHPIPPGPLSEPVQELQHIWNPVSCDEAARVTLPLNSAPGLDAITVRQWRAVPASIKALLYNVVMVVGGFPTSMLGSRTVFVPKKSDLPTPADFRPISVMSVIVRHLHKILAQRLGRAELVDLRQRCFDDGCSENVAVLSSLILEARSKRRELHVASLDVAKAFDSVSHGAISSVMTQRGLPTALVDYISRLYERSHAVFEVCGARSEPVKLGRGVRQGDPLSPILFCLVIDRVLGVVPPEIGFDVGGSLINSLAYADDILLISSTRWGMQAALNLVEEAAGDHGLIFNPKKCSVLSIVPAGKQKKLKIPSTPTFRLRDGDYIPQLMSTSEWRYLGVDFQPSGPRNMQVDLTALLGGLTRAPLKPQQRLKALRCFLVPRFYHGLVLGRANLGRLRGLDLQVRAAVRRWLRLPGDTAVGFFHAAVRDGGLGIPSFVTTIPGLTFERFRRLGQSSSPAARAVAESAWVTRKLRWAEHVLSREGTPLLTRNLRREWWRQRLHGAVDGRELTECPKTTLSSWWIDAGSLAIPGRDFVQYVHVWINCLPTLIRTTRGVRRANRATSCRAGCAVTETAAHVIQQCHRTHGGRIKRHNAVANTVAASLRDAGWVVQQEPVFDTEEGRRKPDLLCVRNEEVRLVDAQIVSGAIPLDDAHERKSAYYGSNNSLKRAISMRYNTNNIVSSSCTLS

SEQ ID NO: 4341 - protein, 1070 aa, unidentified
MTTRNKSKDIGRRQPRNAGPTTSARIDGPVPGTSRAGTPPPALAGASFVVRSPPLRRSPLRCPNCDRLFSTKIGLGVHRRHAHPVEANDEVDVVRVKHQWSDEELRLMAREEALAIRRGVRFVNQHLLTVVPGRTLEAIKGMRRSDRYRRLVIAAREVLSEESSDDYLSASSTEAGEEDASSTDAGESRHSMSPTSQRSAFNDHRAAIQQLLRAVEDIQGWDSHCLTALARDVVDGAPVDGERIARWIAGVFPPQPRRRRPPRYQLVNPRRGVRRRMEYASVQRMYRFNMSRCIKNILDGDGGRDAAVPDVATMAEHWGPFVSQASHPIPSGPLPEPVQELQYIWNPVSCDEAARVALPLNSAPGLDAITVRQWRAVPASIKALLYNVVMVVGGFPTSMLGSRTVFVPKKSDLPTPADFRPISVMSVIVRHLHKILAQRLGRADLVDLRQRCFDDGCSENVAVLSSLILEARSKLRELHVASLDVAKAFDSVSHGAISSVMTQRGLPAALVDYISRLYEHSHAVFEVRGARSEPVKLGRGVRQGDPLSPILFCLVIDRVLGVVPPEIGFDVGGSLINSLAYADDILLISSTRWGMQAALNLVEEAAGDHGLIFNPKKCSVLSVVPAGRQKKLKIPSTPTFRLRDGDYIPQLMSTSEWRYLGVDFQPSGPRNMQVDLTALLGGLTRAPLKPQQRLKALRCFLVPRFYHGLVLGRANLGRLRGLDLQVRAAVRRWLRLPGDTAMGFFHAAVRDGGLGIPSFVTTIPGLTFERFRRLGQSSSPAARAVAESAWVTRKLRWAEHVLSREGTPLLTRNLRREWWKQRLHGAVDGRELAECPKTTLSSWWIDAGSLAIPGRDFVQYVHVWINSLPTLIRTTRGVRRANRAISCRAGCAVTETAAHVIQQCHRTHGGRIRRHNAVANTVAASLRDAGWVVQQEPVFDTEEGKRKPDLLCVRNEEVRLVDAQIVSGAIPLDDAHVRKSAYYGNNNSLKRAISMRYNTNNIVSSSCTLSWRGVWSPRSADSLLQMGVTRGLLRGISTRVLQGSHTNWTRWNRMTTMIPIGGTIPRQGIG

SEQ ID NO: 4342 - protein, 880 aa, Dermanyssus gallinae
MNESSLDLTEYIQAFIKTGKLVRILPKVVRKSVADVLSEVCLKVASDNDDAAWLGLFSFAPVVLRLPIGRRDSRSLAVVIRKNMVEFRRGVRLTDLASLLTAGDSGGNVERNQSITRAVSAKLSDGDVSGAARLLLSDDVMVNEPAATASLREKHPPAQPDLCWPSAPPSQLLPSSTSVEDVRYAVGSFSKSSSAGLDFIRPRLLQDLLSPILGCLSDGLCKALAKVIDLLRCGVPHPRWCPFIFGARLFALKKKDGSFRPIAYSSVLRRVAAKLAVRDSRGTINLAIGPHQLDFFTKGGAEIVIHATRAFIDSRLDPSVLVKLDFKNAFNTVRRDHLLKVVGDETPAIYHQVKLAYGDLSHLVLPSALLTSAVGVQQGDPLAPPLFCLAVKDLVNSLECPLNLWYLDDGVIGGNISTVCEDLKKILSFSTCSGLELNPIKCEVHIIGSGTAEISAIQNLLPGCRVTGDDLDLLGVPLFSGHLGPTIERRMEKLEVGFNRLPQLGAHRGLYLLRSCFSASRLNYLFRGINSSAFSAQLEEINSKMGFALESILNLRLRDDSLVQAFLPVARGGLGLPEAVSLSVAAYIASLQSATGGVESILNTRAIANFQATLEQTHDDAIAFCGSLPETPSLQRAWSELANDGRWNGLWDRTTTAASKARLQAVSSPGGPLLGTLLDDESTRILVGLRLGVELVSPHRCRCGDEVDSLGHHRLSCLQSSGRIARHSALNETFSRGLRSAGYPCILEPSGLVRDDGRRPDGMTLTPFERGQMLVWDATVTDSLAPSMVGTGAARPGHAVALAEAAKCRKYSSISYPHLFSPLAFETLGGGWVAHDETAQGCREKIGARYRRQEGGRVFTATSVIRCSEGECRFGERYHG

SEQ ID NO: 4343 - protein, 1006 aa, Dermanyssus gallinae
MTGDHNNCRTVTQPIHATLPDPSEGAGPSSTSGQNPATTPDPLGSNRVTCHQCGQTFARRGFRRHVTVKHGGGGATLVPNGVMNESNFDLTECIQAFMKNGKLVRILPKVVRKSVADALSEVCIKVASDNDDAAWLGLFSFAPVVLRLPIGCRDTRSLAVVIRKNLVEFRRGVRLTDLVPLLTAGESGGNAEQNQSITRAVSAKLSDGDVSGAARLLLSDDVMVDEPAAAASLREKHPPAQPDLCWPSPPPLQLLPSSTSAEDVRFAVGSFAKSSSAGLDFMRPRLLQDLLSPTLGCSSDTLSKALAKVIDLLRWGAPHPRWCPLIFGARLFALKKKDGSFRPIACSSVLRRVAAKLAVRDSRDLINLAIGPHQLGFYTKGGAEIMIHATRAFIDSRIDSSVLVKLDFKNAFNTVKRNHLLRVVGDEAPGIYHQVKLAYGDSSHLVLPSALLTSAVGVQQGDPLAPPLFCLAVKDLVNSLESPLNLWYLDDGVIAGNIGTVCEDIKKILSFATCSGLELNPTKCEVHIIGSGTADISALRDLLPGCRVTGDDLDLLGVPLFSCHLGPKIEQEREKLEIGFNRLPQLGAHRGLYLLRACFSASRLNYLFRGIKCSAFSPQLEEINLKLGLALESILNLRLRNDPLVQAALPVARGGLGLPEAVSLAIAAHIASLHSATSGVEANLDPEAVSNFRATLERTQEDAIAFCGSLPETPSFQRAWSELANNGRWNGLWDRTTTAANKARLLAVSSPGAGAWLQALPSPQLGTLLDDESTRILVGLRLGAELVSPHRCRCGDEVDSLGHHGLSCPQSSGRIARHSALNETFSRGLRSAGYPCILEPSGLVRDDARRPDGMTLTPFERGQMLVWDATVTDSLAPSMVGTGAARPGHAVALAEAAKCRKYSSVGYPHLFSPLAFETLGGPGVLTKKLLNDVGRKLALATGDKRAGEYLLQRLSLDVQRGNAASVRGTLARWTSPSLDLTPRVLPRAGCAHVLTPQLYTLSHINK

SEQ ID NO: 4344 - protein, 950 aa, Dermanyssus gallinae
MQNLATTPNPLGPNKVTCHQCGQTFARRGLRRHVTVKHGGGGTIPLHDEAANEVNPDLTECIQAFFKHGKLVRILPKVVRKSVADALSEVCLKVALDNDDAAWLGLFSFAPVVLRLPVGCRDTRSLAVVIRKNLVEFRRGVRLTDLTLLLTAGESGGNVERKHSLTRAVSAKMSDGDVSGAARLLLSDDVMVDEPAAAASLREKHPPAQLNLCWPSPPPSQLLPSSTSIKDVRYAVGSFSKSSGAGLDFIRPRLLQDLLSPTLGCSSDGLSKALAKVIDLLRWGAPHPGWCPLIFGARLFALKKMDGSFRPIACASVLRRIAAKLAVRDAKDVISLAVGPHQLGFSTKGGAEIMIHATRAFIDSRLEPSVLVKLDFKNAFNTVRRDHLLKVVGDEAPSIYHQVKLAYGNSSHLVLPSALLTSAVGIQQGDPLAPPLFCLAVKDLVNTLESPLNLWYLDDGVVGGNISTVCEDLKKILSFAACSGLELNPIKCEVHIIGSDTADISEIQNLLPGCRVTDDNLDLLGVPLFSRQLGPTIERGREKLEIGLNRLPQLGAHRGLYLLRSCFSASRLNYLFRGVNTSAFPDLLEEINAKMCCALESILNLKLQDDSLVQAFLPVAKGGLGLPEANSLSVAAHIASLHSATSGVESILDPQAVANFKATLEQIQDDAIAFCGSQPENPSLQRAWSELANDGSLSGLWERTTTAASKARLHAVSSPGAGAWLHALPSPQLGTLLDNESTRILVGLRLGAELVSPHHCKCGDEVDSLGHHGLSCPQSSGRIARHSALNETFSRALRSAGYPCILEPPGLVRDDGKRPDGMTLTPFEQGQMLVWDATVTDSLAPSMVGAGAVRPGHVVALAEAAKCRKYSGVSYPHLFSPLAFETLGGAGLLTKKLLNDVGKRLVLATGDKRAGEYLLQRLSLNVQRGNAASIRGTLARWTSPSLDLML

SEQ ID NO: 4345 - protein, 950 aa, Dermanyssus gallinae
MQNLATTPNPLGPNKVTCHQCGQTFARRGLRRHVTVKHGGGGTIPLHDEAANEVNPDLTECIQAFFKHGKLVRILPKVVRKSVADALSEVCLKVALDNDDAAWLGLFSFAPVVLRLPVGCRDTRSLAVVIRKNLVEFRRGVRLTDLTLLLTAGESGGNVERKHSLTRAVSAKMSDGDVSGAARLLLSDDVMVDEPAAAASLREKHPPAQLNLCWPSPPPSQLLPSSTSIKDVRYAVGSFSKSSGAGLDFIRPRLLQDLLSPTLGCSSDGLSKALAKVIDLLRWGAPHPGWCPLIFGARLFALKKMDGSFRPIACASVLRRIAAKLAVRDAKDVISLAVGPHQLGFSTKGGAEIMIHATRAFIDSRLEPSVLVKLDFKNAFNTVRRDHLLKVVGDEAPSIYHQVKLAYGNSSHLVLPSALLTSAVGIQQGDPLAPPLFCLAVKDLVNTLESPLNLWYLDDGVVGGNISTVCEDLKKILSFAACSGLELNPIKCEVHIIGSDTADISEIQNLLPGCRVTDDNLDLLGVPLFSRQLGPTIERGREKLEIGLNRLPQLGAHRGLYLLRSCFSASRLNYLFRGVNTSAFPDLLEEINAKMSCALESILNLKLQDDSLVQAFLPVAKGGLGLPEANSLSVAAHIASLHSATSGVESILDPQAVANFKATLEQIQDDAIAFCGSQPENPSLQRAWSELANDGRLSGLWERTTTAASKARLHAVSSPGAGAWLHALPSPQLGTLLDDESTRILVGLRLGAELVSPHHCKCGDEVDSLGHHGLSCPQSSGRIARHSALNETFSRALRSAGYPCILEPPGLVRDDGKRPDGMTLTPFEQGQMLVWDATVTDSLAPSMVGAGAVRPGHAVALAEAAKCRKYSGVSYPHLFSPLAFETLGGAGLLTKKLLNDVGKRLVLATGDKRAGEYLLQRLSLNVQRGNAASIRGTLARWTSPSLDLML

SEQ ID NO: 4346 - protein, 1018 aa, Dermanyssus gallinae
MYIYIYIYIYIYIYKYICIDIYIYIYIYIYKYICIYIYIYIYIYTYLYIYIYIYIYIYIYICRPSSTSGQNPATTPDPLGSNRVTCHQCGQTFARRGFRRHVTVKHGGGGATLVPNGVMNESNFDLTECIQAFMKNGKLVRILPKVVRKSVADALSEVCIKVASDNDDAAWLGLFSFAPVVLRLPIGCRDTRSLAVVIRKNLVEFRRGVRLTDLVPLLTAGESGGNAEQNQSITRAVSAKLSDGDVSGAARLLLSDDVMVDEPAAAASLREKHPPAQPDLCWPSPPPLQLLPSSTSAEDVRFAVGSFAKSSSAGLDFMRPRLLQDLLSPTLGCSSDTLSKALAKVIDLLRWGAPHPRWCPLIFGARLFALKKKDGSFRPIACSSVLRRVAAKLAVRDSRDLINLAIGPHQLGFYTKGGAEIMIHATRAFIDSRIDSSVLVKLDFKNAFNTVKRDHLLRVVGDEVPGIYHQVKLAYGDSSHLVLPSALVTSAVGVQQGDPLAPPLFCLAVKDLVNSLESPLNLWYLDDGVIAGNIGTVCEDIKKILSFATCSGLELNPTKCEVHIIGSGTADISALRDLLPGCRVTGDDLDLLGVPLFSCHLGPKIEQEREKLEIGFNRLPQLGAHRGLYLLRACFSASRLNYLFRGIKCSAFSPQLEEINLKLGLALESILNLRLRNDPLVQAALPVARGGLGLPEAVSLAIAAHIASLHSATSGVEAILDPEAVSNFRATLERTQEDAIAFCGSLPETPSFQRAWSELANNGRWNGLWDRTTTAANKARLLAVSSPGAGAWLQALPSPQLGTLLDDESTRILVGLRLGAELVSPHRCRCGDEVDSLGHHGLSCPQSSGRIARHSALNETFNRGLRSAGYPCILAPSGLVRDDARRPDGMTLTPFERGQMLVWDATVTDSLAPSMVGTGAARPGHAVALAEAAKCRKYSSVGYPHLFSPLAFETLGGPGVLTKKLLNDVGRKLALATGDKRAGEYLLQRLSLDVQRGNAASVRGTLARWTSPSLDLTP

SEQ ID NO: 4347 - protein, 760 aa, Dermanyssus gallinae
MVDEPAAAASLREKHPPAQPDLCWSSPSPSQLLPSSTSVKDVRYTVGSFSKSSSAGLDFIRPRLLQDLLSPTLGCSSEGLGKALAKVIDLLRWGAPHPRWCPLIFGARLFALKKKDGSFRPIACSSVLRRIAAKLAVRDSRDVISLAIGPHQLGFSTKGGAEIMIHATRAFIDSRLDPSVLVKLDFKNAFNTVRKDHLLKVVGDETPAIYHQVKLAYGDPSHLVLPSALLTSAVGVQQGDPLAPPLFCLAVKDLVNSLESPLNLWYLDDGVIGGNISTVCEDLKKILSFSTCSGLELNPIKCEVHIIGSGTAEISAIQNLLLGCRVTGDDLDILGVPLFSRHLGPTIERGMEKLEVGFTRLPQLGAHRGLYLLRSCFSASRLNYLFRGINSSAFSAQLEKINSKMGLALESILNLRLRDDSLVQAFLPVARGGLGLPEAVSLSVAAHIASLHSATSGVESILDSRAIANFQATPEQTHDDAIAFCGSLPETPSLQRAWSELANVGRWSGLWDRTTTAASKARLQALSSPGAGAWLHALPSPQLGTLLDDESTRILVGLRLGVELVSPHQCKCGDEVDSLGHHGLSCPQSSGRIARHSALNETFSRGLRSAGYPCILEPPGLVRDNGKRPDGMTLTPFERGQMLVWDATVTDSLAPSMVGAGAARPGHAVALAEAAKCRKYSSVAYPHMFSPLAFETLGGPGLLTKKLLNDVGRRLMLATEDKRAGEYLQQRLSLDVQRGNAASVRGTLARWTSPSLDLTP

SEQ ID NO: 4348 - protein, 982 aa, Dermanyssus gallinae
MMNDHNNHTTAAETTRATEPGPPERPGPSAIPESGSARVPNLQGTNRVTCNFCRQTFTRRGLRRHVTVKHGGADTTHIRDESMNESNPDLTELIQSFMKSGKLVRILPKAVRKSVADALSEVCSRAALDNDDAAWLGLFSFAPVVLRLPVGRRDTRSLTVIIRKNLVEFQRGVRLTHLGSSSGTDESGPSVERIRPNARAVLAKLSDGDAAGAARLLLSDDVMVDEPAAIASLRAKHPVGQSDPVWPSSPSQQLMASSTSAEDVRYAIGSFSKSSSAGLDFIRPRLLQDLLSPSLGSSSERLGKALAKLIDVLRWGAPHPGWRPLIFGARLFALKKNDDSYRPIACSSVIRRVAAKLAVRDSRDVIRRVIGRHQLGFSTKRGAEIMVHATRAFIDSRQESSVLVKLDFKNAFNTVKRDHLLKTVAEEAPAIYHQVKLAYGDPSHLILPSALLTSAVGVQQGDPLAPPLFCLAVKDLVNSLESPLNLWYLDDGIIGGSASTVCEDIKKILSFATCSGLELNPTKCEVHIKGMGANDTPVILDLLPGCRVVGDDLDLLGVPLSPDNLTSTIERWREKLQVGLNRLPQLGAHRGLYLLRSCFSASNLNYLFRGVNCIAFSSHLEELNVKQGDALESLLNLRLRGDPLTQASLPVARGGLGLPEAVSLSVAAHIASLHSAISDIEAILDPHAVAHFRSTLEKTQNEAIAFCGALPETPSLQSAWSDLTHDRRWSDLWSRATSDAAKARLQAVSSPGARVWLHALPSPQLGTLLDDESTRILVGLRVGAELVSPHRCGCGDEVDSLGHHGLSCAQSSGRITRHSALNETFCRGLRLAGYPCVLEPPGLVRDDGKRPDGMTLTPFDRGQMLVWDATVTDSLAPSMVGTGAARPGHAVALAETAKCRKYSSLDYPHLFSPLAFETLGGPGLLTKKLLRDVGRRLVVATGDRRAGEYLLQRLSLDVQRGNAASVRGTLARWTSPILDLEP

SEQ ID NO: 4349 - protein, 982 aa, Dermanyssus gallinae
MMNDHNNHTTAAESTRATEPGPPERPVPSVIPEPGSATVPNLQGTNRVTCNFCRQTFTRRDLRRHVTVKHGGADTTHIRDEAMNESNPDLTELIQSFMKSGKLVRILPKAVRKSVADALSEVCSRAALDNDDAAWLGLFSFAPVVLRLPVGRRDTRSLTVIIRKNLVEFQRGVRLTHLGSLSGTDESGPSVERIRPNARAVLAKLSDGDAAGAARLLLSDDVMVDEPAAIASLRAKHPVGQSHPVWPSPPSQQLMPSSTSAEDVRYAMGSFSKSSSAGLDFIRPRLLQDLLSPSLGSSSERLGKALAKLIDVLRWGAPHPGWRPLIFGARLFALKKNDGSYRPIACSSVIRRVAAKLAVRDSRDVIRRVIGRHQLGFSTKRGAEIMVHATRAFIDSRQESSVLVKLDFKNAFNTVKRDHLLKTVAEEAPAIYHQVKLAYGDPSHLILPSALLTSAVGVQQGDPLAPPLFCLAVKDLVNSLESPLNLWYLDDGIIGGSASTVCEDIKKILSFATCSGLELNPTKCEVHIKGMGANDTPVILDLLPGCRVVGDDLDLLGVPLSPDNLTSTIERWREKLQVGLNRLPQLGAHRGLYLLRSCFLASNLNYLFRGVNCIAFSSHLEELNVKQGDALESLLNLRLRGDPLTQASLPVARGGLGLPEAVSLSVAAHIASLHSAISDIEAILDPHAVVHFRSTLEKTQNEAIAFCGALPETPSLQSAWSDLTHDRRWSDLWSRATSDADKARLQAVSSPGASVWLHALPSPQLGTLLDDESTRILVGLRVGAELVSPHRCGCGDEVDSLVHHGLSCAQSSGRIARHSALNETFCRGLRLAGYPCVLEPPGLVRDDGKGPDGMTLTPFDRGQMLVWDATVTDSLAPSMVGTGAARPGHAVALAETAKCRKYSSLEYPHLFSPLAFETLGGPGSLTKKILRDVGRRLVVATGDKRAGEYLLQRLSLDVQRGNAASVRGTLARWTSPILDLEP

SEQ ID NO: 4350 - protein, 982 aa, Dermanyssus gallinae
MTDDHNNGRKVTEPTPVTLSDSSEGAGPSFTPIEILATTPNPLGSNKVTCHQCGQTFARRGLRRHVTVKHGGESTIPHHDGAPNEVNSDLTECIQAFMKNGKLVRILPKVVRKSVADALSEVLLKVAVDNDDAAWLGLFSFAPVVLRLPIGCRDTRSLAVVIRKNLVEFRRGARLTDLALLQTAGESGGNVERNHSITRAVLAKLSDGDVSGAARLLLSDDVMVDEPAAAASLREKHPPAQPDLCWPSPPPSQLLPSSTSVEDIRYTMGSFSKSSSAGLDFIRPRLLQDLLSPTLGCSSDALSKALAKVIDLLRWGAPHPRWCPLIFGARLFALKKKDGSFRPIGCSSVLRRIAAKLAVRDSKDVISLAVGPHQLGFSTKGGAEIMIHATRAFIDSRPDPSVLVKLDFKNAFNTVRRDHLLKVVGDETPAIYHQVKLAYGAQSHLVLPSALLTSAVGVQQGDPLAPPLFCLAVKDLVNSLESPLNLWYLDDGVIGGNISTVCKDLKKILNFTTCSGLDLNPVKCEVHITGSSTADISAIQNLLPGCRVTGDDLDLLGVPLFARHIGPTIERGREKLEIGFNRLPQLGAHRGLYLLRSCFSASRLNYLFRGTNSSAFSAQLEKINLKMGFALESILNLRLRDDSLVQAFLPVARGGLGLPEAVSLSVAAHIASLHSATSGVESILDPQAIASFHFTLEKIQDDANAFCGSLPETPSLQRSWSELANDGRWSGLWDRTTTATSKARLQAVSSPGAGAWLHALPSPQLGTLLDDESTRILVGLRLGVDLVSPHQCRCGDEVDSLGHHGLSCPQSSGRIARHSALNETFSRGLRSAGYPCILEPPGLVRDDGRRPDGMTLTPFERGQMLVWDATVTDSLAPSMVGTGASRPGHAVSLAEAAKCRKYSSIAYPHLFSPLAFETLGGPGLLTKKLLNDVGRRLVLATGDKRAGEYLLQRLSLDVQRGNAASVRGTLARWTSPSLDLTP

SEQ ID NO: 4351 - protein, 982 aa, Dermanyssus gallinae
MTGDHNNCRTVTQPIHATLPDPSEGAGPSSTSGQNPATTPDPLGSNRVTCHQCGQTFARRGFRRHVTVKHGGGGATLVPNGVMNESNFDLTECIQAFMKNGKLVRILPKVVRKSVADALSEVCIKVASDNDDAAWLGLFSFAPVVLRLPIGCRDTRSLAVVIRKNLVEFRRGVRLTDLVPLLTAGESGGNAEQNQSITRAVSAKLSDGDVSGAARLLLSDDVMVDEPAAAASLREKHPPAQPDLCWPSPPPLQLLPSSTSAEDVRFAVGSFAKSSSAGLDFMRPRLLQDLLSPTLGCSSDTLSKALAKVIDLLRWGAPHPRWCPLIFGARLFALKKKDGSFRPIACSSVLRRVAAKLAVRDSRDLINLAIGPHQLGFYTKGGAEIMIHATRAFIDSRIDSSVLVKLDFKNAFNTVKRDHLLRVVGDEAPGIYHQVKLAYGDSSHLVLPSALLTSAVGVQQGDPLAPPLFCLAVKDLVNSLESPLNLWYLDDGVIAGNIGTVCEDIKKILSFATCSGLELNPTKCEVHIIGSGTADISALRDLLPGCRVTGDDLDLLGVPLFSCHLGPKIEQEREKLEIGFNRLPQLGAHRGLYLLRACFSASRLNYLFRGIKCSAFSPQLEEINLKLGLALESILNLRLRNDPLVQAALPVARGGLGLPEAVSLAIAAHIASLHSATSGVEAILDPEAVSNFRATLERTQEDAIAFCGSLPETPSFQRAWSELANNGRWNGLWDRTTTAANKARLLAVSSPGAGAWLQALPSPQLGTLLDDESTRILVGLRLGAELVSPHRCRCGDEVDSLGHHGLSCPQSSGRIARHSALNETFSRGLRSAGYPCILEPSGLVRDDARRPDGMTLTPFERGQMLVWDATVTDSLAPSMVGTGAARPGHAVALAEAAKCRKYSSVGYPHLFSPLAFETLGGPGVLTKKLLNDVGRKLALATGDKRAGEYLLQRLSLDVQRGNAASVRGTLARWTSPSLDLTP

SEQ ID NO: 4352 - protein, 982 aa, Dermanyssus gallinae
MTGDHNNCRTVTQPIHATLPDPSEGAGPSSTSGQNPATTPDPLGSNRVTCHQCGQTFARRGFRRHVTVKHGGGGATLVPNGVMNESNFDLTECIQAFMKNGKLVRILPKVVRKSVADALSEVCIKVASDNDDAAWLGLFSFAPVVLRLPIGCRDTRSLAVVIRKNLVEFRRGVRLTDLVPLLTAGESGGNAEQNQSITRAVSAKLSDGDVSGAARLLLSDDVMVDEPAAAASLREKHPPAQPDLCWPSPPPLQLLPSSTSAEDVRFAVGSFAKSLSAGLDFMRPRLLQDLLSPTLGCSSDTLSKALAKVIDLLRWGAPHPRWCPLIFGARLFALKKKDGSFRPIACSSVLRRVAAKLAVRDSRDLINLAIGPHQLGFYTKGGAEIMIHATRAFIDSRIDSSVLVKLDFKNAFNTVKRDHLLRVVGDEAPGIYHQVKLAYGDSSHLVLPSALLTSAVGVQQGDPLAPPLFCLAVKDLVNSLESPLNLWYLDDGVIAGNAGTVCEDIKKILSFATCSGLELNPTKCEVHIIGSGTADISALRDLLPGCRVTGDDLDLLGVPLFSCHLGPKIEQEREKLEIGFNRLPQLGAHRGLYLLRACFSASRLNYLFRGIKCSAFSPQLEEINLKLGLALESILNLRLRNDPLVQAALPVARGGLGLPEAVSVAIAAHIASLHSATSGVEAILDPEAVSNFRATLERTQEDAIAFCGSLPETPSFQRAWSELANNGRWNGLWDRTTTAANKARLLAVSSPGAGAWLQALPSPQLGTLLDDESTRILVGLRLGAELVSPHRCRCGDEVDSLGHHGLSCPQSSGRIARHSALNETFSRGLRSAGYPCILEPSGLVRDDARRPDGMTLTPFERGQMLVWDATVTDSLAPSMVGTGAARPGHAVALAEAAKCRKYSSVGYPHLFSPLAFETLGGPGVLTKKLLNDVGRKLALATGDKRAGEYLLQRLSLDVQRGNAASVRGTLARWTSPSLDLTP

SEQ ID NO: 4353 - protein, 951 aa, Dermanyssus gallinae
MQNLATTPNPLGPNKVTCHQCGQTFARRGLRRHVTVKHGGGGTILLHDEAANEVNPDLTECIQAFFKHGKLVRILPKVVRKSVADALSEVCLKVALDNDDAAWLGLFSFAPVVLRLPVGCRDTRSLAVVIRKNLVEFRRGVRLTDLTTLLLTAGESGGNVERKHSLTRAVSAKMSDGDVSGAARLLLSDDVMVDEPAAAASLREKHPPAQLNLCWPSPPPSQLLPSSTSIKDVRYAVGSFSKSSGAGLDFIRPRLLQDLLSPTLGCSSDGLSKALAKVIDLLRWGAPHPGWCPLIFGARLFALKKMDGSFRPIACASVLRRIAAKLAVRDAKDVISLAVGPHQLGFSTKGGAEIMIHATRAFIDSRLDPSVLVKLDFKNAFNTVRRDHLLKVVGDEAPSIYHQVKLAYGNSSHLVLPSALLTSAVGIQQGDPLAPPLFCLAVKDLVNTLESPLNLWYLDDGVVGGNISTVCEDLKKILSFAACSGLELNPIKCEVHIIGSDTADISEIQNLLPGCRVTDDNLDLLGVPLFSRQLGPTIERGREKLEIGLNRLPQLGAHRGLYLLRSCFSASRLNYLFRGVNTSAFPDLLEEINAKMCCALESILNLKLQDDSLVQAFLPVAKGGLGLPEANSLSVAAHIASLHSATSGVESILDPQAVANFKATLEQIQDDAIAFCGSQPETPSLQRAWSELANDGRLSGLWERTTTAASKARLHAVSSPGAGAWLHALPSPQLGTLLDDESTRILVGLRLGAELVSPHHCKCGDEVDSLGHHGLSCPQSSGRIARHSALNETFSRALRSAGYPCILEPPGLVRDDGKRPDGMTLTPFEQGQMLVWDATVTDSLAPSMVGAGAARPGHAVALAEAAKCRKYSGVSYPHLFSPLAFETLGGAGLLTKKLLNDVGKRLVLATGDKRAGEYLLQRLSLNVQRGNAASIRGTLARWTSPSLDLML

SEQ ID NO: 4354 - protein, 982 aa, Dermanyssus gallinae
MTGDHNNCRTVTQPIHATLPDPSEGAGPSSTSGQNPATTPDPLGSNRVTCHQCGQTFARRGFRRHVTVKHGGGGATLVPNGVMNESNFDLTECIQAFMKNGKLVRILPKVVRKSVADALSEVCIKVASDNDDAAWLGLFSFAPVVLRLPIGRRDTRSLAVVIRKNLVEFRRGVRLTDLVPLLTAGESGGNAEQNQSITRAVSAKLSDGDVSGAARLLLSDDVMVDEPAAAASLREKHPPAQPDLCWPSPPPLQLLPSSTSAEDVRFAVGLFAKSSSAGLDFMRPRLLQDLLSPTLGFSSDTLSKALAKVIDLLRWGAPHPRWCPLIFGARLFALKKKDGSFRPIACSSVLRRVAAKLAVRDSRDLINLAIGPHQLGFYTKGGAEIMIHATRAFIDSRIDSSVLVKLDFKNAFNTVKRNHLLRVVGDEAPGIYHQVKLAYGDSSHLVLPSALLTSAVGVQQGDPLAPPLFCLAVKDLVNSLESPLNLWYLDAGVIAGNIGTVCEDIKKILSFATCSGLELNPTKCEVHIIGSGTADISALRDLLPGCRVTGDDLDLLGVPLFSCHLGPKIEQEREKLEIGFNRLPHLGAHRGLYLLCACFSASRLNYLFRGINCSAFSPQLEEINLKLGLALESILNLRLRNDPLVQAALPVARGGLGLPEAVSLAVAAHIASLHSATSGVEANLDPEAVSNFRATLERTQEDAIAFCGSLPETPSFQREWSELANNGRWNGLWDRTTTAANKARLLAVSSPGAGAWLQALPSPQLGTLLDDESTRILVGLRLGAELVSPHRCRCGDEVDSLGHHGLSCPQSSGRIARHSALNETFSRGLRSAGYPCILEPSGLVRDDARRPDGMTLTPFERGQMLVWDATVTDSLAPSMVGTGAARPGHAVALAEAAKCRKYSSVGYPHLFSPLAFETLGGPGVLTKKLLNDVGRKLALATGDKRAGEYLLQRLSLDVQRGNAASVRGTLARWTSPSLDLTP

SEQ ID NO: 4355 - protein, 982 aa, Dermanyssus gallinae
MINDHNNHTTAAESTRATEPGPPERPVPSVIPEPGSATVPNLQGTNRVTCNFCRQTFTRRGLRRHVTVKHGGADTTHIRDEAMNESNPDLTELIQSFMKSGKLVRILPKAVRKSVADALSEVCSRAALDNDDAAWLGLFSFAPVVLRLPVGRRDTRSLTVIIRKNLVEFQRGVRLTHLGSSSGTDESGPSVERIRPNARAVLAKLSDGDAAGAARLLLSDDVMVDEPAAIASLRAKHPVGQSDPVWPSPPSQQLMPSSTSAEDVRYAMGSFSKSSSAGLDFIRPRLLQDLLSPSLGSSSERLGKALAKLIDVLRWGAPHSGWRPLIFGARLFALKKNDGSYRPIACSSVIRRVAAKLAVRDSRDVIRRVIGRHQLGFSTKRGAEIMVHATRAFIDSRQESSVLVKLDFKNAFNTVKRDHLLKTVAEEAPAIYHQVKLAYGDPSHLILPSALLTSAVGVQQGDPLAPPLFCLAVKDLVNSLESPLNLWYLDDGIIGGSASTVCEDIKKILSFATCSGLELNPTKCEVHIKGMGANDTPVILDLLPGCRVVGDDLDLLGVPLSPDNLTSTIERWREKLQVGLNRLPQLGAHRGLYLLRSCFSASNLNYLFRGVNCIAFSSHLEELNVKQGDALESLLNLRLRGDPLTQASLPVARGGLGLPEAVSLSVAAHIASLHSAISDIEAILDPHAVVHFRSTLEKTQNEAIAFCGALPETPSLQSAWSDLTHDRRWSDLWSRATSDADKARLQAVSSPGASVWLHALPSPQLGTLLDDESTRILVGLRVGAELVSPHRCGCGDEVDSLGHHGLSCAQSSGRIARHSALNETFCRGLRLAGYPCVLEPPGLVRDDGKRPDGMTLTPFDRGQMLVWDATVTDSLAPSMVGTGAARPGHAVALAETAKCRKYSSLDYPHLFSPLAFETLGGPGLLTKKLLRDVGRRLVVATGDKRAGEYLLQRLSLDVQRGNAASVRGTLARWTSPILDLEP

SEQ ID NO: 4356 - protein, 982 aa, Dermanyssus gallinae
MTGDHNNCRTVTQPIHATLPDPSEGAGPSSTSGQNPATTPDPLGSNRVTCHQCGQTFARRGFRRHVTVKHGGGGATLVPNGVMNESNFDLTECIQAFMKNGKLVRILPKVVRKSVADALSEVCIKVASDNDDAAWLGLFSFAPVVLRLPIGCRDTRSLAVVIRKNLVEFRRGVRLTDLVPLLTAGESGGNAEQNQSITRAVSAKLSDGDVSGAARLLLSDDVMVDEPAAAASLREKHPPAQPDLCWPSPPPLQLLPSSTSAEDVRFAVGSFAKSSSAGLDFMRPRLLQDLLSPTLGCSSDTLSKALAKVIDLLRWGAPHPRWCPLIFGARLFALKKKDGSFRPIACSSVLRRVAAKLAVRDSRDLINLAIGPHQLGFYTKGGAEIMIHATRAFIDSRIDSSVLVKLDFKNAFNTVKRNHLLRVVGDEAPGIYHQVKLAYGDSSHLVLPSALLTSAVGVQQGDPLAPPLFCLAVKDLVNSLESPLNLWYLDDGVIAGNIGTVCEDIKKILSFATCSGLELNPTKCEVHIIGSGTADISALRDLLPGCRVTGDDLDLLGVPLFSCHLGPKIEQEREKLEIGFNRLPQLGAHRGLYLLRACFSASRLNYLFRGIKCSAFSPQLEEINLKLGLALESILNLRLRNDPLVQAALPVARGGLGLPEAVSLAIAAHIASLHSVTSGVEAILDPEAVSNFRATLERTQEDAIAFCGSLPETPSFQRAWSELANNGRWNGLWDRTTTAANKARLLAVSSPGAGAWLQALPSPQLGTLLDDESTRILVGLRLGAELVSPHRCRCGDEVDSLGHHGLSCPQSSGRIARHSALNETFSRGLRSAGYPCILEPSGLVRDDARRPDGMTLTPFERGQMLVWDATVTDSLAPSMVGTGAARPGHAVALAEAAKCRKYSSVGYPHLFSPLAFETLGGPGVLTKKLLNDVGRKLALATGDKRAGEYLLQRLSLDVQRGNAASVRGTLARWTSPSLDLTP

SEQ ID NO: 4357 - protein, 896 aa, Dermanyssus gallinae
MQNLATTPNPLGPNKVTCHQCGQTFARRGLRRHVTVKHGGGGTIPLHDEAANEVNPDLTECIQAFFKHGKLVRILPKVVRKSVADALSEVCLKVALDNDDAWLGLFSFAPVVLRLPVGCRDTRSLAVVIRKNLVEFRRGVRLTDLTLLLTAGESGGNVERTALTRAVSAKMSDGDVSGAARLLLSDDVMVDEPAAAASLRKKHPPAQLNLCWPSPPPSQLLPSSTSIKDVRYAVGSFSKSSDAGLDFIRPRLLQDLLSPTLGCSSDGLSKALAKVIDLLRWGAPHPGWCPLIFGARLFALKKMDGSFRPIACASVLRRIAAKLAVRDAKDVISLAVGPHQLGFSTKGGAEIMIHATRAFIDSRLDPSVLVKLDFKNAFNTVRRDHLLKVVGDEAPSIYHQVKLAYGNSSHLVLPSALLTLAVGIQQGDPLAPPLFCLAVKDLVNTLESPLNLWYLDDGVVGGNISTVCEDLKKILSFAACSGLELNPIKCEVHIIGSDTADISEIQNLLPGCRVIDDNLDLLGVPLFSRQLGPTIERGREKLEIGLNRLPQLGAHRGLYLLRSCFSASRLNYLFRGVNTSAFPDLLEEINAKMCCALESILNLKLQDDSLVQAFLPVARVGLGLPEANSLSVAAHIASLHSATSGVESILDPQAVANFKATLEQIQDDAIAFCGSQPETPSLQRAWSQLANDGCLSGLWERTTTDASKARLHAVSSPGAGAWLHALPSPQLGTLLDDESTRILVGLRLGAELVSPHHCKCGDEVDSLGHHGLSCPQSSGRIARHSALNETFSRALRSAEYPCILEPPGLVRDDGKRPDGMTLTPFEQGQMLVWDATVTDSLAPSMVGAGAVRPGHAVALAEAAKCRKYSGVSYPHLFSPLAFETLGGGWAAHEETA

SEQ ID NO: 4358 - protein, 950 aa, Dermanyssus gallinae
MQNLATTPNPLGPNKVTCHQCGQTFARRGLRRHVTVKHGGGGTILLHDEAANEVNPDLTECIQAFFKHGKLVRILPKVVRKSVADALSEVCLKVALDNDDAAWLGLFSFAPVVLRLPVGCRDTRSLAVVIRKNLVEFRRGVRLTDLTLLLTAGESGGNVERKHSLTRAVSAKMSDGDVSGAARLLLSDDVMVDEPAAAASLREKHPPAQLNLCWPSPPPSQLLPSSTSIKDVRYAVGSFSKSSGAGLDFIRPRLLQDLLSPTLGCSSDGLSKALAKVIDLLRWGAPHPGWCPLIFGARLFALKKMDGSFRPIACASVLRRIAAKLAVRDAKDVISLAVGPHQLGFSTKGGAEIMIHATRAFIDSRLDPSVLVKLDFKNAFNTVRRDHLLKVVGDEAPSIYHQVKLAYGNSSHLVLPSALLTSAVGIQQGDPLAPPLFCLAVKDLVNTLESPLNLWYLDDGVVGGNISTVCEDLKKILSFAACSGLELNPIKCEVHIIGSDTADISEIQNLLPGCRVTDDNLDLLGVPLFSRQLGPTIERGREKLEIGLNRLPQLGAHRGLYLLRSCFSASRLNYLFRGVNTSAFPDLLEEINAKMCCALESILNLKLQDDSLVQAFLPVAKGGLGLPEANSLSVAAHIASLHSATSGVESILDPQAVTNFKATLEQIQDDAIAFCGSQPETPSLQRAWSELANDGRLSGLWERTTTAASKARLHAVSSPGAGAWLHALPSPQLGTLLDDESTRILVGLRLGAELVSPHHCKCGDEVDSLGHHGLSCPQSSGRIARHSALNETFSRALRSAGYPCILEPPGLVQDDGKRPDGMTLTPFEQGQMLVWDATVTDSLAPSMVGAGAARPGHAVALAEAAKCRKYSGVSYPHLFSPLAFETLGGAGLLTKKLLNDVGKRLVLATGDKRAGEYLLQRLSLNVQRGNAASIRGTLARWTSPSLDLML

SEQ ID NO: 4359 - protein, 976 aa, Dermanyssus gallinae
MTDDHNIGRTVTEPTLVTSSDPSEGVGPSFTSIQNSLGPNKVTCHLCGQTFARRGLRRHVTVKHGGGDAIPLHNGPSNEINPDLTECIQAYIKNGKLVRILPKVVRKSVADALSEVCLKVALDNDDAAWLGLFSFAPVVLRLPVGCRDTRSLAVVIRKNLVEFRRGARLTDLALLHTAGESGGNAERNHSITRAVSAKLSDGDVSGVARLLLSDDVMVDDPAAAALLREKHPPAQPDLCWPSPSPSQLLPSSTSVKDVRYTVGSFSKSSSAGLDFIRPRLLQDLLSPTLGCSSEELGKALAKVIDLVRWGAPHPMWCPLIFGARLFALKKKDGSFRPIACSSVLRRIAAKLAVRDSRDVISLAIGPHQLGFSTKEGAEIMIHATRAFIDSRLDPSVLVKLDFKNAFNTVRRDHLLKVVGDETPAIYHQVKLAYGDPSHLVLPSALLTSAVGVQQGDPLAPPLFCLAVKDLVNSLESPLNLWYLDDGVIGGNISTVCEDLKKILSFSTCSGLKLNPIKCEVHIIGSGTAEISAIQNLLPGCRVTGDDLDILGVPLFSRHLGPTIERGMEKLEVGFTRLPQLGAHRGLYLLRSCFSASRLNYLFRGINSSAFSAQLEEINSKMGLALESILNLRLRDDSLVQAFLPVARGGLGLPEAVSLSVAAHIASLHSATSGVESILDSRAIANFQATLEQTHDDAIAFCGSLPETPSLQRAWSELANDGRWSGLWDRTTTAASKARLQALSSPGAGAWLHALPSPQLGTLLDDESTRILVGLRLGVELVSPHQCKCGDEVDFLGHHGLSCPQSSGRIARHSALNETFSRGLRSAGYPCILEPPGLVRDDGKRPDGMTLTPFERGQMLVWDATVTDSLAPSMVGAGAARPGHAVALAEAAKCRKYSSVAYPHMFSPLAFETLEGPGLLTKKLLNDVGRRLKLATGDKRAGEYLQQRLSLDVQRGNAASVRGTLARWTSPSLDLTP

SEQ ID NO: 4360 - protein, 982 aa, Dermanyssus gallinae
MTDDHNNGRKVTEPTPVTLSDSSEGAGPSFTPIEILATTPNPLGPNKVTCHQCGQTFARRGLRRHVTVKHGGESTIPHHDGAPNEVNSDLTECIQAFMKNGKLVRILPKVVRKSVADALSEVLLKVAVDNDDAAWLGLFSFAPVVLRLPIGCRDTRSLAVVIRKNLVEFRRGARLTDLALLQTAGESGGNIERNHSITRAVMAKLSDGDVSGAARLLLSDDVMVDEPAAAASLREKHPPAQPDLCWPSPPPSQLLPSSTSVEDIRYTMGSFSKSSSAGLDFIRPRLLQDLLSPTLGCSSDALSKALAKVIDLLRWGAPHPRWCPLIFGARLFALKKKDGSFRPIACSSVLRRIAAKLAVRDSKDVISLAVGPHQLGFSTKGGAEIMIHATRAFIDSRPDPSVLVKLDFKNAFNTVRRDHLLKVVGDETPAIYHQVKLAYGAPSHLVLPSALLTSAVGVQQGDPLAPPLFCLAVKDLVNSLESPLNLWYLDDGVIGGNISTVCEDLKKILNFTTCSGLDLNPVKCEVHITGSSTADISAIQNLLPGCRVTGDDLDLLGVPLFARHIGPTIERGREKLEIGFNRLPQLGAHRGLYLLRSCFSASRLNYLFRGTNSSAFSAQLEEINLKMGFALESILNLRLRDDSLVQAFLPVARGGLGLPEAVSLSVAAHIASLHSATSGVESILDPQAIASFHSTLKKIQDDANAFCGSLPETPSLQRSWSELANDGRWSGLWDRTTTATSKARLQAVSSPGAGAWLHALPSPQLGTLLDDESTRILVGLRLGVDLVSPHQCRCGDEVDSLGHHGLSCPQSSGRIARHSALNETFSRGLRSAGYPCILEPPGLVRDDGRRPDGMTLTPFERGQMLVWDATVTDSLAPSMVGTGASRPGHAVSLAEAAKCRKYSSIAYPHLFSPLAFETLGGPGLLTKKLLNDVGRRLVLATGDKRAGEYLLQRLSLDVQRGNAASVRGTLARWTSPSLDLTP

SEQ ID NO: 4361 - protein, 910 aa, Dermanyssus gallinae
MGATLVPNGVMNESNFDLTECIQAFMKNGKLVRILPKVVRKSVADALSEVCIKVASDNDDAAWLGLFSFAPVVLRLPIGRRDTRSLAVVIRKNLVEFRRGVRLTDLVPLLTAGESGGNAGQNQSITRAVSAKLSDGDVSGAARLLLSDDVMVDEPAAAASLREKHPPAQPDLCWPSPPPLQLLPSSTSAEDVRFAVGSFAKSSSAGLDFMRPRLLQDLLSPTLGFSSDTLSKALAKVIDLLRWGAPHPRWCPLIFGARLFALKKKDGSFRPIACSSVLRRVAAKLAVRDSRDLINLAIGPHQLGFYTKGGAEIMIHATRAFIDSRIDSSVLVKLDFKNAFNTVKRNHLLRVVGDEAPGIYHQVKLAYGDSSHLVLPSALLTSAVGVQQGDPLAPPLFCLAVKDLVNSLESPLNLWYLDDGVIAGNIGTVCEDIKKILSFATCSGLELNPTKCEVHIIGSGTADISALRDLLPGCRVTGDDLDLLGVPLFSCHLGPKIEQEREKLEIGFNRLPQLGAHRGLYLLRACFSASRLNYLFRGINCSAFSPQLEEINLKLGLALESILNLRLRNDPLVQAALPVARGGLGLPEAVSLAIAAHIASLHSATSGVEANLDPEAVSNFRATLERTQEDAIAFCGSLPETPSFQRAWSELANNGRWNGLWDRTTTAANKARLLAVSSPGAGAWLQALPSPQLGTLLDDESTRILVGLRLGAELVSPHRCRCGDEVDSLGHHGLSCPQSSGRIARHSALNETFSRGLRSAGYPCILEPSGLVRDDARRPDGMTLTPFERGQMLVWDATVTDSLAPSMVGTGAARPGHAVALAEAAKCRKYSSVGYPHLFSPLAFETLGGPGVLTKKLLNDVGRKLALATGDKRAGEYLLQRLSLDVQRGNAASVRGTLARWTSPSLDLTP

SEQ ID NO: 4362 - protein, 950 aa, Dermanyssus gallinae
MQNLATTPNLLGPNKVTCHQCGQTFARRGLRRHVTVKHGGGGTILLHDEAANEVNPDLTECIQEFFKHGKLVRILPKVVRKSVADALSEVCLKVALDNDDAAWLGLFSFAPVVLRLPVGCRDTRSLAVVIRKNLVEFRRGVRLTDLTLLLTAGESGGNVERKHSLTRAVSAKMSDGDVSGAARLLLSDDVMVDEPAAAASLREKHPPAQLNLCWPSPPPSQLLPSSTSIKDVRYAVGSFSKSSGAGLDFIRPRLLQDLLSPTLGCSSDGLSKALAKVIDVLRWGAPHPGWCPLIFGARLFALKKMDGSFRPIACASVLRRIAAKLAVRDAKDVISLAVGPHQLGFSTKGGAEIMIHATRAFIDSRLDPSVLVKLDFKNAFNTVRRDHLLKVVGDEAPSIYHQVKLAYGNSSHLVLPSALLTSAVGIQQGDPLAPPLFCLAVKDLVNTLESPLNLWYLDDGVVGGNISTVCEDLKKILSFAACSGLELNTIKCEVHIIGSDTADISEIQNLLPGCRVTDDNLDLLGVPLFSRQLGPTIERGREKLEIGLNRLPQLGAHRGLYLLRSCFSASRLNYLFRGVNTSAFPDLLEEINAKMCCALESILNLKLQDDSLVQAFLPVAKGGLGLPEANSLSVAAHIASLHSATSGVESILDPQAVANFKATLEQIQDDAIAFCGSQPETPSLQRAWSELANDGRLSGLWERTTTAASKARLHAISSPGAGAWLHALPSPQLGTLLDDESTRILVGLRLGAELVSPHHCKCGDEVDSLGHHGLSCPQSSGRIARHSALNETFSRALRSAGYPCILEPPGLVRDDGKRPDGMTLTPFEQGQMLVWDATVTDSLAPSTVGAGAVRPGHAVALAEAAKCRKYSGVSYPHLFSPLAFETLGGAGLLTKKLLNDVGKRLVLATGDKRAGEYLLQRLSLNVQRGNAASIRGTLARWTSPSLDLML

SEQ ID NO: 4363 - protein, 982 aa, Dermanyssus gallinae
MTGDHNNCRTVTQPIHATLPDPSEGAGPSSTSGQNPATTPDPLGSNRVTCHQCGQTFARRGFRRHVTVKHGGGGATLVPNGVMNESNFDLTECIQAFMKNGKLVRILPKVVRKSVADALSEVCIKVASDNDDAAWLGLFSFAPVVLRLPIGCRDTRSLAVVIRKNLVEFRRGVRLTDLVPLLTAGESGGNAEQNQSITRAVSAKLSDGDVSGAARLLLSDDVMVDEPAAAASLREKHPPAQPDLCWPSPPPLQLLPSSTSAKDVRFAVGSFAKSSSAGLDFMRPRLLQDLLSPTLGFSSDTLSKALAKVIDLLRWGAPHPRWCPLIFGARLFALKKKDGSFRPIACSSVLRRVAAKLAVRDSRDLINLAIGPHQLGFYTKGGAEIMIHATRAFIDSRIESSVLVKLDFKNAFNTVKRNHLLRVVGDEAPGIYHQVKLAYGDSSHLVLPSALLTSAVGVQQGDPLAPPLFCLAVKDLVNSLESPLNLWYLDDGVIAGNIGTVCEDIKKILSFATCSGLELNPTKCEVHIIGSGTADISALRDLLPGCRVTGDDLDLLGVPLFSCHLGPKIEQEREKLEIGFNRLPQLGAHRGLYLLRACFSASRLNYLFRGIKCSAFSPQLEEINLKLGLALESILNLRLRNDPLVQAALPVARGGLGLPEAVSLAIAAHIASLHSATSGVEANLDPEAVSNFRATLERTQEDAIAFCGSLPETPSFQRAWSELANNGRWNGLWDRTTTAANKARLLAVSSPGAGAWLQALPSPQLGTLLDDESTRILVGLRLGAELVSPHRCSCGDEVDSLGHHGLSCPQSSGRIARHSALNETFSRGLRSAGYPCILEPSGLVRDDARRPDGMTLTPFERGQMLVWDATVTDSLAPSMVGTGAARPGHAVALAEAAKCRKYSSVGYPHLFSPLAFETLGGPGVLTKKLLNDVGRKLALATGDKRAGEYLLQRLSLDVQRGNAASVRGTLARWTSPSLDLTP

SEQ ID NO: 4364 - protein, 949 aa, Dermanyssus gallinae
MTDDHNIGRTVTEPTLVTSSDPSEGVGPSFTSIQNSLGPNKVTCHLCGQTFARRGLRRHVTVKHGGGDAIPRHNGPSNEINPDLTECIQAYIKNGKLVRILPKVVRKSVADALSEVCLEVALDNDDAAWLGLFSFAPVVLRLPVGCRDTRSLAVVIRKNLVEFRRGARLTDLALLHTAGESGGNAERNHSITRAVSAKLSDGDVSGAARLLLSDDVMVDDPAAAASLREKHPPAQPDLCWPSPSPSQLLPSSTSVKDVRYTVGSFSKSSSAGLDFIRPRLLQDLLSPTLVGSSEGLGKALAKVIDLLRWGAPHPRWCPLIFGARLFALKKKDGSFRPIACSSVLRRIAAKLAVRDSRDVISLAIGPHQLGFSTKGGAEIMIYATRAFIDSRLDPSVLVKLDFKNAFNTVRRDHLLKVVGDETPAIYHQVKLAYGDPSHLVLPSALLTSAVGVQQGDPLAPPLFCLAVKDLVNSLESPLNLWYLDDGVIGGSISTVCEDLKKILSFSTCSGLELNPIKCEVHIIGSGTAEISAIQNLLPGCRVTGDDLDILGVPLFSRHLGPTIERGMEKLEVGFTRLPQLGAHRGLYLLRSCFSASRLNYLFRGINSSAFSAQLEEINSKMGLALESILNLRLRDDSLVQAFLPVARGGLGLPEAVSLSVAAHIASLHSATSGVESILDSRAIANFQATLEQTHDDAIAFCGSLPETPSLQRAWSELANDGRWSGLWDRTTTAASKARLQALSSPGAGAWLHALPSPQLGTLLDDESTRILVGLRLGVELVSPHQCKCGDEVDSLGHHGLSCPQSSGRIARHSALNETFSRGLRSAGYPCILEPPGLVRDDGKRPDGMTLTPFERGQMLVWDATVTDSLAPSMVGAGAARPGHAVALAEAAKCRKYSSVAYPHMFSPLAFETLGGPGLLTKKLLNDVGRRLKLATGDKRAGEIYSNVCH

SEQ ID NO: 4365 - protein, 982 aa, Dermanyssus gallinae
MTGDHNNCRTVTQPIHATLPDPSEGAGPSSTSGQNPATTPDPLGSNRVTCHQCGQTFARRGFRRHVTVKHGGGGATLVPNGVMNESNFDLTECIQAFMKNGKLVRILPKVVRKSVADALSEVCIKVASDNDDAAWLGLFSFAPVVLRLPIGRRDTRSLAVVIRKNLVEFRRGVRLTDLVPLLTAGESGGNAEQNQSITRAVSAKLSDGDVSGAARLLLSDDVMVDEPAAAASLREKHPPAQPDLCWPSPPPLQLLPSSTSAEDVRFAVGSFAKSSSAGLDFMRPRLLQDLLSPTLGFSSDTLSKALAKVIDLLRWGAPHPRWCPLIFGARLFALKKKDGSFRPIACSSVLRRVAAKLAVRDSRDLINLAIGPHQLGFYTKGGAEIMIHATRAFIDSRIDSSVLVKLDFKNAFNTVKRNHLLRVVGDEAPGIYHQVKLAYGDSSHLVLPSALLTSAVGVQQGDPLAPPLFCLAVKDLVNSLESPLNLWYLDDGVIAGNIGTVCEDIKKILSFATCSGLELNPTKCEVHIIGSGTADISALRDLLPGCRVTGDDLDLLGVPLFSCHLGPKIEQEREKLEIGFNRLPQLGAHRGLYLLRACFSASRLNYLFRGINCSAFSPQLEEINLKLGLALESILNLRLRNDPLVQAALPVARGGLGLPEAVSLAIAAHIASLHSATSGVEANLDPEAVSNFRATLERTQEDAIAFCGSLPETPSFQREWSELANNGRWNGLWDRTTTAANKARLLAVSSPGAGAWLQALPSPQLGTLLDDESTRILVGLRLGAELVSPHRCRCGDEVDSLGHHGLSCPQSSGRIARHSALNETFSRGLRSAGYPCILEPSGLVRDDARRPDGMTLTPFERGQMLVWDATVTDSLAPSMVGTGAARPGHAVALAEAAKCRKYSSVGYPHLFSPLAFETLGGPGVLTKKLLNDVGRKLALATGDKRAGEYLLQRLSLDVQRGNAASVRGTLARWTSPSLDLTP

SEQ ID NO: 4366 - protein, 982 aa, Dermanyssus gallinae
MTGDHNNCRTVTQPIHATLPDPSEGAGPSSTSGQNPATTPDPLGSNRVTCHQCGQTFARRGFRRHVTVKHGGGGATLVPNGVMNESNFDLTECIQAFMKNGKLVRILPKVVRKSVADALSEVCIKVASDNDDAAWLGLFSFAPVVLRLPIGCRDTRSLAVVIRKNLVEFRRGVRLTDLVPLLTAGESGGNAEQNQSITRAVSAKLSDGDVSGAARLLLSDDVMVDEPAAAASLREKHPPAQPDLCWPSPPPLQLLPSSTSAEDVRFAVGSFAKSSSAGLDFMRPRLLQDLLSPTLGFSSDTLSKALAKVIDLLRWGAPHPRWCPLIFGARLFALKKKDGSFRPIACSSVLRRVAAKLAVRDSRDLINLAIGLHQLGFYTKGGAEIMIHATRAFIDSRIDSSVLVKLDFKNAFNTVKRNHLLRVVGDEAPGIYHQVKLAYGDSSHLVLPSALLTSAVGVQQGDPLAPPLFCLAVKDLVNSLESPLNLWYLDDGVIAGNIGTVCEDIKKILSFATCSGLELNPTKCEVHIIGSGTADISALRDLLPGCRVTGDDLDLFGVPLFSCHLGPKIEQEREKLEIGFNRLPQLGAHRGLYLLRACFSASRLNYLFRGIKCSAFSPQLEEINLKLGLALESILNLRLRNDPLVQAALPVARGGLGLPEAVSLAIAAHIASLHSATSGVEANLDPEAVSNFRATLERTQEDAIAFCGSLPETPSFQRAWSELANNSRWNGLWDRTTTAANKARLLAVSSPGAGAWLQALPSPQLGTLLDDESTRILVGLRLGAELVSPHRCRCGDEVDSLGHHGLSCPQSSGRIARHSALNETFSRGLRSAGYPCILEPSGLVRDDARRPDGMTLTPFERGQVLVWDATVTDCLAPSMVGTGAARPGHAVALAEAAKCRKYSSVGYPHLFSPLAFETLGGPGVLTKKLLNDVGRKLALATGDKRAGEYLLQRLSLDVQRGNAASVRGTLARWTSPSLDLTP

SEQ ID NO: 4367 - protein, 900 aa, Dermanyssus gallinae
MDESNPDLTELIQSFMKSGKLVRILPKAVRKSVADALSEVCSKAALDNDDAAWLGLFSFAPVVLRLPVGRRDTRSLTVIIRKNLVEFQRGVRLTHLGSSSGTDESGPSVERIRPNARAVLAKLSDGDAAGAARLLLSDDVMVDEPDAIASLRAKHPVGQSDPVWPSPPSQQLMPSSTSAEDVRYAMGSFSKSSSAGLDFIRPRLLQDLLSPSLGSSSERLGKALAKLIDVLRWGAPHPGWRPLIFGARLFALKKNDGSYRPIACSSVIRRVAAKLAVRDSRDVIRRVIGRHQLGFSTKRGAEIMVHATRAFIDSRQESSVLVKLDFKNAFNTVKRDHLLKTVAEEAPAIYHQVKLAYGDPSHLILPSALLTSAVGVQQGDPLAPPLFCLAVKDLVNSLESPLNLWYLDDGIIGGSASTVCEDIKKILSFATCSGLELNPTKCEVHIKGMGANDTPVILDLLPGCRVVGDDLDLLGVPLSPDNLTSTIERWREKLQVGLNRLPQLGAHRGLYLLRSCFSASNLNYLFRGVNCIAFSSHLEELNVKQGDALESLLNLRLRGDPLIQASLPVARGGLGLPEAVSLSVAAHIASLHSAIGDIEAILDPHAVVHFRSTLEKTQNEAIAFCGALPETPSLQSAWSDLTHDRRWSDLWSRATSDADKARLQAVSSPGASVWLHALPSPQLGTLLDDESTRILVGLRVGAELVSPHRCGCGDEVDSLGHHGLSCAQSSGRIARHSALNETFCRGLRLAGYPCVLEPPGLVRDDGKRPDGMTLTPFDRGQMLVWDATVTDSLAPSMVGTGAARPGHAVALAETAKCRKYSSLDYPHLFSPLAFETLGGPGLLTKKLLRDVGRRLVVATGDKRAGEYLLQRLSLDVQRGNAASVRGTLARWTSPILDLEH

SEQ ID NO: 4368 - protein, 950 aa, Dermanyssus gallinae
MQNLATTPNPLGPNKVTCHQCGQTFARRGLRRHVTVKHGGGGTIPLHDEAANEVNPDLTECIQAFFKHGKLVRILPKVVRKSVADALSEVCLKVALDNDDAAWLGLFSFAPVVLRLPVGCRDTRSLAVVIRKNLVEFRRGVRLTDLTLLLTAGESGGNVERKHSLTRAVSAKMSDGDVSGAARLLLSDDVMVDEPAAAASLREKHPPAQLNLCWPSPPPSQLLPSSTSIKDVRYAVGSFSKSSGAGLDFIRPRLLQDLLSPTLGCSSDGLSKALAKVIDLLRWGAPHPGWCPLIFGARLFALKKMDGSFRPIACASVLRRIAAKLAVRDAKDVISLAVGPHQLGFSTKGGAEIMIHATRAFIDSRLEPSVLVKLDFKNAFNTVRRDHLLKVVGDEAPSIYHQVKLAYGNSSHLVLPSALLTSAVGIQQGDPLAPPLFCLAVKDLVNTLESPLNLWYLDDGVVGGNISTVCEDLKKILSFAACSGLELNPIKCEVHIIGSDTADISEIQNLLPGCRVTDDNLDLLGVPLFSRQLGPTIERGREKLEIGLNRLPQLGAHRGLYLLRSCFSASRLNYLFRGVNTSAFPDLLEEINAKMCCALESILNLKLQDDSLVQAFLPVAKGGLGLPEANSLSVAAHIASLHSATRGVESILDPQAVANFKATLEQIQDDAIAFCGSQPENPSLQRAWSELANDGRLSGLWERTTTAASKARLHAVSSPGAGAWLHALPSPQLGTLLDDESTRILVGLRLGAELVSPHHCKCGDEVDSLGHHGLSCPQSSGRIARHSALNETFSRALRSAGYPCILEPPGLVRDDGKRPDGMTLTPFEQGQMLVWDATVTDSLAPSMVGAGAVRPGHAVALAEAAKCRKYSGVSYPHLFSPLAFETLGGAGLLTKKLLNDVGKRLVLATGDKRAGEYLLQRLSLNVQRGNAASIRGTLARWTSPSLDLML

SEQ ID NO: 4369 - protein, 900 aa, Dermanyssus gallinae
MNESNFDLTECIQAFMKNGKLVRILPKVVRKSVADALSEVCIKVASDNDDAAWLGLFSFAPVVLRLPIGRRDTRSLAVVIRKNLVEFRRGVRLTDLVPLLTAGESGGNAEQNQSITRAVSAKLSDGDVSGAARLLLSDDVMVDEPAAAASLREKHPPAQPDLCWPSPPPLQLLPSSTSAEDVRFAVGSFAKSSSAGLDFMRPRLLQDLLSPTLGFSSDTLSKALAKVIDLLRWGAPHPRWCPLIFGARLFALKKKDGSFRPIACSSVLRRVAAKLAVRDSRDLINLAIGPHQLGFYTKGGAEIMIRATRAFIDSRIDSSVLVKLDFKNAFNTVKRNHLLRVVGDEAPGIYHQVKLAYGDSSHLVLPSALLTSAVGVQQGDPLAPPLFCLAVKDLVNSLESPLNLWYLDDGVIAGNIGTVCEDIKKILSFATCSGLELNPTKCEVHIIGSGTADISALRDLLPGCRVTGDDLDLLGVPLFSCHLGPKIEQEREKLEIGFNRLPQLGAHRGLYLLRACFSASRLNYLFRGINCSAFSPQLEEINLKLGLALESILILRLRNDPLVQAALPVARGRLGLPEAVSLAIAAHIASLHSATSGVEANLDPEAVSNFRATLERTQEDAIAFCGSLPETPSFQRAWSELANNGRWNGLWDRTNTAANKARLLAVSSPGAGAWLQALPSPQLGTLLDDESTRILVGLRLGAELVSPHRCRCGDEVDSLGHHGLSCPQSSGRIARHSALNETFSRGLRSAGYPCILEPSGLVRDDARRPDGMTLTPFERGQMLVWDATVTDSLAPSMVGTGAARPGHAVALAEAAKCRKYSSVGYPHLFSPLAFETLGGPGVLTKKLLNNVGRKLALATGDKRAGEYLLQRLSLDVQRGNAASVRGTLARWTSPSLDLTP

SEQ ID NO: 4370 - protein, 900 aa, Dermanyssus gallinae
MNESNFDLTECIQAFMKNGKLVRILPKVVRKSVADALSEVCIKVASDNDDAAWLGLFSFAPVVLRLPIGCRDTRSLAVVIRKNLVEFRRGVRLTDLVPLLTAGESGGNAEQNQSITRAVSAKLSDGDVSGAARLLLSDDVMVDEPAAAASLREKHPPAQPDLCWPSPPPLQLLPSSTSAEDVRFAVGSFAKSSSAGLDFMRPRLLQDLLSPTLGCSSDTLSKALAKVIDLLRWGAPHPRWCPLIFGARLFALKKKDGSFRPIACSSVLRRVAAKLAVRDSRDLINLAIGPHQLGFYTKGGAEIMIHATRAFIDSRIDSSVLVKLDFKNAFNTVKRNHLLRVVGDEAPGIYHQVKLAYGDSSHLVLPSALLTSAVGVQQGDPLAPPLFCLAVKDLVNSLESPLNLWYLDDGVIAGNIGTVCEDIKKILSFATCSGLELNPTKCEVHIIGSGTADISALRDLLPGCRVTGDDLDLLGVPLFSCHLGPKIEQGREKLEIGFNRLPQLGAHRGLYLLRACFSASRLNYLFRGIKCSAFSPQLEEINLKLGLALESILNLRLRNDPLVQAALPVARGGLGLPEAVSLAIAAHIASLHSATSGVEANLDPEAVSNFRATLERTQEDAIAFCGSLPETPSFQRAWSELANNGRWNGLWDRTTTAANKARLLAVSSPSAGAWLQALPSPQLGTLLDDESTRILVGLRLGAELVSPHRCRCGDEVDSLGHHGLSCPQSSGRIARHSALNETFSRGLRSAGYPCILEPSGLVRDDARRPDGMTLTPFERGQMLVWDATVTDSLAPSMVGTGAARPGHAVALAEAAKCRKYSSVGYPHLFSPLAFETLGGPGVLTKKLLNDVGRKLALATGDKRAGEYLLQRLSLDVQRGNAASVRGTLARWTSPSLDLTP

SEQ ID NO: 4371 - protein, 982 aa, Dermanyssus gallinae
MTGDHNNCRTVTQPIHATLPDPSEGAGPSSTSGQNPATTPDPLGSNRVTCHQCGQTFARRGFRRHVTVKHGGGGATLVPNDVMNESNFDLTECIQAFMKNGKLVRILPKVVRKSVADALSEVCIKVASDNDDAAWLGLFSFAPVVLRLPIGCRDTRSLAVVIRKNLVEFRRGVRLTDLVPLLTAGETGGNAEQNQSITRAVSAKLSDGDVSEAARLLLSDDVMVDEPAAAASLREKHPPAQPDLCWPSPPPLQLLPSSTSAEDVRFAVGSFAKSSSAGLDFMRPRLLQDLLSPTLGCSSDTLSKALAKVIDLLRWGAPHPRWCPLIFGARLFALKKKDGSFRPIACSSVLRRVAAKLAVRDSRDLINLAIGPHQLGFYTKGGAEIMIHATRAFIDSRIDSSVLVKLDFKNAFNTVKRNHLLRVVGDEAPGIYHQVKLAYGDPSHLVLPSALLTSAVGVQQGDPLAPPLFCLAVKDLVNSLESPLNLWYLDDGVIAGNIDTVCEDIKKILSFATCSGLELNPTKCEVHIIGSGTADISALRDLLPGCRVTGDDLDLLGVPLFSCHLGPKIEQEREKLEIGFNRLPQLGAHRGLYLLRACFSASRLNYLFRGIKCSAFSPQLEEINLKLGLALESILNLRLRNDPLVQAALPVARGGLGLPEAVSLAIAAHIASLHSATSGVEANLDPEAVSNFRATLERTQEDAIAFCGSLPETPSFQRAWSELANNGRWNGLWDRTTTAANKARLLAVSSPGAGAWLQALPSPQLGTLLDDESTRILVGLRLGAELVSPHRCRCGDEVDSLGHHGLSCPQSSGRIARHSALNETFSRGLRSAGYPCILEPSGLVRDDARRPDGMTLTPFERGQMLVWDATVTDSLAPSMVGTGAARPGHAVALAEAAKCRKYSSVGYPHLFSPLAFETLGGPGVLTKKLLNDVGRKLALATGDKRAGEYLLQRLSLDVQRGNAASVRGTLARWTSPSLDLTP

SEQ ID NO: 4372 - protein, 982 aa, Dermanyssus gallinae
MTGDDNNCRTVTQPIHATLPDPSEGAGPSSTSGQNPATTPDPLGSNRVTCHQCGQTFARRGFRRHVTVKHGGGGATLVPNGVMNESNFDLTECIQAFMKNGKLVRILPKVVRKSVADALSEVCNKVASDNDDAAWLGLFSFAPVVLRLPIGCRDTRSLAVVIRKNLVEFRRGVRLTDLVPLLTAGESGGNAEQNQSITRAVSAKLSDGDVSGAARLLLSDDVMVDEPAAAASLREKHPPAQPDLCWPSPPPLQLLPSSTSAEDVRFAVGSFAKSSSAGLDFMRPRLLQDLLSPTLGCSSDTLSKALAKVIDLLRWGAPHPRWCPLIFGARLFALKKKDGSFRPIACSSVLRRVAAKLAVRDSRDLINLAIGPHQLGFYTKGGAEIMIHATRAFIDSRIDSSVLVKLDFKNAFNTVKRDHLLRVVGDEAPGIYHQVKLAYGDSSHLVLPSALLTSAVGVQQGDPLAPPLFCLAVKDLVNSLESPLNLWYLDDGVIAGNAGTVCEDIKKILSFATCSGLELNPTKCEVHIIGSGTADISALRDLLPGCRVTGDDLDLLGVPLFSCHLGPKIEQEREKLEIGFNRLPQLGAHRGLYLLRACFSASRLNYLFRGIKCSAFSPQLEEINLKLGLALESILNLRLRNDPLVQAALPVARGGLGLPEAVSLAIAAHIASLHSATSGVEAILDPEAVSNFRATLERTQEDAIAFCGSLPETPSFQRAWSELANNGRWNGLWDRTTTAANKARLLAVSSPGAGAWLQALPSPQLGTLLDDESTRILVGLRLGAELVSPHRCRCGDEVDSLGHHGLSCPQSSGRIARHSALNETFSRGLRSAGYPCILEPSGLVRDDARRPDGMTLTPFERGQMLVWDATVTDSLAPSMVGTGAARPGHAVALAEAAKCRKYSSVGYPHLFSPLAFETLGGPGVLTKKLLNDVGRKLALATGDKRAGEYLLQRLSLDVQRGNAASVRGTLARWTSPSLDLTP

SEQ ID NO: 4373 - protein, 981 aa, Dermanyssus gallinae
MTGDHNNCRTVTQPIHATLPDPSEGAGPSSTSGQNPATTPDPLGSNRVTCHQCGQTFARRGFRRHVTVKHGGGGATLVPNGVMNESNFDLTECIQAFMKNGKLVRILPKVVRKSVADALSEVCIKVASDNDDAAWLGLFSFAPVVLRLPIGCRDTRSLAVVIRKNLVEFRRGVRLTDLVPLLTAGESGGNAEQNQSITRAVSAKLSDGDVSGAARLLLSDDVMVDEPAAAASLREKHPPAQPDLCWPSPPPLQLLPSSTSAEDVRFAVGSFAKSSSAGLDFMRPRLLQDLLSPTLGCSSDTLSKALAKIDLLRWGAPHPRWCPLIFGARLFALKKKDGSFRPIACSSVLRRVAAKLAVRDSRDLINLAIGPHQLGFYTKGGAEIMIHATRAFIDSRIDSSVLVKLDFKNAFNTVKRDHLLRVVGDEAPGIYHQVKLAYGDSSHLVLPSALLTSAVGVQQGDPLAPPLFCLAVKDLVNSLESPLNLWYLDDGVIAGNAGTVCEDIKKILSFATCSGLELNPTKCEVHIIGSGTADISALRDLLPGCRVTGDDLDLLGVPLFSCHLGPKIEQEREKLEIGFNRLPQLGAHRGLYLLRACFSASRLNYLFRGIKCSAFSPQLEEINLKLGLALESILNLRLRNDPLVQAALPVARGGLGLPEAVSLAIAAHIASLHSATSGVEAILDPEAVSNFRATLERTQEDAIAFCGSLPETPSFQRAWSELANNGRWNGLWDRTTTAANKARLLAVSSPGAGAWLQALPSPQLGTLLDDESTRILVGLRLGAELVSPHRCRCGDEVDSLGHHGLSCPQSSGRIARHSALNETFSRGLRSAGYPCILEPSGLVRDDARRPDGMTLTPFERGQMLVWDATVTDSLAPSMVGTGAARPGHAVALAEAAKCRKYSSVGYPHLFSPLAFETLGGPGVLTKKLLNDVGRKLALATGDKRAGEYLLQRLSLDVQRGNAASVRGTLARWTSPSLDLTP

SEQ ID NO: 4374 - protein, 898 aa, Dermanyssus gallinae
MQNLAATPNPLGPNKVTCHQCGQTFARRGLRRHVTVKHGGGGTIPLHDEAANEVNPDLTECIQAFFKHGKLVRILPKVVRKSVADALSEVCLKVALDNDDAAWLGLFSFAPVVLRLPVGCRDTRSLAVVIRKNLVEFRRGVRLTDLTLLLTAGESAGNVERKHSLTRAVSAKMSDGDVSGAARLLLSDDVIVDEPAAAASLREKHPPAQLNLCWPSPPPSQLLPSSTSIKDVRYAVGSFSKSSGAGLDFIRPRLLQDLLSPTFGCSSDGLSKALAKVIDLLRWGAPHPGWCPLIFGARLFALKKMDGSFRPIACASVLRRIAAKLAVRDAKDVISLAVGPHQLGFSTKGGAEIMIHATRAFIDSRLDPSVLVKLDFKNAFNTVRRDHLLKVVGDEAPSIYHQVKLAYGNSSHLVLPSALLTSAVGIQQGDPLAPPLFCLAVKDLANTLESPLNLWYLDDGVVGGNISTVCEDLKKILSFAACSGLELNPIKCEVHIIGSDTADISEIQNLLPGCRVTDDNLDLLGVPLFSRQLGPTIERGREKLEIGLNRLPQLGAHRGLYLLRSCFSASRLNYLFRGVNTSAFPDLLEEINAKMCCALESILNLKLQDDSLVQAFLPVAKGGLGLPEANSLSVAAHIASLHSATSGVESILDPQAVANFKATLEQIQDDTIAFCGSQPETPSLQRAWSELANDGRLSGLWERTTTAASKARLHAVSSPGAGAWLHALPSPQLGTLLDDESTRILVGLRLGAELVSPHYCKCGDEVDSLGHHGLSCPQSSGRIARHSALNETFSRALRSAGYPCILEPPGLVRDDGKRPDGMTLTPFEQGQMLVWDATVTDSLAPSMVGAGAVCPGHAVALAEAAKCRKYSGVSYPHLFSPLAFETLGGGWAAHEETA

SEQ ID NO: 4375 - protein, 982 aa, Dermanyssus gallinae
MTGDHNNCRKVTQPIHATLPDPSEGAGPSSTSGQNPATTPDPLGSNRVTCHQCGQTFARRGFRRHVTVKHGGGGATLVPNGVMNESNFDLTECIQAFMKNGKLVRILPKVVRKSVADALSEVCIKVASDNDDAAWLGLFSFAPVVLRLPIGCRDTRSLAVVIRKNLVEFRRGVRLTDLVPLLTAGESGGNAEQNQSITRAVSAKLSDGDVSGAARLLLSDDVMVDEPAAAASLREKHPPAQPDLCWPSPPPLQLLPSSTSAEDVRFAVGSFAKSSSAGLDFMRPRLLQDLLSPTLGCSSDTLSKALAKVIDLLRWGAPHPRWCPLIFGARLFALKKKDGSFRPIACSSVLRRVAAKLAVRDSRDLINLAIGPHQLGFYTKGGAEIMIHATRAFIDSRIDSSVLVKLDFKNAFNTVKRDHLLRVVGDEAPGIYHQVKLAYGDSSHLVLPSALLTSAVGVQQGDPLAPPLFCLAVKDLVNSLESPLNLWYLDDGVIAGNAGTVCEDIKKILSFATCSGLELNPTKCEVHIIGSGTADISALRDLLPGCRVTGDDLDLLGVPLFSCHLGPKIEQEREKLEIGFNRLPQLGAHRGLYLLRACFSASRLNYLFRGIKCSAFSPQLEEINLKLGLALESILNLRLRNDPLVQAALPVARGGLGLPEAVSLAIAAHIASLHSATSGVEAFLDPEAVSNFRATLERTQEDAIAFCGSLPETPSFQRAWSELANNGRWNGLWDRTTTAANKARLLAVSSPGAGAWLQALPSPQLGTLLDDESTRILVGLRLGAELVSPHRCRCGDEVDSLGHHGLSCPQSSGRIARHSALNETFSRGLRSAGYPCILEPSGLVRDDARRPDGMTLTPFERGQMLVWDATVTDSLAPSMVGTGAARPGHAVALAEAAKCRKYSSVGYPHLFSPLAFETLGGPGVLTKKLLNDVGRKLALATGDKRAGEYLLQRLSLDVQRGNAASVRGTLARWTSPSLDLTP

SEQ ID NO: 4376 - protein, 982 aa, Dermanyssus gallinae
MTGDHNNCRTVTQPIHATLPDPSEGAGPSSTSGQNPATTPDPLGSNRVTCHQCGQTFARRGFRRHVTVKHGGGGATLVPNGVMNESNFDLTECIQAFMKNGKLVRILPKVVRKSVADALSEVCIKVASDNDDAAWLGLFSFAPVVLRLPIGCRDTRSLAVVIRKNLVEFRRGVRLTDLVPLLTAGESGGNAEQNQSITRAVSAKLSDGDVSVAARLLLSDDVLVDEPAAAASLREKHPPAQPDLCWPSPPPLQLLPSSTSAEDVRFAVGSFAKSSSAGLDFMRPRLLQDLLSPTLGFSSDTLSKALAKVIDLLRWGAPHPRWCPLIFGARQFALKKKDGSFRPIACSSVLRRVAAKLAVRDSRDLINLAIGPHQLGFYTKGGAEIMIHATRAFIDSRIDSSVLVKLDFKNAFNTVKRNHLLRVVGDEAPGIYHQVKLAYGDSSHLVLPSALLTSAVGVQQGDPLAPPLFCLAVKDLVNSLESPLNLWYLDDGVIAGNIGTVCEDIKKILSFATCSGLELNPTKCEVHIIGSGTADISALRDLLPGCRVTGDDLDLLGVPLFSCHLGPKIEQEREKLEIGLNRLPQLGAHRGLYLLRACFSASRLNYLFRGIKCSAFSPQLEEINLKLGLALESILNLRLRNDPLVQAALPVARGGLGLPEAVSLAIAAHIASLHSATSGVEANLDPEAVSNFRATLERTQEDAIAFCGSLPETPSFQRAWSELANNGRWNGLWDRTTTAANKARLLAVSSPGAGAWLQALPSPQLGTLLDDESTRILVGLRLGAELVSPHRCRCGDEVDSLGHHGLSCPQSSGRIARHSALNETFSRGLRSAGYPCILEPSGLVRDDARRPDGMTLTPFERGQMLVWDATVTDSLAPSMVGTGAARPGHAVALAEAAKCRKYSSVGYPHLFSPLAFETLGGPGVLTKKLLNDVGRKLALATGDKRAGEYLLQRLSLDVQRGNAASVRGTLGRWTSPSLDLTP

SEQ ID NO: 4377 - protein, 982 aa, Dermanyssus gallinae
MTGDHNNCRTVTQPIHATLPDPSEGAGSSSTSGQNPATTPDPLGSNRVTCHQCGQTFARRGFRRHVTVKHGGGGATLVPNGVMNESNFDLTECIQAFMKNGKLVRILPKVVRKSVADALSEVCIKVASDNDDAAWLGLFSFAPVVLRLPIGCRDTRSLAVVIRKNLVEFRRGVRLTDLVPLLTAGESGGNAEQNQSITRAVSAKLSDGDVSGAARLLLSDDVMVDEPAAAASLREKHPPAQPDLCWPSPPPLQLLPSSTSAEDVRFAVGSFAKSSSAGLDFMRPRLLQDLLSPTLGCSSDTLSKALAKVIDLLRWGAPHPRWCPLIFGARLFALKKKDGSFRPIACSSVLRRVAAKLAVRDSRDLINLAIGPHQLGFYTKGGAEIMIHATRAFIDSRIDSSVLVKLDFKNAFNTVKRNHLLRVVGDEAPGIYHQVKLVYGDSSHLVLPSALLTSAVGVQQGDPLAPPLFCLAVKDLVNSLESPLNLWYLDDGVIAGNIGTVCEDIKKILSFATCSGLELNPTKCEVHIIGSGTADISALRDLLPGCRVTGDDLDLLGVPLFSCHLGPKIEQEREKLEIGFNRLPQLGAHRGLYLLRACFSASRLNYLFRGIKCSAFSPQLEEINLKLGLALESILNLRLRNDPLVQAALPVARGGLGLPEAVSLAIAAHIASLHSATSGVEANLDPEAVSNFRATLERTQEDAIAFCGSLPETPSFQRAWSELANNGRWNGLWDRTTTAANKARLLAVSSPSAGAWLQALPSPQLGTLLDDESTRILVGLRLGAELVSPHRCRCGDEVDSLGHHGLSCPQSSGRIARHSALNETFSRGLRSAGYPCILEPSGLVRDDARRPDGMTLTPFERGQMLVWDATVTDSLAPSMVGTGAARPGHAVALAEAAKCRKYSSVGYPHLFSPLAFETLGGPGVLTKKLLNDVGRKLALATGDKRAGEYLLQRLSLDVQRGNAASVRGTLARWTSPSLDLTP

SEQ ID NO: 4378 - protein, 982 aa, Dermanyssus gallinae
MTGDHNNCRTVTQPIHATSPDPSEGAGPSSTSGQNPATTPDPLGSNRVTCHQCGQTFARRGFRRHVTVKHGGGGATLVPNGVMNESNFDLTECIQAFMKNGKLVRILPKVVRKSVADALSEVCIKVASDNDDAAWLGLFSFAPVVLRLPIGRRDTRSLAVVIRKNLVEFRRGVRLTDLVPLLTAGESGGNAEQNQSITRAVSAKLSDGDVSGAARLLLSDDVMVDEPAAAASLREKHPPAQPDLCWPSPPPLQLLPSSTSAEDVRFAVGSFAKSSSAGLDFMRPRLLQDLLSPTLGFSSDTLSKALAKVIDLLRWGAPHPRWCPLIFGARLFALKKKDGSFRPIACSSVLRRVAAKLAVRDSRDLINLAIGPHQLGFYTKGGAEIMIHATRAFIDSRIDSSVLVKLDFKNAFNTVKRNHLLRVVGDEAPGIYHQVKLAYGDSSHLVLPSALLTSAVGVQQGDPLAPPLFCLAVKDLVNSLESPLNLWYLDDGVIAGNIGTVCEDIKKILSFATCSGLELNPTKCEVHIIGSGTADISALRDLLPGCRVTGDDLDLLGVPLFSCHLGPKIEQEREKLEIGFNRLPQLGAHRGLYLLRACFSASRLNYLFRGINCSAFSPQLEEINLKLGLALESILNLRLRNDPLVQAALPVARGGLGLPEAVSLAIAAHIASLHSATSGVEANLDPEAVSNFRATLERTQEDAIAFCGSLPETPSFQRAWSELANNGRWNGLWDRTTTAANKARLLAVSSPGAGAWLQALPSPQLGTLLDDESTRILVGLRLGAELVSPHRCRCGDEVDSLGHHGLSCPQSSGRIARHSALNETFSRGLRSAGYPCILEPSGLVRDDARRPDGMTLTPFERGQMLVWDATVTDSLAPSMVGTGAARPGHAVALAEAAKCRKYSSVGYPHLFSPLAFETLGGPGVLTKKLLNDVGRKLALATGDKRAGEYLLQRLSLDVQRGNAASVRGTLARWTSPSLDLTP

SEQ ID NO: 4379 - protein, 982 aa, Dermanyssus gallinae
MTGDHNNCRTVTQPIHATLPDPSEGAGPSSTSGQNPATTPDPLGSNRVTCHQCGQTFARRGFRRHVTVKHGGGGATLVPNGVMNESNFDLTECIQAFMKNGKLVRILPKVVRKSVADALSEVCIKVASDNDDAAWLGLFSFAPVVLRLPIGCRDTRSLAVVIRKNLVEFRRGVRLTDLVPLLTAGESGGNAEQNQSITRAVSAKLSDGDVSGAARLLLSDDVMVDEPAAAASLREKHPPAQPDLCWPSPPPLQLLPSSTSAEDVRFAVGSFAKSSSAGLDFMRPRLLQDLLSPTLGCSSDTLSKALAKVIDLLRWGAPHPRWCPLIFGARLFALKKKDGSFRPIACSSVLRRVAAKLAVRDSRDLINLAIGPHQLGFYTKGGAEIMIHATRAFIDSRIDSSVLVKLDFKNAFNTVKRDHLLRVVGDEAPGIYHQVKLAYGDSSHLVLPSALLTSAVGVQQGDPLAPPLFCLAVKDLVNSLESPLNLWYLDDGVIAGNAGTVCEDIKKILSFATCSGLELNPTKCEVHIIGSGTADISALRDLLPGCRVTGDDLDLLGVPLFSCHLGPKIEQEREKLEIGFNRLPQLGAHRGLYLLRACFSASRLNYLFRGIKCSAFSPQLEEINLKLGLALESILNLRLRNDPLVQAALPVARGGLGLPEAVSLAIAAHIASLHSATSGVEAILDPEAVSNFRATLERTQEDAIAFCGSLPETPSFQRAWSELANNGRWNGLWDRTTTAANKARLLAVSSPGAGAWLQALPSPQLGTLLDDESTRILVGLRLGAELVSPHRCRCGDEVDSLGHHGLSCPQSSGRIARHSALNETFSRGLRSAGYPCILEPSGLVRDDARRPDGMTLTPFERGQMLVWDATVTDSLAPSMVGTGAARPGHAVALAEAAKCRKYSSVGYPHLFSPLAFETLGGPGVLTKKLLNDVGRKLALATGDKRAGEYLLQRLSLDVQRGNAASVRGTLARWTSPSLDLTP

SEQ ID NO: 4380 - protein, 982 aa, Dermanyssus gallinae
MMNDHNNHTTAAESTRATEPGPPERPGPSVIPEPGSARVPNLQGTNRVTCNFCRQTFTRRGLRRHVTVKHGGADTTHIRDEAMDESNPDLTELIQSFMKSGKLVRILPKAVRKSVADALSEVCSRAALDNDDAAWLGLFSFAPVVLRLPVGRRDTRSLTVIIRKNLVEFQRGVRLTHLGSSSGTDESGPSVERIRPNARAVLAKLSDGDAAGAARLLLSDDVMVDEPAAIASLRAKHPVGQSDPVWPSPPSQQLMPSSTSAEDVRYAMGSFSKSSSAGLDFIRPRLLQDLPSPSLGSSSERLGKALAKLIDVLRWGAPHPGWRPLIFGARLFALKKNDGSYRPIACSSVIRRVAAKLAVRDSRDVIRRVIGRHQLGFSTKRGAEIMVHATRAFIDSRQESSVLVKLDFKNAFTTVKRDHLLKTVAEEAPAIYHQVKLAYGDPSHLILPSALLTSAVGVQQGDPLAPPLFCLAVKDLVNSFESPLNLWYLDDGIIGGSASTVCEDIKKILSFATCSGLELNPTKCEVHIKGMGANDTPVILDLLPGCRVVGDDLDLLGVPLSPDNLTSTIERWREKLQVGLNRLPQLGAHRGLYLLRSCFSASNLNYLFRGVNCIAFSSHLEELNVKQGDALESLLNLRLRGDPLTQASLPVARGGLGLPEAVSLSVAAHIASLHSAIGDIEAILDPHAVVHFRSTLEKTQNEAIAFCGALPETPSLQSAWSDLTHDRRWSDLWSRATSDADKARLQAVSSPGASVWLHALPSPQLGTLLDDESTRILVGLRVGAELVSPHRCGCGDEVDSLGHHGLSCAQSSGRIARHSALNETFCRGLRLAGYPCVLEPPGLVRDDGKRPDGMTLTPFDRGQMLVWDATVTDSLAPSMVGTGAARPGHAVALAETAKCRKYSSLDYPHLFSPLAFETLGGPGLLTKKILRDVGRRLVVATGDKRAGEYLLQRLSLDVQRGNAASVRGTLARWTSPILDLEH

SEQ ID NO: 4381 - protein, 951 aa, Dermanyssus gallinae
MTGDHNNCRTVTQPIHATLPDPSEGAGPSSTSGQNPATTPDPLGSNRVTCHQCGQTFARRGFRRHVTVKHGGGGATLVPNGVMNESNFDLTECIQAFMKNGKLVRILPKVVRKSVADTLSEVCIKVASDNDDAAWLGLFSFAPVVLRLPIGCRDTRSLAVVIRKNLVEFRRGVRLTDLVPLLTAGESGGNAEQNQSITRALSAKLSDGDVSGAARLLLSDDVMVDEPAAAASLREKHPPAQPDLCWPSPPPLQLLPSSTSAKDVRFAVGSFAKSSSAGLDFMRPRLLQDLLSPTLGFSSDTLSKALAKVIDLLRWGAPHPRWCPLIFGARLFALKKKDGSFRPIACSSVLRRVAAKLAVRDSRDLINLAIGPHQLGFYTKGGAEIMIHATRAFIDSRIDSSVLVKLDFKNAFNTVKRNHLLRVVGDEAPGTYHQVKLAYGESSHLVLPSALLTSAVGVQQGDPLAPPLFCLAVKDLVNSLESPLNLWYLDDGVIAGNIGTVCEDIKKILSFATCSGLELNPTKCEVHIIGSGTADISALRDLLPGCRVTGDDLDLLGVPLFSCHLGPKIEQEREKLEIGFNRLPQLGAHRGLYLLRACFSASRLNYLFRGIKCSAFSPQLEEINLKLGLALESILNLRLRNDPLVQAALPVARGGLGLPEAVSLAIAAHIASLHSATSGVEANLDPEAVSNFRATLERTQEDAIAFCGSLPETPSFQRAWSELANNGRWNGLWDRTTTAANKARLLAVSSPGAGAWLQALPSPQLGTLLDDESTRILVGLRLGAELVSPHRCRCGDEVDSLGHHGLSCPQSSSRIARHSALNETFSRGLRSAGYPCILEPSGLVRDDARRPDGMTLTPFERGQMLVWDATVTDSLAPSMVGTGAARPGHAVALAEAAKCRKYSSVGYPHLFSPLAFETLGGPGLLTKKLLNDVGRKLALATGDKRAAQAWT

SEQ ID NO: 4382 - protein, 866 aa, Dermanyssus gallinae
MNESNFDLTECIQAFMKNGKLVRILPKVVRKSVADALSEVCIKVASDNDDAAWLGLFSFAPVVLRLPIGCRDTRSLAVVIRKNLVEFRRGVRLTDLVPLLTAGESGGNAEQNQSITRAVSAKLSDGDVSGAARLLLSDDVMVDEPAAAASLREKHPPAQPDLCWPSPPPLQLLPSSTSAEDVRFAVGSFAKSSSAGLDFMRPRLLQDLLSPTLGCSSDTLSKALAKVIDLLRWGAPHPRWCPLIFGARLFALKKKDGSFRPIACSSVLRRVAAKLAVRDSRDLINLAIGPRQLGFYTKGGAEIMIHATRAFIDSRIDSSVLVKLDFKNAFNTVKRDHLLRVVGDEAPGIYHQVKLAYGDSSHLVLPSALLTSAVGVQQGDPLAPPLFCLAVKDLVNSLESPLNLWYLDDGVIAGNIGTVCEDIKKILSFATCSGLELNPTKCEVHIIGSGTADISALRDLLPGCRVTGDDLDLLGVPLFSCHLGPKIEQEREKLEIGFNRLPQLGAHRGLYLLRACFSASRLNYLFRGIKCSAFSPQLEEINLKLGLALESILNLRLRNDPLVQAALPVARGGLGLPEAVSLAIAAHIASLHSATSGVEAILDPEAVSNFRATLERTQEDAIAFCGSLPETPSFQRAWSELANNGRWNGLWDRTTTAANKARLLAVSSPGAGAWLQALPSHQLGTLLDDESTRILVGLRLGAELVSPHRCRCGDEVDSLGHHGLSCPQSSGRIARHSALNETFSRGLRSAGYPCILEPSGLVRDDARRPDGMTLTPFERGQMLVWDATVTDSLAPSMVGTGAARPGHAVALAEAAKCRKYSSVGYPHLFYLAFEIGGWSSSKKLLNYAEKCPLQNKREAILLQRLS

SEQ ID NO: 4383 - protein, 955 aa, Dermanyssus gallinae
MMNDHNNHTTAAESTRATEPGPPERPGPSVIPEPGSARVPNLQGTNRVTCNFCRQTFTRRGLRRHVTVKHGGADTTHIRDEAMDESNPDLTELIQSFMKSGKLVRILPKAVRKSVADALSEVCSKAALDNDDAAWLGLFSFAPVVLRLPVGRRDTRSLTVIIRKNLVEFQRGVRLTHLGSSSGTDESGPSVERIRPNARAVLAKLSDGDAAGAARLLLSDDVMVDEPDAIASLRAKHPVGQSDPVWPSPPSQQLMPSSTSAEDVRYAMGSFSKSSSAGLDFIRPRLLQDLLSPSLGSSSERLGKALAKLIDVLRWGAPHPGWRPLIFGARLFALKKNDGSYRPIACSSVIRRVAAKLAVRDSRDVIRRVIGRHQLGFSTKRGAEIMVHATRAFIDSRQESSVLVKLDFKNAFNTVKRDHLLKTVAEEAPAIYHQVKLAYGDPSHLILPSALLTSAVGVQQGDPLAPPLFCLAVKDLVNSLESPLNLWYLDDGIIGGSASTVCEDIKKILSFATCSGLELNPTKCEVHIKGMGANDTPVILDLLPGCRVVGDDLDLLGVPLSPDNLTSTIERWREKLQVGLNRLPQLGAHRGLYLLRSCFSASNLNYLFRGVNCIAFSSHLEELNVKQGDALESLLNLRLRGDPLIQASLPVARGGLGLPEAVSLSVAAHIASLHSAIGDIEAILDPHAVVHFRSTLEKTQNEAIAFCGALPETPSLQSAWSDLTHDRRWSDLWSRATSDADKARLQAVSSPGASVWLHALPSPQLGTLLDDESTRILVGLRVGAELVSPHRCGCGDEVDSLGHHGLSCAQSSGRIARHSALNETFCRGLRLAGYPCVLEPPGLVRDDGKRPDGMTLTPFDRGQMLVWDATVTDSLAPSMVGTGAARPGHAVALAETAKCRKYSSLDYPHLFSPLAFETLGGPGLLTKKLLRDVGRRLVVATGDKRAGSTYCSACR

SEQ ID NO: 4384 - protein, 982 aa, Dermanyssus gallinae
MTGDHNNCRTVTQPIRATLPDPSEGAGPSSTSGQNPATTPDPLGSNRVTCHQCGQTFARRGFRRHVTVKHGGGGATLVPNGVMNESNFDLTECIQAFMKNGKLVRILPKVVRKSVADALSEVCIKVASDNDDAAWLGLFSFAPVVLRLPIGRRDTRSLAVVIRKNLVEFRRGVRLTDLVPLLTAGESGGNAEQNQSITRAVSAKLSDGDVSGAARLLLSDDVMVDEPAAAASLREKHPPAQPDLCWPSPPPLQLLPSSTSAEDVRFAVGSFAKSSSAGLDFMRPRLLQDLLSPTLGFSSDTLSKALAKVIDLLRWGAPHPRWCPLIFGARLFALKKKDGSFRPIACSSVLRRVAAKLAVRDSRDLINLAIGPHQLGFYTKGGAEIMIHATRAFIDSRIDSSVLVKLDFKNAFNTVKRNHLLRVVGDEAPGIYHQVKLAYGDSSHLVLPSALLTSAVGVQQEDPLAPPLFCLAVKDLVNSLESPLNLWYLDDGVIAGNIGTVCEDIKKILSFATCSGLELNPTKCEVHIIGSGTADIFALRDLLPGCRVTGDDLDLLGVPLFSCHLGPKIEQEREKLEIGFNRLPQLGAHRGLYLLRACFSASRLNYLFRGINCSAFSPQLEEINLKLGLALESILNLRLRNDPLVQAALPVARGGLGLPEAVSLAIAAHIASLHSATSGVEANLDPEAVSNFRATLERTQEDAIAFCGSLPETPSFQRAWSELANNGRWNGLWDRTTTAANKARLLAVSSPGAGAWLQALPSPQLGTLLDDESTRILVGLRLGAELVSPHRCRCGDEVDSLGHHGLSCPQSSGRIARHSALNETFSRGLRSAGYPCILEPSGLVRDDARRPDGMTLTPFERGQMLVWDATVTDSLAPSMVGTGAARPGHAVALAEAAKCRKYSSVGYPHLFSPLAFETLGGPGVLTKKLLNDVGRKLALATGDKRAGEYLLQRLSLDVQRGNAASVRGTLARWTSPSLDLTP

SEQ ID NO: 4385 - protein, 918 aa, Dermanyssus gallinae
MSRSNMGAGGATLVPNGVMNESNFDLTECIQAFMKNGKLVRILPKVVRKSVADALSEVCIKVASDNDDAAWLGLFSFAPVVLRLPMGCRDTRSLAVVIRKNLVEFRRGVRLTDLVPLLTAGESGGNAEQNQSITRAVSAKLSDGDVSGAARLLLSDDVMVDEPAAAASLREKHPPAQPDLCWPSPPPLQLLPSSTSAEDVRFAVGSFAKSSSAGLDFMRPRLLQDLLSPTLGFSSDTLSKALAKVIDLLRWGAPHPRWCPLIFGARLFALKKKDGSFRPIACSSVLRRVAAKLAVRDSRDLINLAIGPHQLGFYTKGGAEIMIHATRAFIDSRIDSSVLVKLDFKNAFNTVKRNHLLRVVGDEAPGIYHQVKLAYGDSSHLVLPSALLTSAVGVQQGDPLAPPLFCLAVKDLVNSLESPLNLWYLDDGVIAGNIGTVCEDIKKILSFATCSGLELNPTKCEVHIIGSGTADISALRDLLPGCRVTGDDLDLLGVPLFSCHLGPKIEQEREKLEIGFNRLPQLGAHRGLYLLRACFSASRLNYLFRGIKCSAFSPQLEEINLKLGLALESILNLRLRNDPLVQAALPVARGGLGLPEAVSLAIAAHIASLHSATSGVEANLDPEAVSNFRATLERTQEDAIAFCGSLPETPSFQRAWSELANNGRWNGLWDRTTTAANKARLLAVSSPGAGAWLQALPSPQLGTLLDDESTRILVGLRLGAELVSPHRCRCGDEVDSLGHHGLSCPQSSGRIARHSALNETFSRGLRSAGYPCILEPSGLVRDDARRPDGMTLTPFERGQMLVWDATVTDSLAPSMVGTGAARPGHAVALAEAAKCRKYSSVGYPHLFSPLAFETLGGPGVLTKKLLNDVGRKLALATGDKRAGEYLLQRLSLDVQRGNAASVRGTLARWTSPSLDLTP

SEQ ID NO: 4386 - protein, 950 aa, Dermanyssus gallinae
MQNLATTPNPLGPNKVTCHQCGQTFARRGLRRHVTVKHGGGGTILLHDEAANEVNPDLTECIQAFFKHGKLVRILPKVVRKSVADALSEVCLKVALDNDDAAWLGLFSFAPVVLRLPVGCRDTRSLAVVIRKNLVEFRRGVRLTDLTLLLTAGESGGNVERKHSLTRAVSAKMSDGDVSGAARLLLSDDVMVDEPAAAASLREKHPPAQLNLCWPSPPPSQLLPSSTSIKDVRYAVGSFSKSSGAGLDFIRPRLLQDLLSPTLGCSSDGLSKALAKVIDLLRWGAPHPGWCPLIFGARLFALKKMDGSFRPIACASVLRRIAAKLAVRDAKDVISLAVGPHQLGFSTKGGAEIMIHATRAFIDSRLDPSVLVKLDFKNAFNTVRRDHLLKVVGDEAPSIYHQVKLAYGNSSHLVLPSALLTSAVGIQQGDPLAPPLFCLAVKDLVNTLESPLNLWYLDDGVVGGNISTVCEDLKKILSFAACSGLELNPIKCEVHIIGSDTADISEIQNLLPGCRVTDDNLDLLGVPLFSRQLRPTIERGREKLEIGLDRLPQLGAHRGLYLLRSCFSASRLNYLFRGVNTSAFPDLLEEINAKMCCALESILNLKLQDDSLVQAFLPVAKGGLGLPEANSLSVAAHIASLHSATSGVESILDPQAVANFKATLEQIQDDAIAFCGSQPETPSLQRAWSELANDGRLSGLWERTTTAASKARLHAVSSPGAGAWLHALPSPQLGTLLDDESTRILVGLRLGAELVSPHHCKCGDEVDSLGHHGLSCPQSSGRIARHSALNETFSRALRSAGYPCILEPPGLVRDDGKRPDGMTLTPFEQGQMLVWDATVTDSLAPSMVGAGAVRPGHAVALAEAAKCRKYSGVSYPHLFSPLAFETLGGAGLLTKKLLNDVGKRLVLATGDKRAGEYLLQRLSLNVQRGNAASIRGTLARWTSPSLDLML

SEQ ID NO: 4387 - protein, 898 aa, Dermanyssus gallinae
MQNLATTPNPLGPNEVSCYQCGQTFARRGLRRHVTVKHGGGGTIPLHDEAANEVNPDLTECIQAFFKYGKLVRILPKVVRKSVADALSEVCLKVALDNDDAAWLGLFSFAPVVLRLPVGCRDTRSLAVVIRKNLVEFRRGVRLTDLTLLLTAGESGGNVERTHSLTRAVSAKMSDGDVSGAARLLLSDDVMVDEPAAAASLREKHPPAQLNLCWPSLPPSQLLPSSTSIKDVRYAVGSFSKSSGAGLDFIRPRLLQDLLSPTLGCSSDGLSKALAKVIDLLRWGAPHPGWCPLIFGARLFALKKMDGSFRPIACASVLRRIAAKLAVRDSKDVISLAVGPHQLGFFTKGGAEIMIHATRAFIDSRLDPSVLVKLDFKNAFNTVRRDHLLKVVGDEAPSIYHQVKLAYGNSSHLVLPSALLTSAVGIQQGDPLAPPLLCLAVKYLVNTLESPLNLWYLDDGVVGGNISTVCEDLKKILSFAACSGLELNPIKCEVHIIGSDTADISEIQNLLPGCRVTDDNLDLLGVPLFSRQLGPTIERGREKLEIGLNRLPQLGAHRGLYLLRSCFSASRLNYLFRGVNTSAFPDLLEEINAKMCCALESILNLKLQDDSLVQAFLPVAKGGLGLPEANSLSVAAHIASLHSATSGVESILDPQAVANFKATLEQIQDDAIAFCGSQPETPSLQRAWSELANDGRLSGLWERTTTAASKSRLHAVSSPGAGAWLHALPSPQLGTLLDDESTRILFGLRLGAELVSPHHCKCGHEVDSLGHHGLSCPQSSGRIARHSALNETFSRALRSAGYPCILEPPGLVRNDGKRPDGMTLTPFEQRQLLVWDATVTDSLAPSMVGAGAVRPGHAVALAEAAKCRKYSGVSYPHLFSPLAFETLGGGWAAHEETA

SEQ ID NO: 4388 - protein, 981 aa, Dermanyssus gallinae
MTGDHNDGRTETEPTQVRSSDSSEGAGPSLTSGQNPATPPDTSGLNRVTCHQCGQTFARRGLRRHVTVKHGGGGAIPVPNGAMNESSLDLTEYIQAFIKTGKLVRILPKVVRKSVADALSEVCLKVASDNDDAAWLGLFSFAPVVLRLPIGRRDSRSLAVVIRKNLVEFRRGVRLTDLAPLLTAGDSGGNVERNQSITRAVSAKLSDGDVSGAARLLLSDDVMVDEPAATATLREKHPPAQPDLCWPSAPPSQLLPSSTSVEDVRYAVGSFSKSSSAGLDFIRPRLLQDLLSPILGCLSDGLCKALAKVIDLLRWGVPHPRWCPLIFGARLFALKKKDGSFRPIACSSVLRRVAAKLAVGDSRGTINLAIGPHQLGFSTKGGAEIMIHATRAFIDSWLDPSVLVKLDFKNAFNTVRRDHLLKVVGDETPAIYHQVKLAYGDPSHLVLPSALLTSAVGVQQGDPLAPPLFCLAVKDLVNSLESPLNLWYLDDGVIGGNISTVREDLKKILSFATCSGLELNPIKCEVHIINSGTAELSAIQNLLPGCRVTGDDLDLLGVPLFSRHLGPTIERGMEKLEVGFNRLPQLGAHRGLYLLRSCFSASRLNYLFRGINSSAFSAQLEEINSKMGFTLESILNLRLRDDSLVQAFLPVARGGLGLPEAVSLSVAAHIASLHSATSGVESILDTRAIANFQATLEQTHDDAIAFCGSLPETPSLQRAWSEMANDGRWNGLWDRTTTAASKARLQAVSSPGAGAWLHALPSPQLGTLLDDESTRILVGLRLGVELVSPHRCRCGDEVDSLGHHGLFCLQSSGRIARHSALNETFSRGLRSAGYPCILEPSGLVRDDGRRPDGMTLTPFERGQMLVWDATVTDSLAPSMVGTGAARPGHAVALAEAAKCRKYSSISYPHLFSPLAFETLGPGSLTTKLLKDVGKRLALATGDKRAGEYLLQRLSLDVQRGNAASVRGTMARWTSPGLDLVP

SEQ ID NO: 4389 - protein, 950 aa, Dermanyssus gallinae
MQNLATTPNPLGPNKVTCHQCGQTFARRGLRRHVTVKHGGGGTIPLHDEAANEVNPDLTECIQAFFKHGKLVRILPKVVRKSVADALSEVCLKVALDNDDAAWLGLFSFAPVVLRLPVGCRDTRSLAVVIRKNLVEFRRGVRLTDLTLLLTAGESGGNVERKHSLTRAVSAKMSDGDVSGAARLLLSDDVMVDEPAAAASLREKHPPAQLNLCWPSPPPSQLLPSSTSIKDVRYAVGSFSKSSGAGLDFIRPRLLQDLLSPTLGCSSDGLSKALAKVIDLLRWGAPHPGWCPLIFGARLFALKKMDGSFRPIACASVLRRIAAKLAVRDAKDVISLAVGPHQLGFSTKGGAEIMIHATRAFIDSRLEPSVLVKLDFKNAFNTVRRDHLLKVVGDEAPSIYHQVKLAYGNSSHLVLPSALLTSAVGIQQGDPLAPPLFCLAVKDLVNTLESPLNLWYLDDGVVGGNISTVCEDLKKILSFAACSGLELNPIKCEVHIIGSDTADISEIQNLLPGCRVTDDNRDLLGVPLFSRQLGPTIERGREKLEIGLNRLPQLGAHRGLYLLRSCFSASRLNYLFRGVNTSAFPDLLEEINAKMCCALESILNLKLQDDSLVQAFLPVAKGGLGLPEANSLSVAAHIASLHSATSGVESILDPQAVANFKATLEQIQDDAIAFCGSQPENPSLQRAWSELANDGRLSGLWERTTTAASKARLHAVSSPGAGAWLHALPSPQLGTLLDDESTRILVGLRLGAELVSPHHCKCGDEVDSLGHHGLSCPQSSGRIARHSALNETFSRALRSAGYPCILEPPGLVRDDGKRPDGMTLTPFEQGQMLVWDATVTDSLAPSMVGAGAVRPGHAVALAEAAKCRKYSGVSYPHLFSPLAFETLGGAGLLTKKLLNDVGKRLVLATGDKRAGEYLLQRLSLNVQRGNAASIRGTLARWTSPSLDLML

SEQ ID NO: 4390 - protein, 957 aa, Dermanyssus gallinae
MTGDHNNCRTVTQPIHATLPDPSEGAGPSSTAGQNPATTPDPLGSNRVTCHQCGQTFARRGFRRHVTVKHGGGGATLVPNGVMNESNFDLTECIQAFMKNGKLVRILPKVVRKSVADALSEVCIKVASDNDDAAWLGLFSFTPVVLRLPIGCRDTRSLAVVIRKNLVEFRRGVRLTDLVPLLTAGESGGNAEQNQSITRAVSAKLSDGDVSGAARLLLSDDVMVDEPAAAASLREKHPPAQPDLCWPSPPPLQLLPSSTSAEDVRFAVGSFAKSSSAGLDFMRPRLLQDLLSPTLGFSSDTLSKALAKVIDLLRWGAPHPRWCPLIFGARLFALKKKDGSFRPIACSSVLRRVAAKLAVRDSRDLINLAIGPYQLGFYTKGGAEIMIHATRAFIDSRIDSSVLVKLDFKNAFNTVKRNHLLRVVGDEAPGIYHQVKLAYGDSSHLVLPSALLTSAVGVQQGDPLAPPLFCLAVKDLVNSLESPLNLWYLDDGVIAGNIGTVCEDIKKILSFATCSGLELNPTKCEVHIIGSGTADISALRDLLPGCRVTGDDLDLLGVPLFSCHLGPKIEQEREKLEIGFNRLPQLGAHRGLYLLRACFSASRLNYLFRGIKCSAFKPQLEEINLKLGLALESILNLRLRNDPLVQAALPVARGGLGLPETVSLAIAAHIASLHSATSGVEANLDPEAVSNFRATLERTQEDAIAFCGSLPETPSFQRAWSELANNGRWNGLWDRTTTAANKARLLAVSSPGAGAWLQALPSPQLGTLLDDESTRILVGLRLGAELVSPHRCRCGDEVDSLGHHGLSCPQSSGRIARHSALNETFSRGLRSAGYPCILEPSGLVRDDARRPDGMTLTPFERGQMLVWDATVTDSLAPSMVGTGAARPGHAVALAEAAKCRKYSSVGYPHLFSPLAFETLGGPGVLTKKLLNDVGRKLALATGDKRAGERSGAEPNQV

SEQ ID NO: 4391 - protein, 982 aa, Dermanyssus gallinae
MMNDHNNHTTAAESTRATEPGPPERPGPSVIPEPGSARVPNLQGTNRVTCNFCRQTFTRRGLRRHVTVKHGGADTTHIRDEAMNESNPDLTELIQSFMKSGKLVRILPKAVRKSVADALSEVCSRAALDNDDAAWLGLFSFAPVVLRLPVGRRDTRSLTVIIRKNLVEFQRGVRLTHLGSSSGTDESGPSVERIRPNARAVLAKLSDGDAAGAARLLLSDDVMVDEPAAIASLRAKHPVGQSDPVWPSPPSQQLMPSSTSAEDVRYAMGSFSKSSSAGLDFIRPRLLQDLLSPSLGSSSERLGKALAKLIDVLRWGAPHPGWRPLIFGARLFALKKNDGSYRPIACSSVIRRVAAKLAVRDSRDVIRRVIGRHQLGFSTKRGAEIMVHATRAFIDSRQESSVLVKLDFKNAFNTVKRDHLLKTVAEEAPAIYHQVKLAYGDPSHLILPSALLTSAVGVQQGDPLAPPLFCLAVKDLVNSLESPLNLWYLDDGILGGSASTVCEDIKKILSFATCSGLELNPTKCEVHIKGMGANDTPVILDLLPGCRVVGDDLDLLGVPLSPDNLTSTIERWREKLQVGLNRLPQLGAHRGLYLLRSCFSASNLNYLFRGVNCIAFSSHLEELNVKQGDALESLLNLRLRGDPLIQASLPVARGGLGLPEAVSLSVAAHIASLHSAIGDIEAILDPHAVVHFRSTLEKTQNEAIAFCGALPETPSLQSAWSDLTHDRRWSDLWSRATSDADKARLQAVSSPGASVWLHALPSPQLGTLLDDESTRILVGLRVGAELVTPHRCGCGDEVDSLGHHGLSCAQSSGRIARHSALNETFCRGLRLAGYPCVLEPPGLVRDDGKRPDGMTLTPFDRGQMLVWDATVTDSLAPSMVGTGAARPGHAVALAETAKCRKYSSLDYPHLFSPLAFETLGGPGLLTKKLLRDVGRRLVVATGDKRAGEYLLQRLSLDVQRGNAASVRGTLARWTSPILDLEH

SEQ ID NO: 4392 - protein, 976 aa, Dermanyssus gallinae
MTDDHNIGRTVTEPTLVTSSDPSEGVGPSFTSIQNSLGPNKVTCHLCGQTFARRGLRRHVTVKHGGGDAIPLHNGPSNEINPDLTECIQAYIKNGKLVRILPKVVRKSVADALSEVCLKVALDNDDAAWLGLFSFAPVVLRLPVGCRDTRSLAVVIRKNLVEFRRGARLTDLALLHTAGESGGNAERNHSITRAVSAKLSDGDVSGAARLLLSDDVMVDDPAAAASLREKHPPAQPDLCWPSPSPAQLLPSSTSVKDVRYTVGSFSKSSSAGLDFIRPRLLQDLLSPTLGCSSEGLGKALAKVIDLLRWGAPHPRWCPLIFGARLFALKKKDGSFRPIACSSVLRRIAAKLAVRDSRDVISLAIGPHQLGFSTKGGAEIMIHATRAFIDSRLDPSVLVKLDFRNAFNTVRRDHLLKVVGDETPAIYHQVKLAYGDPSHLVLSSALLTSAVGVQQGDPLAPPLFCLAVEDLVNSLESPLNLWYLDDGVIGGNISTVCEDLKKILSFSTCSGLELNPIKCEVHITGSGTAEISAIQNLLPGCRVTGDDLDILGVPLFSHHLGPTIERGMEKLEVGFTRLPQLGAHRGLYLLRSCFSASRLNYLFRGINSSAFSAQLEEINSKMGLALESILNLRLRDDSLVQAFLPVARGGLGLPEAVSLSVAAHIASLHSATSGVESILDSRAIANFQATLEQTHDDAIAFCGSLPETPSLQRAWSELANDGRWSGLWDRTTTAASKARLQALSSPGAGAWLHALPSPQLGTLLDDESTRILVGFRLGVELVSPHQCKCGDEVDSLGHHGLSCPQSSGRIARHSALNETFSRGLRSAGYPCILEPPGLVRDDGKRPDGMTLTPFERGQMLVWDATVTDSLAPSMVGAGAARPGHAVALAEAAKCRKYSSVAYPHMFSPLAFETLGGPGLLTKKLLNDVGRRLMLATGDKRAGEYLQQRLSLDVQRGNAASVRGTLARWTSPSLDLTP

SEQ ID NO: 4393 - protein, 982 aa, Dermanyssus gallinae
MTGDHNNCRTVTQPIHATLSDPSEGAGPSSTSGQNPATTPDPLGSNRVTCHQCGQTFARRGFRRHVTVKHGGGGATLVPNGVMNESNFDLTECIQAFMKNGKLVRILPKVVRKSVADALSEVCIKVASDNDDAAWLGLFSFAPVVLRLPIGCRDTRPLAVVIRKNLVEFRRGVRLTDLVPLLTAGESGGNAEQNQSITRAVSAKLSDGDVSGAARLLLSDDVMVDEPAAAASLREKHPPAQPDLCWPSPPPLQLLPSSTSAEDVRFAVGSFAKSSSSGLDFMRPRLLQDLLSPTLGCSSDTLSKALAKVIDLLRWGAPHPRWCPLIFGARLFALKKKDGSFRPIACSSVLRRVAAKLAVRDSRDLINLAIGPHQLGFYTKGGAEIMIHATRAFIDSRIDSSVLVKLDFKNAFNTVKRNHLLRVVGDEAPGIYHQVKLAYGDSSHLVLPSALLTSAVGVQQGDPLAPPLFCLAVKDLVNSLESPLNLWYLDDGVIAGNIGTVCEDIKKILSFATCSGLELNPTKCEVHIIGSGTADISALRDLLPGCRVTGDDLDLLGVPLFSCHLGPKIEQEREKLEIGINRLPQLGAHRGLYLLRACFSASRLNYLFRGIKCSAFSPQLEEINLKLGLALESILNLRLRNDPLVQAALPVARGGLGLPEAVSLAIAAHIASLHSATSGVEANLDPEAVSNFRATLERTQEDAIAFCGSLPETPSFQRAWSELANNGRWNGLWDRTTTAANKARLLAVSSPSAGAWLQALPSPQLGTLLDDESTRILVGLRLGAELVSPHRCRCGDEVDSLGHHGLSCPQSSGRIARHSALNETFSRGLRSAGYPCILEPSGLVRDDARRPDGMTLTPFERGQMLVWDATVTDSLAPSMVGTGAARPGHAVALAEAAKCRKYSSVGYPHLFSPLAFETLGGPGVLTKKLLNDVGRKLALATGDKRAGEYLLQRLSLDVQRGNAASVRGTLARWTSPSLDLTP

SEQ ID NO: 4394 - protein, 982 aa, Dermanyssus gallinae
MTGDHNDGRTETEPTQVRSSDSSEGAGPSLTSGQNPATPPDTSGLNRVTCHQCGQTFARRGLRRHVTVKHGGGGAIPVPNGAMNESSLDLTEYIQAFIKTGKLVRILPKVVRKSVADALSEVCLKVASDNDDAAWLGLFSFAPVVLRLPIGRRDSRSLAVVIRKNLVEFRRGVRLTDLAPLLTAGDSGGNVERNQSITRAVSAKLSDGDVSGAARLLLSDDVMVDEPAATATLREKHPPAQPDLCWPSAPPSQLLPSSTSVEDVRYAVGSFSKSSSAGLDFIRPRLLQDLLSPILGCSSDGLCKALAKVIDLLRWGVPHLRWCPLIFGARLFALKKKDGSFRPIACSSVLRRVAAKLAVRDSRGTINLAIGPHQLGFSTKGGAEIMIHATRAFIDSRLDPSVLVKLDFKNAFNTVRRDHLLKVVGDETPAIYHQVKLAYGDPSHLVLPSALLTSAVGVQQGDPLAPPLFCLAVKDLVNSLESPLNLWYLDDGVIGGNISTVREDLKKILSFATCSGLELNPIKCEVHIINSGTAEISAIQNLLPGCRVTGDDLDLLGVPLFSRHLGPTIERGMEKLEVGFNRLPQLGAHRGLYLLRSCFSASRLNYLFRGINSSAYSAQLEEINSKMGFTLESILNLRLRDDSLVQAFLPVARGGLGLPEAVSLSVAAHIASLHSATSGVESILDTRAIANFQATLEQTHDDAIAFCGSLPETPSLQRAWSEMANDGRWNGLWDRTTTAASKARLQAVSSPGAGAWLHALPSPQLGTLLDDESTRILVGLRLGVELVSPHRCRCGDEVDSLGHHGLSCLQSSGRIARHSALNETFSRGLRSAGYPCILEPSGLVRDDGRRPDGMTLTPFERGQMLVWDATVTDSLAPSMVGTGAARPGHAVALAEAAKCRKYSSISYPHLFSPLAFETLGGPGSLTTKLLKDVGKRLALATGDKRAGEYLLQRLSLDVQRGNAASVRGTMARWTSPGLDLVP

SEQ ID NO: 4395 - protein, 982 aa, Dermanyssus gallinae
MTDDHNNGRKVTEPTPVTLSDSSEGAGPSFTPIEILATTPNPLGPNKVTCHQCGQTFARRGLRRHVTVKHGGESTIPHHDGAPNEVNSDLTECIQAFMKNGKLVRILPKVVRKSVADALSEVLVKVAVDNDDAAWLGLFSFAPVVLRLPIGCRDTRSLAVVIRKNLVEFRRGARLTDLALLQTAGESGGNVERNHSITRAVLAKLSDGDVSGAARLLLSDDVMVDEPAAAASLREKHPPAQPDLCWPSPPPSQLLPSSTSVEDIRYTMGSFSKSSSAGLDFIRPRLLQDLLSPTLGCSSDALSKALAKVIDLLRWGAPHPRWCPLIFGARLFALKKKDGSFRPIACSSVLRRIAAKLAVRDSKDVISLAVGPHQLGFSTKAGAEIMIHATRAFIDSRPDPSVLVKLDFKNAFNTIRRDHLLKVVGDETPAIYHQVKLAYGAPSHLVLPSALLTSAVGVQQGDPLAPPLFCLAVKDLVNSLESPLNLWYLDDGVIGGNISTVCEDLKKILNFTTCSGLDLNPVKCEVHITGSSTADISAIQNLLPGCRLTGDDLDLLGVPLFARHIGPTIERGREKLEIGFNRLPQLGAHRGLYLLRSCFSASRLNYLFRGTNSSAFSAQLEEINLKMGFALESILNLRLRDDSLVQAFLPVARGGLGLPEAVSLSVAAHIASLHSATSGVESILDPQAIASFHSTLEKIQDDANAFCGSLPETPSLQRSWSELANDGRWSGLWDRTTTATSKARLQAVSSPGAGAWLHALPSPQLGTLLDDESTRILVGLRLGVDLVSPHQCRCGDEVDSLGHHGLSCPQSSGRIARHSALNETFSRGLRSAGYPCILEPPGLVRDDGRRPDGMTLTPFERGQMLVWDATVTDSLAPSMVGTGASRPGHAVSLAEAAKCRKYSSIAYPHLFSPLAFETLGGPGLLTKKLLNDVGRRLVLATGDKRAGEYLLQRLSLDVQRGNAASVRGTLARWTSPSLDLTP

SEQ ID NO: 4396 - protein, 982 aa, Dermanyssus gallinae
MTDDHNNGRKVTEPTPVTLSDSSEGAGPSFTPIEILATTPNPLGPNKVTCHQCGQTFARRGLRRHVTVKHGGESTIPHHDGAPNEVNSDLTECIQAFMKNGKLVRILPKVVRKSVADALSEVLVKVAVDNDDAAWLGLFSFAPVVLRLPIGCRDTRSLAVVIRKNLVEFRRGARLTDLALLQTAGESGGNVERNNSITRAVLAKLSDGDVSGAARLLLSDDFMVDEPAAAASLREKHPPAQPDLCWPSPPPSQLLPSSTSVEDIRYTMGSFSKSSSAGLDFIRPRLLQDLLSPTLGCSSDALSKALAKVIDLLRWGAPHPRWCPLIFGARLFALKKKDGSFRPIACSSVLRRIAAKLAVRDSKDVISLAVGPHQLGFSTKGGAEIMIHATRAFIDSRPDPSVLVRLDFKNAFNTVRRDNLLKVVGDETPAIYHQVKLAYGAPSHLVLPSALLTSAVGVQQGDPLAPPLFCLAVKDLVNSLESPLNLWYLDDGVIGGNISTVCEDLKKILNFTTCSGLDLNPVKCEVHITGSSTADISAIQNLFPGCRLTGDDLDLLGVPLFARHIGPTIERGREKLEIGFNRLPQLGAHRGLYLLRSCFSASRLNYLFRGTNSSALSAQLEEINLKMGFALESILNLRLRDDSLVQAFLPVARGGLGLPEAVSLSVAAHIASLHSATSGVESILDPQAIASFHSTLEKIQDDANAFCGSLPETPSLQRSWSELANDGRWSGLWDRTTTATSKARLQAVSSPGAGAWLHALPSPQLGTLLDDESTRILVGLRLGVDLVSPHQCRCGDEVDSLGHHGLSCPQSSGRIARHSALNETFSRGLRSAGYPCILEPPGLVRDDGRRPDGMTLTPFERGQMLVWDATVTDSLAPSMVGTGASRPGHAVSLAEAAKCRKYSSIAYPHLFSPLAFETLGGPGLLTKKLLNDVGRRLVLATGDKRAGEYLLQRLSLDVQRGNAASVRGTLARWTSPSLDLTP

SEQ ID NO: 4397 - protein, 982 aa, Dermanyssus gallinae
MTGDHNNCRTVTQPIHATLPDPSEGAGPSSTSGQNPATTPDPLGSNRVTCHQCGQTFARRGFRRHVTVKHGGGGATLVPNGVMNESNFDLTECIQAFMKNGKLVRILPKVVRKSVADALSEVCIKVASDNDDAAWLGLFSFAPVVLRLPIGCRDTRSLAVVIRKNLVEFRRGVRLTDLVPLLTAGESGGNAEQNQSITRAVSAKLSDGDVSGAARLLLSDDVMVDEPAAAASLREKHPPAQPDLCWPSPPPLQLLPSSTSAEDVRFAVGSFAKSSSAGLDFMRPRLLQDLLSPTLGCSSDTLSKALAKVIDLLRWGAPHPRWCPLIFGARLFALKKKDGSFRPIACSSVLRRVAAKLAVRDSRDLINLAIGPHQLGFYTKGGAEIMIHATRAFIDSRIDSSVLVKLDFKNAFNTVKRDHLLRVVGDEAPGIYHQVKLAYGDSSHLVLPSALLTSAVGVQQGDPLAPPLFCLAVKDLVNSLESPLNLWYLDDGVIAGNIGTVCEDIKKILSFATCSGLELNPTKCEVHIIGSGTADISALRDLLPGCRVTGDDLDLLGVPLFSCHLGPKIEQEREKLEIGFNRLPQLGAHRGLYLLRACFSASRLNYLFRGIKCSAFSPQLEEINLKLGLALESILNLRLRNDPLVQAALPVARGGLGLPEAVSLAIAAHIASLHSATSGVEAILDPEAVSNFRATLERTQEDAIAFCGSLPETPSFQRAWSELANNGRWNGLWDRTTTAANKARLLAVSSPGAGAWLQALPSPQLGTLLDDESTRILVGLRLGAELVSPHRCRCGDEVDSLGHHGLSCPQSSGRIARHSALNETFSRGLRSAGYPCILEPSGLVRDDARRPDGMTLTPFERGQMLVWDATVTDSLAPSMVGTGAARPGHAVALAEAAKCRKYSSVGCPHLFSPLAFETLGGPGVLTKKLLNDVGRKLALATGDKRAGEYLLQRLSLDVQRGNAASVRGTLARWTSPSLDLTP

SEQ ID NO: 4398 - protein, 944 aa, Dermanyssus gallinae
MVTEYTRVTLPDPSEESGPSFTPMQNLATTPNPLGPNKVTCHQCGQTFARRGLRRHVTVKHGGGGTIPLHDEAANEVNPDLTECIQAFFKHGKLVRILPKVVRKSVADALSEVCLKVALDNDDAAWLGLFSFAPVVLRLPVGCRDTRSLAVVIRKNLVEFRRGVRLTDLTLTAGESGGNVERKHSLMRAVSAKMSDGDVSGAARLLLSDDVMVDEPAAAASLREKHPPAQLNLLWPSPPPSQLLPSSTSIKDVRYAVGSFSKSSGTGLDFIRPRLLQDLLSPTLGCSSDGLSKALAKVIDRLRWGAPHPGWCPLIFGARLFALKKMDGSFRPIASSVLRRIAAKLAVRDSKDVISLAVGPHQLGFSTKGGAEIMIHATRAFIDSRLDPSVLVKLDIKNAFNTVRRDHLLKVVGDEAPSIYHQMKLAYGNSSHLVLPSALLTSAVGIQLGDPLAPPLFCLAVKDLVNTLESPLNLWYLDDGVVGGNISTVCEDLKKILSFAACSGLELNPIKCEVHIIGSDTADISEIQNLLPGCRVTDDNLDLLGVPLFSRQLGPTIERGREKLEIGLNRLPQLGAHRGLYLLRSCFSASRLNYLFRGVNTSAFPDLLEEINLNMGFALESILNLKLQDDSLVQAFLPIAKGGLGLPEAKSLSVAAHIASLHSATSGVESIPDPQAVANFQATLEQTQNDAIAFCGSQPETPSLQRAWSELANDGRLSGLWERTTTAASKARLHAVSSRGAGAWLHALPSPQLGTLLDDESTRILVGLMLGAELVSPHHCKCGDEVDSLGHHGLSCPQSSGRIARQSALNETFSRALRSAGYPCILEPPGLVRDDGKRPDGMTLTPFEQGQMLVWDATVTDSLAPSMVGAGAVCPGHAVALAEAAKCRKYSGVSYPHLFSPLAFETLGGGLGCSRRNCLIMSEKDWYSLQETRGRANTYCNVCH

SEQ ID NO: 4399 - protein, 982 aa, Dermanyssus gallinae
MTGDHNNCRTVTQPIHATLPDPSEGAGPSSTSGQNPATTPDPLGSNRVTCHQCGQTFARRGFRRHVTVKHGGGGATLVPNGVMNESNFDLTECIQAFMKNGKLVRILPKVVRKSVADALSEVCIKVASDNDDAAWLGLFSFAPVVLRLPIGCRDTRSLAVVIRKNLVEFRRGVRLTDLVPLLTAGESGGNAEQNQSITRAVSAKLSDGDVSGAARLLLSDDVMVDEPAAAASLREKHPPAQPDLCWPSPPPLQLLPSSTSAEDVRFAVGSFAKSSSAGLDFMRPRLLQDLLSPTLGFSSDTLSKALAKVIDLLRWGAPHPRWCPLIFGARLFALKKKDGSFRPIACSSVLRRVAAKLAVRDSRDLINLAIGPHQLGFYTKGGAEIMIHATRAFIDSRIDSSVLVKLDFKNAFNTVKRNHLLRVVGDEAPGIYHQVKLAYGDSSHLVLPSALLTSAVGVQQGDPLAPPLFCLAVKDLVNSLESPLNLWYLDDGVIAGNIGTVCEDIKKILSFATCSGLELNPTKCEVHIIGSGTADISALRDLLPGCRVTGDDLDLLGVPLFSCHLGPKIEQEREKLEIGFNRLPQLGAHRGLYLLRACFSASRLNYLFRGINCSAFSPQLEEINLKLGLALESILNLRLRNDPLVQAALPVARGGLGLPEAVSLAIAAHIASLHSATSGVEANLDPEAVSNFRATLERTQEDAIAFCGSLPETPSFQRAWSELANNGRWNGLWDRTTTAANKARLLAVSSPGAGAWLQALPSPQLGTLLDDESTRILVGLRLGAELVSPHRCRCGDEVDSLGHHGLSCPQSSGRIARHSALNETFSRGLRSAGYPCILEPSGLVRDDARRPDGMTLTPFERGQMLVWDATVADSLAPSMVGTGAARPGHAVALAEAAKCRKYSSVGYPHLFSPLAFETLGGPGVLTKKLLNDVGRKLALATGDKRAGEYLLQRLSLDVQRGNAASVRGTLARWTSPSLDLTP

SEQ ID NO: 4400 - protein, 982 aa, Dermanyssus gallinae
MTGDHNNCRTVTQPIHATLPDPSEGAGPSSTSGQNPATTPDPLGSNRVTCHQCGQTFARRGFRRHVTVKHGGGGATLVPNGVMNESNFDLTECIQAFMKNGKLVRILPKVVRKSVADALSEVCIKVASDNDDAAWLGLFSFAPVVLRLPIGCRDTRSLAVVIRKNLVEFRRGVRLTDLVPLLTAGESGGNAEQNQSITRAVSAKLSDGDVSGAARLLLSDDVMVDEPAAAASLREKHPPAQPDLCWPSPPPLQLLPSSTSAEDVRFAVGSFAKSSSAGLDFMRPRLLQDLLSPTLGCSSDTLSKALAKVIDLLRWGAPHPRWCPLIFGARLFALKKKDGSFRPIACSSVLRRVAAKLAVRDSRDLINLAIGPHQLGFYTKGGAEIMIHATRAFIDSRIDPSVLVKLDFKNAFNTVKRNHLLRVVGDEAPGIYHQVKLAYGDSSHLVLPSALLTSAVGVQQGDPLAPPLFCLAVKDLVNSLESPLNLWYLDDGVIAGNIGTVCEDIKKILSFATCSGLELNPTKCEVHIIGSGTADISALRDLLPGCRVTGDDLDLLGVPLFSCHLGPKIEQEREKLEIGFNRLPQLGAHRGLYLLRACFSASRLNYLFRGIKCSAFSPQLEEINLKLGLALESILNLRLRNDPLVQAALPVARGGLGLPEAVSLAIAAHIASLHSATNGVEANLDPEAVSNFRATLERTQEDAIAFCGSLPETPSFQRASSELANNGRWNGLWDRTTTAANKARLLAVSSPGAGAWLQALPSPQLGTLLDDESTRILVGLRLGAELVSPHRCRCGDEVDSLGHHGLSCPQSSGRIARHSALNETFSRGLRSAGYPCILEPSGLVRDDARRPDGMTLTPFERGQMLVWDATVTDSLAPSMVGTGAARPGHAVALAEAAKCRKYSSVGYPHLFSPLAFETLGGPGVLTKKLLNDVGRKLALATGDKRAGEYLLQRLSLDVQRGNAASVRGTLARWTSPSLDLTP

SEQ ID NO: 4401 - protein, 982 aa, Dermanyssus gallinae
MTGDHNNCRTVTQPIHATLPDPSEGAGPSSTSGQNPATTPDPLGSNRVTCHQCGQTFARRGFRRHVTVKHGGGGATLVPNGVMNESNFDLTECIQAFMKNGKLVRILPKVVRKSVADALSEVCIKVASDNDDAAWLGLFSFAPVVLRLPIGCRDTRSLAVVIRKNLVEFRRGVRLTDLVPLLTAGESGGNAEQNQSITRAVSAKLSDGDVSGAARLLLSDDVMVDEPAAAASLREKHPPAQPDLCWPSPPPLQLLPSSTSAEDVRFAVGSFAKSSSAGLDFMRPRLLQDLLSPTLGCSSDTLSKALAKVIDLLRWGAPHPRWCPLIFGARLFALKKKDGSFRPIACSSVLRRVAAKLAVRDSRDLINLAIGPHQLGFYTKGGAEIMIHATRAFIDSRIDSSVLVKLDFKNAFNTVKRNHLLRVVGDEAPGIYHQVKLAYGDSSHLVLPSALLTSAVGVQQGDPLAPPLFCLAVKDLVNSLESPLNLWYLDDGVIAGNIGTVCEDIKKILSFATCSGLELNPTKCEVHIIGSGTADISALRDLLPGCRVTGDDLDLLGVPLFSCHLGPKIEQEREKLEIGFNRLPQLGAHRGLYLLRACFSASRLNYLFRGIKCSAFSPQLEEINLKLGLALESILNLRLRNDPLVQAALPVARGGLGLPEAVSLAIAAHIASLHSATSGVEANLDPEAVSNFRATLERTQEDAIAFCGSLPETPSFQRAWSELANNGRWNGLWDRTTTAANKARLLAVSSPGAGAWLQALPSPQLGTLLDDESTRILVGLRLGAELVSPHRCRCGDEVDSLGHHGLSCPQSSGRIARHSALNETFSRGLRSAGYPCILEPSGLVRDDARRPDGMTLTPFERGQMLVWDATVTDSLAPSMVGTGAARPGHAVALAEAAKCRKYSSVGYPHLFSPLAFETLGGPGVLTKKLLNDVGRKLALATGDKRAGEYLLQRLSLDVQRGNAASVRGTLARWTSPSLDLTP

SEQ ID NO: 4402 - protein, 982 aa, Dermanyssus gallinae
MTGDHNNCRTVTQPIHATLPDPSEGAGPSSTSGQNPATTPDPLGSNRVTCHQCGQTFARRGFRRHVTVKHGGGGATLVPNGVMNESNFDLTECIQAFMKNGKLVRILPKVVRKSVADALSEVCIKVASDNDDAAWLGLFSFAPVVLRLPIGCRDTRSLAVVIRKNLVEFRRGVRLTDLVPLLTAGESGGNAEQNQSITRAVSAKLSDGDVSGAARLLLSDDVMVDEPPAAASLREKHPPAQPDLCWPSPPPLQLLPSSTSAEDVRFAVGSFAKSSSAGLDFMRPRLLQDLLSPTLGCSSDTLSKALAKVIDLLRWGAPHPRWCPLIFGARLFALKKKDGSFRPIACSSVLRRVAAKLAVRDSRDLINLAIGPHQLGFYTKGGAEIMIHATRAFIDSRIDSSVLVKLDFKNAFNTVKRDHLLRVVGDEAPGIYHQVKLAYGDSSHLVLPSALLTSAVGVQQGDPLAPPLFCLAVKNLVNSLESPLNLWYLDDGVIAGNAGTVCEDIKKILSFATCSGLELNPTKCEVHIIGSGTADISALRDLLPGCRVTGDDLDLLGVPLFSCHLGPKIEQEREKLEIGFNRLPQLGAHRGLYLLRACFSASRLNYLFRGIKCSAFSPQLEEINLKLGLALESILNLRLRNDPLVQAALPVARGGLGLPEAVSLAIAAHIASLHSATSGVEAILDPEAVSNFRATLERTQEDAIAFCGSLPETPSFQRAWSELANNGRWNGLWDRTTTAANKARLLAVSSPGAGAWLQALPSPQLGTLLDDESTRILVGLRLGAELVSPHRCRCGDEVDSLGHHGLSCPQSSGRIARHSALNETFSRGLRSAGYPCILEPSGLVRDDARRPDGMTLTPFERGQMLVWDATVTDSLAPSMVGTGAARPGHAVALAEAAKCRKYSSVGYPHLFSPLAFETLGGPGVLTKKLLNDVGRKLALATGDKRAGEYLLQRLSLDVQRGNAASVRGTLARWTSPSLDLTP

SEQ ID NO: 4403 - protein, 982 aa, Dermanyssus gallinae
MTGDHNNCRTVTQPIHATLPDPSEGAGPSSTSGQNPATTPDPLGSNRVTCHQCGQTFARRGFRRHVTVKHGGGGATLVPNGVMNESNFDLTECIQAFMKNGKLVRILPKVVRKSVADALSEVCIKVASDNDDAAWLGLFSFAPVVLRLPIGCRDTRSLAVVIRKNLVEFRRGVRLTDLVPLLTAGESGGNAEQNQSITRAVSAKLSDGDVSGAARLLLSDDVMVDEPAAAASLREKHPPAQPDLCWPSPPPLQLLPSSTSAEDVRFAVGSFAKSSSAGLDFMRPRLLQDLLSPTLGFSSDTLSKALAKVIDLLRWGAPHPRWCPLIFGARLFALKKKDGSFRPIACSSVLRRVAAKLAVRDSRDLINLAIGPHQLGFYTKGGAEIMIHATRAFIDSRIDSSVLVKLDFKNAFNTVKRNHLLRVVGDEAPGIYHQVKLAYGDSSHLVLPSALLTSAVGVQQGDPLAPPLFCLAVKDLVNSLESPLNLWYLDDGVIAGNIGTVCEDIKKILSFATCSGLELNPTKCEVHIIGSGTADISALRDLLPGCRVTGDDLDLLGVPLFSCHLGPKIEQEREKLEIGFNRLPQLGAHRGLYLLRACFSASRLNYLFRGINCSAFSPQLEEINLKLGLALESILNLRLRNDPLVQAALPVARGGLGLPEAVSLAIAAHIASLHSATSGVEANLDPEAVSNFRGTLERTQEDAIAFCGSLPETPSFQRAWSELANNGRWNGLWDRTTTAANKARLLAVSSPGAGAWLQALPSPQLGTLLDDESTRILVGLRLGAELVSPHRCRCGDEVDSLGHHGLSCPQSSGRIARHSALNETFSRGLRSAGYPCILEPSGLVRDDARRPDGMTLTPFERGQMLVWDATVTDSLAPSMVGTGAARPGHAVALAEAAKCRKYSSVGYPHLFSPLAFETLGGPGVLTKKLLNDVGRKLALATGDKRAGEYLLQRLSLDVQRGNAASVRGTLARWTSPSLDLTP

SEQ ID NO: 4404 - protein, 982 aa, Dermanyssus gallinae
MTDDHNNGRKVTEPTPVTLSDSSEGAGPSFTPIEILATTPNPLGPNKVTCQKCGQTFARRGLRRHVTVKHGGESTIPHHDGAPNEVNSDLTECIQAFMKNGKLVRILPKVVRKSVADALSEVLVKVAVDNDDAAWLGLFSFAPVVLRLPIGCRDTRSLAVVIRKNLVEFRRGARLTDLALLQTAGESGGNVERNHSITRAVLAKLSDGDVSGAARLLLSDDVMVDEPAAAASLREKHPPAQPDLCWPSPPPSQLLPSSTSVEDIRYTMGSFSKSSSAGLDFIRPRLLQDLLSPTLGCSSDALSKALAKVIDLLRWGAPHPRWCPLIFGARLFALKKKDGSFRPIACSSVLRRIAAKLAVRDSKDVISLAVGPHQLGFSTKGGAEIMIHATRAFIDSRPDPSVLVKLDFKNAFNTVRRDHLLKVVGDETPAIYHQVKLAYGAPSHLVLPSALLTSAVGVQQGDPLAPPLFCLAVKDLVNSLESPLNLWYLDDGVIGGNISTVCEDLKKILNFTTCSGLDLNPVKCEVHITGSSTADISAIQNLLPGCRLTGDDLDLLGVPLFARHIGPTIERGREKLEIGFNRLPQLGAHRGLYLLRSCFSASRLNYLFRGTNSSAFSAQLEEINLKMGFALESILNLRLRDDSLVQAFLPVARGGLGLPEAVSLSVAAHIASLHSATSGVESILDPQAIASFHSTLEKIQDDANAFCGSLPETPSLQRSWSELANDGRWSGLWDRTTTATSKARLQAVSSPGAGAWLHALPSPQLGTLLDDESTRILVGLRLGVDLVSPHQCRCGDEVDSLGHHGLSCPQSSGRIARHSALNETFSRGLRSAGYPCILEPPGLVRDDGRRPDGMTLTPFERGQMLVWDATVTDSLAPSMVGTGASRPGHAVSLAEAAKCRKYSSIAYPHLFSPLAFETLGGPGLLTKKLLNDVGRRLVLATGDKRAGEYLLQRLSLDVQRGNAASVRGTLARWTSPSLDLTP

SEQ ID NO: 4405 - protein, 982 aa, Dermanyssus gallinae
MTGDHNNCRTVTQPIHATLPDPSEGAGPSSTSGQNPATTPDPLGSNRVTCHQCGQTFARRGFRRHVTVKHGGGGATLVPNGVMNESNFDLTECIQAFMKNGKLVRILPKVVRKSVADALSEVCIKVASDNDDAAWLGLFSFAPVVLRLPIGRRDTRSLAVVIRKNLVEFRRGVRLTDLVPLLTAGESGGNAEQNQSITRAVSAKLSDGDVSGAARLLLSDDVMVDEPAAAASLREKHPPAQPDLCWPSPPPLQLLPSSTSAEDVRFAVGSFAKSSSAGLDFMRPRLLQDLLSPTLGFSSDTLSKALAKVIDLLRWGAPHPRWCPLIFGARLFALKKKDGSFRPIACSSVLRRVAAKLAVRDSRDLINLAIGPHQLGFYTKGGAEIMIHATRAFIDSRIDSSVLVKLDFKNAFNTVKRNHLLRVVGDEAPGIYHQMKLAYGDSSHLVLPSALLTSAVGVQQGDPLAPPLFCLAVKDLVNSLESPLNLWYLDDGVIAGNIGTVCEDIKKILSFATCSGLELNPTKCEVHIIGSGTADISALRDLLPGCRVTGDDLDLLGVPLFSCHLGPKIEQEREKLEIGFNRLPQLGAHRGLHLLRACFSASRLNYLFRGINCSAFSPQLEEINLKLGLALESILNLRLRNDPLVQAALPVARGGLGLPEAVSLAIAAHIASLHSATSGVEANLDPEAVSNFRATLERTQEDAIAFCGSLPETPSFQREWSELANNGCWNGLWDRTTTAANKARLLAVSSPGAGAWLQALPSPQLGTLLDDESTRILVGLRLGAELVSPHRCRCGDEVDSLGHHGLSCPQSSGRIARHSALNETFSRGLRSAGYPCILEPSGLVRDDARRPDGMTLTPFERGQMLVWDATVTDSLAPSMVGTGAARPGHAVALAEAAKCRKYSSVGYPHLFSPLAFETLGGPGVLTKKLLNDVGRKLALATGDKRAGEYLLQRLSLDVQRGNAASVRGTLARWTSPSLDLTP

SEQ ID NO: 4406 - protein, 982 aa, Dermanyssus gallinae
MTGDHNNCRTVTQPIHATLPDPSEGAGPSSTSGQNPATTPDPLGSNRVTCHQCGQTFARRGFRRHVTVKHGGGGATLVPNGVMNESNFDLTECIQAFMKNEKLVRILPKVVRKSVADALSEVCIKVASDNDDAAWLGLFSFAPVVLRLPIGRRDTRSLAVVIRKNLVEFRRGVRLTDLVPLLTAGESGGNAEQNQSITRAVSAKLSDGDVSGAARLLLSDDVMVDEPAAAASLREKHPPAQPDLCWPSPPPLQLLPSSTSAEDVRFAVGSFAKSSSAGLDFMRPRLLQDLLSPTLGFSSDTLSKALAKVIDLLRWGAPHPRWCPLIFGARLFALKKKDGSFRPIACSSVLRRVAAKLAVRDSRDLINLAIGPHQLGFYTKGGAEIMIHATRAFIDSRIDSSVLVKLDFKNAFNTVKRNHLLRVVGDEAPGIYHQVKLAYGDSSHLVLPSALLTSAVGVQQGDPLAPPLFCLAVKDLVNSLESPLNLWYLDDGVIAGNIGTVCEDIKKILSFATCSGLELNPTKCEVHIIGSGTADISALRDLLPGCRVTGDDLDLLGVPLFSCHLGPKIEQEREKLEIGFNRLPQLGAHRGLYLLRACFSASRLNYLFRGINCSAFSPQLEEINLKLGLALESILNLRLRNDPLVQAALPVARGGLGLPEAVSLAIAAYIASLHSATSGVEANLDPEAVSNFRATLERTQEDAIAFCGSLPETPSFQREWSELANNGRWNGLWDRTTTAANKARLLAVSSPGAGAWLQALPSPQLGTLLDDESTRILVGLRLGAELVSPHRCRCGDEVDSLGHHGLSCPQSSGRIARHSALNETFSRGLRSAGYPCILEPSGLVRDDARRPDGMTLTPFERGQMLVWDATVTDSLAPSMVGTGAARPGHAVALAEAAKCRKYSSVGYPHLFSPLAFETLGGPGVLTKKLLNDVGRKLALATGDKRAGEYLLQRLSLDVQRGNAASVRGTLARWTSPSLDLTP

SEQ ID NO: 4407 - protein, 976 aa, Dermanyssus gallinae
MTDDHNIGRTVTEPTLVTSSDPSEGVGPSFTSIQNSLGPNRVTCHLCGQTFARRGLRRHVTVKHGGGDAIPLHNGPSNEINPDLTECIQAYIKNGKLVRILPKVVRKSVADALSEVCLKVALDNDDAAWLGLFSFAPVVLRLPVGCRDTRSLAVVIRKNLVEFRRGARLTDLALLHTASESGSNAERNHSITRAVSAKLSDGDVSGAARLLLSDDVMVDEPAAAASLRDNHPPAQPDLCWPSSSPSQLLPSSTSVKDVRYTVGSFSKSSSAGLDFIRPRLLQDLLSPTLGCSSEGLGKALAKVIDLLRWGAPHPRWCPLIFGARLFALKKKDGSFRPIACSSVLRRIAAKLAVRDSRDVISLAIGPHQLGFSTKGGAEIMIHATRAFIDSRLDSSVLVKLDFKNAFNTVRRDHLLKVVGDETPAIYHQVKLAYGDPSHLVLPSALLTSAVGVQQGDPLAPPLFCLAVKDLVNSLESPLNLWYLDDGVIGGNISTVCEDLKKILSFSTCSGLELNPIKCEVHIIGSGTAEISAIQDLLPGCRVTGDDLDILGVPLFSRHLGPTIERGMEKLEVGFTRLPQLGAHRGLYLVRSCFSASRLNYLFRGINSSAFSAQLEEINSKMGLALESILNLRLRDDSLVQAFLPVARGGLGLPEAVSLSVAAHIASLHSATSGVESILDSRAIANFQATLEQTHDDAIAFCGSLPETPSLQRAWSELANDGRWSGLWDRTTTAASKARLQALSSPGAGAWLHALPSPQLGTLLDDESTRILVGLRLGVELVSPHQCKCGDEVDSLGHHGLSCPQSSGRIARHSALNETFSRGLRSAGYPCILEPPGLVRDDGKRPDGMTLTPFERGQMLVWDATVTDSLAPSMVGAGAARPGHAVALAEAAKCRKYSSVAYPHMFSPLAFETLGGPGPLTKKLLNDVGRRLMLATGDKRAGEYLQQRLSLDVQRGNAASVRGTLARWTSPSLDLTP

SEQ ID NO: 4408 - protein, 778 aa, Dermanyssus gallinae
MSDGDVSGAARLLLSDDVMVDEPAAAASLREKHPPAQLNLCWPSPPPSQLLPSSTSIKDVRYAVGSFSKSSGAGLDFIRPRLLQDLLSPTLGCSSDGLSKALAKVIDLLRWGAPHPGWCPLIFGARLFALKKMDGSFRPIACASVLRRIAAKLAVRDSKDVISLAVGPHQLGFSTKGGAEIMIHATRAFIDSRLDPSVLVKLDFKNAFNTVRRDHLLKVVGDEAPSIYHQVKLAYGNSSHLVLPSALLTSAVGIQHGDPLAPPLFCLAVKDLVDTLESPLNLWYLDDGVVGGNISTVCEDLKKILSFAACSGLELNPIKCEVHIIGSDTADISEIQNLLPGCRVTDDNLDLLGVPLFSRQLGPTIERGREKLEIGLNRLPQLGAHRGLYLLRSCFSASRLNYLFRGVNTSAFPDLLEEINSKMCCALESILNLKLQDDSLVQAFLPVAKGGLGLPEANSLSVAAHIASLHSATSGVESILDPQAVANFKATLEQIQDDAIAFCGSQPETPSLQRAWSELANDGRLSGLWERTTTAASKARLHAVSSLGAGAWLHALPSPQLGTLLDDESTRILVGLRLGAELVSPHHCKCGDEVDSLGHHGLSCPQSSGRIARHSALNETFSRALRSAGYPCILEPPGLVRDDGKRPDGMTLTPFEQGQMLVWDATVTDSLAPSMVGAGAVRPGHAVALAEAAKCRKYSGVSYPHLFSPLAFETLGGAGLLTKKLLNDVGKRLVLATGDKRAGEYLLQRLSLNVQRGNAASIRGTLARWTSPSLDLML

SEQ ID NO: 4409 - protein, 982 aa, Dermanyssus gallinae
MMNDHNNHTTAAKSTRATEPGPPERPGPSVIPEPGSARVPNLQGTNRVTCNFCRQTFTRRGLRRHVTVKHGGADTTHIRDEAMNESNPDLTELIQSFMKSGKLVRILPKAVRKSVADALSEVCSRAALDNDDAAWLGLFSFAPVVLRLPVGRRDTRSLTVIIRKNLVEFQRGVRLTHLGSSSGTDESGPSVERIRPNARAVLAKLSDGDAAGAARLLLSDDVMVDEPAAIASLRAKHPVGQSDPVWPSPPSQQLMPSSTSAEDVRYAMGSFSKSLSAGLDFIRPRLLQDLLSPSLGSSSERLGNALAKLIDVLRWGAPHPGWRPLIFGARLFALKKNDGSYRPIACSSVIRRVAAKLAVRDSRDVIRRVIGRHQLGFSTKRGAEIMVHATRAFIDSRQESSVLVKLDFKNAFNTVKRDHLLKTVAEEAPAIYHQVKLAYGDPSHLILPSALLTSAVGVQQGDPLAPPLFCLAVKDLVNSLESPLNLWYLDDGIIGGSASTVCEDIKKILSFATCSGLELNPTKCEVHIKGMGANDTPVILDLLPGCRVVGDDLDLLGVPLSPDNLTSTIERWREKLQVGLNRLPQLGAHRGLYLLRSCFSASNLNYLFRGVNCIAFSSHLEELNVKQGDALESLLNLRLRGDPLTQASLPVARGGLGLPEAVSLSVAAHIASLHSAIGDIEAILDPHAVVHFRSTLEKTQNEAIAFCGALPETPSLQSAWSDLTHDRRWSDLWSRATSDADKARLQAVSSPGASVWLHALPSPQLGTLLDDESTRILVGLRVGAELVSPHRCGCGDEVDSLGHHGLSCAQSSGRIARHSALNETFCRGLRLAGYPCVLEPPGLVRDDGKRPDGMTLTPFDRGQMLVWDATVTDSLAPSMVGTGAARPGHAVALAETAKCRKYSSLDYPHLFSPLAFETLGGPGLLTKKLLRDVGRRLVVATGDKRAGEYLLQRLSLDVQRGNAASVRGTLARWTSPILDLEH

SEQ ID NO: 4410 - protein, 982 aa, Dermanyssus gallinae
MMNDHNNHTTAAESTRATEPGPPERPGPSVIPEPGSATAPNLQGTNRVTCNFCRQTFTRRGLRRYVTVKHGGADTTHIRDEAMNESNPDLTELIQSFMKSGKLVRILPKAVRKSVADALSELCSRAALDNDDAAWLGLFSFAPVVLRLPVGRRDTRSLTVIIRKNLVEFQRGVRLTHLGSSSGTDESGPSVERIRPNARAVLAKLSDGDAAGAARLLLSDDVMVDEPAAIASLRAKHPVGQSDPVWPSPPSQQLMPSSTSAEDVRYAIGSFSKSSSAGLDFIRPRLLQDLLSPSLGSSSERLGKALAKLIDVLRWGAPHPGWRPLIFGARLFALKKNDGSYRPIACSSVIRRVAAKLAVRDSRDVIRRVIGRHQLGFSTKRGAEIMVHATRAFIDSRQESSVLVKLDFKNAFNTVKRDHLLKTVAEEAPAIYHQVKLAYGDPSHLILPSALLTSAVGVQQGDPLAPPLFCLAVKDLVNSLESPLNLWYLDDGIIGGSASTVCEDIKKILSFATCSGLELNPTKCEVHIKGMGANDTPVILDLLPGCRVVGDDLDLLGVPLSPDNLTSTIERWREKLQVGLNRLPQLGAHRGLYLLRSCFSASNLNYLFRGVNCIAFSSHLEELNVKQGDALESLLNLRLRGDPLTQASLPVARGGLGLPEAVSLSVAAHIASLHSAISDIEAILDPHAVVHFRSRLEKTQNEAIAFCGALPETPSLQSAWSDLTHDRRWSDLWSRATSDADKARLQAVSSPGASVWLHALPSPQLGTLLDDESTRILVGLRVGAELVSPHRCGCGDEVDSLGHHGLSCAQSSGRIARHSALNETFCRGLRLAGYPCVLEPPGLVRDDGKRPDGMTLTPFDRGQMLVWDATVTDSLAPSMDGTGAARPGHAVALAETAKCRKYSSLDYPHLFSPLAFETLGGPGLLTKKLLRDVGRRLVVATGDKRAGEYLLQRLSLDVQRGNAASVRGTLARWTSPILDLEP

SEQ ID NO: 4411 - protein, 950 aa, Dermanyssus gallinae
MQNLATTPNPLGPNKVTCHQCGQTFARRGLRRHVTVKHGGGGTMLLHDEAANEVNPDLTECIQAFFKHGKLVRILPKVVRKSVADALSEVCLKVALDNDDAAWLRLFSFAPVVLRLPVGCRDTRSLAVVIRKNLVEFRRGVRLTDLTLLLTAGESGGNVERKHSLTRAVSAKMSDGDVSEAARLLLSDDVMVDEPAAAASLREKHPPAQLNLCWPSPPPSQLLPSSTSIKDVRYAVGSFSKSSGAGLDFIRPRLLQDLLSPTLSCSSDGLSKALAKIIDLLRWGAPHPGWCPLIFGARLFALKKMDGSFRPIACASVLRRIAAKLAVRDAEDVISLAVGPHQLGFSTKGGAEIMIHATRAFIDSRLDPSVLVKLDFKNAFNTVRRDHLLKVVGDEAPSIYHQVKLAYGNSSHLVLPSALLTSAVGIQQGDPLAPPLFCLAVKDLVNTLESPLNLWYLDDGVVGGNISTVCEDLKKILSFAACSGLELNPIKCEVHIIGSDTADISEIQNLLPGCRVTDDNLDLLGVPLFSRQLGPTIERGREKLEIGLNRLPQLGAHRGLYLLRSCFSASRLNYLFREVNTSAFPDILEEINAKMCCALESILNLKLQDDSLVQAFLPVAKGGLGLPEANSLSVAAHIASLHSATSGVESILDPQAVANFKATLEQIQDDAIAFCGSQPETPSLQRAWSELANDGRLSGLWERTTTAASKARLHAVSSPGAGAWLHALPSPQLGTLLDDESTRILVGLRLGAELVSPHHCKCGDEVDSLGHHGLSCPQSSGRIARHSALNETFSRALRSAGYPCILEPPGLVRDDGKRPDGMTLTPFEQGQMLVWDATVTDSLAPSMVGAGAVRPGHAVALAEAAKCRKYSGVSYPHLFSPLAFETLGGAGLLTKKLLNDVGKRLVLATGDKRAGEYLLQRLSLNVQRGNAASIRGTLARWTSPSLDLML

SEQ ID NO: 4412 - protein, 1152 aa, Morbakka virulenta
MSEMNYSSNGNNGVNGAGSYCESSSPGRCSPAQQRGPGRHPDTASRRTRRKWSQEENKTVMECFYLSSPKRRGYRKRMHEVWKSKGTFDVTEQRLIDQKCNIIKKNWLSEVELEEIRRNIEDFPHGELHDMVIVSEEEVDFNVNSKPENTEGTVDNTPDCCGMSDDIDHNSEFPKKIPGCTLSDEEEQMLQKITILLNNTRERLPPLRGMQKAKITTELNKVNSLLSKIKVSSISEVNDLFYAGAVIVTNNLVTRKKGKEPWWKKRLDNKLKELNKDLGLINSLIEENRLKPRSKNRLQIKYKIKQKSINVVREEIKQRIKAITGKIKRYSNRISQYQQNRTFRNNQGQFYRDLESKVNSESEIPDPIEAQEFWSGIWGQEQVHNSHAGWLHDFKNTFKDGDKQTDIIISPKKFSKVLKKLPNWKAPGPDLVQGFWIKNFTSLHLEFCRYLQQCVELHDVPLWMTKGRTVLIQKEKSKGNVPNNYRPITCLPLVWKILTGIISEEMYSYLDDKKYLHNEQKGCSKNAKGTHDLLFIDRMILKEVKKKQRNLFVGWIDYKKAYDMIPHTWIMECLKSLGINENICKLIEKSMGSWRVELICGNESLGEVPIKRGIFQGDSLSPLLFVICLIPLSHILRNMEQGYHFEKDQQKINHLLFMDDLKLYAGSQKALDSLVQTVRIFSNDIGMQFGIEKCAVLRMYKGVLKDFSGIKLPDDCEIKGLKEGEGYKYLGILEADVVKSKEMKDNISKEYKRRVRKILETKLNGGNLIQAINTYAVSLIRYSAAFIDWTVKEMKQLDERTRKLLTMHKALHPKSDVDRLYLPRKVGGRGLLSVEDTILQTRASLNSYVESSKEDLIIAARSVRGATDVNENAGTFMKRRRSERTSKWKEKPLHGQFVRQTDEISNEERWLWLKDGSMKRETESLIIAAQNQSIRTNHIKATIDKSQRNNKCRMCNQSDETISHILCECPKLAQREYKRRHDWVGKRIHWEVCQVNGITVSPKWYDHNPQAVIENEKCKILWDFNVQTDHIIEARRPDMIVVDKDKKSCTIIDFAVPYDSRVIAKEQEKILKYQDLARELKKLWDIPIKLVPIIIGALGTPPKNLKKWLGELGLKTKIVELQKTTLLQAARVLRKVLEVLGVLLTPCLKKLH

SEQ ID NO: 4413 - protein, 1139 aa, Morbakka virulenta
MSEMNYSSNGNNGVNGAGSYCESSSPGRCSPAQQRGPGRHPDTASRRTRRKWSQEENKTVMECFYLSSPKRRGYRKRMHEVWKSKGTFDVTEQRLIDQKCNIIKKNWLSEVELEEIRRNIEDFPHGELHDMVIVSEEEVDFNVNSKPENTEGTVDNTPDCCGMSDDIDHNSEFPKKIPGCTLSDEEEQMLQKITILLNNTRERLPPLRGMQKAKITTELNKVNSLLSKIKVSSISEVNDLFYAGAVIVTNNLVTRKKGKEPWWKKRLDNKLKELNKDLGLINSLIEENRLKPRSKNRLQIKYKIKQKSINVVREEIKQRIKAITGKIKRYSNRISQYQQNRTFRNNQGQFYRDLESKVNSESEIPDPIEAQEFWSGIWGQEQVHNSHAGWLHDFKNTFKDGDKQTDIIISPKKFSKVLKKLPNWKAPGPDLVQGFWIKNFTSLHLEFCRYLQQCVELHDVPLWMTKGRTVLIQKEKSKGNVPNNYRPITCLPLVWKILTGIISEEMYSYLDDKKYLHNEQKGCSKNAKGTHDLLFIDRMILKEVKKKQRNLFVGWIDYKKAYDMIPHTWIMECLKSLGINENICKLIEKSMGSWRVELICGNESLGEVPIKRGIFQGDSLSPLLFVICLIPLSHILRNMEQGYHFEKDQQKINHLLFMDDLKLYAGSQKALDSLVQTVRIFSNDIGMQFGIEKCAVLRMYKGVLKDFSGIKLPDDCEIKGLKEGEGYKYLGILEADVVKSKEMKDNISKEYKRRVRKILETKLNGGNLIQAINTYAVSLIRYSAAFIDWTVKEMKQLDERTRKLLTMHKALHPKSDVDRLYLPRKVGGRGLLSVEDTILQTRASLNSYVESSKEDLIIAARSVRGATDVNENAGTFMKRRRSERTSKWKEKPLHGQFVRQTDEISNEERWLWLKDGSMKRETESLIIAAQNQSIRTNHIKATIDKSQRNNKCRMCNQSDETISHILCECPKLAQREYKRRHDWVGKRIHWEVCQVNGITVSPKWYDHNPQAVIENEKCKILWDFNVQTDHIIEARRPDMIVVDKDKKSCTIIDFAVPYDSRVIAKEQEKILKYQDLARELKKLWDIPIKVVPIIIGALDTPPKNLKKWLGELGLKTKIVELQKTTLLQSARVLRKVLEV

SEQ ID NO: 4414 - protein, 1139 aa, Morbakka virulenta
MSEMNYSSNGNNGVNGAGSYCESSSPGRCSPAQQRGPGRHPDTASRRTRRKWSQEENKTVMECFYLSSPKRRGYRKRMHEVWKSKGTFDVTEQRLIDQKCNIIKKNWLSEVELEEIRRNIEDFPHGELHDMVIVSEEEVDFNVNSKPENTEGTVDNTPDCCGMSDDIDHNSEFPKKIPGCTLSDEEEQMLQKITILLNNTRERLPPLRGMQKAKITTELNKVNSLLSKIKVSSISEVNDLFYAGAVIVTNNLVTRKKGKEPWWKKRLDNKLKELNKDLGLINSLIEENRLKPRSKNRLQIKYKIKQKSINVVREEIKQRIKAITGKIKRYSNRISQYQQNRTFRNNQGQFYRDLESKVNSESEIPDPIEAQEFWSGIWGQEQVHNSHAGWLHDFKNTFKDGDKQTDIIISPKKFSKVLKKLPNWKAPGPDLVQGFWIKNFTSLHLEFCRYLQQCVELHDVPLWMTKGRTVLIQKEKSKGNVPNNYRPITCLPLVWKILTGIISEEMYSYLDDKKYLHNEQKGCSKNAKGTHDLLFIDRMILKEVKKKQRNLFVGWIDYKKAYDMIPHTWIMECLKSLGINENICKLIEKSMGSWRVELICGNESLGEVPIKRGIFQGDSLSPLLFVICLIPLSHILRNMEQGYHFEKDQQKINHLLFMDDLKLYAGSQKALDSLVQTVRIFSNDIGMQFGIEKCAVLRMYKGVLKDFSGIKLPDDCEIKGLKEGEGYKYLGILEADVVKSKEMKDNISKEYKRRVRKILETKLNGGNLIQAINTYAVSLIRYSAAFIDWTVKEMKQLDERTRKLLTMHKALHPKSDVDRLYLPRKVGGRGLLSVEDTILQTRASLNSYVESSKEDLIIAARSVRGATDVNENAGTFMKRRRSERTSKWKEKPLHGQFVRQTDEISNEERWLWLKDGSMKRETESLIIAAQNQSIRTNHIKATIDKSQRNNKCRMCNQSDETISHILCECPKLAQREYKRRHDWVGKRIHWEVCQVNGITVSPKWYDHNPQAVIENEKCKILWDFNVQTDHIIEARRPDMIVVDKDKKSCTIIDFAVPYDSRVIAKEQEKILKYQDLARELKKLWDIPIKVVPIIIGALGTPPKNFKKWLGELGLKTKIVELQKTTLLQSARVLRKVLEV

SEQ ID NO: 4415 - protein, 1105 aa, Morbakka virulenta
MSEMNYSSNGNNGVNGAGSYCESSSPGRCSPAQQRGPGRHPDTASRRTRRKWSQEENKTVMECFYLSSPKRRGYRKRMHEVWKSKGTFDVTEQRLIDQKCNIIKKNWLSEVELEEIRRNIEDFPHGELHDMVIVSEEEVDFNVNSKPENTEGTVDNTPDCCGMSDDIDHNSEFPKKIPGCTLSDEEEQMLQKITILLNNTRERLPPLRGMQKAKITTELNKVNSLLSKIKVSSISEVNDLFYAGAVIVTNNLVTRKKGKEPWWKKRLDNKLKELNKDLGLINSLIEENRLKPRSKNRLQIKYKIKQKSINVVREEIKQRIKAITGKIKRYSNRISQYQQNRTFRNNQGQFYRDLESKVNSESEIPDPIEAQEFWSGIWGQEQVHNSHAGWLHDFKNTFKDGDKQTDIIISPKKFSKVLKKLPNWKAPGPDLVQGFWIKNFTSLHLEFCRYLQQCVELHDVPLWMTKGRTVLIQKEKSKGNVPNNYRPITCLPLVWKILTGIISEEMYSYLDDKKYLHNEQKGCSKNAKGTHDLLFIDRMILKEVKKKQRNLFVGWIDYKKAYDMIPHTWIMECLKSLGINENICKLIEKSMGSWRVELICGNESLGEVPIKRGIFQGDSLSPLLFVICLIPLSHILRNMEQGYHFEKDQQKINHLLFMDDLKLYAGSQKALDSLVQTVRIFSNDIGMQFGIEKCAVLRMYKGVLKDFSGIKLPDDCEIKGLKEGEGYKYLGILEADVVKSKEMKDNISKEYKRRVRKILETKLNGGNLIQAINTYAVSLIRYSAAFIDWTVKEMKQLDERTRKLLTMHKALHPKSDVDRLYLPRKVGGRGLLSVEDTILQTRASLNSYVESSKEDLIIAARSVRGATDVNENAGTFMKRRRSERTSKWKEKPLHGQFVRQTDEISNEERWLWLKDGSMKRETESLIIAAQNQSIRTNHIKATIDKSQRNNKCRMCNQSDETISHILCECPKLAQREYKRRHDWVGKRIHWEVCQVNGITVSPKWYDHNPQAVIENEKCKILWDFNVQTDHIIEARRPDMIVVDKDKKSCTIIDFAVPYDSRVIAKEQEKILKYQDLARELKKLWDIPIKVVPIIIGALGTPPKNF

SEQ ID NO: 4416 - protein, 1139 aa, Morbakka virulenta
MSEMNYSSNGNNGVNGAGSYCESSSPGRCSPAQQRGPGRHPDTASRRTRRKWSQEENKTVMECFYLSSPKRRGYRKRMHEVWKSKGTFDVTEQRLIDQKCNIIKKNWLSEVELEEIRRNIEDFPHGELHDMVIVSEEEVDFNVNSKPENTEGTVDNTPDCCGMSDDIDHNSEFPKKIPGCTLSDEEEQMLQKITILLNNTRERLPPLRGMQKAKITTELNKVNSLLSKIKVSSISEVNDLFYAGAVIVTNNLVTRKKGKEPWWKKRLDNKLKELNKDLGLINSLIEENRLKPRSKNRLQIKYKIKQKSINVVREEIKQRIKAITGKIKRYSNRISQYQQNRTFRNNQGQFYRDLESKVNSESEIPDPIEAQEFWSGIWGQEQVHNSHAGWLHDFKNTFKDGDKQTDIIISPKKFSKVLKKLPNWKAPGPDLVQGFWIKNFTSLHLEFCRYLQQCVELHDVPLWMTKGRTVLIQKEKSKGNVPNNYRPITCLPLVWKILTGIISEEMYSYLDDKKYLHNEQKGCSKNAKGTHDLLFIDRMILKEVKKKQRNLFVGWIDYKKAYDMIPHTWIMECLKSLGINENICKLIEKSMGSWRVELICGNESLGEVPIKRGIFQGDSLSPLLFVICLIPLSHILRNMEQGYHFEKDQQKINHLLFMDDLKLYAGSQKALDSLVQTVRIFSNDIGMQFGIEKCAVLRMYKGVLKDFSGIKLPDDCEIKGLKEGEGYKYLGILEADVVKSKEMKDNISKEYKRRVRKILETKLNGGNLIQAINTYAVSLIRYSAAFIDWTVKEMKQLDERTRKLLTMHKALHPKSDVDRLYLPRKVGGRGLLSVEDTILQTRASLNSYVESSKEDLIIAARSVRGATDVNENAGTFMKRRRSERTSKWKEKPLHGQFVRQTDEISNEERWLWLKDGSMKRETESLIIAAQNQSIRTNHIKATIDKSQRNNKCRMCNQSDETISHILCECPKLAQREYKRRHDWVGKRIHWEVCQVNGITVSPKWYDHNPQAVIENEKCKILWDFNVQTDHIIEARRPDMIVVDKDKKTCTIIDFAVPYDSRVIAKEQEKILKYQDLARELKKLWDIPIKVVPIIIGALGTPPKNLKKWLGELGLKTKIVELQKTTLLQSARVLRKVLEV

SEQ ID NO: 4417 - protein, 1139 aa, Morbakka virulenta
MSERNYSSNGNNGVNGAGSYCESSSPGRCFPSQQRGPGRHPDTASRRTRRKWSQEENKTVMECFYLCSPERRGYRKRMHEIWKSKGTFDVTEERLIDQKSNIIKKNWLSEVKLEEIRRNIEDFPHGELHDMVIVSEEGVDFNVNSKPENTEGIVDNTPDCCGMSDDIDHNSEFPKKIPGCTLSDEEEQMLQKIRILLNNTRERLPPLRGMQKAKITTELNKVNSLLSKIKVSSISEVNDLFYAGAVIVTNNLVTRKKGKEPWWKKRLDNKLKELNKDLGLINSLIEENRLKPRSKNRLQIKYKIKQKSITVVREEIKQRIKAITGKIKRYSNRISQYQQNRTFRNNQGQFYRDLESKVDSESEIPDPIEAQEFWSGIWGQEQVHNSHAGWLHDFKNTFKDGDKQTDIIISPKKFSKVLKKLPNWKAPGPDLVQGFWIKNFTSLHLEFCRYLQQCVELHDVPLWMTKGRTVLIQKEKSKGNVPNNYRPITCLPLVWKILTGIISEEMYSYLDDKKYLHNEQKGCSKNAKGTHDLLFIDRMILKEVKKKQRNLFVGWIDYKKAYDMIPHTWIMECLKSLGINENICKLIEKSMGSWRVELICGNESLGEVPIKRGIFQGDSLSPLLFVICLIPLSHILRNMEQGYHFEKDQQKINHLLFMDDLKLYAGSQKALDSLVQTVRIFSNDIGMQFGIEKCAVLRMYKGVLKDFSGIKLPDDCEIKGLKEGEGYKYLGILEADVVKSKEMKDNISKEYKRRVRKILETKLNGGNLIQAINTYAVSLIRYSAAFIDWTVKEMKQLDERTRKLLTMHKALHPKSDVDRLYLPRKVGGRGLLSVEDTILQTRASLNSYVESSKEDLIIAARSVRGATDVNENAGTFMKRRRSERTSKWKEKPLHGQFVRQTDEISNEERWLWLKDGSMKRETESLIIAAQNQSIRTNHIKATIDKSQRNNKCRMCNQSDETISHILCECPKLAQREYKRRHDWVGKRIHWEVCQVNGITVSPKWYDHNPQAVIENEKCKILWDFNVQTDHIIEARRPDMIVVDKDKKSCTIIDFAVPYDSRVIAKEQEKILKYQDLARELKKLWDIPIKVVPIIIGALGTPPKNLKKWLGELGLKTKIVELQKTTLLQSARVLRKVLEV

SEQ ID NO: 4418 - protein, 1136 aa, Morbakka virulenta
MNYSSNGNNGVNGAGSYCESSSPGRCSPAQQRGPGRHPDTASRRTRRKWSQEENKTVMECFYLSSPKRRGYRKRMHEVWKSKGTFDVTEQRLIDQKCNIIKKNWLSEVELEEIRRNIEDFPHGELHDMVIVSEEEVDFNVNSKPENTEGTVDNTPDCCGMSDDIDHNSEFPKKIPGCTLSDEEEQMLQKITILLNNTRERLPPLRGMQKAKITTELNKVNSLLSKIKVSSISEVNDLFYAGAVIVTNNLVTRKKGKEPWWKKRLDNKLKELNKDLGLINSLIEENRLKPRSKNRLQIKYKIKQKSINVVREEIKQRIKAITGKIKRYSNRISQYQQNRTFRNNQGQFYRDLESKVNSESEIPDPIEAQEFWSGIWGQEQVHNSHAGWLHDFKNTFKDGDKQTDIIISPKKFSKVLKKLPNWKAPGPDLVQGFWIKNFTSLHLEFCRYLQQCVELHDVPLWMTKGRTVLIQKEKSKGNVPNNYRPITCLPLVWKILTGIISEEMYSYLDDKKYLHNEQKGCSKNAKGTHDLLFIDRMILKEVKKKQRNLFVGWIDYKKAYDMIPHTWIMECLKSLGINENICKLIEKSMGSWRVELICGNESLGEVPIKRGIFQGDSLSPLLFVICLIPLSHILRNMEQGYHFEKDQQKINHLLFMDDLKLYAGSQKALDSLVQTVRIFSNDIGMQFGIEKCAVLRMYKGVLKDFSGIKLPDDCEIKGLKEGEGYKYLGILEADVVKSKEMKDNISKEYKRRVRKILETKLNGGNLIQAINTYAVSLIRYSAAFIDWTVKEMKQLDERTRKLLTMHKALHPKSDVDRLYLPRKVGGRGLLSVEDTILQTRASLNSYVESSKEDLIIAARSVRGATDVNENAGTFMKRRRSERTSKWKEKPLHGQFVRQTDEISNEERWLWLKDGSMKRETESLIIAAQNQSIRTNHIKATIDKSQRNNKCRMCNQSDETISHILCECPKLAQREYKRRHDWVGKRIHWEVCQVNGITVSPKWYDHNPQAVIENEKCKILWDFNVQTDHIIEARRPDMIVVDKDKKTCTIIDFAVPYDSRVIAKEQEKILKYQDLARELKKLWDIPIKVVPIIIGALGTPPKNLKKWLGELGLKTKIVELQKTTLLQSARVLRKVLEV

SEQ ID NO: 4419 - protein, 1139 aa, Morbakka virulenta
MSEMNYSSNGNNGVNGAGSYCESSSPGRCSPAQQRGPGRHPDTASRRTRRKWSQEENKTVMECFYLSSPKRRGYRKRMHEVWKSKGTFDVTEQRLIDQKCNIIKKNWLSEVELEEIRRNIEDFPHGELHDMVIVSEEEVDFNVNSKPENTEGTVDNTPDCCGMSDDIDHNSEFPKKIPGCTLSDEEEQMLQKITILLNNTRERLPPLRGMQKAKITTELNKVNSLLSKIKVSSISEVNDLFYAGAVIVTNNLVTRKKGKEPWWKKRLDNKLKELNKDLGLINSLIEENRLKPRSKNRLQIKYKIKQKSINVVREEIKQRIKAITGKIKRYSNRISQYQQNRTFRNNQGQFYRDLESKVNSESEIPDPIEAQEFWSGIWGQEQVHNSHAGWLHDFKNTFKDGDKQTDIIISPKKFSKVLKKLPNWKAPGPDLVQGFWIKNFTSLHLEFCRYLQQCVELHDVPLWMTKGRTVLIQKEKSKGNVPNNYRPITCLPLVWKILTGIISEEMYSYLDDKKYLHNEQKGCSKNAKGTHDLLFIDRMILKEVKKKQRNLFVGWIDYKKAYDMIPHTWIMECLKSLGINENICKLIEKSMGSWRVELICGNESLGEVPIKRGIFQGDSLSPLLFVICLIPLSHILRNMEQGYHFEKDQQKINHLLFMDDLKLYAGSQKALDSLVQTVRIFSNDIGMQFGIEKCAVLRMYKGVLKDFSGIKLPDDCEIKGLKEGEGYKYLGILEADVVKSKEMKDNISKEYKRRVRKILETKLNGGNLIQAINTYAVSLIRYSAAFIDWTVKEMKQLDERTRKLLTMHKALHPKSDVDRLYLPRKVGGRGLLSVEDTILQTRASLNSYVESSKEDLIIAARSVRGATDVNENAGTFMKRRRSERTSKWKEKPLHGQFVRQTDEISNEERWLWLKDGSMKRETESLIIAAQNQSIRTNHIKATIDKSQRNNKCRMCNQSDETISHILCECPKLAQREYKRRHDWVGKRIHWEVCQVNGITVSPKWYDHNPQAVIENEKCKILWDFNVQTDHIIEARRPDMIVVDKDKKSCTIIDFAVPYDSRVIAKEQEKILKYQDLARELKKLWDIPIKVVPIIIGALGTPPKNLKKWLGELGLKTKIVELQKTTLLQSARVLRKVLEV

SEQ ID NO: 4420 - protein, 1104 aa, Morbakka virulenta
MSEMNYSSNGNNGVNGAGSYCESSSPGRCSPAQQRGPGRHPDTASRRTRRKWSQEENKTVMECFYLSSPKRRGYRKRMHEVWKSKGTFDVTEQRLIDQKCNIIKKNWLSEVELEEIRRNIEDFPHGELHDMVIVSEEEVDFNVNSKPENTEGTVDNTPDCCGMSDDIDHNSEFPKKIPGCTLSDEEEQMLQKITILLNNTRERLPPLRGMQKAKITTELNKVNSLLSKIKVSSISEVNDLFYAGAVIVTNNLVTRKKGKEPWWKKRLDNKLKELNKDLGLINSLIEENRLKPRSKNRLQIKYKIKQKSINVVREEIKQRIKAITGKIKRYSNRISQYQQNRTFRNNQGQFYRDLESKVNSESEIPDPIEAQEFWSGIWGQEQVHNSHAGWLHDFKNTFKDGDKQTDIIISPKKFSKVLKKLPNWKAPGPDLVQGFWIKNFTSLHLEFCRYLQQCVELHDVPLWMTKGRTVLIQKEKSKGNVPNNYRPITCLPLVWKILTGIISEEMYSYLDDKKYLHNEQKGCSKNAKGTHDLLFIDRMILKEVKKKQRNLFVGWIDYKKAYDMIPHTWIMECLKSLGINENICKLIEKSMGSWRVELICGNESLGEVPIKRGIFQGDSLSPLLFVICLIPLSHILRNMEQGYHFEKDQQKINHLLFMDDLKLYAGSQKALDSLVQTVRIFSNDIGMQFGIEKCAVLRMYKGVLKDFSGIKLPDDCEIKGLKEGEGYKYLGILEADVVKSKEMKDNISKEYKRRVRKILETKLNGGNLIQAINTYAVSLIRYSAAFIDWTVKEMKQLDERTRKLLTMHKALHPKSDVDRLYLPRKVGGRGLLSVEDTILQTRASLNSYVESSKEDLIIAARSVRGATDVNENAGTFMKRRRSERTSKWKEKPLHGQFVRQTDEISNEERWLWLKDGSMKRETESLIIAAQNQSIRTNHIKATIDKSQRNNKCRMCNQSDETISHILCECPKLAQREYKRRHDWVGKRIHWEVCQVNGITVSPKWYDHNPQAVIENEKCKILWDFNVQTDHIIEARRPDMIVVDKDKKTCTIIDFAVPYDSRVIAKEQEKILKYQDLARELKKLWDIPIKVVPIIIGALGTPPKI

SEQ ID NO: 4421 - protein, 963 aa, Morbakka virulenta
MSNDIDHNSEFPKKIPGCTLSDEEEQMLQKITILLNNTRERLPPLRGMQKAKITTELNKVNSLLSKIKVSSISEVNDLFYAGAVIVTNNLVTRKKGKEPWWKKRLDNKLKELNKDLGLINSLIEENRLKPRSKNRLQIKYKIKQKSINVVREEIKQRIKAITGKIKRYSNRISQYQQNRTFRNNQGQFYRDLESKVNSESEIPDPIEAQEFWSGIWGQEQVHNSHAGWLHDFKNTFKDGDKQTDIIISPKKFSKVLKKLPNWKAPGPDLVQGFWIKNFTSLHLEFCRYLQQCVELHDVPLWMTKGRTVLIQKEKSKGNVPNNYRPITCLPLVWKILTGIISEEMYSYLDDKKYLHNEQKGCSKNAKGTHDLLFIDRMILKEVKKKQRNLFVGWIDYKKAYDMIPHTWIMECLKSLGINENICKLIEKSMGSWRVELICGNESLGEVPIKRGIFQGDSLSPLLFVICLIPLSHILRNMEQGYHFEKDQQKINHLLFMDDLKLYAGSQKALDSLVQTVRIFSNDIGMQFGIEKCAVLRMYKGVLKDFSGIKLPDDCEIKGLKEGEGYKYLGILEADVVKSKEMKDNISKEYKRRVRKILETKLNGGNLIQAINTYAVSLIRYSAAFIDWTVKEMKQLDERTRKLLTMHKALHPKSDVDRLYLPRKVGGRGLLSVEDTILQTRASLNSYVESSKEDLIIAARSVRGATDVNENAGTFMKRRRSERTSKWKEKPLHGQFVRQTDEISNEERWLWLKDGSMKRETESLIIAAQNQSIRTNHIKATIDKSQRNNKCRMCNQSDEMISHILCECPKFAQREYKRRHDWVGKRIHWEVCQVNGITVSPKWYDHNPQAVIENEKPKILWDFNVRTDHIIEARRPDMIVVDKDKKKCTIIDFAVPYDSRVIAKVLEKILKYQDLARELKKLWDIPIKVVPIIIGELGLKTRIAELQKTTLLQSARVLRKVLEV

SEQ ID NO: 4422 - protein, 942 aa, Morbakka virulenta
MSDDIDHNSEFPKKIPGCTLSDEEEQMLQKIRILLNNTRERLPPLRGMQKAKITTELNKVNSLQSKIKVSSISEVNDLFYAGAVIVTNNLVTRKKGKEPWWKKRLDNKLKELNKDLGLINSLIEENRLKPRSKNRLQIKYKIKQKSINVVREEIKQRIKAITGKIKRYSNRISQYQQNRTFRNNQGQFYRDLESKVNSESEIPDPIEAQEFWSGIWGQEQVHNSHAGWLHDFKNTFKDGDKQTDIIISPKKFSKVLKKLPNWKAPGPDLVQGFWIKNFTSLHLEFCRYLQQCVELHDVPLWMTKGRTVLIQKEKSKGNVPNNYRPITCLPLVWKILTGIISEEMYSYLDDKKYLHNEQKGCSKNAKGTHDLLFIDRMILKEVKKKQRNLFVGWIDYKKAYDMIPHTWIMECLKSLGINENICKLIEKSMGSWRVELICGNESLGEVPIKRGIFQGDSLSPLLFVICLIPLSHILRNMEQGYHFEKDQQKINHLLFMDDLKLYAGSQKALDSLVQTVRIFSNDIGMQFGIEKCAVLRMYKGVLKDFSGIKLPDDCEIKGLKEGEGYKYLGILEADVVKSKEMKDNISKEYKRRVRKILETKLNGGNLIQAINTYAVSLIRYSAAFIDWTVKEMKQLDERTRKLLTMHKALHPKSDVDRLYLPRKVGGRGLLSVEDTILQTRASLNSYVESSKEDLIIAARSVRGATDVNENAGTFMKRRRSERTSKWKEKPLHGQFVRQTDEISNEERWLWLKDGSMKRETESLIIAAQNQSIRTNHIKATIDKSQRNNKCRMCNQSDETISHILCECPKLAQREYKRRHDWVGKRIHWEVCQVNGITVSPKWYDHNPQAVIENEKCKILWDFNVQTDHIIEARRPDMIVVDKDKKSCTIIDFAVPYDSRVIAKEQEKILKYQDLARELKTLWDIPIKVVPIIIGALGTPPKN

SEQ ID NO: 4423 - protein, 1139 aa, Morbakka virulenta
MSEMNYSSNGNNGVNGAGSYCESSSPGRCSPAQQRGPGRHPDTASRRTRRKWSQEENKTVMECFYLSSPKRRGYRKRMHEVWKSKGTFDVTEQRLIDQKCNIIKKNWLSEVELEEIRRNIEDFPHGELHDMVIVSEEEVDFNVNSKPENTEGTVDNTPDCCGMSDDIDHNSEFPKKIPGCTLSDEEEQMLQKITILLNNTRERLPPLRGMQKAKITTELNKVNSLLSKIKVSSISEVNDLFYAGAVIVTNNLVTRKKGKEPWWKKRLDNKLKELNKDLGLINSLIEENRLKPRSKNRLQIKYKIKQKSINVVREEIKQRIKAITGKIKRYSNRISQYQQNRTFRNNQGQFYRDLESKVDSESEIPDPIEAQEFWSGIWGQEQVHNSHAGWLHDFKNTFKDGDKQTDIIISPKKFSKVLKKLPNWKAPGPDLVQGFWIKNFTSLHLEFCRYLQQCVELHDVPLWMTKGRTVLIQKEKSKGNVPNNYRPITCLPLVWKILTGIISEEMYSYLDDKKYLHNEQKGCSKNAKGTHDLLFIDRMILKEVKKKQRNLFVGWIDYKKAYDMIPHTWIMECLKSLGINENICKLIEKSMGSWRVELICGNESLGEVPIKRGIFQGDSLSPLLFVICLIPLSHILRNMEQGYHFEKDQQKINHLLFMDDLKLYAGSQKALDSLVQTVRIFSNDIGMQFGIEKCAVLRMYKGVLKDFSGIKLPDDCEIKGLKEGEGYKYLGILEADVVKSKEMKDNISKEYKRRVRKILETKLNGGNLIQAINTYAVSLIRYSAAFIDWTVKEMKQLDERTRKLLTMHKALHPKSDVDRLYLPRKVGGRGLLSVEDTILQTRASLNSYVESSKEDLIIAARSVRGATDVNENAGTFMKRRRSERTSKWKEKPLHGQFVRQTDEISNEERWLWLKDGSMKRETESLIIAAQNQSIRTNHIKATIDKSQRNNKCRMCNQSDETISHILCECPKLAQREYKRRHDWVGKRIHWEVCQVNGITVSPKWYDHNPQAVIENEKCKILWDFNVQTDHIIEARRPDMIVVDKDKKSCTIIDFAVPYDSRVIAKEQEKILKYQDLARELKKLWDIPIKVVPIIIGALGTQRKNLKKWLGELGLKTKIVELQKTTLLQSARVLRKVLEV

SEQ ID NO: 4424 - protein, 676 aa, Morbakka virulenta
MTKGRTVLIQKEKSKGNVPNNYRPITCLPLVWKILTGIISEEMYSYLDDKKYLHNEQKGCSKNAKGTHDLLFIDRMILKEVKKKQRNLFVGWIDYKKAYDMIPHTWIMECLKSLGINENICKLIEKSMGSWRVELICGNESLGEVPIKRGIFQGDSLSPLLFVICLIPLSHILRNMEQGYHFEKDQQKINHLLFMDDLKLYAGSQKALDSLVQTVRIFSNDIGMQFGIEKCAVLRMYKGVLKDFSGIKLPDDCEIKGLKEGEGYKYLGILEADVVKSKEMKDNISKEYKRRVRKILETKLNGGNLIQAINTYAVSLIRYSAAFIDWTVKEMKQLDERTRKLLTMHKALHPKSDVDRLYLPRKVGGRGLLSVEDTILQTRASLNSYVESSKEDLIIAARSVRGATDVNENAGTFMKRRRSERTSKWKEKPLHGQFVRQTDEISNEERWLWLKDGSMKRETESLIIAAQNQSIRTNHIKATIDKSQRNNKCRMCNQSDETISHILCECPKLAQREYKRRHDWVGKRIHWEVCQVNGITVSPKWYDHNPQAVIENEKCKILWDFNVQTDHIIEARRPDMIVVDKDKKSCTIIDFAVPYDSRVIAKEQEKILKYQDLARELKKLWDIPIKVVPIIIGALGTPPKKLKKWLGELGLKTKIVELQKTTLLQSARVLRKVLEV

SEQ ID NO: 4425 - protein, 1105 aa, Morbakka virulenta
MSEMNYSSNGNNGVNGAGSYCESSSPGRCSPAQQRGPGRHPDTASRRTRRKWSQEENKTVMECFYLSSPKRRGYRKRMHEVWKSKGTFDVTEQRLIDQKCNIIKKNWLSEVELEEIRRNIEDFPHGELHDMVIVSEEEVDFNVNSKPENTEGTVDNTPDCCGMSDDIDHNSEFPKKIPGCTLSDEEEQMLQKITILLNNTRERLPPLRGMQKAKITTELNKVNSLLSKIKVSSISEVNDLFYAGAVIVTNNLVTRKKGKEPWWKKRLDNKLKELNKDLGLINSLIEENRLKPRSKNRLQIKYKIKQKSINVVREEIKQRIKAITGKIKRYSNRISQYQQNRTFRNNQGQFYRDLESKVNSESEIPDPIEAQEFWSGIWGQEQVHNSHAGWLHDFKNTFKDGDKQTDIIISPKKFSKVLKKLPNWKAPGPDLVQGFWIKNFTSLHLEFCRYLQQCVELHDVPLWMTKGRTVLIQKEKSKGNVPNNYRPITCLPLVWKILTGIISEEMYSYLDDKKYLHNEQKGCSKNAKGTHDLLFIDRMILKEVKKKQRNLFVGWIDYKKAYDMIPHTWIMECLKSLGINENICKLIEKSMGSWRVELICGNESLGEVPIKRGIFQGDSLSPLLFVICLIPLSHILRNMEQGYHFEKDQQKINHLLFMDDLKLYAGSQKALDSLVQTVRIFSNDIGMQFGIEKCAVLRMYKGVLKDFSGIKLPDDCEIKGLKEGEGYKYLGILEADVVKSKEMKDNISKEYKRRVRKILETKLNGGNLIQAINTYAVSLIRYSAAFIDWTVKEMKQLDERTRKLLTMHKALHPKSDVDRLYLPRKVGGRGLLSVEDTILQTRASLNSYVESSKEDLIIAARSVRGATDVNENAGTFMKRRRSERTSKWKEKPLHGQFVRQTDEISNEERWLWLKDGSMKRETESLIIAAQNQSIRTNHIKATIDKSQRNNKCRMCNQSDETISHILCECPKLAQREYKRRHDWVGKRIHWEVCQVNGITVSPKWYDHNPQAVIENEKCKILWDFNVQTDHIIEARRPDMIVVDKDKKSCTIIDFAVPYDSRVVAKEQEKILKYQDLARELKKLWDIPIKVVPIIIGALGTPPKTF

SEQ ID NO: 4426 - protein, 1210 aa, Trachythela sp.
MSEVNLEDDETTITSPAVSRRSRRSRVRNLSNMSLSCPVSTYNDDDSCFNVPPPLPTPSPLSQFLANPTKSSPNPNSSTPQPVSPVHLQPLSNPNFSTPQPFSPVHLQPSTLQPSSQIPDNIPQPILSDLDDDLYLSTNSPPRPSSPVPSTIPLILNLSIQANLEPTVALSGCSTVGDGDVPSQSANLDPPVALNGCSTAGESDAPPSIPPSNLPPLPDLLFEIDPPDYLNDPVEPSQQPFIHQPNPDNEILYQHESISLSPSNDIDDTPVTLPPQAPSDDSIESIPVFHDRWSSTFAIDSNWQEFSENVDKFADEIILTCNAHYRQPKKNPAPRRPHRPSARPANNNRQPIGYNPVEARKIQTLYRLSKKRAARKVLDDTKPSYSGSVDDANAFFMSVFGERTTDLTKLQEGLDEFVPSGPTDDSIGAPMTADEVSKKLRSLSNSSPGADRVEYRHLKSIDPKGTLLSVIYNRCLAVNDVPSNWKLSQTILIHKKGNASDVSNFRPIALMSCIYKLFTSILANRLVSYSINNDLLSRQQKSARPTEGCYEHTFILQSLTLGAKRSQKNLNLAWLDLRNAFGSVPHVISSTLLHLGVPDSVVTLIINIYTNASTDVRTPSGTTPSIPIKSGVKQGCPLSPILFNLCVELILRSVSAKGHSIGQAKHFDSEISVLAYADDLVIIARNKKNLQKLLDAASEAASTIGLEFRPDKCASLSLIFSKNYQDNIEFIDFIVQGKAIPSLKAHEHYRYLGVPIGMIRDVSSIQLLADDLCVQLDRIEASLLALWQKLDMIRTFVQPCITFILRAGEPLKSSLTNYRRKLIEVVRSICNLPLRATTHFVFAPIRVGGLGFQDPKAEVDVQTVVQAMKMLTSSDPFVSSVAVAELRSAARFAARADASPALIRDFMSGSTRGPFHKDRIRYQTHSLWTRARCACRRLGITFAFPDTEAPAIYTNTKGPCLSKAASSFLHRHVQDLAAEKLTDFPDQGKVARALAKDSFGNGSAFIYTGLNIRFRDWRFVHRARLNVVPTNQNKARWCDVSPNCRKCGVQNETLPHVLNHCETHMVMIRERHNTVVTRLVNTVRSGVVRADQQVPGVDDNCRPDIVVEDGDDVIIIDVTCPFENGEDALSKADYDKLQKYAHLKRHFENLGKRCSLHAFVIGALGTWYPNNEAVLAKLNMTKYYKTLFRKLCCTDVIKGSSEIYYKHMVV

SEQ ID NO: 4427 - protein, 1268 aa, Umbra pygmaea
MRNHRVLLGGLEVTHPLGWGHGGDGTQGMDSKPYPSQADQTGSSNLTPAVGLSGHRTVERSGPSLTLRPGGELTQSYGLVDLCSGRELREQVNQGGAKDTKGREQPTKDAAPGKGTVVTHFKAVRKRPAKDLALGKNDLEMTDGKLPCKKVALEPRWESESKVDARPATGQSTVMHPQPAMTKRAKVVSAATTLPDTVLITIPVKDLSCEICRWEMGTVGEVVKHFASQHPAVSVTYRCGLCGKTGPKAHPISCHVPWCVPKAETQMDGGEVCPSCGARFQKRVGLSQHIRHMHPGLYQERKGGSPTGPASAMSSWLATGSQEGGTVVKQVRHIRRGQGHAGGLSDAPLETLCGRDLAEMLSKPRMSSPPQTGIHGILRGKLVGNGTDDDIVVGDVTLSLRGVEQDPNLLETSASELIRLVGKGGKAPRRLIVVKRHACVMKPRRRSVKRAEFAKVQNLYRRNRSGLADYLLDGVENAKAVRPSLEIALAFKERWEAAETFKGFGQFASDLKADNGLLGSLISPTEVSDNLYSIKPGSAPGPDGVTKGTLRKWDPSGVKLAKIFSIWMASGMLPRVLKRCRTTLIPKSKETAVLAQANGWRPLTLGSVILRLYSKILTHRLAGAMPINSRQRGFISSPGCSENLMILDGIVKISRREGFELAVLFVDFARAFDSVNHSHILGVLRQRGLDEHLIGLVEDSYTGVQSELAVVGEKSPVIDMRIGVKQGDPMSPLLFSLALDPMIATLERIGSGYPLGGGRQVTTLAFADDLVLLSGSWDGMERNVGILEEFCRLTGLRVQTRKCHGFYSHRKGGSFAVNDCRPWVLEGEELHMLGPDDSVKYLGVDVSPWWGIVRPDMVDRVQHWIKALSRPSLRASQKVHMLRVYALPRLIYVADHGKLGQGELGVLDRMVRGAVKGWLHLPPCTCDGLIHSRAADGGLGVVRMARLIPSTQVRRIHRLWHSEETVTQEVVRRVVNVKELMRLWMMAGGSKDGFPPPEGGTKGVEISKDPTVPMIPRTLTVPDWRQAEFLNWASLDVQGRGILAFAKDSNSNHWLTDPTSVGLSQRHYIASLQLRANVYPTRETLFRGRLDRVVACRRCGERIETCSHILGQCSAVHGSRIRRHHKLCDLLASEAEKAGWMAIRERSCYTPAGDLRRPDLILVKRSTAFVVDVTVRYEMAFDTLKVAAAEKVARYVPVCRYVEEMLGVGEVRVFGFPLGARGKWPEEGSRLLCALGVRPKRAEALARLFSRRALLYSLDVLRDFFRAT

SEQ ID NO: 4428 - protein, 986 aa, Pammene fasciana
MSSPAKATCPYCPGSPRLYVVPRSSIFESHRVIYFVLNSHRLHTKKVTGEIQKSNSRGLNVHISRVHRDLAHTHSPNSVATPNAPASSQAVPSVTITAPDQARGLEVLPSLKTNIRVLRHIPKGARNLAAGRLCDVISEALRTNDTKDWLALLSFSFSALRVPESKANKSLTTRVKENIENSGSYFPGDSTPYKSSSKYRAIEAKVYDGDLRGAVRLLLSDSSLAPMNDDTLNAMRDKHPSPSRPPSFPPEPDQNSAFLSVTPTEDARALGSFYNGSASGLDGLSPQHLKELTSSSAGNNGPRLLESLTSLCNFLLRGMLNLEVRPYLYGASLCALSKKDGGIRPIAVGSVIRRLTAKLGCQSVRDAMSQYLQPQQIGFGTTRGCEAAIHATRSFVLERDNMDSVVVKVDLRNAFNCLDRDTMLREVLELVPSLYPFLCQCYSASTNLYLKDSLVLSQQGAQQGDPLGPLLFCLAIQRTIVTLKSSLNVWYLDDGTIGGKPDEVVEDLKRLIPALKQMGLEVNPIKCELFTCEPITESSLNDLKTLLPGVKTIEKSGFSLLGAPIFPDGVSAALQVKKDALVAVRDHLHNLSSHVALTLLRNCFATPRMTYILRTSPTWQFVSEARDIDRELRVTLELILDVELSESQWLQAALPVRYGGLGIRAVEGLGLIAFLASAHGAADLATRIFPIHGGNFPVPLVSDALAMWSSTVPGDKRPDNPAVQKQWDDLWSKHVQGSLLSDASGANLARLKALERAESGAWLHALPSPQLGTLLDNDSLRIAAALRLGARVCQAHRCRCGIMVEENGHHGLSCQRCAGRFPRHHSINEIVRRALVSANVPCVLEPPGLSRTDGKRPDGLTLIPWRMGRCLLWDATCVSTYAASHLRHTMGCAGSAAESAAKLKHAKYAALESAYDFVPIAIETAGPWGAEALSFFRELGRRLRERGCDPRSGSYLIQQVSIAVQRGNAAGIMGTFEPGAIQNGLC

SEQ ID NO: 4429 - protein, 952 aa, Pammene fasciana
MSSPAKATCPYCPGSPRLYVVPRGLNVHISRVHRDLAHTHSPNSVATPNAPASSQAVPSVTITAPDQARGLEVLPSLKTNIRVLRHIPKGARNLAAGRLCDVISEALRTNDTKDWLALLSFSFSALRVPESKSNKSLTTRVKENIENSGSYFPGDSTPYKSSSKYRAIEAKVYDGDLRGAVRLLLSDSSLAPMNDDTLNAMRDKHPSPSRPPSFPPEPDQNSAFLSVTPTEVARALGSFYNGSASGLDGLSPQHLKELTSSSAGNNGPRLLESLTSLCNFLLRGMLNLEVRPYLYGASLCALSKKDGGIRPIAVGSVIRRLTAKLGCQSVRDAMSQYLQPQQIGFGTTRGCEAAIHATRSFVLERDNMDSVVVKVDLRNAFNCLDRDAMLREVLELVPSLYPFLYQCYSASTNLYLKDSLVLSQQGAQQGDPLGPLLFCLAIQRTIVTLKSSLNVWYLDDGTIGGKPDEVVEDLKRLIPALKQMGLEVNPIKCELFTCRPITESSLNDLKTLLPGVKTIEKSGFSLLGAPIFPDGVSAALQVKKDALVAVRDHLHNLSSHVALTLLRNCFATPRMTYILRTSPTWQFVSEARDIDRELRVTLELILNVELSESQWLQAALPVRYGGLGIRAVEGLGLIAFLASAHGAADLATRIFPIHGGNFPVPLVSDALAMWSSTVPGDKRPDNPAVQKQWDDLWSKHVQGSLLSDASGANLARLKALERAESGAWLHALPSPQLGTLLDNDSLRIAAALRLGARVCQAHRCRCGVMVEENGHHGLSCQRCAGRFPRHHSINEIVRRALVSANVPCVLEPPGLSRTDGKRPDGLTLIPWRMGRCLLWDATCVSTYAASHLRHTMGCAGSAAESAAKLKHAKYAALESAYDFVPVAIETAGPWGTEALSFFRELGRRLRERGCDPRSGSYLIQQVSIAVQRGNAAGVMGTFEPGAIQNGLC

SEQ ID NO: 4430 - protein, 760 aa, Pammene fasciana
MNDDTLNAMRDKHPSPSRPPSFPPEPDQNSAFLSVTPTEVARALGSFYNGSASGLDGLSPQHLKELTSSSAGNNGPRLLESLTSLCNFLLRGMLNLEVRPYLYGASLCALSKKDGGIRPIAVGSVIRRLTAKLGCQSVRDAMSQYLQPQQIGFGTTRGCEAAIHATRSFVLERDNMDSVVVKVDLRNAFNCLDRDTMLREVLELVPSLYPFLYQCYSASTNLYLKDSLVLSQQGAQQGDPLGPLLFCLAIQRTIVTLKSSLNVWYLDDGTIGGKPDEVVEDLKRLIPALKQMGLEVNPIKCELFTCGPITESSLNDLKTLLPGVKTIEKSGFSLLGAPIFPDGVSAALQVKKDALVAVRDHLHNLSSHVALTLLRNCFATPRMTYILRTSPTWQFVSEARDIDRELRVTLELILNVELSESQWLQAALPVRYGGLGIRAVEGLGLIAFLASAHGAADLATRIFPIHGGNFPVPLVSDALAMWSSTVPGDKRPDNPAVQKQWDDLWSKHVQGSLLSDASGANLARLKALERAESGAWLHALPSPQLGTLLDNDSLRIAAALRLGARVCQAHRCRCGVMVEENGHHGLSCQRCAGRFPRHHSINEIVRRALVSANVPCVLEPPGLSRTDGKRPDGLTLIPWRMGRCLLWDATCVSTYAASHLRHTMGCAGSAAESAAKLKHAKYAALESAYDFVPVAIETAGPWGAEALSFFKELGRRLRERGCDPRSGSYLIQQVSIAVQRGNAAGIMGTFEPGAIQNGLC

SEQ ID NO: 4431 - protein, 943 aa, Apotomis turbidana
MSSPCRAACPYCPGSQKQYIAPRGLSVHISRVHKDVLNINTASQAAPSSVPHTSQSHQVVKLEDLPRLKSNVPVLRHIPKGARNLAAGKLCDVIGDCLRTNSAEDWFALLSFSYTALRVPENKTDRSLTSKVKENIINSSLYYPEDPLTFKNNSIYRAIEAKVHDGDLRGAVRRLLSDASLAPYNDSTLSSLKDKHPSPSRPLLFPPEPDRNNVFLTVTPTEVAHAIGSFYNGSASGLDGLRPQHLKELISPSTGSNGPRLLESLANLCNFLLKGMLNLEVRPFLYGASLCALSKKDGGVRPIAVGNTIRRLVGKLGCHAVRHSMSEHLQPQQIGFGTTRGCEAAIHATRSFVMTHNNSNSVVLKLDLKNAFNSVERDILLNEVLDNVPSLYPFLYQCYSGSTNLYLKENLISSQVGAQQGDPLGPLVFCLSIQKAIVTLSSPLNVWYLDDGTIGGRPETVIEDLKRLIPVLKEVGLDVNPTKCELYSCGPISDSSLTELKQLLPGIRPINKETFSLLGAPIFPEGVKAALQLKKDALVGVREHLSKMSSHVSITLLRNCFATPRMTYILRTTPLWLYMDEVKEIDLELKFTLEMILNVGLSQSQWVQATLPIRFGGLGIRRVQDVGIVAYLASSHGTGDLVTRILCSDGGNVSVPFMTEALTKWSMVFPDGELPENPIIQRQWDDIFSKHIYDSLVESALEADLARLKAIVRPESGAWLHALPSPQLGTLLDNDTLRIAAALRLGAKVCEAHRCRCGVTVEENGHHGLSCQRCAGRFPRHHSINEIIRRAMVSVNVPCILEPPGLSRTDGKRPDGLTLIPWRRGRCLLWDATCVSTFAASHLRQTCRYAGSAAENAAKLKHTKYSALEPAYEFVPVAVETAGPWSLEARNLFRELGRRLRDRGCDPRSGSYLVQQVSIAIQRGNAAGIMGTFEPGIMQGGLF

SEQ ID NO: 4432 - protein, 956 aa, Cydia splendana
MSSPAKATCPYCPGSPRLYVVPRGLSIHISKVHKDVAQTAGLAVPDVNFVNTVSQAVPGNTTAPPQTQAVNWEVLPTLKSSVRVLRHIPKGARSQAARRLCEVIRKVLDTNDVNDWFTFLTFSFSALRVPESKSDSRSLTTKVKENIESASLCFPDDHETRVSGSKYRAIEAKVYDGDGDLRGAVRLLLSDSSLAPVDQDTLNSLREKHPSPSRPMCCPPEPDRNSTFLSVTSHEVAKALGSFYNGSASGLDGLRPQHLKELTSSSAGDNGRRLLDSLTDLCNFLLKGMLNLEVRPYLYGASLCALSKKDGGIRPIAVGSVIRRLTAKLGCRAVRDSMSEQLQPQQVGFGTTRGCEAAIHATRSFVLNNDNSNSVLVKIDLKNAFNCVDRDIILKEVLDLAPSLYPFAYQCYSGASNLYLKDSLILSQVGAQQGDPLGPLIFCLAIQKAIVALNSPLNVWYLDDGTIGGSPEAVIEDLKKLIPALKEIGLDVNPTKCELYACGLVPVASSRSLEELLPGIKKVNKASLSLLGAPIFPDGVSAALQTKKEALEAVRGHLGNLSSHVALTLLRNCFATPRMTYILRTSPSWLFVDDARELDGQLKLTLELVLNVELSEAQWVQAALPVRYGGLGIRRVEDVGLVAFLASSFGAEGLVTRIFSLNGGNSPVPFVAEALARWSVTVPGDLRPQNPAVQREWDDVWSKHVYSSLVSGASGADLARLKAIAEPESGAWLHALPSPQLGTMLDNDSLRIAVALRLGAKVCEPHRCGCGAWVAENGHHGLSCRRCAGRFPRHHSINEIVRRAMVSANIPCVLEPPGLSRTDGKRPDGLTLVPWRRGRCLLWDATCVSTFAASHLGQTMRCAGSAAETAAKQKHVKYSALASAYDFVPVALETAGPWGVEARRLFGDIGRRLRERGGDPRSGSYLVQQVSIAVQRGNAAGIMGTFEPGTMQGGLF

SEQ ID NO: 4433 - protein, 954 aa, Cydia splendana
MSSPAKATCPYCPGSPRLYVVPRGLSIHISKVHKDVAQTAGLAVPDVNFVNTVSQAVPGNTTAPPQTQAVNWEVLPTLKSSVRVLRHIPKGARSQAARRLCEVIRKVLDTNDVNDWFTFLTFSFSALRVPESKSDSRSLTTKVKENIESASLCFPDDHETRVSGSKYRAIEAKVYDGDLRGAVRLLLSDSSLAPVDQDTLNSLREKHPSPSRPMCCPPEPDRNSTFLSVTSHEVAKALGSFYNGSASGLDGLRPQHLKELTSSSAGDNGRRLLDSLTDLCNFLLKGMLNLEVRPYLYGASLCALSKKDGGIRPIAVGSVIRRLTAKLGCRAVRDSMSEQLQPQQVGFGTTRGCEAAIHATRSFVLNNDNSNSVLVKIDLKNAFNCVDRDIILKEVLDLAPSLYPFAYQCYSGASNLYLKDSLILSQVGAQQGDPLGPLIFCLAIQKAIVALNSPLNVWYLDDGTIGGSPEAVIEDLKKLIPALKEIGLDVNPTKCELYACGLVPVASSRSLEELLPGIKKVNKASLSLLGAPIFPDGVSAALQTKKEALEAVRGHLGNLSSHVALTLLRNCFATPRMTYILRTSPSWLFVDDARELDGQLKLTLELVLNVELSEAQWVQAALPVRYGGLGIRRVEDVGLVAFLASSFGAEGLVTRIFSLNGGNSPVPFVAEALARWSVTVPGDLRPQNPAVQREWDDVWSKHVYSSLVSGASGADLARLKAIAEPESGAWLHALPSPQLGTMLDNDSLRIAVALRLGAKVCEPHRCGCGAWVAENGHHGLSCRRCAGRFPRHHSINEIVRRAMVSANIPCVLEPPGLSRTDGKRPDGLTLVPWRRGRCLLWDATCVSTFAASHLGQTMRCAGSAAETAAKQKHVKYSALASAYDFVPVALETAGPWGVEARRLFGDIGRRLRERGGDPRSGSYLVQQVSIAVQRGNAAGIMGTFEPGTMQGGLF

SEQ ID NO: 4434 - protein, 943 aa, Apotomis turbidana
MSSPCRAACPYCPGSQKQYIAPRGLSVHISRVHKDVLNINTASQAAPSSVPHTSQSHQVVKLEDLPRLKSNVPVLRHIPKGARNLAAGKLCDVIGDCLRTNSAEDWFALLSFSYTALRVPENKTDRSLTSKVKENIINSSLYYPEDPLTFKNNSIYRAIEAKVHDGDLRGAVRRLLSDASLAPYNDSTLSSLKDKHPSPSRPLLFPPELDRNNVFLTVTPTEVAHAIGSFYNGSASGLDGLRPQHLKELISPSTGSNGPRLLESLANLCNFLLKGMLNLEVRPFLYGASLCSLSKKDGGVRPIAVGNTIRRLVGKLGCHAVRHSMSEHLQPQQIGFGTTRGCEAAIHATRSFVMTHNNSNSVVLKLDLKNAFNSVERDILLNEVLDNVPFLYPFLYQCYSGSTNLYLKENLISSQVGAQQGDPLGPLVFCLSIQKAIVTLSSPLNVWYLDDGTIGGRPETVIEDLKRLIPVLKEVGLDVNPTKCELYSCGPISDSSLTELKQLLPGIRPINKETFSLLGAPIFPEGVKAALQLKKDALVGVREHLSKMSSHVSIILLRNCFATPRMTYILRTTPLWLYMDEVKEIDLELKFTLEMILNVGLSQSQWVQATLPIRFGGLGIRRVQDVGIVAYLASSHGTGDLVTRILCSDGGNVSVPFMTEALTKWSMVFPDGELPENPIIQRQCDDIFSKHIYDSLVESALEADLARLKAIVRPESGAWLHALPSPQLGTLLENDTLRIAAALRLGAKVCEAHRCRCGVTVEENGHHGLSCQRCAGRFPRHHSINEIIRRAMVSVNVPCILEPPGLSRTDGKRPDGLTLIPWRRGRCLLWDATCVSTFAASHLRQTCRYAGSAAENAAKLKHTKYSALEPAYEFVPVAVETAGPWSLEARNLFRELGRQLRDRGCDPRSGSYLVQQVSIAIQRGNAAGIMGTFEPGIMQGGLF

SEQ ID NO: 4435 - protein, 943 aa, Apotomis turbidana
MSSPCRAACPYCPGSQKQYIAPRGLSVHISRVHKDVLNINTASQAAPSSVPHTSQSHQVVKLEDLPRLKSNVPVLRHIPKGARNLAAGKLCDVIGDCLRTNSAEDWFALLSFSYTALRVPENKTDRSLTSKVKENIINSSLYYPEDPLTFKNNSIYRAIEAKVHDGDLRGAVRRLLSDASLAPYNDSTLSSLKDKHPSPSRPLLFPPEPDRNNVFLTVTPTEVAHAIGSFYNGSASGLDGLRPQHLKELISPSTGSNGPRLLESLANLCNFLLKGMLNLEVRPFLYGASLCALSKKDGGVRPIAVGNTIRRLVGKLGCHAVRHSMSEHLQPQQIGFGTTRGCEAAIHATRSFVMTHNNSNSVVLKLDLKNAFNSVERDILLNEVLDNVPFLYPFLYQCYSGSTNLYLKENLISSQVGAQQGDPLGPLVFCLSIQKAIVTLSSPLNVWYLDDGTIGGRPETVIEDLKRLIPVLKEVGLDVNPTKCELYSCGPISDSSLTELKQLLPGIRPINKETFSLLGAPIFPEGVKAALQLKKDALVGVREHLSKMSSHVSIILLRNCFATPRMTYILRTTPLWLYMDEVKEIDLELKFTLEMILNVGLSQSQWVQATLPIRFGGLGIRRVQDVGIVAYLASSHGTGDLVTRILCSDGGNVSVPFMTEALTKWSMVFPDGELPENPIIQRQWDDIFSKHIYDSLVESALEADLARLKAIVRPESGAWLHALPSPQLGTLLDNDTLRIAAALRLGAKVCEAHRCRCGVTVEENGHHGLSCQRCAGRFPRHHSINEIIRRAMVSVNVPCILEPPGLSRTDGKRPDGLTLIPWRRGRCLLWDATCVSTFAASHLRQTCRYAGSAAENAAKLKHTKYSALEPAYEFVPVAVETAGPWSLEARNLFRELGRRLRDRGCDPRSGSYLVQQVSIAIQRGNAAGIMGTFEPGIMQGGLF

SEQ ID NO: 4436 - protein, 1127 aa, Eupelmus urozonus
MLFLKPTEMRKHVEELHLGLKVTWVCRMCERGFEKLHAWSCHAPKCKGVRVEEGDFECSECHRRFATQTGMSQHERHEHPKVRNLRRREVAERTPKKKGAPSSVWTEEETRILREMNRRYRGVRLINKRIQEHLPGKTFRQISDKRRLLSSSSSSSSLASGEDEGDEGEREVVSAIEQESESIEVAEVNISESAGGALPAPEVSRHGSAGGGPGVEGAASNEIVVSESEEEFADALETQNVEIREEWRELLKSYTAGMENASDKWSAWVARVQLAITSDSITKEDVNQLYKELTGLIAKERNAEKPAGKPKRTGTGRKNRGHGRSSRPPSSSDKRRYQYARCQELYDSEPKKLADIVVNNDLSLITRHQPPGKEEVMGLYGELWGTTGPEDVEHLYPKAEQPCLVEEIFRPVTPKEILERIKRIETSSAAGRDKISTSDLRAKGMDRALACLFNLLLCTLVYPDDWRCNRTTLIPKVGKDHSEVKNWRPLTIGSLISRLFSSMLDRRLRRKVKQNERQKGFTDENGCFANVQVLNLAMAEAKKEGAVIGVQDVQKAFDTVPHAAIRPALERKGIPRVVSTYIEKMYEGSTTLIRTRDGDAEIAVKRGVKQGDPLSPLIFNVCVEPALEKIQRETVGMSIEGENLAALAFADDLVTIGRDAEQAKKQVRLTAGFLEKLGMKLALDKCVAFEYVPRGKTWYLRDPELVVDDIRVPSAEADEVFKYLGAKIAPWSGMIEGHEAEAIREIVQRVKRLPLKPMQKVDLLARYLLPKYTYGLITGQSPRSTLQKVDQVVRDEVKKILHISSRTSTAYLYVPRKRGGLGLVNIEKMVMIAALRNATKAGWSADQATTAAVNTERVIKRMSEYARALELQWPVSVQSLNGKKEEVKSEFLREWARQPVQGQGAKEYGQPVSNEWMRRGDLILPSRIPDAIRLRTNTYPTRMCLKRSLYRDNAQFLTECRRCKKPYETLGHVLGECIATKEKRIQRHNEICNLLAERLSVEGSVLQEQTFATAAGENLRPDLVVKTNEAEAVVIDVTVRFERGTYLREAAKEKAQKYKRIEAAVKSALGVRKVRVAPIIVGSRGALPFGTVRELEKLKIRRSDQLTISLIALRSSIEMANAFIDYV

SEQ ID NO: 4437 - protein, 1012 aa, Eupelmus annulatus
MNQRYKGTRYINKRIQEHLPGKTLKQISDKRRLLSSSSSSSASEEDEEREEEDASEQEGDGEEVGGNISVSAGDALPILELPRHGSADGALGEEDEAPSAEAASGSEEEFADALETQNEEGEGEREEWKVSLRNYTVGIENAPDKWSAWVARVQLVITSDTITKEDVNQLYDELTGLILRAQQKNKEKTAGRPKRTGPGRRKRGHGRSNQRPPSSSQQKRYRYARCQELYDNEPKKLAGIVANNDLSLITRHQPPGREETTRLYGELWGRTGPENVESLYEQAEQPCLVEDVFKPVSPREVREKIKRVESSSAAGRDKITKGDLRTKGIERALACFFNLLMYSLVYPDAWRCNRTTLIPKVGKDQRDVRNWRPLTISSLINRLFSSLVDRRLRRMVKQNARQKGFTDENGCFANVQVLNMAMAVAKKEGAVFGIQDVEKAFDTVPHAAIRPALERKGIPRVVSTYVERMYENSTTLIRTREGDVEVAVKRGVKQGDPLSPLLFNLCVEPALEKIQQETVGMNVEGENLAALAFADDLITIGSDAEQAREQLRVVAAFLASLGMKLAISKCLAFEYVPRGKTWYMKDPNIAIDGVRVPSAEADEAFKYLGAKIAPWSGMIESREAATIREIAQRVKRLPLKPMQKVDLLSRYILPKYTYGLITGQGPRSTLQQVDQVVRDEVKKMLHISSRTSTAYLYVPRGRGGLGLVNIEKMTMIAVLRNAAKASNSADAVTITAVSTERVQKRLNEYTRALELQWPVSVQELNRKKEEVKREFLREWAKQPVQGQGANEFAQPVSNEWLRRGDLILPSRIADAIRLRTNTFPTRMCLKRSLYRDNAQFITDCRKCGKPHETLGHILGECIATKHKRIQRHNEICNLLAERLSVEHSTLQEQSFATAGGENLRPDLVTKVNETEAMVIDVSVRFERGSYLRDAAREKIEKYKRIEAAVKGALNVRRVRIAPVIIGSRGALPSATIRELEKLKIKRSDQVTISLIALRSSVEMGNAFMDYDA

SEQ ID NO: 4438 - protein, 959 aa, Dibothriocephalus latus
MKSAHSTLYFAERQRLVPSRTTWTTQEDRLLRKFAIAIIQKEGQLALRPLARGVKKHFPTRSAEALCKRLSKLNNKVLIYGTLGFETAVNPPLVVSSSPPPMTEADQSQACRLSLLHSAAHLLAESRNEALCTETLLSLVTDLLMDDAQWTEAAATRLDSHALHVFPPKWKPEVHTDPQRDEVQAQLEKNYKAGAQLILSGDWRQVPFPEAPLPPGTLEFWRELTERPSGQDQRPVIPPAAVAWSLLDPLEPSEVTQHLRLMVRSAAGMDGHSAKDLLRWPPTAIAGYLNLILATGYLPLQHCTCRTTLVPNVRLPTLPSQFHPTAVSNAIPCLLNRILASRWSRFCPTSRFQFGFQKRDGTAEATVLLHGILRQAVTAPKSLAVAVLEMDKAFDSVNHSTLLRAAAAHGAPPSLIHLLSSSYSRSSTFILDAEVRCFRGVRQDDSLSPLLFSGALSEALSYSDRQLGFEIGETTVDCLAYADDLVLFAESPDRLQVRLDGLVEGLSLAGMQLNPSRCTTFFLQALGKDKSSCLRLCNVLLGGTVLPSLGPQDTFKYLGVPFSYRGKQPIRHRPVLHDMMAEVSEAPINHQQRFSLLKRSCVPKLLHELVLGTVHRNTLENLDMQIRQTVRSALKLPTDTPTSFLYAKIRDGGLGVPCLKTLVPLAKRRRLDNVLRSKEPVVRAVAVIPSALSSMRLAAEPVRMGCKVLASKKDARTYWRDSLYNSADGHALAHFANSTCANHWLSSPDRVLPWLFIRGIQLRAGVLSTKARGNRRTGSGDVLCRGQCGQRETLIHILQCCRVTQTARLGRHNNVMNLLRERLAKIHPSVLLEPRIPEGSKFCKPDIILLNESSATVIDVAVAGEDCMEKRYTGKIERYSAAEIEANIRQTFAKPSDFPITHMPAVFSARGTVYARTERGLRTLGLSKFDISDLALEAIRGSVTAYDIFTRGAGGGRIS

SEQ ID NO: 4439 - protein, 1161 aa, Bregmaceros cantori
METPKKRQRLNSPRLLSMSQDRYRNTSRASLLYGVRARPKSSYCTPTRKADGTVENVCEQQIWSVNTGEARLGRTSIPSRRFLRKRLFDTEPGNSVIIMSLTENPRNDERIADIFYPFSSSFCQICNESLETAAEAIKHVTDSHRITRIGYICGKCGRSLQGARSAAIHAGRCARKSFPNYNKVGAGFECKWCTRDFKSQRALSQHERMLHKAMENEEVIEAGTSTQDQPMPEVESMPTVMPVDPPDGDFEAGEQDKESSDDETPDLPIESNDLATHIKRSLKDRGAKLPDGICILTKKQIRSAIKEIKRKENRTLLIRATARGRRVVFRRTKKALHYLWREDPKKVAGIVLNGNTETWCSIPKRKVEQEYAAIWEKAFPFKSLDGFKIKGDCDNSLLKYPVSEEEIEYIYKRTNKNSAAGPDGVRYRTLKKWDSTFRKHARLFNSMIVHKYIPKSMLRSRTVLLPKVKDKVLLQKVGNWRPITISSSLLRLFTGMLTRRMSEALPTSPRQKGFKKLAGCSENLALLQGIVDHHKSARTPLAIMFIDLAKAFDRVSHDHILYTLEERKSDPTLTSIIRRMYEKSTTQVEAPSWKTRSIDIRSGVKQGDPLSPLLFNLALDPLLVKLEKHGQGIEVEGQRVTTMAYADDLVILSDSYDGMVKNLKILEKFSAQTGLSANPAKCKALFLNRQGRKRKLKEDCTPWKINGVEVEMIKDGQTVMYLGQSINGKGSIMRQNTHEIIQDLCGKVARAKLKPRQKLLLLKTFVIPRLYYRAVQGQATIYGLGTDLQKADRVIRNTIRQSLHLEPTITNGIIYTKCKKGGLGVPCLHKTIPAMMAKRIHKLYFARDPLVQHISRRTIPRKNFEAVVKMAGWNPEEWPTEADPEVEEGQRPWNRLQPYSDKSLEQWSALKVQGAGLRLFNHGASHSWLHPWKCDHWLESTYIRALQMRTNTLPTMEFFSRGLKNPDVNDRTCRNCGLTIETQHHILCECKSTKAYRINRHDAVVRRLEKAAHIDWEVDVEVQVPYENKFIARPDMIFHNKDTKEIIVLDVAVVTDHHDGNLQATKRRKEEKYKKVQKPIMDMYPGATSCSFVGFVVGARGAWLSNNDQTLLKIVGFKNKARRVAANITADVARRSATIFKAFLVEARGTSPTKTPGCFYA

SEQ ID NO: 4440 - protein, 1256 aa, Callosobruchus maculatus
MTDLADRYKMHIPIIMEQQKEDKASDAPASQAVAGVGPQPIDDNRKKQRKRTMVDSEPNIPVRMTRQRTSRTSNRNELTSDREEPTASITTNLTPAEGVSREDNPLLPETTQAGRRRQRMKWTPDMNKFIMRAYYRITKLETDCTAYRQPLYQAFKDKYPTINVTEQRISDQRRAIVRNNLIPINILEEIRASVRPELQLETSNADDTLNTHENQTNSTLQANSDEVTPNISASGNERVSEETIPNLVSEVSNRFQRAITLYSGMDPLSRPSIPKQKTSVRLAKIINVLNTEVLPAYITQIPSFDELQTGIYCAAVATVECNGSKVIPQNIGENRSKARQPAWQARLIRKIEGIRKDLAHLVEYSKGRPSRRLKRIIQHTFRKYRVHSTRNGINSTLNEFIDTLKQKLAVFAGRLKRYVKCDRRKETNRKFQHNERNFYRNIKSSKEDSIDNQHTNQNIPTQQQIEEFWSDIWSTPENHNQSAAWIQKEEMHTENLPEMKISTISMETLKEVINKTHNWKAPGSDRIHNYWYKKFTCIHQALLMYINKWISYPLLMPTYLTHGTTYLLPKDENTDDPSRYRPIACLQTLYKILTGCLAKLITEHITSNNIIAEEQKGCRKGAKGCKEQLIIDEVVMKQAVKKQRNLYMCYIDYQKAFDSVPHSWLLEILRLYKIDKTITRFLEYAMQKWRTTIHLKTKQKEISTSPIYIRKGIFQGDTLSALWFCLAINPLSNALNNSGYGFQVKSTSECHTISHLLYMDDLKIYASSPKQLKNLLQIIEHFTNDVRMKFGLNKCRTLSINRGKIEQLEINTQHGDSIESMDETDTYKYLGVQQSRRIDHITIKKQLTHEFTNRLRSILTSKLNTRNIVKAINTYVIPTISYSFGIIKWSSTDLQQLERKIRTEMTKHRMHHRNASMERFMLPRKIGGLGISSIEDLHNSQITSLREYFHERKSTSHLHQTICDADKAYTTLNLHDQHQQHHEGVQTAEERVRIWRAKALHGRHAQDLQSQDVDINASTAWLTVGELFPETTGYMMAIQDQVVSTKNYKKFIIKDSAVVDDKCRMCREKTENIQHITGGCPMLAQNDYTHRHNQIVNIIHQSLAIKCGLLHKDNTPYYKYLPDPVLENDTFKLYYDRSILTDRTIHNNRPDVVLHNKKMGETYIIDIAVPNTNNMSNTIQEKIRKYTDLKYEISRTWKSKSVHIVPIIISSTGVVPLNLKRNLQIIGLDENIFIKIQKTAILNTCRIVRKFLNEND

SEQ ID NO: 4441 - protein, 1251 aa, Callosobruchus maculatus
MPYPPPSPRSLTLAGVCTWLGNEKVPALAGVGPQPIDDNRKKQRKRTMVDSEPNIPVRMTRQSTSRTSNRNELTSDREEPTASITMNLTPAEGVSREDNPLLPETTQAGRRRQRMKWTPDMNKFITRAYYRITKLETDCTAYRQPLYQAFKDKYPTINVTEQRISDQRRAIVRNNLIPINILEEIRASVRPELQLETSNADDTLNTHENQTNSTLQANSDEVTPNISASGNERVSEETIPNLVSEVSNRFQRAITLYSGMDPLSRPSIPKQKTSVRLAKIINVLNTEVLPAYITQIPSFDELQTGIYCAAVATVECNGSKVIPQNIGENRSKARQPAWQARLIRKIEGIRKDLARLVEYSKGRPSRRLKRIIQHTFRKYRVHSTRDGINSTLNEFIDTLKQKLAVFAGRLRRYVKCDRRKETNRKFQHNERNLYRNIKSSKEDLIDNQHTNQNIPTQQQIEEFWSDIWSTPENHNQSAAWIQKEEMHTENLPEMKISTISMETLKEVINKTHNWKAPGSDRIHNYWYKKFTCIHQALLMYINKWISDPLLMPTYLTHGTTYLLPKDENTDDPSRYRPIACLQTLYKILTGCLAKLITEHITSNNIIAEEQKGCRKGAKGCKEQLIIDEVVMKQAVKKQRNLYMCYIDYQKAFDSVPHSWLLEILRLYKIDKTITRFLEYAMQKWQTTIHLKTKQKEISTSPIYIRKGIFQGDTLSALWFCLAINPLSNALNNSGYGFQVKSTSDCHTISHLLYMDDLKIYASSPKQLKNLLQIIEHFTNDVRMKFGLNKCRTLSINRGKIEQLEINTQHGDSIESMDETDTYKYLGVQQSRRIDHITIKKQLTHEFTNRLRSILTSKLNTRNIVKAINTYVIPTMSYSFGIIKWSSTDLQQLERKIRTEMTKHRMHHRNASMERFMLPRKIGGLGISSIEDLHNSQITSLREYFHERKSTSHLHQTICDADKAYTTLNLHDQHQQHHEGVQTAEERVRIWRAKALHGRHAQDLQSQDVDINASNAWLTVGELFPETTGYMMAIQDQVVSTKNYKKFIIKDSAVVDDKCRMCREKTENIQHITGGCQMLAQNDYTHRHNQIVNIIHQSLAIKCGLLHKDNTPYYKYLPDPVLENDTFKLYYDRSILTDRTIHNNRPDVVLHNKKMGETYIIDIAVPNTNNMSNTIQEKIRKYTDLKYEISRTWKSKSVHIVPIIISSTGVVPLNLKRNLQIIGLDKNIFIKIQKTAILNTCRIVRKFLNEND

SEQ ID NO: 4442 - protein, 1256 aa, Callosobruchus maculatus
MTDLADRYKMHIPIIMEQQKEDKASDAPASQAVAGVGPQPIDDNRKKQRKRTMVDSEPNIPVRMTRQRTSRTSNRNELTSDREEPTASITTNLTPAEGVSREDNPLLPETTQAGRRRQRMKWTPDMNKFIMRAYYRITKLETDCTAYRQPLYQAFKDKYPTINVTEQRISDQRRAILRNNLIPINILEEIRASVRPELQLETSNADDALNTHENQTNSTLQANSDEVTPNISASGNERVSEETIPNLVSEVSNRFQRAITLYSGMDPLSRPSIPKQKTSARLAKIINVLNTEVLPAYITQIPSFDELQTGIYCAAVATVECNGSKVIPQNIGENRSKARQPAWQARLIRKIEGIRKDLARLVEYSKGRPSRRLKRIIQHTFRKYRVHSTRDGINSTLNEFIDTLKQKLAVFAGRLRRYVKCDRRKETNRKFQHNERNFYRNIKSSKEDSIDNQHTNQNIPTQQQIEEFWSDIWSTPENHNQSAAWIQKEEMHTENLPEMKISTISMETLKEVINKTHNWKAPGSDRIHNYWYKKFTCIHQALLMYINKWISDPLLMPTYLTHGTTYLLPKDENTDDPSRYRPIACLQTLYKILTGCLAKLITEHITSNNIIAEEQKGCRKGAKGCKEQLIIDEVVMKQAVKKQRNLYMCYIDYQKAFDSVPHSWLLEILRLYKIDKTNTRFLEYAMQKWQTTIHLKTKQKEISTSPIYIRKGIFQGDTLSALWFCLAINPLSNALNNSGYGFQVKSTSDCHTISHLLYMDDLKIYASSPKQLKNLLQIIEHFTNDVRMKFGLNKCRTLSINRGKIEQLEINTQHGDSIESMDETDTYKYLGVQQSRRIDHITIKKQLTHEFTNRLRSILTSKLNTRNIVKAINTYVIPTISYSFGIIKWSSTDLQQLERKIRTEMTKHRMHHRNASMERFMLPRKIGGLGISSIEDLHNSQITSLREYFHERKSTSHLHQTICDADKAYTTLNLHDQHQQHHEGVQTAEERVRIWRAKALHGRHAQDLQSQDVDINASNAWLTVGELFPETTGYMMAIQDQVVSTKNYKKFIIKDSAVVDDKCRMCREKTENIQHITGGCPMLAQNDYTHRHNQIVNIIHQSLAIKCGLLHKDNTPYYKYLPDPVLENDTFKLYYDRSILTDRTIHNNRPDVVLHNKKMGETYIIDIAVPNTNNMSNTIQEKIRKYTDLKYEISRTWKSKSVHIVPIIISSTGVVPLNLKRNLQIIGLDENIFIKIQKTAILNTCRIVRKFLNEND

SEQ ID NO: 4443 - protein, 766 aa, Callosobruchus maculatus
MHTENLPEMKISTISMETLKEVINKTHNWKAPGSDRIHNYWYKKFTCIHQALLMYINKWISDPLLMPTYLTHGTTYLLPKDENTDDPSRYRPIACLQTLYKILTGCLAKLITEHITSNNIIAEEQKGCRKGAKGCKEQLIIDEVVMKQAVKKQRNLYMCYIDYQKAFDSVPHSWLLEILRLYKIDKTITRFLEYAMQKWQTTIHLKTKQKEISTSPIYIRKGIFQGDTLSALWFCLAINPLSNALNNSGYGFQVKSTSDCHTISHLLYMDDLKIYASSPKQLKNLLQIIEHFTNDVRMKFGLNKCRTLSINRGKIEQLEINTQHGDSIESMDETDTYKYLGVQQSRRIDHITIKKQLTHEFTNRLRSILTSKLNTRNIVKAINTYVIPTISYSFGIIKWSSTDLQQLERKIRTEMTKHRMHHRNASMERFMLPRKIGGLGISSIEDLHNSQITSLREYFHERKSTSHLHQTICDADKAYTTLNLHDQHQQHHEGVQTAEERVRIWRAKALHGRHAQDLQSQDVDINASNAWLTVGELFPETTGYMMAIQDQVVSTKNYKKFIIKDSAVVDDKCRMCREKTENIQHITGGCPMLAQNDYTHRHNQIVNIIHQSLAIKCGLLHKDNTPYYKYLPDPVLENDTFKLYYDRSILTDRTIHNNRPDVVLHNKKMGETYIIDIAVPNTNNMSNTIQEKIRKYTDLKYEISRTWKSKSVHIVPIIISSTGVVPLNLKRNLQIIGLDENIFIKIQKTAILNTCRIVRKFLNEND

SEQ ID NO: 4444 - protein, 1947 aa, Caenorhabditis becei
MGSQPTPISAQVRWRDQSDTLSTCVSSLPPFPLPLSLFPLSLSRWPGRLLAVSPSHGAACGPVVRVRELDRGVVLEQFAGVTSEFVWLRPSVSVCPPCDAELTSHVCGGQRSLSVPPCALVSCSSGVKYLNFTQRPLSYSVVEPGTPLSPLFCFSTCCSHQRGCVCGRVSVNTPLTVLSSPSGVDRTPVKLLPDGSCGSTREPVESFPLGIDKTPVNPLTCVSTLFPYERVYGDRRVPGNTCEPVSPNPLWIGGTPSNVLIPVSLTAPQNDCGGGGSGSHTSVIGPSSPGGVDGPNVIVVPTRSRERDFEIESSIRSRGGDTEIGPSSPTGGDVPSDSRSRLCGGGLVPSGEKIVKLVPLRREDRSISLRVEYPSEARSECPLCTKVTSKLGLGSEGVAYMNRHLKDVHDVDPKWSFKCSLCPAMPPSGTRQVIWMKEHLRSEHKFEAESGKQTVSTLTKVMTRLESVAPSLARIKPKPSVAPRTPTKSAPEQSGRVLTRSMTKASAEKEKQEPVRELRTTLGTISEEPVKSEVKTARRSLAPVTKPFSFENRRSSIGAKPVALPVVAQPMVGRRMVTRPSYRAPVKKAAVIVTAPPEKTVTPVIPVKPVTPKVPEQPRKRRFNTWCLDHETSTKAWLDDEVIRFYFENLERQSDRYRLMDPCLWSMYLRNNSDVGYIVDLMSGTPHCLFPICDSDHWRLLIVNSATFWYVDPFGREPVGKVEEFLQELTNRGRKRKRFAVPPPIQSDQVNCGVHVCLVAKSVVTSRFWYSNDDVKSFRKTLKMELLETDLELYSEDHNRILAFELDEEVIDEDEVKILEVVDRRESEKPSEPDQDSEPSEVPSRRENEPVIIFEKTQDIIEVITTETDRATTPNPVEPMQEEPSVVIRSRPEPVIVSDKSIGDDSGMREIAESSEHIAVEKSEQVTPTEIDCAATPNPVGPMHEKPVEPRKVTKAKKRKVPAGVPDTLALRVKVWFEREFKSYQDEGRSFQTLSWIASVLCAGIYKASVGDIEAIELIERRCAPPEVEEGSMSTQTEKYVSEKARKQGYVSKKPPLPNSESLPSQYVKNRAKTYNRIVGQESAQCEIPIGELERFFKGTTSRTNVSKEILREKSSKLPKLVIGEAMSNDFTAAELASAMKKTKDTAPGVDGLRYYHLEWFDPDFSLLTRLYNECKEKRRIPNHWKEAETVLLYKGGDKNKPENWRPISLMPTIYKLYSSLWNRRIRSVKGVMSKCQRGFQEREGCMESIGILRTAIDAARGFQRSLAVAWLDLTNAFGSVPHELIEHTLETYGFPSVVTEIVMDMYRGASIRVKSKTEKSGPIEIRSGVKQGDPISPTLFNMCIETVIRRHLETAAGHRCVNTKIKVLAFADDMAILASSKYQLQRELAKLDADCTPLNLIFKPAKCASLVIEGGKVNSDAEIVLKGHAIRSMDSSDTYKYLGVRTGSEGRVSEMDQIARVTREMDLVKASTLTPHQKLDCIKAFVLPKMTYVYANSTPPLKEIEGLAIMTKRTLKDMHNIPWDGSPNEYLYLPTGKGGLGVACPLATYLITFLTSTLKKLWSKDTYIRTLYNDYLWEVGKRELGGALMFRHEIGEYLSNEKKQEYYTTGFNTFTRVRECIRKLGREGGNKGALLHSCKLVVQMNNELALVVKATRNSEEKVFTEANVNKLQQLLKAEVIAAWQESFYKVKTVKSKVMQVVQQHPQSNSFVRTGGKMSIAAQKWIHRARLNLLTCNYNTHNDDQPKNCRRCGYENESQCHILQWCKFGLPRLIVERHDAVLHRIKRMIKKGSKKDWKLKIDKTVHSGTQLRPDIYLESPDGKEVILADVAVPYENGLEAMRNSWDSKVDKYEPLCDLFRAMGKKASILPLVVGSLGTWWTPTTSSLVQLGIGKAFVKKEIPEISAMVVEYSKNCYWNHYYGEGYTHVPHHFGTEKPKGREWMKEEH

SEQ ID NO: 4445 - protein, 1202 aa, Triatoma infestans
MMPHQNRINQGSLPGVRQGISGAGAGDDSMRTTGGRVLNRRVPPAQEATADSAEASASSVTLGTTSRQSRRRMKWSIELNKFIMLTYYTVTNLETQKVGYRQELHRLFRERFPEIEVSEQRIADQRRVIVTNNLLPPEILQERREEAGRRLGGGILTEDDGGETTDTITSGDPALGAVTEQGTSEPAPSPADHGADELLRRLEVEFRASYDMVGTMDPTLRPTLPRLSWSPFLVKCVTLMNRSVLSDQEIATQDMLGLQTVVYAAATAIVTVITGKSPLTTESAARKSIEPIWKKRLESKINALRKDLGRLIRCQRGEAGGRTVTKVNAIMRRERFHPGTPATRNRRLAEVIDTLKQRLAVAANRLRRYNKSARRRVDNLKFDRNEAAFYTQLEANNCPNSGEVPTRDAIQEYWGNLWSATGDYNHDAAWLRMLEVERRPGQEMVFEGFTEEDIENALRKCANWKAPGPDGIHNFWWKRFSAVHGRLAEVFSLTIADPWSLPAFMTLGVTYLKHKGGDARDPAQYRPITCLSTLYKLLTACIAKRVHDYVDGENIIADVQKGCARGSYGCKELLIIDTVATEQAKRQKRNLYMAYIDYRKAYDSVPHTWLTDILKLYGVATNVIRFLNVAMGSWRTHIVMPASEEVTRTEMIQIKRGIFQGDALSPLWFVLAINPLSALLESSGYGYAWGSAAPGSRLSHLFYMDDLKIYAARKVHLDLLIDTVRRFSADITMKFGLDKCRTQTIIRGRVNPTPCVMEDGTEMEALASGDSYRYLGIQQSKGVLHTTIKQEVTAKFRLRLQAVARSGLHSGNLTRAINAFCVPVLSYTFGIIRWTSTELSALQCMVRTSLTAQNKHHPRAAVERVILPRAEGGRGLVNIIAQHVAQVNRMREYFLARRGSGLIDAMLAGDTGFTPLNLSAEPTRVEVDNEPPPSVGETWRRKALHGQYPAALDGELIDKEASVAWLTRGLLFPETEGALIAIQDQVVPTRYYRNRIMNDSGVADVRCRLCRAAPETIHHLLAACPLLAQRDYLQRHNSVARILHRELAQKLGLIQDAPPYYKYDPLPVLEDARCLLYWDREVLTDHAVANTRPDVIWHNKITGRVWLIDVSVPDDANIARAYTTKLAKYRPLAAEISAVWRGVSGVEIVPLIISATGLVPRSLGENLCMMGIRRTIMYEMQQAVVLHTCRIVREVLREDARD

SEQ ID NO: 4446 - protein, 974 aa, Lysiphlebus fabarum
MHKDWYDANLIESKRSGLPGTVKKRWTEEEKCLLARREAMLIAQGGVRFMNKALAEHFPQRSLEAIKSARACSKYRAKVQQLLHENDDDSDSSSSDEFFDTLTEMDEHFEKITTFIDALPAIKTKHFKSEELSNICNHIRTWDLDKVHENIAVYLQNIFPIAKKILYKREKSIPQKRTNARRRRRQEYAKTQTMWRKNPCKCLRMILKDKNSGQIPEKEVMIPFWKEIMTKSEDKSPGIGSRRKVCDVLWDPISTEEIENSWPERGTAPGPDGITAKLLRSVPTEILVRILNIFILVGKLPEHLMESRTTLIPKKDEAKDPGEFRPLTVSSVITRLFHKILAARVLQNLNIDKRQKAFRQTDGCAENLFLTDLVLRYHRQAFKSTYMASMDMAKAFDSVTHKTIQDTMITMGFPSKMVEYIMSTYQRSQTRLVCDGWESELIHPTCGVKQGDPLSPILFILVIDRMLEAIPKEVGVKIGHIKVNAEAFADDILFFAATKEGLQTTIDSATEFLSKCGLYINNNKCFTISIEGFGHLHKTAVDEKSRFTCRNQQLPALKRTDVWKYLGVHFTAEGCFIKEPLKKLKESIDTLTKAPLKPQQRVFALKTVVLPGLYHQYTLSRTHIGTLNKADKISREALRKWLDLPHDVTTAYFHADVKDGGLGIPSMRWNMPLVRLNRLKNLDLNKVKEASLATNYLENEIKKALHRLKDQEVQISSGAGISQRWRKLFHKSVDGSPLKGSNIVSQQHQWVSEGTKLVSGKDYINMIKFRINAMPVRARTTRGTTKDRRCRAGCPASETLNHVVQQCHRTHGARIKRHDAVVKYVARSLGRKWATVQEEPKFKTPDGLLKPDLLAIKEGTAAIIDVGIPSEQTDLAKAHQNKIEKYKILEKNIKEKYKVSTVTFTAAIISSRGKWCARSAEELVKLQAINKSEIKIISTRVLVGGIYAHGMFNRMTTSKWDKKWIKTKDWTDNG

SEQ ID NO: 4447 - protein, 1229 aa, Teleogryllus occipitalis
MATDLNNMVRHHDTIHSDVPLIFSCSKCSKNYKGKLSALSHFPKCPGPKTAKGDFICELCSANFATKSGLSQHLRHAHPDAANKARAAKAQRSGRTAMPRAGKIFSSDDIMKMAALEKEQPEASNENLAALLGKTARQVGEKRRETSYRRYLAAIGDVATVIAESSLSPSDGRRSDDSVRPSTSAAVIASPPRVISPPKTPVSQIPMLISSSPLYRRPNLKTRRKSVIPCSDTLPKGAETSLQVEISKQPRVDYLPKSRPTDSDPEELAKVDITSPEADRGRFPYEEAATVSEMNQELSGVPVLFDSVLCVIDTARSDTAGRLGWDQTFTESPAAMTPGDATTETSLNRATLDATPNWKENISTWIGTWGISQTNVDQELFEVGNELKRNIQSQDQLNETYARLVEILGGSSVPTTTRPKKPRRHGGKRARKRYSYARAQDLFKNDPALLAKCIRTGIDCTSVDQQPLNRDEVNDLYKSIWGNTPPIRLSELREDDKFSTPEMDPDIILYAVQVAEIKSRLAGMKNATAPGPDKIKVSNISSGAKIEILSLLYTQILYTGFVPSGWKANRTILIPKEGKDNKFVTNYRPITISSLLCRIFWGIMDKRIRSVVTFNPRQKGFIPEPGCFANVQILHEAVSDMKKVEGGVGAVLDISKAFDTVPHAAIRWALSRKGIPDAFTNLVMDSYTDVSTVIQHPSKGIEVPIRRGVKQGDPLSPLLFNLIMECLLEKLDNMSGYPLLERSVSVLAFADDLVLLAKDAPRAQELVDIVVEYLGALGMTLSVAKCSSFQITTFERSWFIEDPCLERLGERIPLVSDDHTITYLGVNYSIWNGFPCKASISNLMEAVTRLQKAHLKPTQKLALFHTYIMPHYLYQLVLSMPSMSMLREADCQIRVAVKQFLHLHMSTADGLFYLAKRDGGLGLLRLAQHVPRVALNLGLRLEKSADPICRWLSSCPSFYQRTLKTAKALRLNMPYTEQDLRSYKKKCADDEIAAWEKLGSQGRAVKAHINDPIGNAFLKDYNLLKPGLFITALQLRSNTAANKTTLSRGRSREDVYCRKCNTAVETMNHILGQCIFTKPARIKRHDEIKNFIEGKMLRKSDTVVSTEATFSVAEGVRLKPDLVIKSREGVHVVDVTVRHEDGSNLLKAGEEKVVKYQPVIPLAAQLHGVPNARILPVVVGTSGAMPRSTVSALKTLGIMSRGDLLTISLIALRCSIKIYTQFVNYDGAI

SEQ ID NO: 4448 - protein, 1154 aa, Teleogryllus occipitalis
MATDLNNMVRHHDTIHSDVPLIFSCSKCSKNYKGKLSALSHFPKCPGPKTAKGDFICELCSANFATKSGLSQHLRHAHPDAANKARAAKAQRSGRTAMPRAGKIFSSDDIMKMAALEKEQPEVSNENLAALLGKTARQVGEKRRETSYRRYLAAIGEVATVIAESSLSPSDGRRSDDSVRPSTSAAVIASPPRVISPPKTPVSQIPMLISSSPLYRSPNPKTRRKSVIPCSDTLPKGAETSLQVEISKQPRVDSLPKSRPTDSDPEELAKVDITSPEADRGRFPYEEAATVSEMNQELSGVPVLFDSVLCDIDTARSDTAGRLGWDQTFIESPAAMTPGDATTETSLNRATLDATPNWKENISTWIGTWGISQTNVDQELFEVGNELKRNIQSQDQLNETYARLVEILGGSSVPTTTTRPKKPRRHGGKRARKRYSYARAQDLFKNDPALLAKCIRTGIDCTSVDQQPLNRDEVNDLYKSIWGNTPPIRLSELREDDKFSTPEMDPDTILYAVQVAEIKSRLAGMKNATVPGPDKIKVSNISSGAKIEILSLLYTQILYTGFVPSGWKANRTILIPKEGKDNKFVTNYRPITISSLLCRIFWGIMDKRIRSVVTFNPRQKGFIPEPGCFANVQILHKAVSDMKKVEGGVGAVLDISKAFDTVPHAAIRWALSRKGIPDAFTNLVMDSYTDVSTVIHHPSKGIEVPIRRGVKQGDPLSPLLFNLIMECLLEKLDNMSGYPLLERSVSVLAFADDLVLLAKDAPRAQELVDIVVEYLGALGMTLSVAKCSSFQITTFERSWFIEDPCLERLGERIPLVSDDHTITYLGVNYSIWNGFPCKASISNLMEAVTRLQKAHLKPTQKLALLHTYIMPHYLYQLVLSMPSMSMLREVDCQIRVAVKQFLHLHMSTADGLFYLAKRDGGLGLLRLAQHVPRVALNLGLRLEKSAGPICRWLSSCPSFYQRTLKTAKALRLNMPYTEQDLRSYKKKCADDEITAWEKLGSQGRAVKAHINDPIGNAFLKDYNLLKPGLFITALQLRSNTAANKTTLSRGRSREDVYCRKCNTAVETMNHSLGQCIFTKPARIKRHDEIKNFIEGKMLRKSDTVVSTEATFSVAEGVRLKPDLVIKSREGVHVVDVTVRHEDGSNLLKAGEEKW

SEQ ID NO: 4449 - protein, 1230 aa, Teleogryllus occipitalis
MATDLNNMVRHHDTIHSDVPLIFSCSKCSKNYKGKLSALSHFPKCPGPKTSKGDFICELCSANFATKSGLSQHLRHAHPDAANKARAAKAQRSGRTAMPRAGKIFSSDDIMKMAALEKEQPEASNENLAALLGKTARQVGEKRRETSYRRYLAAIGDVATVIAESSLSPSDGRRSDDSVRPSTSAAVIASPPRVISPPKTPVSQIPMLISSSPLYRRPNLKTRRKSVIPCSDTLPKGAETSLQVEISKQPRVDSLPKSRPTDSDPEELAKVDITSPEADRGRFPYEEAATVSEMNQELSGVPVLFDSVLCVIDTARSDTAGRLGWDQTFIESPAAMTPGDATTETSLNRATLDATPNWKENISTWIGTWGISQTNIDQELFEVGNELKRNIQSQDQLNETYARLVEILGGSSVPTTTTRPKKPRRHGGKRARKRYSYARAQDLFKNDPALLAKCIRTGIDCTSVDQQPLNRDEVNDLYKSIWGNTPPIRLSELREDDKFSTPEMDPDTILYAVQVAEIKSRLAGMKNATAPGPDKIKVSNISSGAKIEILSLLYTQILYTGFVPSGWKANRTILIPKEGKDNKFVTNYRPITISSLLCRIFWGIMDKRIRSVVTFNPRQKGFIPEPGCFANVQILHEAVSDMKKVEGGVGAVLDISKAFDTVPHAAIRWALSRKGIPDAFTNLVMDSYTEVSTVIQHPSKGIEVPIRRGVKQGDPLSPLLFNLIMECLLEKLDNMSGYPLLERSVSVLAFADDLVLLAKDTPRAQELVDIVVEYLGALGMTLSVAKCSSFQITTFERSWFIEDPCLERLGERIPLVSDDHTITYLGVNYSIWNGFPCKASISNLMEAVTRLQKAHLKPTQKLALLHTYIMPHYLYQLVLSMPSMSMLREADCEIRVAVKQFLHLHMSTADGLFYLAKRDGGLGLLRLAQHVPRVALNLGLRLEKSADPICRWLSSCPSFYQRTFKTAKALRLNMPYTEQDLRSYKKKCADHEIAAWEKLGSQGRAVKAHINDPIGNAFLKDYNLLKPGLFITALQLRSNTAANKTTLSRGRSREDVYCRKCNTAVETMNHILGQCIFTKPARIKRHDEIKNFIEGKMLRKSDTVVSTEATFSVAEGGRLKPDLVIKSREGVHVVDVTVRHEDGSNLLKAGEEKVVKYQPVIPLAAQLHGMPNARILPVVVGTSGAMPRSTVSALKTLGIMSRGDLLTISLIALRCSIKIYTQFVNYDGAI

SEQ ID NO: 4450 - protein, 1059 aa, Teleogryllus occipitalis
MVGGPDDSVRPSTSAAVIASPPRVISPPKTPVSQIPMLISSSPLYRRPNLKTRRKSVIPCSDTLPKGAETSLQVEISKQPRVDSLPKSRPTDSDPEELAKVDITSPEADRGRFPYEEAATVSEMNQELSGVPVLFDSVLCVIDTARSDTAGRLGWDQTFIESPAAMTPGDATTETSLNRATLDATPNWKENISTWIGTWGISQTNVDKELFEVGNELKRNIQSQDQLNETYARLVEILGGSSVPTTTRPKKPRRHGGKRARKRYSYARAQDLFKNDPALLAKCIRTGIDCTSVDQQPLNRDEVNDLYKSIWGNTPPIRLSELREDDKFSTPEMDPDTILYAVQVAEIKSRLAGMKNATAPGPDKIKVSNISSGAKIEILSLLYTQILYTGFVPSGWKANRTILIPKEGKDNKFVTNYRPITISSLLCRIFWGIMDKRIRSVVTFNPRQKGFIPEPGCFANVQILHEAVSDMKKVEGGVGAVLDISKAFDTVPHAAIRWALSRKGIPDAFTNLVMDSYTDVSTVIQHPSKGIEVPIRRGVKQGDPLSPLLFNLIMECLLEKLDNMSGYPLLERSVSVLAFADDLVLLAKDAPRAQELVDIVVEYLGALGMTLSVAKCSSFQITTFERSWFIEDPCLERLGERIPLVSDDHTITYLGVNYSIWNGFPCKASISNLMEAVTRLQKAHLKPTQKLALLHTYIMPHYLYQLVLSMPSMSMLREADCQIRVAVKQFLHLHMSTADGLFYLAKRDGGLGLLRLAQHVPRVALNLGLRLEKSADPICRWLSSCPSFYQRTFKTAKALRLNWPYTEQDLRSYKKKCADDEIAAWEKLGSQGRTVKAHINDPIGNAFLKDYNLLKPGLFITALQLRSNTAANKTTLSRGRSREDVYCRKCNTAVETMNHILGQCIFTKPARIKRHDEIKNFIEGKMLRKSDTVVSTEATFSVAEGVRLKPDLVIKSREGVHVVDVTVRHEDGSNLLKAGEEKVVKYQPVIPLAAQLHGVPNARILPVVVGTSGAMPRSTVSALKTLGIMSRGDLLTISLIALRCSIKIYTQFVNYDGAI

SEQ ID NO: 4451 - protein, 1230 aa, Teleogryllus occipitalis
MATDLNNMVRHHDTIHSDAPLIFSCSKCSKNYKGKLSALSHFPKCPGPKTSKGDFICELCSANFATKSGLSQHLRHAHPDAANKARAAKAQRSGRTAMPRAGKIFSSDDIMKMAALEKEQPEASNENLAALLGKTALQVGEKRRETSYRRYLAAIGDVVTVIAESSLSPSDSQRSDDSVRPSTSAAVIASPPRVISPPKTPVSQIPMLISSSPLYRRPNLKIRRKSVIPCSDTLPKGAETSLQVEISKQPRVDSLPKSRLTDSDPEELAKVDITSPEADRGRFPYEEAATVSEMNQELSGVPVLFDSVLCVIDTARSDTAGRLGWDQTFIESPAAMTPGDATTETSLNRATLDATPNWKENISTWIGTWGISQTNIDQELFEVGNELKRNIQSQDQLNETYARLVEILGGSSVPTTTTRPKKPRRHGGKRARKRYSYARAQDLFKNDPALLAKCIRTGIDCTSVDQQPLNRDEVNDLYKSIWGNTPPIRLSELREDDTFSTPEIDPDTILYAVQVAEIKSRLAGMKNATAPGPDKIKVSDISSGAKIEILSLLYTQILYTGFVPSGWKANRTILIPKEGKDNKFVTNYRPITISSLLCRIFWGIMDKRIRSVVTFNARQKGFIPEPGCFANVQILHEAVSDMKKVEGGVGAVLDISKAFDTVPHAAIRWALSRKGIPDAFTNLVMDSYTEVSTVIQHPSKGIEVPIRRGVKQGDPLSPLLFNLIMECLLEKLDNMSGYPLLERSVSVLAFADDLVLLAKDAPRAQELVDIVVEYLGALGMTLSVAKCSSFQITTFERSWFIEDPCLERLGERIPLVSDDHTITYLGVNYSIWNGFPCKASISNLMEAVTRLQKAHLKPTQKLALLHTYIMPHYLYQLVLSMPSMSMLREADCQIRVAVKQFLHLHMSTADGLFYLAKRDGGLGLLRLAQHVPRVALNLGLRLEKSADPICRWLSSCPSFYQRTSKTAKALRLNMPYTEQDLRSYKKKCADDEIAAWEKLGSQGRAVKAHINDPIGNAFLKDYNLLKPGLFITALQLRSNTAANKTTLSRGRSREDVYCRKCNTAVETMNHILGQCIFTKPARIKRHDEIKNFIEGKMLRKSDTVVSTEATFSVAERVRLKPDLVIKSREGVHVVDVTVRHEDGSNLLKAGEEKVVKYQPVIPLAAQLHGVPNARILPVVVGTSGAMPRSTVSALKTLGIMSRGDLLTISLIALRCSIKIYTQFVNYDGAI

SEQ ID NO: 4452 - protein, 911 aa, Teleogryllus occipitalis
MNQELSGVPVLFDSVLCVIDTARSDTAGRLGWDQTFIESPAAMTPGDATTETSLNRATLDATPNWKENISTWIGTWGISQTNVDQELFEVGNELKRNIQSQDQLNETYARLVEILGGSSVPTTTRPKKPRRHGGKRARKRYSYARAQDLFKNDPALLAKCIRTAIDCTSVAQQPLNRDEVNDLYKSIWSNRPPIRLSELREDDKFSTPEMDPDTILYAVQVAEIKSRLAGMKNATAPGPDKIKVNNISSGAKIEILSLLYTQILYTGFVPSGWKANRTILIPKEGKDNKFVTNYRPITISSLLCRIFWGIMDKRIRSVVTFNPQQKGFIPEPGCFANVQILHEAVSDMKKVEGGVSAVLDISKAFDTVPHAAIRWALSRKGIPDAFTSLVMDSYTDVSTVIQHPSKGIEVPIRRGVKQGDPLSPLLFNLIMECFLEKLDNMSGYPLLERSVSVLAFADDLVLLAKDAPRAQELVDIVVEYLGAHGMTLSVAKCSSFQITTFERSWFIEDPCLERLGERIPLVSDDHTITYLGVNYSIWNGFPCKASISNLMEAVTRLQKAHLKPTQKLALLHTYIMPHYLYQLVLSMSSMSMLREADCQIRVAVKQFLHLHMSTADGLFYLAKRDGGLGLLRLAQHVPRVALNLGLRLEKSADPICRWLSSCPSFYQRTFKTAKALRLNMPYTEQDLRSYKKKCADDEIATWEKLGSQGRAVKAHINDPIGNAFLKDYNLLKPGLFITALQLRSNTAANKTTLSRGRSREDVYCRKCNTAVETMNYILGQCIFTKPARIKRHDEIKNFVEGKMLRKSDTVVSTEATFSVAEGVRLKPDLVIKSRVGVHVVDVTVRHEDGSNLLKAGEEKVVKYQPVIPLAAQLHGVPNARILSVVVGTSGAMPRSTVSALKTLGSCLGEIY

SEQ ID NO: 4453 - protein, 1229 aa, Teleogryllus occipitalis
MATDLNNMVRHHDTIHSDVPLIFSCSKCSKNYKGKLSALSHFPKCPGPKTSKGDFICELCSANFATKSGLSQHLRHAHPDAANKARAAKAQRSGRTAMPRAGKIFSSDDIMKMAALEKEQPEASNENLAALLGKTARQVGEKRRETSYRRYLAAIGDVATVIAESSLSPSDGRRSDDSVRPSTSAAVIASPPRVISPPKTPVSQIPMLISSSPLYRRPNLKTRRKSVIPCSDTLPKGAETSLQVEISKQPRVDSLPKSRPTDSDPEELAKVDITSPEADRGRFPYEEAATVSEMNQELSGVPVLFDSVLCVIDTARSDTAGRLGWDQTFIESPAAMTPGDATTETSLNRATLDATPNWKENISTWIGTWGISQTNIDQELFEVGNELKRNIQSQDQLNETYARLVEILGGSSVPTTTRPKKPRRHGGKRARKRYSYARAQDLFKNDPALLAKCIRTGIDCTSVDQQPLNRDEVNDLYKSIWGNTPPIRLSELREDDKFSTPEMDPDTILYAVQVAEIKSRLAGMKNATAPGPDKIKVSNISSGAKIEILSLLYTQILYTGFVPSGWKANRTILIPKEGKDNKFVTNYRPITISSLLCRIFWGIMDKRIRSVVTFNPRQKGFIPEPGCFANVQILHEAVSDMKKVEGGVGAVLDISKAFDTVPHAAIRWALSRKGIPDAFTNLVMDSYTDVSTVIQHPSKGIEVPIRRGVKQGDPLSPLLFNLIMECLLEKLDNMSGYPLLERSVSVLAFADDLVLLAKDAPRAQELVDIVVEYLGALGMTLSVAKCSSFQITTFERSWFIEDPCLERLGERIPLVSDDHTITYLGVNYSIWNGFPCKASISNLMEAVTRLQKAHLKPTQKLALLHTYIMPHYLYQLVLSMPSMSMLREADCQIRVAVKQFLHLHMSTADGLFYLAKRDGGLGLLRLAQHVPRVALNLGLRLEKSADPICRWLSSCPSFYQRTLKTAKALRLNMPYTEQDLRSYKKKCADDEIAAWEKLGSQGRAVKAHINDPIGNAFLKDYNLLKPGLFITALQLRSNTAANKTTLSRGRSREDVYCRKCNTAVETMNHILGQCIFTKPARIKRHDEIKNFIEGKMLRKSDTVVSTEATFSVAEGVRLKPDLVIKSREGVHVVDVTVRHEDGSNLLKAGEEKVEKYQPVIPLAAQLHGVPNARILPVVVGTSRAMPRSTVSALKTLGIISRGDLLTISLIALRCSIKIYSQFVNYDGEI

SEQ ID NO: 4454 - protein, 936 aa, Teleogryllus occipitalis
MNQELSGVPVLFDSVLCVFDMARSDTAGRLGWDQTFIESPAAMTPGDATTETSLNRATLDATPNWKENISTWIGTWGISQTNVDQELFEVGNELKRNIQSQDQLNETYARLVEILEGSSVPTTTRPKKPRRHGGKRARKRYSYARAQDLFKNDPALLAKCIRTGINCTSVDQQPLNRDEVNDLYKSIWGNTPPIRLSELREDDKFSTPEMDPDTILYAVQVAEIKSRLAGMKNATAPGPDKIKVSNISSGAKIEILSLLYTQILYTGFVPSGWKANRTILIPKEGKDNKFVTNYRPITISSLLCRIFWGIMDKRIRSVVTFNPRQKGFIPEPGCFAIVQILHEAVSDMKKVEGGVGAVLDISKAFDTVPHAAIRWALSRKGIPDAFTNLVMDSYTDVSTVIHHPSKGIEVPIRRGVKQGDPLSPLLFNLIMECLLEKLDNMSGYPLLERSVSVLAFADDLVLLAKDAPRAQELVDIVVEYLGALGMTLSVAKCSSFQITTFERSWFIEDPCLERLGERIPLVSDDHTITYLGVNYSIWNGFPCKASISNLMEAVTRLQKAHLKPTQKLALLHTYIMPHYLYQLVLSMPSMSMLREADCQIRVAVKQFLHLHMSTADGLFYLAKRDGGLGLLRLAQHVPRVALNLGLRLEKSADPICRWLSSCPSFYQRTFKTAKALRLNMPYTEQDLRSYKKKCADDEIAAWEKLGSQGRAVKAHINDPIGNAFLKDYNLLKPGLFITALQLRSNTAANKTTLSRGRSREDVYCRKCNTAVETMNHILGQCIFTKPARIKRHDEIKNFIEGKMLRKSDTVVSTEATFSVAEGVRLKPDLVIKSREGVHVVDVTVRHEDGSNLLKAGEEKVVKYQPVIPLAAQLHGVPNARILPVVVGTSGAMPRSTVSALKTLGIMSRGDLLTISLIALRCSIKIYTQFVNYDGAI

SEQ ID NO: 4455 - protein, 1230 aa, Teleogryllus occipitalis
MATDLNNMVRHHDTIHSDALLIFSCSKCSKNYKGKLSALSHFPKCPGPKTSKGDFICELCSANFATKSGLSQHLRHAHPDAANKARAAKAQRSGRTAMPRAGKIFSSDDIMKMAALEKEQPEASNENLAALLGKTARQVGEKRRETSYRRYLAAIGDVVTVIAESSLSPSDSQRSDDSVRPSTSAAVIASPPRVISPPKTPVSQIPMLISSSPLYRRPNLKIRRKSVFPCSDTLPKGAETSLQVEISKQPRVDSLPKSRLTDSDPEELAKVDITSPEADRGRFPYEEAATVSEMNQELSGVPVLFDSVLCVIDTARSDTAGRLGWDQTFIESPAAMTPGDATTETSLNRATLDATPNWKENISTWIGTWGISQTNIDQELFEVGNELKRNIQSQDQLNETYARLVEILGGSSVPTTTTRPKKLRRHGGKRARKRYSYARAQDLFKNDPALLAKCIRTGIDCTSFDQQPLNRDEVNDLYKSIWGNTPPIRLSELREDDTFSTPEMDPDTILYAVQVAEIKSRLAGMKNATAPGPDKIKVSNISSGAKIEILSLLYTQILYTGFVPSGWKANRTILIPKEGKDNKFVTNYRPITISSLLCRIFWGIMDKRIRSVVTFNPRQKGFIPEPGCFANVQILHEAVSDMKKVEGGVGAVLDISKAFDTVPHAAIRWALSRKGIPDAFTNLVMDSYTEVSTVIQHPSKGIEVPIRRGVKQGDPLSPLLFNLIMECLLEKLDNMSGYPLLERSVSVLAFADDLVLLAKDAPRAQELVDIVVEYLGALGMTLSVAKCSSFQITTFERSWFIEDPCLERLGERIPLVSDDHTITYLGVNYSIWNGFPCKASISNLMEAVTRLQKAHLKPTQKLALLHTYIMPHYLYQLVLSMPSMSMLREADCQIRVAVKQFLHLHMSTADGLFYLAKRDGGLGLLRLAQHVPRVALNLGLRLEKSADPICRWLSSCPSFYQRTSKTAKALRLNMPYTEQDLRSYKKKCADDEIAAWEKLGSQGRAVKAHINDPIGNAFLKVYNLLKPGLFINALQLRSNTAANKTTLSRGRSREDVYCRKCNTAVETMNHILGQCIFTKPARIKRHDEIKNFIEGKMLRKSDTVVSTEATFSVAEGVRLKPDLVIKSREGVHVVDVTVRHEDGSNLLKAGEEKVVKYQPVIPLAAQLHGVPNARILPVVVGTSGAMPRSTVSALKTLGIMSRGDLLTISLIALRCSIKIYTQFVNYDGAI

SEQ ID NO: 4456 - protein, 1230 aa, Teleogryllus occipitalis
MATDLNNMVRHHDTIHSDAPLIFSCSKCSKNYKGKLSALSHLPKCPGPKTSKGDFICELCSANFATKSGLSQHLRHAHPDAANKARAAKAQRSGRTAMPRAGKIFSSDDIMKMAALEKEQPEASNENLAALLGKTARQVGEKRRETSYRRYLAAIGDVVTVIAESSLSPSDSQRSDDSVRPSTSAAVIASPPRVISPPKTPVSQIPMLISSSPLYRRPNLKIRRKSVFPCSDTLPKGAETSLQVEISKQPRVDSLPKSRLTDSDPEELAKVDITSPEADRGRFPYEEAATVSEMNQELSGVPVLFDSVLCVIDTARSDTAGRLGWDQTFIESPAAMTPGDATTETSLNRATLDATPNWKENISTWIGTWGISQTNIDQELFEVGNELKRNIQSQDQLNETYARLVEILGGSSVPTTTTRPKKPRRHGGKRARKRYSYARAQDLFKNDPALLAKCIRTGIDCTSVDQQPLNRDEVNDLYKSIWGNTPPIRLSELREDDTFSTPEMDPDTILYAVQVAEIKSRLAGMKNATAPGPDKIKVSNISSGAKIEILSLLYTQILYTGFVPSGWKANRTILIPKEGKDNKFVTNYRPITISSLLCRIFWGIMDKRIRSVVTFNPRQKGFIPEPGCFANVQILHEAVSDMKKVEGGVGAVLDISKAFDTVPHAAIRWALSRKGIPDAFTNLVMDSYTEVSTVIQHPSKGIEVPIRRGVKQGDPLSPLLFNLIMECLLEKLDNMSGYPLLERSVSVLAFADDLVLLAKDAPRAQELVDIVVEYLGALGMTLSVAKCSSFQITTFERSWFIEDPCLERLGERIPLVSDDHTITYLGVNYSIWNGFPCKASISNLMEAVTRLQKAHLKPTQKLALLHTYIMPHYLYQLVLSMPSMSMLREADCQIRVAVKQFLHLHMSTADGLFYLAKRDGGLGLLRLAQHVPRVALNLGLRLEKSADPICRWLSSCPSFYQRTSKTAKALRLNMPYTEQDLRSYKKKCADDEIAAWEKLGSQGRAVKAHINDPIGNAFLKDYNLLKPGLFITALQLRSNTAANKTTLSRGRSREDVYCRKCNTAVETMNHILGQCIFTKPARIKRHDEIKNFIEGKMLRKSDTVVSTEATFSVAEGVRLKPDLVIKSREGVHVVDVTVRHEDGSNLLKAGEEKVVKYQPVIPLAAQLHGVPNARILPVVVGTSGAMPRSTVSALKTLGIMSRGDLLTISLIALRCSIKIYTQFVNYDGAI

SEQ ID NO: 4457 - protein, 1152 aa, Teleogryllus occipitalis
MATDLNNMVRHHDTIHSDAPLIFSCSKCSKNYKGKLSALSHFPKCPGPKTSKGDFICELCSANFATKSGLSQHLRHAHPDAANKARAAKAQRSGRTAMPRAGKIFSSDDIMKMAALEKEQPEASNENLAALLGKTARQVGEKRRETSYRRYLAAIGDVATVIAESSLSPSDGRRSDDSVRPSISAAVIASPPRVISPPKTPVSQIPMLISSSPLYRRPNLKTRRKSVIPCSDTLPKGAETSLQVEISKQPRVDSLPKSRPTDSDPEELAKVDITSPEADRGRFPYEEAATVSEMNQELSGVPVLFDSVLCVIDTARSDTAGRLGWDQTFIESPAAMTPGDATTKTSLNRATLDATPNWKENISTWIGTWGISQTNIDQELFEVGNELKRNIQSQDQLNETYARLVEILGGSSVPTTTRPKKPRRHGGKRARKRYSYARAQDLFKNDPALLAKCIRTGIDCTSVDQQPLNRDEVNDLYKSIWGNTPPIRLSELREDDKFSTPEMDPDTILYAVQVAEIKSRLAGMKNATAPGPDKIKVSNISSGAKIEILSLLYTQILYTGFVPSGWKANRTILIPKEGKDNKFVTNYRPITISSLLCRIFWGIMDKRIRSVVTFNPRQKGFIPEPGCFANVQILHEAVSDMKKVEGGVGAVLYISKAFDTVPHAAIRWALSRKGIPDAFTNLVMDSYTEVSTVIQHPSKGIEVPIRRGVKQGDPLSPLLFNLIMECLLEKLDNMSGYPLLERSVSVLAFADDLVLLAKDAPRAQELVDIVVEYLGALGMTLSVAKCSSFQITTFERSWFIEDPCLERLGERIPLVSDDHTITYLGVNYSIWNGFPCKVSISNLMEAVTRLQKAHLKPTQKLALLHTYIMPHYLYQLVLSMPSMSMLREADCQIRVAVKQFLHLHMSTADGLFYLAKRDGGLGLLRLAQHVPRVALNLGLQLEKSADPICRWLSSCPSFYQRTFKTAKALRLNMPYTEQDLRSYKKKCADEIAAWEKLGSQGRAVKAHINDPIGNAFLKDYNLLKPGLFITALQLRSNTAANKTTLSRGRSREDVYCRKCNTAVETMNHILGQCIFTKPARIKRHDDIKNFIEGKMLRKSDTVVSTEATFSVAEGVRLKPDLVIKSREGVHVVDVTVRHEDGSNLLKAGEEKG

SEQ ID NO: 4458 - protein, 1229 aa, Teleogryllus occipitalis
MATDLNNMVRHHDTIHSDVPLISSCSKCSKNYKGKLSALSHFPKCPGPKTSKGDFICELCSANFATKSGLSQHLRHAHPDAANKARAAKAQRSGRTAMPRAGKIFSSDDIMKMAALEKEQPEASNENLAALLGKTARQVGEKRRETSYRRYLAAIGDVATVIAESSLSPSDGRRSDDSVRPSTSAAVIASPPRVISPPKTPVSQIPMLISSSPLYRRPNLKTRRKSVIPCSDTLPKGAETSLQVEISKQPHVDSLPKSRPTDSDPEELAKVDITSPEADRGRFPYEEAATVSEMNQELSGVPVLFDSVLCIIDTARSDTAGRLGWDQTFIESPAAMTPGDATTETSLNRATLNATLNWKENISTWIGTWGISQTNVDQELFEVGNELKRNIQSQDQLNETYARLVEILGGSSVPTTTRPKKPIRHGGKRARKRYSYARAQDLFKNDPALLAKCIRTGIDCTSIDKQPLNRDEVNDLYKSIWGNTPPIRLSELREDDQFSTPEMDPDTILYAVQVAEIKSRLVGMKNATAPGPDKIKVSNISSGAKIEILSLLYTQILYTGFVPSGWKANRTILIPNEGNDNKFVTNYRPITISSLLCRIIWGIMDKRIRSVVTFNPRQKGFIPEPGCFANVQILHEAVSDMKKVEGGVGAVLDISKAFDTVSHAAIRWALSRKGIPDAFTNLVMDSYTDVSTVIPHPSKGIEVPIRRGVKQGDPLSPLLFNLIMECLLEKLDKMSGYPLLERIVSVLAFADDLVLLAKDAPRAQELVDIVVEYLGALGMTLSVAKCSSFQITTFERSWFIEDPCLERLEERIPLVSDDHTLTYLGVNYSIWNGFPCKASISNLMEAVTRLQKAHLKPTQKLALLHTYIMPHYLYQLVLSMPSMSMLREADCQIRVAVKQFLHLHMSTADGLFYLAKRDGGLGLLRLAQHVPRVALNLGLRLEKSADPICRWLSSCPSFYQRTLKTAKALRLNMPYTEQDLRSYKKKCADDEIAAWEKLGSQGRAVKAHINDPIGNAFLKDYNLLKPGLFITALQLRSNTAANKTTLSRGRSREDVYCRKCNTAVETMNHILGQCIFTKPARIKRHDEIKNFIEGKMLWKSDTVVSTVATFSVAEGVRLNPDLVIKSREGVHVVDVTVRHEDGSNLLKAGEEKVVKYQPVIPLAAQLHGVPNARILPVMVGTSGAMPRSTVSALKTLGIMFRGDLLTISLIALRCSIKIYTQFVNYDGAI

SEQ ID NO: 4459 - protein, 895 aa, Teleogryllus occipitalis
MTPGDATTETSLNRATLDATPNWKENISTWIGTWGISQTNVDQELFEVGNELKRNIQSQDQLNETYARLVEILGGSSVPTTTTRPKKPRRHGGKRARKRYSYARAQDLFKNDPALLAKCIRTGIDCTSVDQQPLNRDEINDLYKSIWGNTPPIRLSELREDDKFSTPEMDPHTILYAVQVAEIKSRLAGMKNATAPGPDKIKVSNISSGAKIEILSLLYTQILYTGFVPSGWKANRTILIPKEGKDNKFVTNYRPITISSLLCRIFWGIMDKRIRSVVTFNPRQKGFIPEPGCFANVQILHEAVSDMKKVEGGVGAVLDISKAFDTVPHAAIRWALSRKGIPDAFTNLVMDSYTEVSTVIQHPSKGIEVPIRRGVKQRDPLSPLLFNLIMECLLEKLDNMSGYPLLERSVSVLAFADDLVLLAKDAPRAQELVDIVVEYLGALGMTLSVAKCSSFQITTFERSWFIEDPCLERLGERIPLVSDDHTITYLGVNYSIWNGFPCKASISNLMEAVTRLQKAHLKPTQKLALLHTYIMPHYLYQLVLSMPSMSMLREVDCQIRVAVKQFLHLHMSTADGLFYLAKRDGGLGLLRLAQHVPRVALNLGLRLEKSADPICRWLSSCPSFYQRTFKTAKALRLNMPYTEQDLRSYKKKCADDEIAAWEKLGSQGRAVKAYINDPIGNAFLKDYNLLKSGLFITALQLRSNTAANKTTLSRVRSREDVYCRKCNTAVETMNHILGQCIFTKPARIKRHDEIKNFIEGKMLRKSDTVVSTEATFSVAEGVRLKPDLVIKSREGVHVVDVTVRHEDGSNLLKAGEEKVVKYQPVIPLAAQLHGVPNARILPVVVGTSGAMPRSTVSALKTLGIMSRGDLLTISLIALRCSIKIYTQFVNYDGAI

SEQ ID NO: 4460 - protein, 937 aa, Teleogryllus occipitalis
MNQELSGVPVLFDSVLCVIDTARSDTAGRLGWDQTFIESPAAMTPGDATTETSLNRATLDATPNWKENISTWIGTWGISQTNIDQELFEVGNELKRNIQSQDQLNETYARLVEILGGSSVPTTTTRPKKPRRHGGKRARKRYSYARAQDLFKNDPALLAKCIRTGIDCTSVDQQPLNRDEVNDLYKSIWGNTPPIRLSELREDDKFSTPEMDPDTILYAVQVAEIKSRLAGMKNATAPGPDKIKVSNISSGAKIEILSLLYTQILYTGFVPSGWKANRTILIPKEGKDNKFVTNYRPITISSLLCRIFWGIMDKRIRSVVTFNPRQKGFIPEPGCFANVQILHEAVSDMKKVEGGGGAVLDISKAFDTVPHAAIRWALSRKGIPDAFTNLVMDSYTEVSTVIQHPSKGIEVPIRRGVKQGDPLSPLLFNLIMECLLEKLDNMSGYPLLERSVSVLAFADDLVLLAKDTPRAQELVDIVVEYLGALGMTLSVAKCSSFQITTFERSWFIEDPCLERLGERIPLVSDDHTITYLGVNYSIWNGFPCKASISNLMEAVTRLQKAHLKPTQKLALLHTYIMPHYLYQLVLSMPSMSMLREADCEIRVAVKQFLHLHMSTADGLFYLAKRDGGLGLLRLAQHVPRVALNLGLRLEKSADPICRWLSSCPSFYQRTFKTAKALRLNMPYTEQDLRSYKKKCADHEIAAWEKLGSQGRAVKAHINDPIGNAFLKDYNLLKPGLFITALQLRSNTAANKTTLSRGRSREDVYCRKCNTAVETMNHILGQCIFTKPARIKRHDEIKNFIEGKMLRKSDTVVSTEATFSVAEGVRLKPDLVIKSREGVHVVDVTVRHEDGSNLLKAGEEKVVKYQPVIPLAAQLHGVPNARILPVVVGTSGAMPRSTVSALKTLGIMSRGDLLTISLIALRCSIKIYTQFVNYDGAI

SEQ ID NO: 4461 - protein, 1230 aa, Teleogryllus occipitalis
MATDLNNMVRHHDTIHSDAPLIFSCSKCSKNYKGKLSALSHFPKCPGPKTSKGDFICELCSANFATKSGLSQHLRHAHPDAANKARAAKAQRSGRTAMPRAGKIFSSDDIMKMAALEKEQPEASNENLAALLGKTARQVGEKRRETSYRRYLAAIGDVVTVIAESSLSPSDSQRSDDSVRPSTSAAVIASPPRVISPPKTPVSQIPMLISSSPLYRRPNLKIRRKSVIPCSDTLPKGAETSLQVEISKQPRVDSLPKSRLTDSDPEELAKVDITSPEADRGRFPYEEAATVSEMNQELSGVPVLFDSVLCVIDTARSDTAGRLGWDQTFIESPAAMTPGDATTETSLNRATLDATPNWKENISTWIGTWGISQTNIDQELFEVGNELKRNIQSQDQLNETYARLVEILGGSSVPTTTTRPKKPRRHGGKRARKRYSYARAQDLFKNDPALLAKCIRTGIDCTSVDQQPLNRDEVNDLYKSIWGNTPPIRLSELREDDTFSTPEIDPDTILYAVQVAEIKSRLAGMKNATAPGPDKIKVSDISSGAKIEILSLLYTQILYTGFVPSGWKANRTILIPKEGKDNKFVTNYRPITISSLLCRIFWGIMDKRIRSVVTFNPRQKGFIPEPGCFANVQILHEAVSDMKKVEGGVGAVLDISKAFDTVPHAAIRWALSRKGIPDAFTNLVMDSYTEVSTVIQHPSKGIEVPIRRGVKQGDPLSPLLFNLIMECLLEKLDNMSGYPLLERSVSVLAFADDLVLLAKDAPRAQELVDIVVEYLGALGMTLSVAKCSSFQITTFERSWFIEDPCLERLGERIPLVSDDHTITYLGVNYSIWNGFPCKASISNLMEAVTRLQKAHLKPTQKLALLHTYIMPHYLYQLVLSMPSMSMLREADCQIRVAVKQFLHLHMSTADGLFYLAKRDGGLGLLRLAQHVPRVALNLGLRLEKSADPICRWLSSCPSFYQRTSKTAKALRLNMPYTEQDLRSYKKKCADDEIAAWEKLGSQGRAVKAHINDPIGNAFLKDYNLLKPGLFITALQLRSNTAANKTTLSRGRSREDVYCRKCNTAVETMNHILGQCIFTKPARIKRHDEIKNFIEGKMLRKSDTVVSTEATFSVAEGVRLKPDLVIKSREGVHVVDVTVRHEDGANLLKAGEEKVVKYQPVIPLAAQLHGVPNARILPVVVGTSGAMPRSTVSALKTLGIMSRGDLLTISLIALRCSIKIYTQFVNYDGAI

SEQ ID NO: 4462 - protein, 1119 aa, Beroe forskalii
MHDRTQTTDCHALDQTNQVLPQQEIPPTPPHPQLPTRHNLHSLTKPPVPSTPVTSFIREARKDVEWKESQTIHDPDQCYHPNTIKVCERLNVPHKSHLWEEMDNKVVESFNTCVEHANPEDATSKLSLFKLVIHAEFSEKYGTKTQLQTKSSRRSKKLAEERKELRKKKRASKKEYKLASRQGGSDETIAERKAEWRKLLKLHNRVRNQELELENKIDEIKNNSSFNSNPFRFMKNEVTKGKTSNKEPKCSQEFAEKFFTERYSDSSRTDQISFPDFLQTPSTLTSKFPVSTPTKSEFESYIKSRRNSSGPGPDGIPYVIYKKCHQTRCILIQLLQLLWNDYTTPSIDHVAIKILIPKGKSTKLAEYRDITLFNTSLKILTGVWAKRLSDFMLKNKYLDNNLQKGFIPKVSGCIEHNQTLIQLIREAVTKKQQVHIAFLDLENAFGSVKHNLILAALAWYNVPKSMVNFIKSLYNGFHVTVHTSQWKTKPIQIQKGSLQGGPEAGILFNVPWNIVLSGIATFLAKLGYTKPDKPISAFADDVTFKTESKEHLQLTINFATHLGSWSKSLKFKESKSATLAFNSDGKVYNPQLVLNSKEVPNLVKRPFKFLGKWIYPSLKDKDHIQATSKRLSELLLKTDNVPLDGRKKVWIYQHGIIPVLSWDFMMTEFSDTVLDRMESQVTKYLKKWLKVTKSTDPSIFYRETFGLHITSIKDAFLAGRTNTEITLCTSVDPVVRTAAKRRRESDIGCVRPNTPKRLKIAVDDITFQQKFCHGTRKHRDRRGVGATPAGEKVSFNKKTIIKRVKEISNEEKIAKITALAVQSQWTKWDDIIDNDWKWKEILYGFSPSMLSFWLNSVQNTLPDPVNLRRWGKQNQAQCPLCNWKSCTLQHILCSCRTALEQGRISWRHDSILSNIVKVIKKSKLDHTKNHKNCGQPDKTPSFVKEGQIPRKRQKQRQCYWSKADDWKILMDTRQAQYSIPPEIVITSLRPDICIYSTEKREVLFIELTSPAEENVSYWRMKKKTKYMSLIEEAKSNGYNAKCRTIEVGARGFVSKPSLTTFRMLGITEGNQIKIRKELSQIAIRCSHFIWINREIHQWANPARMCQEASQNKSGQKESN

SEQ ID NO: 4463 - protein, 886 aa, Beroe forskalii
MKNEVTKGKTSNKEPKCSQEFAEKFFTERYSDSSRTDQISFPDFLQTPSTPTSKFPVSTPTKSEFESYIKSRRNSSGPGPDGIPYVIYKKCHQTRCILIQLLQVLWKEYTTPSIDHVAIKILIPKGKTTKIAEYRDITLFNTSLKILTGVWAKRLSDFMLKNKYLDNNLQKGFIPKVSGCIEHNQTLIQLIREEVTKKQQVHIAFLDLENAFGSVKHNLILAALAWYNVPKSMVNFIKSLYNGFHVTVHTSQWKTKPIQIQKGSLQGGPEAGILFNVPWNIVLSGIATFLSKLGYTKPDKPISAFADDVTFKTESKEHLQLTINFATHLGSWSKSLKFKESKSATLAFNSDGKVYNPQLVLNSKEIPNLVKKPFKFLGKWIYPSLKDKDHIQATSKRLSELLLKTDNVPLDGRKKVWIYQHGIIPVLSWDFMMTEFSDTVLDRMESQVTKYLKKWLKVTKSTDPSIFYRETFGLHITSIKDAFLAGRTNTEITLCTSVDPVVRTAAKRRRESDIGCARPNTPKRLKIAVDDITFQQKFCHGTRKHRDRRGVGATPGGEKVSFNKKTIIKRVKEISNEEKIAKITALAVQSQWTKWDDIIDNDWKWKEILYGFSPSMLSFWLNSVQNTLPDPVNLRRWGKQNQAQCPLCNWKSCTLQHILCSCRTALEQGRISWRHDSILSNIVKVIKKSKLDHTKNHKNCGKPDKAPSFVKEGQIPRKRQKQRQCYWSKADDWKILMDTRQAQYSIPPEIVITSLRPDICIYSTEKKEVLFIELTSPAEENVSYWRMKKKTKYMSLIEEAKSNGYNAKCRTIEVGARGFVSKPSLATFRMLGITEGNQTKIRKELSQIAIRCSHFIWINREIHQWANPARMFQEASQNKSDQKESN

SEQ ID NO: 4464 - protein, 1305 aa, Ostrea lurida
MSMSRFKPYHVGRQRGCPRTTRRCNQIPWVWMESTRMAGSVQTEETRVLRVPSTPDYDDVNYQIELRDSRLPTMLITRDKFFVDGFLVRPSRLGASVGHDPTDVLVAGGRSAMMDEPPKDCEHVNVDGIRDFLEVTQETENGTLTIKYPFRPYRCLACMEFMETPKKLTEHMARCHKEDFINFACSLCNKKFPTLKGMAIHYGICQRSLTGRRLATGRSSFETSPSAHGMRRLTESAVQIEDLVDDRNVEGRRINVDLGHTHDLSDDVQLEDAAPVADNSGTDTPTVVIPTHECSECKEAFRSAIGLGQHIRHRHPNLANLRRIEAVQRDIERKRTARKREKDTIAADKPRRVKPSKVWTDEEVATLLELCEKFKGEKHINVAISEHLKSKTFKQIGSKRSELKKKHKVAGPSSTVEPMASHEAVVEPSICPCADAYRSAIVLDGGPLTGDTAEILTKAVEGEDCDDVMSSFLERLTNACSRPVRKGGKGQRTSRNRRARGSHKVTGDRAKGKLDRYREHQRLYGRDKKALANLILDGKEGQKCDLDPTLVEAVYQGRFGGGSQSVRLEKYPGASSLVDNLSLLRPFTTEEVREGFSRAKKDSAAGPDGVELRQLIAKDPRGHILVNLFNAFLISRKIPEGIKRNRSILLPKGSEGLSEVNNWRPLTISSVILRLYTSLLARRVLAEFDLNPRQRGFIAASGCSENSFLLSELIKHAKTARQSLCVTFLDLAKAFDTVSHRHLVAGLKRFGAADHFVEIVEDLYTGASTSFQTSAGTTGEIPMTRGVKQGDPLSPLLFNIAMDPLLQCITRQENGYRFGHEDGDFIESLCYADDNALTTGTPEQMNHNLAIVDQFCTDTGMCLNIRKSATFYLTPSGSRTYTVNTNKTAVSIRGEAVPVIEPDGYMKYLGSKMSPWVTKIRKDLVSQLEAWCESVGEAKLKPRQKLVLLNQYVLPRLTYPLTQDHYPQGVLKKLDLRVRAAVRKWLKLPDCSPIALFYLSRSEGGLGLPEFAKSIPAQRMNMLRGVCLSSDSKIRRMTDVMGTKALVERIGDLAELKVPETAKGRVRWRQSVGKTTEGLGIGKSVKAFRFPESNTWMNPHASYFGEADFITGMSLRTETYPCRATLARGRAGITDVNCRHCHSTVETVGHISGACPKVKDYRIARHNVIVNCVAEKVKSGGWTVSHEPTIVDEQGLRWKPDLVLLKGSHAVVLDPTVVYEKDHSLQRANHEKVAKYTQLAPQIRGVFGVESVEFAGLAIGARGGWCAQNTSTLDRLGISDKGFRSHLCRLAMKGTINMLRMFMDG

SEQ ID NO: 4465 - protein, 1213 aa, Angomonas deanei
MSRKNNTNKPNKKGKKNEYNENETNHTNLVEQRQHPQQEQTPKSESLPSFTSDEDRLLLPRAQTAPRPPHRKQARTPGVRPRLEDDGSSGPDDVKYLAVEPTRRATSVQVEEMQRKGSAGRGESRTSWTHCPYEDCPVTGSPYHLRLHFNKQHSAEIMKRKVDLAQQFPNELRGVGPFKICPHDACIYLSENPSSYTAHQKVCAKPVASFMPTNPQAPPDVPPQVPPTPPPPPPIVDAIPIFPEYVTSDESDHQEIIDVDAEESAVPSVVAPSTEDEATQDPAYDPIEETTPPRYVQETLHEPVRCIDPFLEEEAEEEKENQEKPQEEDLPPMEQTTMQSLMDDNRSTDEYLAYLPRCHRALPKTKWQQWMQVISPLLTGYTASDANERSRRQISLTNVVHHILRLPDPKPEKESQGEEEERPNTESDSPPSVNTTPPYDAYMPIHMDPQKDLDLFYKPNATYREKKHVPEDPASDPTAKRAVQLIKANAIGKAARVLDQEPANMATPSDETARLVDELHPQEDLHGIPRPKTSIAAIKPGQVRKSLLSLSKCSAPGPDGWTRELLLPITTNEALLAELTTLVEDIVQGQIHPLFRERICSAQINPLMKAPGKIRTIAPESIWLKLASHVAVALIHKNVLAEFKGWQFGVGGDAAEAVHTIRNEYAKPGNVVVAIDAKNAYNSVSRRHIIMETLNDERMHPIHQLVYTALATPSQLGLYDRGKRYHRLWSSCGIRQGMVLGPLLFCQATKRILQEFRAAFPKVKLVAYLDDLTVIGPPKEVERSLGELLPRMSEFGFTVNTEKTQVLGKTPVTVMGTKITPSRETIRILGAGFHPDGASTEPYVTKHVRKQDLFFNRLLTPGYIPKTAGMMLLRACAVPRMNFILRTHPKEDTEKAANWFDQRIASTLQHLVGHQLDERAMAIAQLPIRGGGLGIRSQEVLSKYAYDCVGKKGKQKEATTAYEKELSANLYATLDQNEKHILVSNCHPGANRLLVDGEATVGLSDEAFETMLKQRLLLPVISDPSLMCRCGATATNQHLNTCTQMENGPRTVRHDRVKYAIASWAQQLGFRVEVESKADPHTKQRLDLVIHTAGGVYATDVSVTYPAKVSENNKFGQALQVRFSHKMSSYATWAMKTGGSYTPFILESTGKIHQESMRWIREVACKQTTAPFSSQTSVEVLMARLAAELQEGNHLQFGPLQLRQVDGTGVQIL

SEQ ID NO: 4466 - protein, 965 aa, Owenia fusiformis
MTIIVYDICMDRFGLEERGDGVQSERGPSRRQMEIGNIRKDLRRLKKAYLKASHFEKEGLRRLRDDLRRRLLLLRKADNLRKKRSEKRKVRSKFFKSPFQFVGDLLGKPKSGNLQCTKEEMNASVKAAHTDPRRNEPLTDKPNISPAPLPEHQFDTTQIKLTEVQQVIKKGRSGSAPGPSGLTYKIYKNCPLLTLRLSRLMQVLWTKKEIPDSWLIAEGCFVPKEENSSSLDQFREISLLSVEGKIFWAIIAKRFTNFFMKNKYVDTSVQKGGITGFSGCVEHTAAITKLIGEAKKEKKDLSVVWLDLAKAYPSVPHQLIYTALEHYHIPPDVTTLVKLHLGGLHMRFSAGDITSDWQRLEKGIMAGCSVSVILFVAAMNILLTDAAKECRGPVASDGTRHPPCRAFMDDITAMTCQEIGMRWVLSRLEELATWGRLTFKPKKSRSLILKKGKIVDSKFTMQGETIPTINENPIKCLGKWFDHNLNDKTHIADTLCQLITWMKTIDKTSLPGKLKIWCFQYGVIPRLNWPFTMYDFSMTAIEALERTASKFLRKWLGVPKSFSAVNLYSTSSPAAIPTSSIVEEFKVTKVRTAMLLRDSKDPTARSTEATTSRTRKWSAQTAITNAEGRLRQSDIVGTVAEGRRGLGSYGRVPWSKADAREKRKMVTGEIRKSEEESRLVKATGMAKQGAWLNWEAVEGRRLTGKDLLQTSETSLAFLLKSLSDTLPTPCNLSLWGMIDDPMCTLCKDQPASLKHILSSCNVALGEHRYTWRHDQVLREIVRQIDNIITCKASPQVKETAQWTSFLREGESKGPQQQKPIKLPGILQTATDWKIGVDLGKKLVFPQEIATTTLRPDIVITSDNRRCVILVELTVPWEERMEISHEIKQSKYEDIITEATQNGWKAHSFPVEVGCRGFAGKSVTWMLKSLGMPSTKRKRASTEIGAVAERCSRWIWLRSSAAWLPH

SEQ ID NO: 4467 - protein, 1129 aa, Owenia fusiformis
MTEAPTFTATDNQTREYPQDDPRGGAEDSSNRQNTTDKDPRNDNGRRDSCESCGRIFKNWHGVRIHQGKTKCSSTPTQRREVNTPRQTQDNPDPVNNHSVQVVSVEEEVNTREQEEAVKVPVFERKPKLKLPAASSSEWKDLDADLQQILNNTLKGDAKRKVEAMTSIVYDVCMDRFGLEEKGDGIPKEKGPSRRQKEIGNIRKDLRGLRKAFLNADVSEKEGLHRLRESLRRRLLLLRKADNLRKKRSEKRKTRSKFFKSPFQFVSDILGKPKSGNLECTKEEMNTSVQAAHTDPRRNEPLAEKPNLSPAPLPEHEFDTTPIKLSEVQQVIRKGRSGSAPGPSGLTYKIYKNCPLLTTRLWRLMQVLWIKKELPAPWLIAEGCFVPKEENSISLDQFREISLLSVEGKIFWAVIARRFTTFFMENKYVDTSVQKGGITGFAGCVEHTAAISKLIGEAKKEKKDLSVVWLDLAKAYPSVPHQLIYTALEHYHVPPEVIGLVKLHLGGLYMRFSTRHITSDWQRLEKGIMAGCSVSVILFVAAMNILLTDAAKECRGPLASDGTRHPPCRAFMDDITAMTCKEIGMRWILSRLEQLATWGRLTFKPKKSRSLILKKGVISDNKFTMQGEMIPTISENPIKCLGKWFDHSLNDKTHTADTLHQLATWMKAVDRTPLPGKLKIWCFQYGIIPRLNWPFTMYDFSITSVQAMERIAGKFLRKWLGVPKSFSSVNLYSTSSPAALPTSSIVEEFKVTKVRTAMLLRDSKDPTARASEVKPPERRKWSAQDAISNAESRLRQSDIVGTVAEGRKGLGSYGRVPWSKADPKAKRKMVTSEIRKTEEEARLVKATGMGSQGAWLSWESVESRKVTGSDLMQTAETSLAFFLKSLSNTLPTPTNLSLWGLTDDPTCSLCKDQPASLRHILSSCSVALGEHRYTWRHDQVLREVARQIDIIIASKTCPLAKDTTPWISFCKEGQSKAPQQQRTTMLPGILQTTADWQIMVDLDRKLVFPQDIAITTLRPDIVIRSNDKRCVILVELTVPWEDRIEVSHELKQTKYDDIITEARQKDWKAHSFPIEVGCRGFAGKSVTWMLKSLGMPSTKRKRASMQIATVAERCSRWIWLRSSAAWLPH

SEQ ID NO: 4468 - protein, 965 aa, Owenia fusiformis
MTIIVYDICMDRFGLEERVDGVQSERGPSRRQMEIGNIRKDLRRLKKAYLKASHFEKEGLRRLRDDLRRRLLLLRKADNLRKKRSEKRKVRSKFFKSPFQFVGDLLGKPKSGNLQCTKEEMNASVKAAHTDPRRNEPLTDKPNISPAPLPEHQFDTTQIKLTEVQQVIKKGRSGSAPGPSGLTYKIYKNCPLLTLRLSRLMQVLWTKKEIPDSWLIAEGCFVPKEENSSSLDHFREISLLSVEGKIFWAIIAKRFTNFFMKNKYVDTSVQKGGITGFSGCVEHTAAITKLIGEAKKEKKDLSVVWLDLAKAYPSVPHQLIYTALEHYHIPPDVTTLVKLHLGGLHMRFSAGDITSDWQRLEKGIMAGCSVSVILFVAAMNILLTDAAKECRGPVASGGTRHPPCRAFMDDITAMTCQEIGMRWVLSRLEELATWGRLTFKPKKSRSLILKKGKIVDSKFTMQGETIPTINENPIKCLGKWFDHNLNDKTHIADTLCQLITWMKTIDKTSLPGKLKIWCFQYGVIPRLNWPFTMYDFSMTAIEALERTASKFLRKWKGVPKSFSAVNLYSTSSPAAIPTSSIVEEFKVTKVRTAMLLRDSKDPTARSTEATTSRTRKWSAQTAITNAEGRLRQSDIVGTVAEGRRGLGSYGRVPWSKADAREKRKMVTGEIRKSEEESRLVKATGMAKQGAWLNWEAVVGRRLTGKDLLQTSETSLAFLLKSLSDTLPTPCNLSLWGMIEDPTCTLCKDQPASLKHILSSCNVALGEHRYTWRHDQVLREIVRQIDNIITCKASPQVKETAQWTSFLREGESKGPQQQKPIKLPRILQTATDWKIGVDLGKKLVFPQEIATTTLRPDIVITSDNRRCVILVELTVPWEERMEISHEIKQSKYEDIITEATQNGWKAHSFPVEVGCRGFAGKSVTWMLKSLGMPSTKRKRASTEIGAVAERCSRWIWLRSSAAWLPH

SEQ ID NO: 4469 - protein, 1257 aa, Curetis bulis
MEMHTRNYSKGPLPGGNRQGTSGAGAGRDSIRAVSGSQLNRRAGAGDPEDTTADVCDGDTLQSGNIPENSAGTPCGRTTTSLNYDSRRKWSQEELHELLFCYFKAKSEGAGYTKRLEVLFKDRNPDNPKINRYNGNNLATQARSVITRKTIPSEVLYEIKKSAECNAQTTVDNNVNHIAHLGILTNTENNQYHTNEQNNVNLLSNYTINQSIETELQSEITNQNDEPTYYVDANEEEQDPLILDLLNNLSEVNELDIDNRKILPKPVFSKSFFNNLNKINQYLPKILQSRNSMREINNIIYASAKTLIINNNQKPYLLTINNKIKKEPPWKIRLKKKIENFRKELGRLIEIKNGVNSKRMQNIKHKLFSKYNILNSNDINNIIEILKQKIKALAGRLRRYDDINIRKQHNKMFNANQHKFYNQVTGKNNFTATIPLESDLHEYWSSILSNPTNYNKEAPWINEVEQSMRHVQAADFIEIDEKRISNAVKKAANWKSPGMDMIQNFYIKYLTNTHKYIASSYNNILKGIEPIEEWFTTGRVILIPKDGDSTDPSNWRPIACLPTLYKLLTSVLTEELTTHCEHNNIIAPEQRGCKRRTRGCKDHLMVNKAILEDSHDSQKNLSMAWIDYQKAFDSVSHEWILKILELYKCPESIKMFLKLVMPMWRVFMTAKGTNKSVTTQAITIKRGIFQGDSLSPLLFCLAINPLSDLLSKYDKKGYKLKDGPWINHLLYMDDLKVYANNKFNLQVLLDSIEIFTRDIGMIFGLKKCNVLHITAGRRNECVGQNHVLLSGKEFTHLKENQTYKYLGINEGGKVDHNNVRQQISKEYIKRVKCLASTSLNSRNLFKALNTFAVPLLLYSFGIINYKMRDLRNLDVKTRKILALNKIHQLKAEKERLYLPVDEGGRGLLKIESLYKSQIIKYSTYLQTERDYLIAAILKHDKNLDKYSIIKNADEYKRFLTLDLNQHNSDLEIKKAIVKDTINKWRHKPLHGQFYNKVLLKDNIDKVNSLGWIKKLPVSPTLESTIFAIQDQAVKTRQIERDIFKTTNDGKCRLCFSKDETIQHITSGCEKLAGTYYTKRHNNIVQYIFWTIAKKYKLEQSHLWWKDILEEPQVRENSEIKLMWEMPVQTDVTIPCNRPDIIFVNKKNNETYLIDITIPSDYNIGPKEIEKLSKYHPLKKEISRLWQTKTKIIPIVIGATGMIAKSLKRYCDILDTNINIAIMQKQAAIHTTIIVSNVLSDSIFVNNINNDRRDVINL

SEQ ID NO: 4470 - protein, 1082 aa, Fasciola gigantica
MSTHNANGAASATPMASSSQPMEYICEICGKSCRSKAGLTLHKKVHPPPTHPPLPPTPPTPKAFQCVLCSDSFHTKMGLTQHKRHRHLQEYNGDKRQQIVTSARSRRWTTSEEAALIALANDLAATHSEKQELCAALSTQFPNRSAESIKKRLQHLDWQYPDDVLPDSTSSDDDTNTSNLSSDSISMLQPLPNSPTDSEPVAPQPTTSLCATSTALLEAACSLLRSTPHDVFGSRELLSIVEAGLTHSMDATALRCRLEAHAEANIPNLWNPSRPRSSRLPTRPLSRRPRKPPRPKILARRAQYAHLQCLFAQRKKDAAREVLSGRWRSAHENDSSWSPDFTRFWSEKLSLPPLNDPRPHRQLSHPPSLILHPITIPELQDALRDMRGSAPGIDRVTPETLLRSPLSVFTAYINILLALAHVPRRLNTARITFVPKSDNPTSPSDYRPISVSPVLLRSLHKVLQRRWTSLFPVDGLQFAFLKRDGAFEATALLHTLLRYAHTSFHSLAFASLDLSKAFDSISHDSILRSAATFGAPPILLDYVRSSYATASCVLPDGSTITPRRGVRQGDPLSPLLFIMAIDEILSLSHPQTSFLTPSGPVDAIAYADDLILFADSADGLQKKLSDCSVACGMSGLVFNTQKSFSASIITSPKQKISALDETTLFVNGHPIRTLSTSDTFSYLGTSFTYRGKAGVDYSNTLRIMLQDVISAPLRPFQRLYILRSHLISRLHHTLCLGVIHKKTLKRLDLQVRHCTRKFLRLPKDTPTAYFHARCSDGGLGIPHLSSQIPLIRRKRLERLLSSTAPLLRWAGTCPAASSSQAISHVPIAVQGAYIQSKEQAADAWKNSLYGTLDGKHISCQQFAAPSDLWITSPTRMFPRDFIHNIKLRCHLLSTKTRRCRGLRSADDILCRGGCGQPESLSHILQSCSITHDSRCRRHDDVVNLLLKRLMRMGATCYNEPRIPLETTFCKPDVIVVKGNTAFVCDIAVCDPSLIQQTLTNKVAKYSTPVVNTAIQSFLSASGHATPNIVHKPIVITYNGFVHRSSASTLRQFHLSPLDILDLVSTTMRGSTKTYLRYMRGPN

SEQ ID NO: 4471 - protein, 1061 aa, Fasciola gigantica
MSTHNANGAASATPMASSSQPMEYICEICGKSCRSKAGLTLHKKVHPPPTHPPLPPTPPTPKAFQCVLCSDSFHTKMGLTQHKRHRHLQEYNGDKRQQIVTSARSRRWTTSEEAALIALANDLAATHSEKQELCAALSTQFPNRSAESIKKRLQHLDWQYPDDVLPDSTSSDDDTNTSNLSSDSISMLQPLPNSPTDSEPVAPQPTTSLCATSTALLEAACSLLRSTPHDVFGSRELLSIVEAGLTHSMDATALRCRLEAHAEANIPNLWNPSRPRSSRLPTRPLSRRPRKPPRPKILARRAQYAHLQCLFAQRKKDAAREVLSGRWRSAHENDSSWSPDFTRFWSEKLSLPPLNDPRPHRQLSHPPSLILHPITIPELQDALRDMRGSAPGIDRVTPETLLRSPLSVFTAYINILLALAHVPRRLNTARITFVPKSDNPTSPSDYRPISVSPVLLRSLHKVLQRRWTSLFPVDGLQFAFLKRDGAFEATALLHTLLRYAHTSFHSLAFASLDLSKAFDSISHDSILRSAATFGAPPILLDYVRSSYATASCVLPDGSTITPRRGVRQGDPLSPLLFIMAIDEILSLSHPQTSFLTPSGPVDAIAYADDLILFADSADGLQKKLSDCSVACGMSGLVFNTQKSFSASIITSPKQKISALDETTLFVNGHPIRTLSTSDTFSYLGTSFTYRGKAGVDYSNTLRIMLQDVISAPLRPFQRLYILRSHLISRLHHTLCLGVIHKKTLKRLDLQVRHCTRKFLRLPKDTPTAYFHARCSDGGLGIPHLSSQIPLIRRKRLERLLSSTAPLLRWAGTCPAASSSQAISHVPIAVQGAYIQSKEQAADAWKNSLYGTLDGKHISCQQFAAPSDLWITSPTRMFPRDFIHNIKLRCHLLSTKTRRCRGLRSADDILCRGGCGQPESLSHILQSCSITHDSRCRRHDDVVNLLLKRLMRMGATCYNEPRIPLETTFCKPDVIVVKGNTAFVCDIAVCDPSLIQQTLTNKVAKYSTPVVNTAIQSFLSASGHATPNIVHKPIVITYNGLYIGPLHQPFGSFTSPPWIFLT

SEQ ID NO: 4472 - protein, 1082 aa, Fasciola gigantica
MSTHNANGAASATPMASSSQPMEYICEICGKSCRSKAGLTLHKKVHPPPTHPPLPPTPPTPKAFQCVLCSDSFHTKMGLTQHKRHRHLQEYNGDKRQQIVTSARSRRWTTSEEAALIALANDLAATHSEKQELCAALSTQFPNRSAESIKKRLQHLDWQYPDDVLPDSTSSDDDTNTSNLSSDSISMLQPLPNSPTDSEPVAPQPTTSLCATSTALLEAACSLLRSTPHDVFGSRELLSIVEAGLTHSMDATALRCRLEAHAEANIPNLWNPSRPRSSRLPTRPLSRRPRKPPRPKILARRAQYAHLQCLFAQRKKDAAREVLSGRWRSAHENDSSWSPDFTRFWSEKLSLPPLNDPRPHRQLSHPPSLILHPITIPELQDALRDMRGSAPGIDRVTPETLLRSPLSVFTAYINILLALAHVPRRLNTARITFVPKSDNPTSPSDYRPISNSPVLLRSLHKVLQRRWTSLFPVDGLQFAFLKRDGAFEATALLHTLLRYAHTSFHSLAFASLDLSKAFDSISHDSILRSAATFGAPPILLDYVRSSYATASCVLPDGSTITPRRGVRQGDPLSPLLFIMAIDEILSLSHPQTSFLTPSGPVDAIAYADDLILFADSADGLQKKLSDCSVACGMSGLVFNTQKSFSASIITSPKQKISALDETTLFVNGHPIRTLSTSDTFSYLGTSFTYRGKAGVDYSNTLRIMLQDVISAPLRPFQRLYILRSHLISRLHHTLCLGVIHKKTLKRLDLQVRHCTRKFLRLPKDTPTAYFHARCSDGGLGIPHLSSQIPLIRRKRLERLLSSTAPLLRWAGTCPAASSSQAISHVPIAVQGAYIQSKEQAADAWKNSLYGTLDGKHISCQQFAAPSDLWITSPTRMFPRDFIHNIKLRCHLLSTKTRRCRGLRSADDILCRGGCGQPESLSHILQSCSITHDSRCRRHDDVVNLLLKRLMRMGATCYNEPRIPLETTFCKPDVIVVKGNTAFVCDIAVCDPSLIQQTLTNKVAKYSTPVVNTAIQSFLSASGHATPNIVHKPIVITYNGFVHRSSASTLRQFHLSPLDILDLVSTTMRGSTKTYLRYMRGPN

SEQ ID NO: 4473 - protein, 1082 aa, Fasciola gigantica
MSTHNANGAASATPMASSSQPMEYICEICGKSCRSKAGLTLHKKVHPPPTHPPLPPTPPTPKAFQCVLCSDSFHTKMGLTQHKRHRHLQEYNGDKRQQIVTSARSRRWTTSEEAALIALANDLAATHSEKQELCAALSTQFPNRSAESIKKRLQHLDWQYPDDVLPDSTSSDDDTNTSNLSSDSISMLQPLPNSPTDSEPVAPQPTTSLCATSTALLEAACSLLRSTPHDVFGSRELLSIVEAGLTHSMDATALRCRLEAHAEANIPNLWNPSRPRSSRLPTRPLSRRPRKPPRPKILARRAQYAHLQCLFAQRKKDAAREVLSGRWRSAHANDSSWSPDFTRFWSEKLSLPPLSDPRPHRQLSHPPSLILHPITIPELQDALRDMRGSAPGIDRVTPETLLRSPLSVFTAYINILLALAHVPRRLNTARITFVPKSDNPTSPSDYRPISVSPVLLRSLHKVLQRRWTSLFPVDGLQFAFLKRDGAFEATALLHTLLRYAHTSFHSLAFASLDLSKAFDSISHDSILRSAATFGAPPILLDYVRSSYATASCVLPDGSTITPRRGVRQGDPLSPLLFIMAIDEILSLSHPQTSFLTPSGPVDAIAYADDLILFADSADGLQKKLSDCSVACGMSGLVFNTQKSFSASIITSPKQKISALDETTLFVNGHPIRTLSTSDTFSYLGTSFTYRGKAGVDYSNTLRIMLQDVISAPLRPFQRLYILRSHLISRLHHTLCLGVIHKKTLKRLDLQVRHCTRKFLRLPKDTPTAYFHARCSDGGLGIPHLSSQIPLIRRKRLERLLSSTAPLLRWAGTCPAASSSQAISHVPIAVQGAYIQSKEQAADAWKNSLYGTLDGKHISCQQFAAPSDLWITSPTRMFPRDFIHNIKLRCHLLSTKTRRCRGLRSADDILCRGGCGQPESLSHILQSCSITHDSRCRRHDDVVNLLLKRLMRMGATCYNEPRIPLETTFCKPDVIVVKGNTAFVCDIAVCDPSLIQQTLTNKVAKYSTPVVNTAIQSFLSASGHATPNIVHKPIVITYNGFVHRSSASTLRQFHLSPLDILDLVSTTMRGSTKTYLRYMRGPN

SEQ ID NO: 4474 - protein, 896 aa, Fasciola hepatica
MLQLLPNSPTDPEPEAPQPKASLSATSIALLEAACSLLLSKPHDVFGSSELFSIVEAGLTHSMDAAALRCRLEAHAEANIPNLWNPSRQRSSRMPTRPPSRRPHKPPRPKVLARRAQCAHLQCLFAERKKDAAREVLSGRWRSAHANDSSWSPDFTRFWFEKLSLPPLNDPRPHRQLSHPPSLILHLITIPELQDTLRDMRGSAPGIDRVTPEALLRSPLSVFTAYINILLALAYVPRRLNTARITLVPKSDNLTSPSDYRPISVSPVLLRPLHKVLQHRWTSLFPVDGLQFAFLKRDGAFEATALLHTLLRHAHTSFHSLAFASLDLSKAFDSISHDSILRSAATFGAPPILMDYVSSSYATASCVLPDGSTITPRRGVRQGDPLSPLLFIMAIDEILSLSHPQTPFLTPSGPVDAIAYADDLILFADSADGLQKKLSDCSVACGMSGLTFNTQKSFSASIITSPKQKILALDNTTLFVNGHPIRTLSTSDTFYYLGTSFTHRGKAGVDYSNTLRTMLQDVISAPLRPFQRLYILRSHLISRLHHTLCLGVIHKKTLKRLDLQVRHCTRKFLRLPKDTPTAYFHARCSDGGLGIPHLSSQIPLIRRKRLERLLSSTAPLLRWVGTCPSASSSQAISHVPIAVQGAYIQSKEQAADAWKNSLYGTLDGKHISCQQFASPSDLWITSPTRMFPRDFIHNSKLRCHLLSTKTRRFRGLRSADDILCREGCGQPESLSHILQSCSITHDSRCCRHDDVVNLLLKRLMRMGATCYNEPRIPLETTFCKPDVIVVKGNTAFVCDIAVCDPSLIQQTLTNKVAKYSTPVVNTAIQSFLSASGHATPNIVHRPIVITYNGFVRMSSASTLRRFHLSPLDVLDLVSTAMRGSTKTYLRYMRGPN

SEQ ID NO: 4475 - protein, 1082 aa, Fasciola hepatica
MSTHNANGAASATPMASSSQPMEYICEICGKSCRSKAGLTLHKKVHPPPTHPPLPPTPPTPKAFQCVLCSDSFHTKMGLTQHKRHRHLQEYNGDKRQQIVTSARSRRWTTSEEAALIALANDLSATHSEKQELCAALSTQFPNRSAESIKKRLQHLDWQYPDDVLPDSTSSDDDTNTSNLSSDSISMLQPLPNSPTDSEPVAPQPTASLSATSTALLEAACSLLRSTPHDVFGSSELLSIVEAGLTHSMDAAALRCRLEAHAAANIPNLWNPSRPRSSRLPTRPPSRHPRKPPRPKVLARRAQYAHLQCLFAQRKKDAAREVLSGRWRSAHANDSSWSPDFTRFWSEKLSLPPLNDPRPHRQLSHPPSLILHPITIPELQDALRDMRGSAPGIDRVTPETLLRSPLSVFTAYINILLALAHVPRRLNTARITFVPKSDNPTSPSDYRPISVSPVLLRSLHKVLQRRWTSLFPVDGLQFAFLKRDGAFEATALLHTLLRYAHTSFHSLAFASLDLSKAFDSISHDSILRSAATFGAPPILLDYVRSSYATASCVLPDGSVITPRRGVRQGDPLSPLLFIMAIDEILSLSHPQTSFLTPSGPVDAIAYADDLILFADSADGLQKKLSDCFVACGMSGLMFNTQKSFSASIITSPKQKISALDNTTLFVNGHPIRTLSTSDTFSYLGTSFTYRGKAGVDYSNTLRTMLQDVISAPLRPFQRLYILRSHLISRLHHTLCLGVIHKKTLKRLDLQVRLCTRKFLRLPKDTPTAYFHARCSDGGLGIPHLSSQIPLIRRKRLERLLSSTAPLLRWAGTCPAASSSQAISHAPITVQGAYIQSKEQAADAWKNSLYGTLDGKHISCQQFAAPSDLWITSPTRMFPRDFIHNVKLRCHLLSTKTRRSRGLRSADDILCRGGCGQPESLSHILQSCSITHDSRCRRHDDVVNLLLKRLMRMGATCYNEPRIPLETTFCKPDVIVVKGNTAFVCDIAVCDPSLIQQTLTNKVAKYSTPVVNTAIQSFLSASGHATPNIVHRPIVITYNGFVHRSSASTLRQFHLSPLDVLDLVSTTMRGSTKTYLRYMRGPN

SEQ ID NO: 4476 - protein, 912 aa, Gonioctena quinquepunctata
MRSAHPVEYNQGIVVDRAKARWCGEEVHIMACLEAEAIRRGVRFVNQELVRLMPDRTLEAIKGKRREAAYKRSVQEMVETQANQVDIPDLESANEQEPASPPQITPGDQSFADAILRLAEEVAWEGLGDRAEPLRALVDECPGRDISRSLFEWIRDALPRTQPIGGNKNSGRFRPEPNISKRDKRRREYRLTQELYRKHEAQCARQILDGERGEPEIPIEGDAFHQYWRGVFETPSQEYVAPIGVAPNGAHEELWGPITSEEVGRSFVANSKAPGPDGILPRDWRKIPSPVIAMLFNSFMARGGLPGELHASRTIFIPKRIGDDRDAQPADFRPLTVPSVVVRHFHKILATRMGNVPGILSDEQRAFRRKVDGIAENLCVLNTVLREARSGIKTVHMATLDVSKAFDTVSHEGLLDACRMAGIPDVMVNYLKDVYANAYTSLSCPKKSEVITENQRVKPMRGVRQGDPLSPMLFSLVIDRALLALNREIGFMVEGERISWLAFADDLILCSTSKVGLQRNLDLLNAELGRFGLLLNPAKCMVLSMVASGRDKKVKIVDTQMFTISGVGIRQCAVLDFWSYLGVKFIGTRVGQIRVSLSNELERITKAPLKAHQRVNVLRTYLIPRYIQSWVMGRVTSGYLKKLDVTVRAAVRRWLHLPKDVAIGYFHCPVREGGLGIPRMSEFIPHLRLRRLIALKESTVPHVVACAGGALVEIEIAWCRARLANVANPERSNCLSRHWAQLLHASVDGAALRETGGSRFSSSWVSSKNPFMKGGDFVHYNWVRSNALASGMRCSRGRRGPGNRPVMCRAGCQETETAGHIVQKCFRTHGGRILRHNCIVKAVGNSLVKKGWAVQYEKLYQTAVGVRKPDITAVKGGRVAIVDAQVVSSGELDRAHEAKWQNTETKPSLHLS

SEQ ID NO: 4477 - protein, 1349 aa, Lethrus apterus
MSHPKRDFNEEESIMLAKLEAKYTGRTINIFLSTKTNFDIQSIRKFRDKNKTYHELVMKYRKQLSSDSEPDIPSFEFEEESSFQITSPINFSVTSLLKTPVTSISEQRIERQDSFNTLHFNESSFHCIDSGATDLPTIMNSADDLALLRPVQDPCAYSHGRRKALGHFPINTNTHDKSKYKNIRSNSRVPLPAGHAISLGSPPGPPTSDPEPVLPEPISGFICPECLRSFSTKIGLGIHKKRAHPLLANDEVQLPAVKVRWSDEELRIMAREEAEGSLHGVKFMNQHLMTRIAGRTLESIKGVRRRMDYKNMVLAALDDARVIGAAEIIPPAFTPPQHRRSAPRRIVRHQSPQPRTPEQIPGPSRTNAYLIRRQIIHALEPSNFAQTDLDTEDSSSSSLLSAKSSSFRPSTPSIESDTDSYTPLPSPTLRTSTSDTERNSRTPIVQQSVAIESATPLNHQEPAALPKSPLGTNIAAVIHGLCQAIKDKELHSHQADDLVEIGRAALRNNPVHNLLLVWFNKAFVVPPAPQQREQLYVHLPDRRPSRRRLRRREYARIQNNWRKNPGQTARDIIDGKNAEPIRQPDGLFDYWSNILELPSDPYQPRPRAPPSPELAFVWDPISVEEVRDARIALSSAPGPDRISSRQWNTVAPIIRALFYNIVLLCGLPTKLALSRTVFIPKMRNPEHPADFRPISMTSVAVRHLHKILSIRLLRAALIDHRQRAFITADGSAENISVLEAILADARKNLKEVHLATLDLSKAFDNLSQAALADVLYSTGLPRDFISYVVNTYQDARTILMSAGKTSEPLRVMRGVRQGDPLSPLLFNIAANRILKAVPMEVGFKLESEKVNALAFADDIILVAGSHNGLQFSINQVEAEIQNLGLQINAAKSSTLSMIPNGKLKKMKTVNDRPFSTSTGNLQTLNVLSTWKYLGTNFSVRGNRPIEQNLAEALANITRAPLKPQQRLIAVRTSLLPQLYHSLTLAVVTAGRLKAIDRQVRQSVRAWLRLPHDTPLGFFHAAVRDGGLGIPSLLTTIPALVSKRLGSLRDSQFPPARAASNTVSVKRRITWAARILRRIGISPEAPTPTIRKRYWSTQLYASTDGMELREVSQCPSSSSWVARSSRVIPGRDFIQFCHVRINALPSRIRTSRGRDRRPNLATGCRAGCQSTETTAHIIQSCWRTHGGRISRHDAIAKTLANELQRLGWRTEREKIFQTHDGNMKPDIIAAKDDRAVIVDAQVVSATNSLSVSHRAKREKYASKPELIEAVARRLEVEPNDVATTTLTISWRGIWSKDSCRDLTALGIKQRTLEGITTRVLQGSHTNWTRFNRMTGRAPNQRGGVPVQGNG

SEQ ID NO: 4478 - protein, 1346 aa, Ips nitidus
MENFDQSNSQTKSGEIGSGAGPSNLNKGSSVHTDSRVRPTPTAPYSCPKCGKGYTTRSGRSKHLKDCGNNDRRACAFCGKEFGTFAQMRCHERVAHPAQYMEVEESKLKISDSEIFTTIAELEVRNNSKGNFLLDISRATGLSRDQIKYRRTRPVYADYLKMAREKLGAETLKAAPGSKTTSKLAPAKPAPAKPAPANRRHTLSSFLTRPAQSKQSPKSIDVQPPSKTAKKPSGRLSLPPAKPVSRPSDGPTTSETASSPPPPSPLAPPDIVNLNSSDEEVFFTPSAPEIPMAPATNIKRKRPSQPATPEDFTPKRFNLERGSQPIARGAKRGADSPLDEQPEPAPKRRVNYELPDTPLAVNILQNITLAPAPRPNVSPDNFRPPPLPPHLFEGQGFEGRDEEPAPATFTQIAAELEALLSPPQGSEGEGLQQAPGGETGSTGTDEIVEWLRMKLESEAARPGSDGSNIDIVAIIQSALIDSDRVLGTILDTWLDVNFYQKTRRRNNNTNQRERLTQTRITEFVHPSGQADVTNCPRSRYSNNRNGANYAQQHTGRGLRASNYKKAQDLYNKNRATLASAIIEGKNLQTADKYPDIDRVETFYANILEAPMVEDLDPIVGPLATTTANTERPFTALEIDQAKTGWAMASAGPDLIPVPVVKNVPSEILAVLFNIIYHRKIIPKAWRQSRTTLIPKEGDREDPANWRPITVSSAFLRLFHRILSKRLKDATVLNLNQRGFINIDGTLANTMVVHHYIRNRIEARKSYNVLSIDLRKAFDTVNQSSILRAMKRVGLSDHMCAYVGETFRHATTTIKIGNNSSRPIKISRGVKQGDPLSPILFNLVIDELLCDLDRLGRGGSLDDNIVGDVRCSSLAFADDIVVLENEDKYIPLDLHIIDSFFKKRGMELNSDKCSLLSAALVPRGGKVIPRSRPFIRHNGALIKSVTNFDTAKYLGHKLGASGIQKPSIANLALWMANVERAPLKPDQKLTIVKQYVIPKVLYGLQNPKITGRILREADRLIKYRLKRILHLNTHTPDAALYARVRDGGLGIMPLRYAIPKIYMGRLQNLLNADNRDAALNYVMQSPRTLHLMDRMHGLMGNTPYEIYWADQLKASPLLSGLEESSADVASRSWIDNRPNGWTGRDFVRAVQLRTNNLPTAGIPSNPVERRKCRAGCPRVETISHVLQGCPATHFERIKRHNEIAKKITKHCREKLKLTTTEEPHVRHDDGTLFKPDIIAIKHNSVIVCDVQVMWEGNISLANSHNNKRLKYEEDRKFRAALDKLYPGKDHLFAPITVGARGIWPACNGVTEALLSIDRPLKTSCVQSALKWASTIHASFMRRVWRGQ

SEQ ID NO: 4479 - protein, 898 aa, Zaprionus vittiger
MAAANQPTHSPTGGGVPTSQGRRGPQTLADAAIYRTNRPRAMREVLGQSSPPCDLPGRAVYAHLRQMFSKDSDERVRPFDWPTWCAPGEEDRADALLSPLTQEEVLARLRRTHSSAPGPDGVTYGNLKKIDPKTSMLTAVFNACLRTGHVPDLWKKSRTVLIHKKGDRTDLSNWRPLSMGDTIPKLFAAVMADRLTTFLTNGGRLSPEQKGFLQHEGCHEHNFVLGQVLEESRRHGKDLVMGWLDLSNAFGSIPHATIMDAVAGMRIPSRIQSILHQLATGAATTAKTVDGMSEEIPIEAGVRQGCPASPILFNMAIERVLRKIKTINAGYLLYGSRISTLAYADDLVLIASSPEEMRSLLRAADDAAIEAGLNFNPKKCATLHLTGKKSLRRAVQTGFLVRGTPLPAMTEGDAYEYLGIPVGLDVDQTPRAAMEAIVGDIARIDGSLLAPWQKIDAVRTFVAPKLDFVLRSGAILRAPLRHLDTVIKKHIKKWLYLPQRASAEVVFTPLRKGGAGILPSAILADVLTIAQAHRMMSCPGEVVPQIAREGLREAVKRKINREPSGEEMAHFLSGSALSGETASFGDAGFWSRVRMATKRQAVHLAVRWAWRGDELLVECRGQRNRPVTIDSNSRALLIQRLRCAAQEEFLTILLNKPDQGKVAKLSSLTPVSNAFIRNGSFTRFADWRFIHRARLGVLPLNGAIRWGSGDKRCRVCGYQLESIPHVLCHCMHHSNAMQQRHNTVMERLAKAGSRLGTPRVNCRVEGVAEDMAALRPDLVWRDERNKNIVIVDVAIPFENGADAFEIARGEKTEKYRPLAEALRAIGYQVKLEAFIVGALGSWDPRNERVLKALGVSSFYAGLMRKLMVADTIRWSRDIYVEHVSGIRQFTLPQGAPSI

SEQ ID NO: 4480 - protein, 923 aa, Zaprionus ornatus
MANAAATREELLGAVTSLSEMAAVNQPTRAHSGVGNHSSQIGRGPQTMAAAAKRLQQIYRTNRPRALREVLGQSSPPCELPGRAVYDHLRQMFARVDDERVRPFDWPAWHEPGEDDRADALQNPLTQEEVLARLRRTHSSAPGPDGVTYGNIKKIDPKASMLTAVFNACLRTGHVPNLWKKSKTILIHKKGDRSDLSNWRPLSMGDTIPKLFAAVMADRLTKFLTNGRRLSEEQKGFLQHEGCHEHNFILGQVLEESRRQGKDLVMGWLDLSNAFGSIPHATIMDAIAGMGIPPRIQAILHQLATGATTSVKTIDGMSEEIEINAGVRQGCPASPILFNMAIERVLRKIKTVDAGYTLHGSRISTLAYANDLVLIASSPEEMRSLLRAADDAAIEAGLHFNPGKCATLHLKGNKSVRTTVQTDFLVRGTQIPAMTMGDAYHYLGIPAGLNVDQTPRAVMEAMVGDVRKIDDALLAPWQKIDAVRTFVAPKLDFVLRSSATLRAPLRHLDIAIKKHIKKWLYLPQRASAEVVSTPTSKGGAGILPSAILADVLTIAQAHKMLTCPSVSVSQIAREGLRETVKRRTNREPSGDEMALFLSGSALVGDTASFADAGFWSRVRLATKRQAAQLAVRWAWRGDELLVECRGKKNRPVATDSNSRALLIQRLRSAAQEEFLTSLTNKPDQGKVAKLSSLTPVSNAFLRDGSFTRFADWRFIHRARLGVLPLNGAIRWGSGDKRCRVCGYELESIPHVLCHCMPHSNAMQQRHNAVLERLAKAGSRMGTPRVNCRVEGVAEDMAALRPDLVWRDERSKKIVIVDVTIPFENGAEAFEQARSGKIEKYRPLAEALRAKGYNVKLEAFIVGALGSWDPRNEGVLKAVGVSKFYAGLMRRLMVSDTIRWSRDIYVEHVSGIRQFTLPQEAPIN

SEQ ID NO: 4481 - protein, 1296 aa, Zaprionus ornatus
MNSQRVFTFEYPFVGLFRCIVCTEGASRSHGSYGTYAAAYQHITRRHPQVAIKYRCRVCNADMPRGMKQLKAHVAASHPEVAIDAHGMLLETPVTSTAALLPARPPATGQQPNPALSPRTSRLVLGPTPTRARPGSRLLPAPSPVAAGASRPHGSTISPSPTRRTILRAPSTRQTTTPVPQRSPARNAPPARSVPPAPGHMTGPPNQLLRSGTQQPAAPVPSRTLNANTAAPRRTTPTRTGLGVSAPSVASRRPPVRLASTTTAGRERAPRSPSTTTPLRTRTIATQTPPDIIIISPPISNSPAEIATQTPLDIIIISPSPSNSPAESPISSQTPNSPAQPPLETVSNSQILPPLIHPTIPRAAPSRRTIICSMANAAATREELLGAVTSLSEMAAVNQPTHAHSGAGNHSSQIGRGPQTMAAAAKRLQQIYRTNRPRALREVLGQSSPPCELPGRAVYDHLRQMFARVDDERVRPFDWPAWHEPGEDDRADALQSPLTQEEVLARLRRTHSSAPGPDGVTYGNIKKIDPKASMLTAVFNACLRTGHVPNLWKKSKTILIHKKGDRSDLSNWRPLSMGDTIPKLFAAVMADRLTKFLTNGRRLSEEQKGFLQHEGCHEHNFILGQVLEESRRQGKDLVMGWLDLSNAFGSIPHATIMDAIAGMGIPPRIQAILHQLATGATTSVKTIDGMSEEIVINAGVRQGCPASPILFNMAIERVLRKIKTVDAGYTLHGSRISTLAYADDLVLIASSPEEMRSLLRAADDAAIEAGLHFNPGKCATLHLTGKKSVRTTVQTDFLVRGTQIPAMTMGDAYHYLGIPAGLNVDQTPRAVMEAMVGDVRKIDDALLAPWQKIDAVRTFVAPKLDFVLRSSATLRAPLRHLDIAIKKHIKKWLYLPQRASAEVVSTPTSKGGAGILPSAILADVLTIAQAHKMLTCPSVSVSQIAREGLRETVKRRTNREPSGDEMALFLSGSALVGDTASYADAGFWSRVRLATKRQAAQLAVRWAWRGDELLVECRGKKNRPVATDSNSRALLIQRLRSAAQEEFLTSLKNKPDQGKVAKLSSLTPVSNAFLRDGSFTRFADWRFIHRARLGVLPLNGAIRWGSGDKRCRVCGYELESIPHVLCHCMPHSNAMQQRHNAVLERLAKAGSRMGTPRVNCRVEGVAEDMAALRPDLVWRDERSKKIVIVDVTIPFENGAEAFEQARSGKIEKYRPLAEALRAKGYNVKLEAFIVGALGSWDPRNEGVLKAVGVSKFYAGLMRRLMVSDTIRWSRDIYVEHVSGIRQFTLPQEAPIN

SEQ ID NO: 4482 - protein, 1289 aa, Zaprionus indianus
MSSQRVHVFAYPFVGSFRCSICMDAYAGHPTRSLGTYGTYTAAYQHISRRHPQVAIKYRCRICDTDMPRGMKQLKAHVAASHPEIVTDAHGMLVEATATPAASLLAPPPAPSLGQQPHSALSPVASRASARTAPTSRRVAPSPTPSRAEPPRSRPSPARSPVATGARTAVPTPNRLISLRAPAVARTPPTNPQRSPARNAPPAPPAATGQITGTTSRLLRSGNQPSASPAPVRSLTSTTASPRAAAPPRIGLGGSAPSAASRRPPDSLASTATAIRGRTARPTSTTPPPHTRTIATQTPPEIVITPSTLNSPVSPPIDSIIPPTTLNSPTQPPPEISTPPPPRDSPTQRPPTHPDIPRAAPSRRTTICLMANAAATREDLLRAVTGLSEMATANQPTRPTTGVGVPAFQGRRGPQTLADAAKRLQQIYRTNRPRAMREVLGQSSPPCDLPGRDVCAHLRQMFAKDGDERVRPFDWPTWCVPGEEDRADALQSPLTQEEVLARLRRTHSSAPGPDGVTYGSLKKIDPKASMLTAVFNACLRTGHVPDLWKKSRTILIHKKGDRTDLSNWRPLSMGDTIPKLFAAVMADRLTTFLTGGGRLSEEQKGFLQYEGCHEHNFVLGQVLEESRRQGKDLVMGWLDLSNAFGSIPHATIMDAVAGMGIPPRIQALLHQLATGTATTVKTIDGVSEEIPIEAGVRQGCPASPILFNMAVERVLRKIKTVNAGYLLHGSRISTLAYADDLVLIASSPEEMRSLLRAADDAAIEAGLHFNPRKCATLHLTGKKSLRRTVQTDFLVRGTPLPAMTEGDAYDYLGIPVGPDVDQTPRAAMETMVGDIARIDGSLLAPWQKIDAVRTFIAPRLDFVLRSGATLRAPLSHLDTAVKKYIKKWLYLPQRASAEVVFTPMRKGGAGILPSAVLADVLTIAQAHRMMSCPGEVVSQIARGGLREAVKRKINREPSGEEMAHFLSGSVLSGETASYGDAGFWSRVRMATKRQATLLGVRWAWRVGELLVECRGPKNRPVATDSNSRSLLIQRLRSAAQEEFLAILLSKPDQGKVAKLSTLTAVSNAFVHNGSFTRFADWRFIHRARLGVLPLNGAIRWGSGDKRCRVCGYVLESIPHVLCHCMRHSNAMQQRHNTVMERLAKAGSRLGTPRVNGRVEGVVEDLAALRPDLVWRDERSRNIVIVDVTIPFENGAEAFELARGAKIEKYRPLAEALRALGYQVKLEAFIVGALGSWDPKNERVLKALGVSKFYAGLMRKLMVADTIRWSRDIYVEHVSGTRQYTLAAPN

SEQ ID NO: 4483 - protein, 1293 aa, Zaprionus camerounensis
MSSQRVHVFAYPFVGCFRCTICTDGAAEHPTRSLGVYGTYAAAYQHITRRHPQVVIKYRCRVCDTDMPRGMKQLKAHVSTRHPEVIIDAHGMLVEAAATATTPAESLPAPPLPLPTPSPDRQPNPALSSVTPRASVSDRPAPISRRVPSPTPSRAGPPGNRPYPAPSPVVTDASARVGRTVAPTPIRRMAPRAPSTARTPPSVPQRTPARIVPPAPPAMGQITGTTRRPLRSGNQPSISSVPTRPLSSTTAAHRMATPTGLRGSAPSAASRRSPASLASTGTVGRERTPRPPPTSSSPHTRTIATQTTPEIISPPSAINSPARPPPVIVISSPTRNSPVPPPPEITTAPHTLNSPTHPPPTLTDVPRAAPSRTAICLTANAAATREDLLRAVAGLSEMAAANQPTHPPTQGRRGPQTLADAAKRIQQIYRTNRPRAMREVLGQSSPPCDLPGRAVYAHLRQMFSKDSDERVRPFEWPTWCVPGEEDRADALQSPLTQEEVLARLRRTHSSAPGPDGVTYGNLKKIDPKASMLTAVFNACLRTGHVPDLWKKSRTVLIHKKGDRTDLSNWRPLSMGDTIPKLFAAVMADRLTTFLTNGGRLSPEQKGFLQHEGCHEHNFVLGQVLEESRRHGKDLVMGWLDLSNAFGSIPHATIMDAVAGMRIPPRIQTILHQLATGAATTAKTMDGMSEEIPIEAGVRQGCPASPILFNMAIERVLRKIKTINAGYLLYGSRISTLAYADDLVLIASSPEEMRSLLRAADDAAIEAGLNFNPKKCATLHLSGKKSLRRAVQTSFLVRGTPLPAMTEGDAYEYLGIPVGLDVDQTPRAAMEAMVGDITRIDGSLLAPWQKIDAVRTFVAPKLDFVLRSGAILRAPLRHLDTAIKKHIKKWLYLPQRASAEVVFTPLRKGGAGILPSAILADVLTIAQAHRMMSCPGEVVSQIAREGLREAVKRKINREPSGEEMAHFLSGSALSGETASFGDAGFWSRVRMATKRQAVHLAVRWAWREDELLVECRGQRNRPVTIDSNSRALLIQRLRCAAQEEFLTILLSKPDQGKVAKLSSLTPVSNAFIRNGSFTRFADWRFIHRARLGVLPLNGAIRWGSGDKRCRVCGYQLESIPHVLCHCMHHSNAMQQRHNAVMERLAKAGSRLGTPRVNCRVEGVAEDMAALRPDLVWRDERNKNIVIVDVTIPFENGADAFEISRGEKTEKYRPLAEALRAIGYQVKLEAFIVGALGSWDPRNERVLKALGVSRFYAGLMRKLMVADTIRWSRDIYVEHVSGIRQFTLPQGAPST

SEQ ID NO: 4484 - protein, 923 aa, Zaprionus kolodkinae
MANAAATREHLLEAVASLSEMATASIYQPTHSPTGRGEPPSQGRHGPQTLADASKRIQQIYRTNRPRAMREVLGQSSPPCDLPGRAICDHLRRMFQKNTDERVRPFEWPAWCVPGEEERADALQSPLTQEEVLARLRRTHSSAPGPDGVTYGNLKKIDPKASMLTAVFNACLRTGHVPDQWKRSRTILIHKKGDRTDLSNWRPLSMGDSIPKMFAAVMADRLTAFLTNGGRLSSSQKGFLQHEGCHEHNFVLGQVLEDSRRQGKDLIMGWLDLSNAFGSIPHATIMDAVAGMGIPPRIQNIILQMATGATTTAKTMDGMSEEIPIEAGVRQGCPASPILFNMAIERIIRNIKNTNAGYTLYGNRISTLAYADDLVLIASSPEEMRSLLRAADAAAIEAGLHFNPNKCATLHLTGKKSYRRTVQTGFLVRGTPLPAMTEGDAYEYLGIPVGLGVDQTPRAKIEAMIEDISRIDGSLLAPWQKIDAARTFVAPRLDFVLRSGATLRAPLRHLDTAIKKNIKKWLYLPQRASAEVVFTPTNKGGAGILPTATLADVLIIAQAHRMMSCPDGMVSQIAREGLREAVKRKINREPSGEEMAQFLSGSELTGQTASYGDAGLWSRVRMATIREAVHLAVRWAWRGGEILVECRGHKNRPVLTVSNSRSQLIQRLRWAAQEEFLTILTNKPDQGKVAKLSTLTATSNAFLTNGGFLRFADWRFIHRARLGVLPVNGAIRWGSGDKRCRVCGYEQETIPHVLCHCMRHSSAMQQRHNAVMERIAKAGSRLGTPRVNCRVEGVADGMAALRPDLVWRDERSRNVVIVDVAIPFENGADAFAKARGEKVEKYRLLAEALRAQGYRVKLEAFIVGALGSWDPNNEKVLKTLGVSRFYAGLMRKLMVADTIRWSRDIYVEHVSGIRQYTLPPQAP

SEQ ID NO: 4485 - protein, 1302 aa, Drosophila yakuba
MASQRVHVFAYPFVGPFRCSICMDASGMHPTRSLGEYGTYAAAYQHITRRHPQVVITYRCRVCGADMPRGMKQLKAHVAASHPETTTDAHGMLVEAATAPNPALPLPASSPRQSALSPVTTRASERGTPVPTSRRVLCTTPSRAMLPGNRPHPALSPVVTGASGRTGRTVAPIPPTRQMAPRAPTAARTPSPAPQRPPARNVPPAPSGQITGVTRRLLRSGNQPPISSIPPRSPSSSVPARSPISAAPARSPTTIRMATPSRTGLGVSAPSAPSRRTPERPTSTATAGRPGTPRPLSCRSIATQTSPVNSPIQPPPEKVISSPTHNSPTHPPQTPVNSPVQPPSEIVILPPTHNSPTNPPQTHTDIPRAAPSRRAAICLMANAAATREDLLRAATSLSEMAAANLPTRSPTGGGEPTSQGRRGPQALADAAKRIQQIYRTNRPRAMREVLGQSSPPCDLPGRAVYAHLRQMFARNGDERVRPFNWPAWCVPGEEARVDTLVSPLTQEEVLARLRRTHSSAPGPDGVTYGNLKKTDPKASMLTAVFNACLRTGHVPDLWKKSRTVLIHKKGDRTDLSNWRPLSMGDTIPKLFAAVMADRLTAFLTNGGRLSEEQKGFLQHEGCHEHNFVLGQVLEESRRQGKDLVMGWLDLSNAFGSIPHATIMDAVAGMGIPSRIRTIINQLATGAATTAKTIDGMSEEIPIEAGVRQGCPASPILFNIAIERVLRKIKTVNAGYLLYGSRISPLAYADDLVLIASSPEEMRSLLRAADDAAIEAGLHFNPKKCATLHLTGKKSSRRAVQTGFLVRGTPIPAMTEGDAYEYLGIPVGLNVDQTPRAAMEAIVGDIAKIDDSLLAPWQKIDAARTFVAPKLDFVLRSGATLRAPLRHLDTVIKKHIKKWLYLPQRASAEVVYTPLKKGGAGILPSSILADVLTIAQAHRMVSCPGEVVSRIASEGLREAVKRKINREPSGDEMAHFLSGSTLSGETASFGDAGFWSRVRMATKTQAVHLGVRWAWRGGELLVESRGQRNRPVATDSNSRSQLIQRLRCAAQDEFLTILINKPDQGKVAKLSTLTPVSNAFMRDGSFTRFADWRFIHRARLGVLPVNGAIRWGSGDKRCRVCGYQLESVPHVLCHCMHHSNAMQQRHNAVMDRLAKAGSRLGTPRVNCRVEGVAEDMAALRPDLVWRDERSRKIVIVDVTVPFENGAEAFDNARGEKEEKYRPLAEALRAMGYQVKLEAFIVGALGSWDPKNERVLKTLGVSRFYAGLMRRLMVADTIRWSRDIYVEHVSGIRQFTLPSGAPPN

SEQ ID NO: 4486 - protein, 1302 aa, Drosophila yakuba
MASQRVHVFAYPFVGPFRCSICMDASGMHPTRSLGEYGTYAAAYQHITRRHPQVAITYRCRVCGADMPRGMKQLKAHVAASHPETTTDAHGMLVEAATAPNPALPLPASSPRQSALSPVTTRASERGTPVPTSRRVLCTTPSRAMLPGNRPHPALSPVVTGASGRTGRTVAPIPPTRQMAPRAPTAARTPSPAPQRPPARNVPPAPSGQITGVTRRLLRSGNQPPISSIPPRSPSSSVPARSPISAAPARSPTTIRMATPSRTGLGVSAPSAPSRRTPERPTSTATAGRPGTPRPLSCRSIATQTSPVNSPIQPPPEIVISSPTHNSPTHPPQTPVNSPVQPPSEIVILPPTHNSPTHPPQTHTDIPRAAPSRRAAICLMANAAATREDLLRAATSLSEMAAANLPTRSPTGGGEPTSQGRRGPQALADAAKRIQQIYRTNRPRAMREVLGQSSPPCDLPGRAVYAHLRQMFARNGDERVRPFDWPAWCVPGEQARVDTPVSPLTQEEVLARLRRTHSSAPGPDGVTYGNLKKTDPKASMLTAVFNACLRTGHVPDLWKKSRTVLIHKKGDRTDLSNWRPLSMGDTIPKLFAAVMADRLTAFLTNGGRLSEEQKGFLQHEGCHEHNFVLGQVLEESRRQGKDLVMGWLDLSNAFGSIPHATIMDAVAGMGIPSRIRTIINQLATGAATTAKTIDGMSEEIPIEAGVRQGCPASPILFNIAIERVLRKIKTINAGYLLYGSRISTLAYADDLVLIASSPEEMRSLLRAADDAAIEAGLHFNPKKCATLHLTGKKSSRRAVQTGFLVRGTTVPAMTEGDAYEYLGIPVGLNVDQTPRAAMEAIVGDIAKIDDSLLAPWQKIDAARTFVAPKLDFVLRSGATLRAPLRHLDAAIKKHIKKWLYLPQRASAEVVYTPLKKGGAGILPSSILADVLTIAQAHRMVSCPGEVVSRIASEGLREAVKRKINREPSGDEMAHFLSGSTLSGETASFGDAGFWSRVRMATKRQAVHLGVRWAWRGGELLVECRGQRNRPVATDSNSRSQLIQRLRCAAQDEFLTILINKPDQGKVAKLSTLTPVSNAFIRDGSFTRFADWRFIHRARLGVLPLNGAIRWGSGDKRCRVCGYQLESVPHVLCHCMHHSNAMQQRHNAVMDRLAKAGSRLGTPRVNCRVEGVAEDMAALRPDLVWRDERSRKIVIVDVTVPFENGAEAFDNARGEKEEKYRPLAEALRAMGYQVKLEAFIVGALGSWDPKNERVLKTLGVSRFYAGLMRRLMVADTIRWSRDIYVEHVSGIRQFTLPSGAPSN

SEQ ID NO: 4487 - protein, 1187 aa, Drosophila teissieri
MASQRVHVFAYPFVGPFRCSVCMDASGMHPTRSLGEYGTYAAAYQHITRRHPQVVITYRCRVCGADMPRGMKQLKAHVAASHPETTTDAHGMLVEAATAPNPAGPLPAPSPRQSALSPVTTRASERGTPVPTSRRVLCTTPSRAMLPGNRPHPALSPVVTGASGRTGRTVAPIPPKRQMAPRAPTAARTPSPAPQRPPARNVPPAPSGQITGVTRRLLRSGNQPPISSIPPRSPISSAPARSPTTTRTTTPSRTGLGVFAPSAPSRRTPERPTSTATAGRPRTPRPLSCRSIATQTSPVNSPIQPPPEIVISSPTHNSPTHPPQTPVNSPVQPPSEIVILPPTHNSPTHPPQTHTDIPRAAPSRRAAICLMANAAATREDLLRAATSLSEMAAANQPTRSPTGGGEPTSQGRREPQALADAAKRIQQIYRTNRPRAMREVLGQSSPPCDLPGRAVYAHLRQMFARNGDERVRPFDWPAWCVPGEEARVDTLVSPLTQEEVLARLRRTHSSAPGPDGVTYGNLKKTDPKASMLTAVFNACLRTGHVPDLWKKSRTVLIHKKGYRTELSNWRPLSMGDTIPKLFAAVMADRLTAFLTNGGRLSEEQKGFLQHEGCHEHNFVLGQVLEESRRQGKDLVMGWLDLSNAFGSIPHATIMDAVAGMGIPSRIRTIIHQLATGAATTAKTIDGMSEEIPIEAGVRQGCPASPILFNIAIERVLRKIKTINAGYLLYGSRISTLAYADDLVLIASSPEEMRSLLRAADDAAIEAGLHFNPKKCATLHLTGKKSSRRAVQTGFLVRGTPIPAMTEGDAYEYLGIPVGLNVDQTPRAAKGAIVGDIAKIDDSLLALWQKIDAARTFVAPKLDFVLRSGATLRAPLRHLDAAIKKHIKKWLYLPQRASAEVVYTPLKKGGAGILPSSILADVLTIAQAHRMVSCPGEVVSRIAREGLREAVKRKINREPSGDEMAHFLSGSTLSGETASFGDAGFWSRVRMATKRQAVHLWVRWAWRGGELLVECRGQRNRPVATDSNSRSQLIQRLRCAAQDEFLTILLNKPDQGKVAKLSTLTPVSNAFIRDGSSTRFADWRFIHRARLGVLPVNGAIRWGSGDKRCRVCGYQLESVPHVLCHCIHHSNAMQQRHNAVMDRLAKAGSRLGTPRVNCRVEGVVTVPFENGAEAFDSGGARRKKNTAP

SEQ ID NO: 4488 - protein, 927 aa, Zaprionus capensis
MPNAADTREDLMRAAASLSEVAAANQPTRSPTGGGEPTSQGRRGPQTLADAAKRIQQIYRTNRPRAMREALGQSSPPCELPGRAVHAHLRHMFARNGDERVRPFDWPTWCVPGEEDRADALQSPFTQEEVLARLRRTHSSAPGPDGVTYGNLKKTDPKASMLTAVFNACLRTGHVPDLWKKSRTVLIHKKGDRTDLSNWRPLSMGDTIPKLFAAVMADRLTAFLVNGGRFSDEQKGFLQHEGCHEHNFVLGQVLEESRRQGKDLVMGWLDLSNAFGSIPHATILDAVAGMGIPSRIRTIIHQLATGAATTAKTIDGMSEEIPIEAGVRQGCPASPILFNMAIERVLRKIKSINAGYLLYGSRISTLAYADDLVLIASSPEEMRSLLRAADDAAIEASLHFNPKKCATLHLTGKKSLRRAVQTGFLVRRTQIPAMTEGDAYEYLGIPVGLDVDQTHRAAMEAIVGDIAKIDDSLLAPWQKIDAARTFVAPKLDFVLRSGATLRAPLRHLDTAVKRYVKKWLYLPQRASAEVVFTPLRKGGAGILPSSTLADILTIAQAHRMISCPGEVVSQIAREGLRELVKRKINREPSGDEMAHFLSGSSLSGETARFGDAGFWSRVRMATKRQAVHLAVRWAWRGDELLVECRGQRNRPVAIDSSTRTQLIQRLRCAAQDEFLTIFLNKPDQGKAAKLSTLTPVSNAFIRNDSFTRFSDWRFIHRARLGVHPVNGAIRWGSGDKRCRVCGYQLESIPHVLCHCMHHSYAMQQRHNALMERLTKAGSRLGTPRVNCRVEGVAEDMAALRPDLVWRDERSRKIVIVDVTVPFENGAEAFDNARCEKEEKHRPLAEALRALGYQVKLEAFIVGALGSLDPRNERVLKTLGVSKFYAGLMRRLMVADTIRWFRDIYVEHVSGIRQLTLPIGKENICIKY

SEQ ID NO: 4489 - protein, 1321 aa, Drosophila ercepeae
MSGGSDHVFTYPFLGRHRCSFCYGRSTGGNLGEYATYLSAYQHISRRHPEVILKYKCRICEADMPKGMKQLKAHVSKRHPDIAINDNGVMMDPAPEPAVPDTANQNYPANTTSSSQSTAATPSLDTANPRPGASRGRGNGGTQTGNGGSLSTAATPRLDTANPRPGVNRGTSRGLGIGTPHTSRTNNGAISSGISPRIASLSSPRLSVPGSGQTGIRGNLRLSVQRSPGTSAAAGNGAGRFRAVSSPRAGNLRPDLPSPAGPRTANPRTPRLSVSRSPGTPAPPGTGITIRRSGESVIAIGRGSIRPPTIHPRPDAASPTMRSVSTQTDHSLPAVAPIALPSPTIVISPMFLPTDHSEPPIAQPTPTIALFNTPPPPTTQPDLTAQPSGNMLTASSRRAAICQLANRATNAAELLVAVNDLQAMMAAETDPGQSAAARGLTRRSGQGPEPLAAAAKRIQQIYRGNRPRAMREVLKNSSPPCELPGAEVCSFLKRMFSRKEMERASAFDWPSWNGPEEPALAEALSKPFSREEVLRRLRRSHNSAPGPDGVTYGTLKRMDPKASMLLAIYNACLRTGHVPDLWKKSKTILIHKKGDRNDLSNWRPLSMGDTIPKLFAAVLADRLTRFLTNGGRLSLAQKGFLQHEGCHEHNFMLGQVLEDSRRNGNDLILGWLDLSNAFGSIPHATIRDAIAGMGIPSQIQTILEGMTTGAATRAKTVDGMSDEIPIEAGVKQGCPASPILFNMAMERVLRLIQSLNLGYLLHGSRISVLAYADDLVLVANSPEEMRSLLSVAQDAAKDAGLLFNPSKCATLHLTGRKGHRKTMQTSFQIGGVQLPAMKEEDAYNYLGIPVGLDVDQTPRAALEAIGVDIASIDGSLLAPWQKIDAVRTFVAPRLDFMLRGGSLKRTALCHVDKAIKKHVKKWLYLPQRASAEVVYIPPSRGGAGILPTSMLADILLISHGHRMLTCPSAAVSHIAREGLRGTVARNINREPSGEEMAMFLSGSRLGPCGDAGLWSRVRMATRRQSTHLGVRWIWRGGELVVESRGKRNRPLLTDSNSRSQSIKRLRSAAQEEYLAILQGKPDQGKVAILSARTPISNSFIRDGSFVRFADWRFIHRARLGVLPLNGAIRWGDGDKRCRVCGHLLESIPHVLCHCMHHSYAMQRRHDSVVDRLARAGSRLGTPKVNCRVEEATGDLAALRPDLVWRVERNSRIVIVDVTIPFENGAEAFKAAREEKERKYAPLAEALRALGHQVSLEAFIVGALGTWDPQNERVLNVLGVSRFYAGLMRRLMVAETIKWSRDIYVEHVSGTRQFTTVEREAM

SEQ ID NO: 4490 - protein, 1339 aa, Zaprionus tsacasi
MSAPLVHIFAYPFVGYFRCGICFTGHPTRSLGEYGTYAAAYQHITRRHPQVVIKYRCRVCDTEMPRGMKQLKAHVAASHPAVITDAHGMLVQPTATATTTATTPSAPRIPPAARTTTPVPQRRPVVTDPDQTTGAMRRPPNRGNQPPVSPVPARPLDTTLRTPSTLRTPSTLRTPSTLRTPSTLRTPSTLRTPSTTRTATLVPQRSPARNISTPGIGATRRVLRSQNLPYTPSVPARLRNSTAASRTSTTTRTSAAVRTTTSVPQRSPATNAPPAPGQATDTTRRVLRSGNQPPTSSVPLQTLNSTAASPRLAVPTRTDLGVSAPSAVSRRPSERLSSITVAGREGAQRPPSNIPIATQTPPTITLNSPTIINLISPPAITPTHNRPATNNSPPPTHTDIPRAAPSRRASICLMANAAATREDLLGAVAGLSEMAAAHNNQPTRSSTGGGERASQGRRGPQTLADAAKRIQQIYRTNRPRAMREVLGQSSPPCDLPGRAVSDHLKRMFSKLDDERVRPFDWPVWCVPGEEERADALQSPLTQEEVLARLRRTHSSAPGPDGVTYGNLKKIDPKASMLTAVFNACLRTGHVPDLWKRSRTVLIHKKGDRTDLSNWRPLSMGDTIPKLFAAVMADRLTAFLTNGGRLSNEQKGFLQHEGCHEHNFVLGQVLEDSRREGKDLIMGWLDLSNAFGSIPHATIMDAVAGMGIPPRIQSLVNQLATGAATTAKTMDGMSEEIPIEAGVRQGCPASPILFNMAIERVLRKIKTINAGYLLHGSRISTLAYADDLVLIANSPEEMRALLRAADDAAIEAGLHFNPKKCATLHLKGKKSFRRTVQTGFLVRGTPIPAMSEGDAYEYLGIPVGLGVDQTPRAAMEAIVEDIARIDGALLAPWQKIDAVRTFVAPRLDFVLRSGAILRAPLSHLDTVIKRNIKKWLYLPQRASAEVVFTPMRKGGAGILPTAILADALTIAHAHRMMTCPGEVVSQIAREGLREAVRRKINREPSGDEMAHFLSGSALSGETASYGDAGLWSRVRMATKRQAAFLAVRWAWRGGELLVECRGQRNRPVLTDSNSRSQLLQRLRFAAQEEFLTILLNKPDQGKVAKLSSLAPVSNAFIRDGSFTRFADWRFIHRARLGVLPLNGAIRWGPDRDKRCRICGYVLESIPHVLCHCMRHSNPMQYRHNAVMERLAKAGSRMGTPRMNCRVEGVAEGMAALRPDLVWRDERNKRIVIVDVAIPFENGAEAFEVARGAKEEKYRPLAEALRASGYQVKLEAFIVGALGSWDPRNERVLKALGVSKFYAGLMRRLMVADTIRWSRDIYVEHVSGIRQFTLPQEAPTN

SEQ ID NO: 4491 - protein, 1333 aa, Zaprionus kolodkinae
MSAPLVHIFAYPFVGYFRCGICFTGHPTRSLGEYGTYAAAYQHITRRHPQVVIKYRCRVCDTEMPRGMKQLKAHVAASHPAVITDAHGMLVQPTATATTTATTPSAPRIPPAARTTTPVPQRRPVVTDPDQTTGAMRRPPNRGNQPPVSPVPARPLDTTLRTPSTLRTPSTLRTPSTLRTPSTLRTPSTTRTATLVPQRSPARNISTPGIGATRRVLRSQNLPYTPSVPARLRNSTAASRTSTTTRTSATVRTTTSVPQRSPATNAPPAPGQATDTTRRVLRSGNQPPTSSVPLQTLNSTAASPRLAVPTRTDLGVSAPSAVSRRPSERLSSITVAGREGAQRPPSNIPIATQTPPTITLNSPTIINLISPPAITPTHNRPATNNSPPPTHPDIPRAAPSRRASICLMANAAATREDLLGAVAGLSEMAAAHNNQPTRSSTGGGERASQGRRGPQTLADAAKRIQQIYRTNRPRAMREVLGQSSPPCDLPGRAVSDHLKRMFSKLDDERVRPFDWPVWCVPGEEERADALQSPLTQEEVLARLRRTHSSAPGPDGVTYGNLKKIDPKASMLTAVFNACLRTGHVPDLWKRSRTVLIHKKGDRTDLSNWRPLSMGDTIPKLFAAVMADRLTAFLTNGGRLSNEQKGFLQHEGCHEHNFVLGQVLEDSRREGKDLIMGWLDLSNAFGSIPHATIMDAVAGMGIPPRIQSLVNQLATGAATTAKTMDGMSEEIPIEAGVRQGCPASPILFNMAIERVLRKIKTINAGYLLHGSRISTLAYADDLVLIANSPEEMRALLRAADDAAIEAGLHFNPKKCATLHLKGKKSFRRTVQTGFLVRGTPIPAMSEGDAYEYLGIPVGLGVDQTPRAAMEAIVEDIARIDGALLAPWQKIDAVRTFVAPRLDFVLRSGAILRAPLSHLDTVIKRNIKKWLYLPQRASAEVVFTPMRKGGAGILPTAILADALTIAHAHRMMTCPGEVVSQIAREGLREAVRRKINREPSGDEMAHFLSGSALSGETASYGDAGLWSRVRMATKRQAAFLAVRWAWRGGELLVECRGQRNRPVLTDSNSRSQLLQRLRFAAQEEFLTILLNKPDQGKVAKLSSLAPVSNAFIRDGSFTRFADWRFIHRARLGVLPLNGAIRWGPDRDKRCRICGYVLESIPHVLCHCMRHSNPMQYRHNAVMERLAKAGSRMGTPRMNCRVEGVAEGMAALRPDLVWRDERNKRIVIVDVAIPFENGAEAFEVARGEKEEKYRPLAEALRASGYQVKLEAFIVGALGSWDPRNERVLKALGVSKFYAGLMRRLMVADTIRWSRDIYVEHVSGIRQFTLPQEAPTN

SEQ ID NO: 4492 - protein, 1188 aa, Penaeus indicus
MKMNNKEIPLCEKGSAPTKGGSTVISGTSRRPEQSGDQSEAGRHKTTDPVPAAQEGTALIATEPTTRDGRYKWTTEMRIELWKCYKLAEGPNKGYRAKMHKWWKTRKNPRFTEQALASQITIIKKNNLLTPAQRGEDENENAQQTTEDDPENNNTNRSEDRSASGVNNYNNNEDTTNDNNNEISNNPIENNNQNSTHESPNVITQEPETAHIENEQTEENLPPEDRDLLEKLREIYKNTLESRDHEVLPPGKKTENKKLLHVTNKVDALLKFIPTNNITETNKLIYSAAKLILNILDVKLTKKEKGKKDPPWKHRIEKKIQLLRKHLSWIKEIREGRLRDEGKRYEIERKHQLLQNGTAATEEKIKQRIQANTAKIRRYEKRVKGYHQNQQFNNNQRRLYSSLREGNQTEQQRLPPPDPDETKEYWEGIWTTSKEHNKEAEWLKEIKKEKVTSNNNNFTITLTAIRKQLAKTANWKAPGADQVQGYWIKNFRSLHSRITTNLQQIITESQTPEWLTTGRTVLIIKDTALGNRVTNYRPITCLPLMWKLLTGTIYEHLYQHLEENNIIPPEQKGCRKGTRGTKDHLLIDKLILKQAKQKKKDLSMAWIDYKKAFDMVPHSWILECLKLMGTPNNIVNLIKNSMEKWRTMLTAEDKELCEVKIKRGIFQGDSLSPLLFIMTLIPLTTMLNKKKEVYKINKNYKINHLLYMDDLKIFAHNENEITTLVKEVQQFSQDIGMEFGINKCGVLNIKNGRVTHTDGIEVGENIIKNIETDGYKYLGILEYDNIKHEDMKAKIKREYLKRIRAILKSELNGGNTIKAINTWAIPVLRYSAGIIDWTKLEQQKIDRKTRKLMTIHHSLHPRACTARLYLKRSEGGRGLISAEEAIRTECCALGQYIKESTNPILRLAWTNNIIKENEDSKSYKERMTEEKRTEWIEKPLAGQYHRQVQEIQGKNSWNWLKRGEIKKETEGLITSAQDQALRTRVIRARIEGRGGNTKCRMCGQKDETINHITSECSKLAQKEYKRRHDKVATAVHWALCKHHKLPSTADVWYKHEPQAVVEDENTKLLWDQYIQTDQEVQARRPDIVIIRKDKEEFDIIDIAVPYDSRIMEKEREKIEKYQDLKFQMARCWKMKGKVIPIVIGALGAMPPKLDEYLKRIGCDRIHPGLIQKSVLLSSAGILRRILDT

SEQ ID NO: 4493 - protein, 1170 aa, Penaeus indicus
MKMNNKEIPLCEKGSAPTKGGSTFISGTSRRPEQSGDQSEAGRHKTTDPVPAAQEVTALIDTEPTTRDGRYKWTTEMRIELWKCYKLAEGPNRGYRAKMHKWWETRKNPRFTEQALASQITIIKKNNLLTPAQRGEDESENAQQTTEDDPENNNTNRSEDRSASGVNNYNNNEDTTNDNNNEISNNPIENNNQNSTHESPNVITQEPETAHIENEQTEENLPPEDRDLLEKLREIYKNTLESRDHEVLPPGKKTENKKLLHVTNKVDALLKFIPTNNITETNKLIYSAAKLILNILDVKLTKKEKGKKDPPWKHRIEKKIQLLRKHLSWIKEIREGRLRDEGKRYEIERKHQLLQNGTAATEEKIKQRIQANTAKIRRYEKRVKGYHQNQQFNNNQRRLYSSLREGNQTEQQRLPPPDPDETKEYWEGIWTTSKEHNKEAEWLKEIKKEKVTSNNNNFTITLTAIRKQLAKTANWKAPGADQVQGYWIKNFRSFHSRITTNLQQIITESQTPEWLTTGRTVLIIKDTALGNRVTNYRPITCLPLMWKLLTGTIYEHLYQHLEENNIIPPEQKGCRKGTRGTKDHLLINKLILKQAKQKKKDLSMAWIDYKKAFDMVPHSWILECLKLMGTPNNIVNLIKNSMEKWRTMLTAEDKELCEVKIKRGIFQGDSLSPLLFIMTLIPLTTMLNKKKEGYKINKNYKINHVLYMDDLKIFAHNENEITTLVKEVQQFSQDIGMEFGINKCGVLNIKNGRVTHTDGIEVGENIIKNIETDGYKYLGILEYDNIKHEDMKAKIKREYLKRIRAILKSELNGGNTIKAINTWAIPVLRYSAGIIDWTKLEQQKIDRKTRKLMTIYHSLHPRACTARLYLKRSEGGRGLISAEEAIRTECCALGQYIKESTNPILRLAWTNNIIKENEDSKSYKERMTEEKRTEWIEKPLAGQYHCQVQEIQGKNSWNWLKRGEIKKETEGLITSAQDQALRTRVIRARIEGRGGNTKCRMCGQKDETINHITSECSKLAQKEYKRRHDKVATAVHWALCKHHKLPSTADVWYKHEPQAVVEDENTKLLWDQYIQTDQEVQARRPDIVIIRKDKEEFDIIDIAVPYDSRIMEKEREKIEKYQDLKFQMARCWKMKGKVIPIVIGALGAMPPKLDEYLKRIGCDRIHPGLI

SEQ ID NO: 4494 - protein, 644 aa, Penaeus indicus
MWKLLTGTIYEHLYQHLEENNIIPPEQKGCRKGTRGTKDHLLIDKLILKQAKQKKKDLSMAWIDYKKAFDMVPHSWILECLELMGTPNNIVNLIKNSMEKWRTMLTAEDKELCEVKIKRGIFQGDSLSPLLFIMTLIPLTTMLNKKKEGYKINKNYKINHLLYMDDLKIFAHNENEITTLVKEVQQFSQDIGMEFGINKCGVLNIKNGRVTHTDGIEVGENIIKNIETDGYKYLGILEYDNIKHEDMKAKIKREYLKRIRAILKSELNGGNTIKAINTWAIPVLRYSAGIIDWTKLEQQKIDRKTRKLMTIYHSLHPRACTARLYLKRSEGGRGLISAEEAIRTECCALGQYIKESTNPILRLAWTNNIIKENEDSKSYKERMTEEKRTEWIEKPLAGQYHRQVQEIQGKNSWNWLKRGEIKKETEGLITSAQDQALRTRVIRARIEGRGGNTKCRMCGQKDETINHITSECSKLAQKEYKRRHDKVATAVHWALCKHHKLPSTADVWYKHEPQAVVEDENTKLLWDQYIQTDQEVQARRPDIVIIRKDKEEFDIIDIAVPYDSRIMEKEREKIEKYQDLKFQMARCWKMKGKVIPIVIGALGAMPPKLDEYLKRIGCDRIHPGLIQKSVLLSSAGILRRILDT

SEQ ID NO: 4495 - protein, 644 aa, Penaeus indicus
MWKLLTGTIYEHLYQHLEENNIIPPEQKGCRKGTRGTKDHLLIDKLILKQAKQKKKDLSMAWIDYKKAFDMVPHSWILECLELMGTPNNIVNLIKNSMEKWRTMLTAEDKELCEVKIKRGIFQGDSLSPLLFIMTLIPLSTMLNKKKEGYKINKNYKINHLLYMDDLKIFAHNENEITTLVKEVQQFSQDIGMEFGINKCGVLNIKNGRVTHTDGIEVGENIIKNIETDGYKYLGILEYDNIKHEDMKAKIKREYLKRIRAILKSELNGGNTIKAISTWAIPVLRYSAGIIDWTKLEQQKIDRKTRKLMTIYHSLHPRACTARLYLKRSEGGRGLISAEEAIRTECCALGQYIKESTNPILRLAWTNNIIKENEDSKSYKERMTEEKRTEWIEKPLAGQYHRQVQEIQGKNSWNWLKRGEIKKETEGLITSAQDQALRTRVIRARIEGRGGNTKCRMCGQKDETINHITSECSKLAQKEYKRRHDKVATAVHWALCKHHKLPSTADVWYKHEPQAVVEDENTKLLWDQYIQTDQEVQARRPDIVIIRKDKEEFDIIDIAVPYDSRIMEKEREKIEKYQDLKFQMARCWKMKGKVIPIVIGALGAMPPKLDEYLKRIGCDRIHPGLIQKSVLLSSAGILRRILDT

SEQ ID NO: 4496 - protein, 1004 aa, Penaeus indicus
MIIIIMIMMIMMIIIIMTVMIIMIMQILIEFDNNNNNNNNDDNYNRMIITMKYIILTIIIKLIIAMIIMLIIIITIIIVIIIIIIIKFIPTNNITETNKLIYSAAKLILNILDVKLTKKEKGKKDPPWKHRIEKKIQLLRKHLSWIKEIREGRLRDEGKRYEIERKHQLLQNGTAATEEKIKQRIQANTAKIRRYEKRVKGYHQNQQFNNNQRRLYSSLREGNQTEQQRLPPPDPDETKEYWEGIWTTSKEHNKEAEWLKEIKKEKVTSNNNNFTITLTAIRKQLAKTANWKAPGADQVQGYWIKNFRSLHSRITTNLQQIITESQTPEWLTTGRTVLIIKDTALGNRVTNYRPITCLPLMWKLLTGTIYEHLYQHLEENNIIPPEQKGCRKGTRGTKDHLLIDKLILKQAKQKKKDLSMAWIDYKKAFDMVPHSWILECLELMGTPNNIVNLIKNSMEKWRTMLTAEDKELCEVKIKRGIFQGDSLSPLLFIMTLIPLTTMLNKEKEGYKINKNYKINHLLYMDDLKIFAHNENEITTLVKEVQQFSQDIGMEFGINKCGVLNIKNGRVTHTDGIEVGENIIKSIETDGYKYLGILEYDNIKHEDMKAKIKREYLKRIRAILKSELNGGNTIKAINTWAIPVLRYSAGIIDWTKLEQQKIDRKTRKLMTIYHSLHPRACTARLYLKRSEGGRGLISAEEAIRTECCALGQYIKESTNPILRLAWNNNIIKENEDSKSYKERMTEEKRTEWIEKPLAGQYHRQVQEIQGKNSWNWLKRGEIKKETEGLITSAQDQALRTRVIRARIEGRGGNTKCRMCGQKDETINHITSECSKLAQKEYKRRHDKVATAVHWALCKHHKLPSTADVWYKHEPQAVVEDENTKLLWDQYIQTDQEVQARRPDIVIIRKDKEEFDIIDIAVPYDSRIMEKEREKIEKYQDLKFQMARCWKMKGKVIPIVIGALGAMPPKLDEYLKRIGCDRIHPGLIQKSVLLSSAGILRRILDT

SEQ ID NO: 4497 - protein, 948 aa, Penaeus indicus
MIIIIIIIIIIIIIIIINITIIIIITIRKLIIINIIIIMIVLIIITIIIIIIIIIIIIIIMMINIIIIMLILILITIIMIIIIMIIIIILIIITIIITIIIIVMIIVIIIIIIIVIIITMILVIMIIIIIIIIIIIIIIIIMIIIITKVIMIMIIIIIIIIIIIIIIIIIIIINQTEQQRLPPPDPDETKEYWEGIWTTSKEHNKEAEWLKEIKKEKVTSNNNNFTITLTAIRKQLAKTANWKAPGADQVQGYWIKNFRSLHSRITTNLQQIITESQTPEWLTTGRTVLIIKDTALGNRVTNYRPITCLPLMWKLLTGTIYEHLYQHLEENNIIPPEQKGCRKGTRGTKDHLLIDKLILKQAKQKKKDLSMAWIDYKKAFDMVPHSWMGTPNNIVNLIKNSMEKWRTMLTAEDKELCEVKIKRGIFQGDSLSPLLFIMTLIPLTTMLNKKKEGYKINKNYKINHLLYMDDLKIFAHNENEITTLVKEVQQFSQDIGMEFGINKCGVLNIKNGRVTHTDGIEVGENIIKNIETDGYKYLGILEYDNIKHEDMKAKIKREYLKRIRAILKSELNGGNTIKAINTWAIPVLRYSAGIIDWTKLEQQKIDRKTRKLMTIYHSLHPRACTARLYLKRSEGGRGLISAEEAIRTECCALGQYIKESTNPILRLAWTNNIIKENEDSKSYKERMTEEKRTEWIEKPLAGQYHRQVQEIQGKNSWNWLKRGEIKKETEGLITSAQDQALRTRVIRARIEGRGGNTKCRMCGQKDETINHITSECSKLAQKEYKRRHDKVATAVHWALCKHHKLPSTADVWYKHEPQAVVEDENTKLLWDQYIQTDQEVQARRPDIVIIRKDKEEFDIIDIAVPYDSRIMEKEREKIEKYQDLKFQMARCWKMKGKVIPIVIGALGAMPPKLDEYLKRIGCDRIHPGLIQKSVLLSSAGILRRILDT

SEQ ID NO: 4498 - protein, 1390 aa, Ophraella communa
MKMVNTSDLGKKPLPGGNRQGTLGAIAEGDSIRDSGDRALNRRTSVDKIATAEPISGIFTRSEIIGDGSCLFRTVSLFLYGHQNNHKQLREDALEYICQNWSGLSDYLLVEDDRMRNMTKYYAHMAKTTTYGTSLEILVLSETQNLNFHIYRKQRRPRAREITIKEKPTKISKIEHDRTINLLLIGNLESGHFELLTSQTKNSDTAKEIHQLKPDEPCDGQERRGNRSLDQNNEEHATHLETAQNVLLKNSATTKAGRTRQRMTWNDKMNRTVMRCYYIAAQLEKIKTGYRRELHRLFTTTYPELAVAVTEQRLIDQKRVILKNNRLTNHEIHQIKEEVAKELGDKEKIDITHTNAQEQPYVPQTIHKPEHTPSPQTLQKNILNGEGEEIAANNQSQNISEIKEKLTKEMELHLTIWRGSDPTMRDILPRVHLKQNTKSLINIINKEIITKYIDESSTLQDIHMVIYAAASVVLTCNNQKTINQNNPKPNRINIPKWQRRIENNITKLRADIGRITQYMNGNQSKKILKHIENITLEKKQPITETLDTLKQKLTVYSSRLRRYKESNQRKTDNSLFNRNEKLFYKQISNAEKIKVIPPSKEEITEYWRGIWSNPVEHNQKATWIQEEECRQNDTKEQTEYKISTDELTTIIKSTHNWKCPGTDHIHNFWYKQFTSTHKYLAKQINIVLENPELLPQFLTQGKTYIKPKNHKTENPANYRPITYLQTLYKIITSAICKKINHHLQKYNIITEEQKGSRKNSQGCKEQLIMDSVILKQTEKQQRNLKTCFIDYKKAYDSVPHSWLKKVLQIYKIHPTIRHFLSIIMKTWRTNIHLTTDKGHIKTDNINIKTGIFQGDSLSALWFCLCLNPLSNTLNHTEYGFQIKHKKRVEHKINHILYMDDIKIYAPTQTQMRGLLKITEEITKDIGMQFGIDKCKILHMERGKWKDENNTETLNNEILNNMQIEETYKYLGFQQNTKIDHTTIKKQLTKEYKKRLTLVLNTKLNSKHLFKAINTFAMPLLTYSFGIIKWTTTDLENINILTRSQLTKHRKLHPNSCKERITISRREGGRGLIDIHTLHADQIQTLRTYFHNKPTSLHKAITQADKEYTPLNLSQVEPQSKRIQTQQDKVEQWSKKKLHGKHLHIMNSQQINKEETYKWLQIGQLYPETEGFIMAIQDQVIATKNYQKHIMKRTEIDDRCRKCHQQQETIEHIIGGCKILADTAYTERHNIAAKVIHQALASKCNLINIETPYYNYTPEGILENNRFKLYYDITIHTDKTIPHNRPDLTLIDKIKKNTYVIDVAIPIDSNITKKYTEKMDKYTPLAIEIERIWKQEKVKIIPFIISATGITHNAFTLHLNQLQLDSDIHQLIQKAIILKTCNITRNFLRPV

SEQ ID NO: 4499 - protein, 1255 aa, Eueides isabella
METRNRNSRIGPLPGGDRRGTSAAGDGRDSMLASDSRNSDWAGAGDRGDGERSSEATVVRRSSRSRTATPVDDVLQEARANQLATTKTGKPRERMKWDDETNIFIMRTYYYVTKLDTDRTMYCSKLYDNFIQKYPHLKVSSQRIADQRRVIIRNKLIPENVLENIKREVELLLRSENNVQLNNLNPVLPAILEEDMDSILQNSNNQTIDTISDTNNYINSNIFTTTQTLHSQHIIYAEKHTFSDKIDSQYVEKLQNELETALTEYRGTDPTLRPKLPRLKENKKLYKLVHIFNNHILRNYSSIDLTIIELHTLIYCSAVVISRNLGYKIKTQNENSDNNNTTKDHGKPAWQIRIEKDITKLRADIGRVQRYLNNNTSRKLERKVKLIFQDTKVHSKHEYNNVKPEEFLDTLKQKLALKSQRLARYIKSLKRKNDNKLFFRNEKAFYRTLHNNIPRIEQANSPTAETFKNYWADIWKKKDNYNNEATWIDKEEQNWKHIGQMDFLQITTTDLEHVLTKTKNWKAAGVDSIHSFWYKKFSAFHNILASIITRLIRSEENLPDFITRGVTYMIPKSHKTGDPSHYRPITCLPTIYKIITSCITIKISNHISTNNILSEEQKGCRRNHKGCKEQLVIDSVILKHATTHNRNLNLAYIDYRKAFDSVPHTWLIRILQIYKINPMIINFLENIMKTWKTYLHIPNNQTIIKTEQIAIENGIFQGDSLSPLWFCLALNPLSSILNDSNAGYKLTPNTMITHLMYVDDIKLFAKSEQDIKKLLNKTASFSKDICMTFGLDKCRELSLKRGKLSNSRNISGDDVRFDMIEDGDSYKYLGIQQAKGIAHTQIKTELKQKYFQRVNKICKRQLHSKNLMKAINTYAIPILTYSFGIIKWSKTDINRIEIKTRTILTKHSYLHPKSAIERITLQRQEGGRGLIDLDSLWQGQIINLRTFFFEKANDSKIHLAVTETDKKFTPLNLKDKSMQYDSKTDSQNKKIETWRKKELHGRHLHDLENSSIDLEASNKWLKLGSLFPETEGFAIAIQDQVINTRNYKKYILKDPKLKTDRCRKCLKQSETIQHITGACSSLTHSDYCHRHNQVCNIIHQKLAIKHKLTEKKPLPYYKYTPSPVLESTSHKMYFDRTILTDRTIHNNRPDITLIDKEKKIVHFIDVAIPNTHNIQKTITEKIQKYTELKEEIIRIWKMNKVYIVPLVLSSTGFIPKYLHEALKTIDLPDNTYYTMQKSAILNTCRIVRKFLQDAD

SEQ ID NO: 4500 - protein, 1121 aa, Heliconius himera
MYCSKLYDNFVQKYPHLKVSSQRIADQRRVIVRNKLLSENILENIKREVALLLKSDNNEQPNNIETVLPPILEEDSNSILQNPSNQTDTVFINNHAIANIDTPPQTILSPYTISTQENTSSDIIDPQYIEKLKDELETALAEYRGTDPTSRPKLPRLKENKKLYKLVHIFNNNILDGYCSIDLTITELHTLVYCSAIVISRNLGYKIKTQNENSVFNDTMNRRKPAWQIRIEKDIRKLRADIGRLEKKVQQIFKNTKIHSKYEKNNVKPEEFLDTLKQKLALKSQRLARYIKSLKRKKDNKLFSNNEKGFYRTLSNDIAKNQQTILPTAEAFKNYCMNIWKTKEYHNNNANWIGQEEQHWKHIEQMDFLQITTKDLEHVLTKTKNWKAAGVDSIHSFWFKKLSIIHSILAIIITNLIKSKEILPEFITKGITYMIPKSSTTEDPSHYRPITCLPTIYKIITSCITVKINNHILVNNILSEEQKGCRQNHRGCKEQLVIDSVILKHATTHKRNLNLAYVDYRKAFDSVPHSWLIRILQIYKINPVIINFLKNVMKTWKTYLYICNNQTITKTEQIAIENGMFQGDSLSPLWFCLALNPLSNILNNSNGGYKLTPNTVITHLMYVDDIKLFAKSEQDMKKLLNITASFSRDICMTFGLDKCRELYLKRGKLSSSRNISGDVVRFNLMKDGDNYKYLGIQQAKGIAHTQIKTELKQEYFQRVNRICKKQLHSKNLIKAINTYAIPVLTYSFGIIKWSKTDINRIEIKTRTILTKHSYLHPKSAIERMTLQRQIGGRGLIDLNSLWQGQILNLRTFFFDKSNNSKIHLAVTETDNKFTPLNLKDKHITFYSKTDIENKKIETWRRKELHGRHFHDLNNSNIDLEASNKWLQLGSLFPETEGFAIAIQDQVINTRNYKKYILKDPSLKTDRCRKCLKNSETIQHVTGACPSLAQSDYSHRHNQICNIIHQKLAIKHNLTEKKPLPYYQYTPAPVLESTNHKMYFDRAILTDKTVHNNRPDITLIDKENKIVHIIDIAIPNTHNIQKTITEKIQKYTELKEEITRIWKINKVYIVPLVLSSTGIIPKYLHQALKTIDLPNSTYYTMQKCAILNTCRIVRKFLQDDAL

SEQ ID NO: 4501 - protein, 1275 aa, Boloria selene
METRNKRYRIGSLPGGDRRGTSVAGHGRDSMLASDSRNHGWARVGDRGDGDRSSEVTAGRDRRRGITETPTEDVSQEAVAEQPVTTKAGKPRVRMKWDDEINMFIMRTYYYITKLETDKTMYPTKLFDIFTHKYPHLKVNSQRIADQRRVIVRNNLLTTTVIENIKREVRLQLDKEENEELRNLESERYLPAITNSSTQIENHNIIIKEIVKSPNSQNNRETREPKLTQNADMPIDVSTQTTHSPQVFSNQSDITHNETDTSSQYTQTLIEELEIALAEYRGTDPTSRPKLPRLKENKKLYKLVDIFNKDILRNYYSIDSDIVEIHTLIYCSALVMCRQMGYKIKKQNAENVNSYNTQRNKKPEWQIRIEKDIQKLRADIGRLQRYINNDRSRKLEKKVELIFKNTRIHSIHEKDNIRPEEFLDTLKQKLALKSQRLARYIKALKRKNDNKLFLNNEKDFYRTLTNNSTSNDNTELPTVETLENYWTDIWRKREDHNNEAYWIKEEEKKWEHLHQMDFAEVTTSDLEQVMTKMKNWKASGGDGIHIFWYKKLYTLHKILSNIVTDLIKAKAVLPDFVTKGVTYMVPKSNATADPSQYRPITCLPTIYKLITACITFKINTHILTNNILSEEQKGCRQNHKGCKEQLVIDSTIVKQATSRNRNLCLAYIDYKKAFDSVPHSWLIKILQIYKIDPVVINFLDIAMKTWKTTLHLRSNKVNLNTAEINIENGIFQGDSLSPLWFCLALNPLSSLLNNSNAGYKLTTNTSVTHLMYVDDIKIFSKSEKELKKLITITASFSKDICMSFGLDKCRELYLKRGKLSSSRNISVGSIQFDMMEEGETYKYLGIQQAKGITHTEIKTNLRHKYFQRLTRICKKQLNSRNLFKAINTYAIPILTYSFGIIKWSKTDINRIEMKTRTILTKHNYAHPKSAIERMSIKRDKGGRGLIDLNSLWQGQINDLRAFFFEKAKTSGLHCAVTETDDKFTPLNLKDRLIEVNTKPDLQKNKIEAWKKKELHGRHIHDLQQPHISLEASNKWLKLGSFFPETEGFAIAIQDQVINTRNYKKYILKDPNLQTDKCRKCLRQPETIQHITSACTSLTQTDYTHRHNQVCNIIHQKLAIKHKLTEKKPLPYYHYTPTPVMENASYKMYYDRAILTDKTIHNNRPDITLINKINKIVHIIDISVPNTHNLQKTITEKLQKYTELKEEILRIWKMKTVYIVPLVLSSTGVIPKHLLHSLKALDLPETTYYTMQKATILNTCRIVRKFLQEEDVDTVA

SEQ ID NO: 4502 - protein, 1275 aa, Boloria selene
METRNKRYRIGSLPGGDRRGTSVAGHGRDSMLASDSRNHGWARVGDRGDGDRSSEVTAGRDRRRGITETPTEDVSQEAVAEQPVTTKAGKPRVRMKWDDEINMFIMRTYYYITKLETDKTMYPTKLFDIFTHKYPHLKVNSQRIADQRRVIVRNNLLTTTVIENIKREVRLQLDKEENEELRNLESKRYLPAITNSSTQIENHNIIIKEIVKSPNSQNNRETREPKLTQNADMPIDVSTQTTHSPQVFSNQSDITHNETDTSSQYTQTLIEELEIALAEYRGTDPTSRPKLPRLKENKKLYKLVDIFNKDILRNYYSIDSDIVEIHTLIYCSALVMCRQMGYKIKKQNAENVNSYNTQRNKKPEWQIRIEKDIQKLRADIGRLQRYINNDRSRKLEKKVELIFKNTRIHSIHEKDNIRPEEFLDTLKQKLALKSQRLARYIKALKRKNDNKLFLNNEKDFYRTLTNNSTSNDNTELPTVETLENYWTDIWRKREDHNNEAYWIKEEEKKWEHLHQMDFAEVTTSDLEQVMTKMKNWKASGGDGIHIFWYKKLYTLHKILSNIVTDLIKARAVLPDFVTKGVTYMVPKSNATADPSQYRPITCLPTIYKLITACITFKINTHILTNNILSEEQKGCRQNHKGCKEQLVIDSTIVKQATSRNRNLCLAYIDYKKAFDSVPHSWLIKILQIYKIDPVVINFLDIAMKTWKTTLHLRSNKVNLNTAEINIENGIFQGDSLSPLWFCLALNPLSSLLNNSNAGYKLTTNTSVTHLMYVDDIKIFSKSEKELKKLITITASFSKDICMSFGLDKCRELYLKRGKLSSSRNISVGSIQFDMMEEGETYKYLGIQQAKGITHTEIKTNLRHKYFQRLTRICKKQLNSRNLFKAINTYAIPILTYSFGIIKWSKTDINRIEMKTRTILTKHNYAHPKSAIERMSIKRDRGGRGLIDLNSLWQGQINNLRAFFFEKAKTSGLHCAVTETDDKFTPLNLKDRLIEVNTKPDLQKNKIEAWKKKELHGRHIHDLQQPHISLEASNKWLKLGSFFPETEGFAIAIQDQVINTRNYKKYILKDPNLQTDKCRKCLRQPETIQHITSACTSLTQTDYTHRHNQVCNIIHQKLAIKHKLTEKKPLPYYHYTPTPVMENASYKMYYDRAILTDKTIHNNRPDITLINKINKIVHIIDISVPNTHNLQKTITEKLQKYTELKEEILRIWKMKTVYIVPLVLSSTGVIPKHLLHSLKALDLPETTYYTMQKATILNTCRIVRKFLQEEDVDTVA

SEQ ID NO: 4503 - protein, 927 aa, Boloria selene
MCRQMGYKIKKQNAENVNSYNTQRNKKPEWQIRIEKDIQKLRADIGRLQRYINNDRSRKLEKKVELIFKNTRIHSLHEKDNIRPEEFLDTLKQKLALKSQRLARYIKALKRKNDNKLFSNNEKDFYRTLTNNSTSNDNTELPTVETLENYWTDIWRKREDHNNEAYWIKEEEKKWEHLNQMDFAEVTTSDLEQVMTKMKNWKASGGDGIHIFWYKKLYTLHKILSNIVTDLIKARAVLPDFVTKGVTYMVPKSNATADPSQYRPITCLPTIYKLITACITFKINTHILTNNILSEEQKGCRQNHKGCKEQLVIDSTIVKQATSRNRNLCLAYIDYKKAFDSVPHSWLIKILQIYKIDPVVINFLDIAMKTWKTTLHLRNNKVNLNTAEINIENGIFQGDSLSPLWFCLALNPLSSLLNNSNAGYKLTTNTLVTHLMYVDDIKIFSKSEKELKKLITITASFSKDICMSFGLDKCRELYLKRGKLSSSRNISVGSIQFDMMEEGETYKYLGIQQAKGITHTEIKTNLRLKYFQRLTRICKKQLNSRNLFKAINTYAIPILTYSFGIIKWSKTDINRIEMKTRTILTKHNYAHPKSAIERMSIKRDRGGRGLIDLNSLWQGQINNLRAFFFEKAKTSGLHCAVTETDDKFTPLNLKDRLIEVNTKPDLQKNKIEAWKKKELHGRHIHDLQQPHISLEASNKWLKLGSFFPETEGFAIAIQDQVINTRNYKKYILKDPNLQTDKCRKCLRQPETIQHITSACTSLTQTDYTHRHNQVCNIIHQKLAIKHKLTEKKPLPYYHYTPTPVMENASYKMYYDRAILTDKTIHNNRPDITLINKINKIVHIIDISVPNTHNLQKTITEKLQKYTELKEEILRIWKMKTVYIVPLVLSSTGLLLLLPVLIPRYVGSAGRSPAQVSFLNTYFIHSKR

SEQ ID NO: 4504 - protein, 1183 aa, Venturia canescens
MAEVNNLSLGGGEPIGPISPTVVGSTNQGTSDDEEGANRPIDRIMELVEVSVPIDPANTLCEECLQHGQRRGFISLKNLDTHFKASHPRIIVIYICRVCDKRCPSKHSWDCHRPKCPGGQNERRGILKCDHCERYFDTQRGKSQHERHAHPVVRNRAREAEANREWAPQGRPPTRWTPEEFALLKQLNLRFKNSRFPNVEIRAFLPGKTLKQISDKRRDIPNEESEHEDTERPSSSDNEEADDSNNIDTDSTNDLEDQTDLAEAENNDQNENDIDESHVRWLERMEEKIRSIELPEANRFYNEHKQLIEIWDTYKNEQQELELKVNEFISRMTTLLVGDGAQGLPSGTRPSKNKEANERHARTRPMNGNQRRKHKYARCQDMFKNCPKRLAEIAISGDFSFVEARKEPPPVEVIHGLYDQLWGSEGPLDTTFMLEEGQYEQQRINDVLDPINLKEVKDRIARMKSGSAPGIDGIKKGHIAKTGVSELLSVLYNILLMHNIFPEEWSKNRTTLIPKDGKDHKDIKNWRPITVGSMLGRVFAGLIDQKMRKFVKQSIRQKGFTAEDGCRSNTLILDKAIEQMKGVHGGAVMIADVSKAFDTVPHSAITTALKRQRVPRHLIKLVEKMYDNCSTSIKGPNGGRVEIVLKRGVKQGDPLSPLLFNLIMDPIINVLDQEGQGINLEGENLAILAFADDIVLIGRDTERAQAQTRKLDEYLSKLGMSLSAPKCSAFSIVASSKTWYTRDPKLTIRGQAIPAIDADEICRYLGTKFSPWTGLQRGREIPKIMEAIRNTRNLSLKPYQKVALITTYILPHFMYELTASPPAASILKVLDTDIRNHIKEILKLPISTANGFLYTARRDGGLGLIRITRAVQLLTLKSGITTAASNDPILRAIRTNPKFRRKLERSAEVLHIARPEGMEEYEKAKNDTRQQERLSWKNLKSQSHGVNDYMGDKIGNCWLKNPALLKSSRYLDALRLRTNTFGTRVVLSRTKANTETVCRRCGLMPETLGHILGQCVSTKPARIKRHDEIKNLIAERTGRRHVVMVEPTIDEGGTLKKPDLIIKTNNEVFIVDVTVRYEKDSYLADAHKEKVEKYKDTALLMAQRLGTETGRVLPVVVGSRGTLPRRTITALEKLGISKKDRMTIALTALRSSIEIANAFIDYDNGRNHRPANFNIDNAQRMNF

SEQ ID NO: 4505 - protein, 1173 aa, Dusona sp.
MPVGRPPNLKENKMAENKNVSLGGGEPYGPGSPTVDSSTSQGTSDDEDGINRPNERTMESIEVMVPIDPANTACEICLLQRQQRGFINLKDLDAHLKSSHPRIMVLYVCRTCDKRCKTKHSWDCHRPKCPGARDERRGMLKCDHCDRYFDSQRGKSQHERHAHPVERNRAREDAANREWAPQGRPPTRWSQEEVALLKQLNQRFKDHRFPNVEIRAFLPGKTLKQISDKRRDIRDEEPEQINLSSGSSNGSEIFLDAEESNALDAHHSTNPEEQVVINEVVNDETHELWLARMEEYIRSIQLPESNKFKNECIRLTEIWNTHKTEQQELELKINEFISGMTSFLIGVEGNPTTARGRNPPGRGRVRRPLRETRRKNGNQRRKHKYARCQDMFRNCPKRLAEIAISGDFSFVEARKDPPAARKIQDLYDRLWGSEGPQNTAFILGEVQYEQYKINEVLDPIKLKDTKERIVRMKSGSAPGIDGVKKGHIARSGAAELLTILYNILMLHNIFPSEWSKNRTTLIPKDGKDHTDIKNWRPITVGSMLGRVFTGLVDQKLRKFVKQSIRQKGFTAEDGCRSNTLILDKAIEEMKGVMGGVVMVADVSKAFDTVPHKAITTALVRKRVPQHLIKLIERMYENCSTSIKGPGEERVEIVLRRGVKQGDPLSPLLFNLIMDPIIDALDRESQGIRIEEENLAILAFADDIVLVGKDVEAAQRQIEKLDDYLTRLDMSLSAPKCSAFNIVSGNRTWYTRDPKLTVRGENVPAINADEICNYLGTKFSPWTGLQRGKEIPKIMEAIRNTRNLSLKPYQKVNLITTYILPHFMYELTVSPPPATVLKVLDTDIRNQIKEILKMPISTASGFLYTPKRDGGLGLIRITRAVQLLTLKSGIMTAASDDPILRAIRSNTKFQRKLARSAEVLRIEAPAGIEEYERAKNQTRQQERTAWRNLHSQGHGVDDYRGDKLGNCWLKNPALLKSSRYLDALRLRTNTFGTRVVLSRAKANTETVCRRCSLAPETLGHILGQCVSTKPARIKRHDEIKNLIAKRMSRRHTVMVEPTIDEEGTLKKPDLVIKSDNEVIIVDVTVRYEKDSYLADADKEKREKYKNTAQIMAQRLGVEVGRVLPVVVGSRGTLPRKTITTLEKLGINKKDRMTIALTALRSSIEIANAFIDYHE

SEQ ID NO: 4506 - protein, 1068 aa, Venturia canescens
MSEGVSRVSDLARTHFIKSIYKKKKKKKNNYDSQRGKSQHERHAHPVARNRAREAGAIRERIPQGRPPSRWTPEEFTLLKELNERFKNSRFPNVEIRAFLPGKTLKQISDKRRDIPREPEPIDISSSSSSENDTTADSEDSSILENDDENEPNEAEVDDYDDSHAMWRARMEENIRSIKLPESNKFNNECTRLVEAWDTFKRDEQELEAQINEFVSRITTLLVGDEGVQAQPRGSRPATRTRPRQVESRYMNGNQRRKHEYARCQDMFKNCPKRLAEIAISGDFSYVKARKDPPPVRDIRDLYDQLWRVEGPENTGFMLGGGQYEALKINDVLNPIQCKEVKDRIARMKSGSAPGLDGIKKGHIARSGVAELLTILFNILLLHNIFPNEWSKNRTTLIPKDGKNHNDLKNWRPITVGSMLGRVFAGLVDQKMRKFVNQSIRQKGFTAEDGCRSNTLILDKAIEQMKGVHGGVVMVADVSKAFDTVPHKAIRTALIRKRVPHHLITLIEKMYENCTTSIKGPGDGRVEIVLKRGVKQGDPLSPLLFNLIMDPIIDELDRQGQGIYIQDENLSVLAFADDIVLIGKDIERAQTQTNGLDEYLTKLGMSLSAPQCSAFNIVAGNRTWYTRDPGLVVRGENIPEIKADEFSKYLDTKFSPWTGLQRGKEIPKIMEAIRNARNLSLKPYQKVALITTYILPHFMYELTASPPAASILKVLDTDIRNQIKEILKLPLSTATGFLYTPKRDGGLGLIRITRAVQLLTLKSGITTATSNDPILRAIRSNTKFQRKLERSAEVLKIARPGGLDEYERAKNDTRQRERTAWKNLHSQSHGVDDYRGDKFGNCWLKNPALLKSSRFLDALRLRTNTFGTRVVLSRTKANAETVCRRCGLMPETLGHILGQCVATKPARIKRHDEIKNLIAERLSSRHMVMVEPTIDDNGTLKKPDLVIKTDNEAIIVDITVRYEKGSYLADADKEKREKYKTTATLMAQRLGVPTEQVLPVVVGSRGTLPRRTITTLDKLGINKKDRITIALTALRSSIEMANAFIDYNNGQYHRPANLNLDNVQRMSA

SEQ ID NO: 4507 - protein, 1197 aa, Venturia canescens
MPLDDRKIKEINMAGNNNTSLGGGEPIGPISPTVVGSTHQGTSDDEDGENRPIDRIMEIVEVHVPIDPANTMCEECLQHGLRRGFNNLRDMDAHFKSSHPRIVVVYICRACDKRCPSKHSWDCHKPKCPGGREQRAGELKCDHCDRYFDSQRGKSQHERHAHPVARNRAREAGAIRERVPQGRPPSRWTPEEFTLLKELNERFKNARFPNVEIRAFLPTKTLKQISDKRRDIPREPEQINISSSSNSENDTTADSEDSNILEDNDENRDNMIDLAEEHAEPNEAEVADYDDSHAMWQARMDENIRSIKLPESNKFRNECTRLVETWDAFKRDEQELEAQIDEFVSRITTLLVGDEGVQAHPRGSRPTTRTRPRQIEPRYMNGNQRRKHEYARCQDMFKNCPKRLAEIAISGDFSYVKARKDPPSVRDIRDLYDQLWGVEGPENTGFMLGGGQYEALKINDVLNPIQCKEVKDRIARMKSGSAPGLDGIKKGHITRSGVPELLTILFNILLLHSIFPNEWSKNRTTLIPKDGKNHNDIKNWRPITVSSMLGRVFAGLVDQKMRKFVNQSIRQKGFTAEDGCRSNTLILDKAIEQMKGVQGGVVMVADVSKAFDTVPHKSIRTALIRKRVPYHMITLIEKMYENCTTSIKGPGDGRVEIVLKRGVKQGDPLSPLLFNLIMDPIIDELDRQGQGIHIQDENLSVLAFADDIVLIGKDIERAQIQTDRLDEYLTKLGMSLSAPKCSAFNIVSGNRTWYTRDPGLVVRGENIPEIKADEFSKYLGTKFSPWTGLQRGKEIPKIMEAIRNTRHLSLKPYQKVALITTYILPHFMYELTASPPAASILKVLDTNIRNQIKEILKLPLSTATGFLYTPKRVGGLGLIRITRAVQLLTLKSGITTATSNDPILRAIRSNTKFQRKLERSAEVLRIARPGGLDEYERAKNDTRQRERTAWKNLHSQSHGVDDYRGDKFGNCWLRNPAILKSSRFLDALRLRTNTFGTRVVLSRTKANAETVCRRCGLMPETLGHILGQCVATKPARIKRHDEIKNLIAERLSSRHMVMVEPTIDDNGTLKKPDLVIKTDNEAIIVDITVRYEKGSYLADADKEKREKYKTTATLMAQRLGVPTGQVLPVVVGRRGTLPRRTVTTLDKLGITKKDRITIALTALRSSIEMANAFIDYNNGQYHRPANLNLDNVQRMSA

SEQ ID NO: 4508 - protein, 1123 aa, Tomocerus maximus
MSKRKSNMNLNSSGSNAGSVQTPSQETPAVAGTQFACTVPGCVRTFPTVQGLGQHRRRSHVAVANAEININRTNYTWTVEELRILAREEYRLREAGHVNTINQSLFNSIYSDAIENRVEGGEVGAPQVQGRSERSVSKISNVRKQERYKVIYTALEREMANPLPPPSMTTMGNLNQDVDTSVTTDVKTDGQSEIKQYLKSLVGVKGVDEPKNRFDGDRLDDIVERAMNGESFVSDLCTYMKEVIFTFKPPNKTGCAVDELDVAATNRKTLVRKRPPNPDRPKAVGQSSASRKSKEVPAKGRVLQNKTPRGKGGKLNTACRRDTVRKPNEKSLNRRERFRRYQQLYEKNRADLANRILDGTSDIVIEPIPGIAKVWGDSFQECPTGIDTSNMTKASLFRCSVWTHIPIEELEWQRGRMAESASGPDRVSIRALKFIPVTILAKLYNLILLHGELPDLLKLSVTSLVPKVAEPKSASDYRPISVASVLVRLLHKILAARMTASVTLSVKQRAFIPVDGCAENIAILEAIINQAKLHCRSAFILSLDIKNAFGAVAHKAIVDALEKSGAEAALVGYIKNLYSNFVTAIKSGKDASSVMVNRGVLQGDPLSPILFNLVIDQILRALPDEIGCQVSKDVKSNGQGFADDLILCAETEAGAQKLLAIVESLAPPWGLEFNPKKCSYMALVAAGRQKKVKVVTNLNLKLHGETLRGTEAEETWKYLGMFFGARGIQPSRNKLQEYLDRVRKAPLNPQQRMYIVRVHVIPRLLYSLVMAPIHVTTLNRYDRMLRKAVRAILHLPNSVPKAFYYANSAGLGLLELRASVPGMVLTRFERLNESSSPLARAASKSVALLNKVVRAKRCLISHDGIKVTNADQVRKYHLDLLFAKVDGRDLEEVDAVKGVHSWLTDGTKVMSGQAFVESVKVRINAMPTRSRRARGKMLPRNCAAGCQQPETLHHVLQVCPRTHGARIKRHYAVAAGLADFLTKAKYTVKEQPLIRAVPENRKPDLVVIKNNKATIIDIQIAGGQRPLNAAHQAKVAHYSMPEVEKYAKDLGAEIVTCGAVIISYKGLVSQRSWEETLKPLGISKTMLRTLVVRTLERSTYIWHVFNRSTAHVGSRNKRKGSKA

SEQ ID NO: 4509 - protein, 1120 aa, Tomocerus qinae
MSTQKKKINVDSSSRNAGSAQTPSQGTSAVAEAQFACTVAGCERSFNTPQGLGQHKRRAHAAVANAEINIDRKNFAWTEEELRIMAREEYRLKELGHTRTINQSLFNSLYSEACSGGNGGEVGAPQVQGRNQRSVVKIASVRKGARYREIYAALEGEKVNPQPIPSSPTREEMAQSVDTEGNTEGDTTGQRGIKTYLLDLCGESREAEPKNWFDVDRLDDIVKRAVNGECFIDDLCSYLKEIILPFKPNTVDKSEVAATNMPNRPPKVVRKKTRTSDCPRSVGRSSYNDGKVALAKDRVLNIKAPREQGRDPNTACRRKTIRKPNIKSLNRKERLRRYQQLYDKNRSDLANRILDGTSDLVIEPIPGIAKVWGDSFQQFPREINTSNMSTASLFRSSVWSYLPMEELEWQRSKMAESAPGPDRVSVRAVKFIPVAILVKIYNLFLLHGELPEFLKISITSLIPKVAEPKSASDYRPISVASVLVRLFHKVLAARITASVTLSIKQRAFIPVDGCAENIAILEAIISQAKANCRSAFILSLDIKNAFGAVAHQAIVDALAKSGAEVALVKYIGKLYNNFVTDIKSGNEASSVPVNRGVLQGDPLSPILFNLVIDQILRALPDDIGCQVSRDVKSNGQGFADDLILAAETEAGAQKLLSIVESLAPPWGLEFNPKKCSYFALIAAGRQKKLKIVTNLNLKLHGEVLRGIEVEETWKYLGMFFGAQGILPPKTKLQLYLDRVRKAPLNPQQRLYIIKVHVIPRLLYSLVMAPLHVTTLNRYDGMIRKAIRAILHLPHSVPKAFYYANTAGLGLMQLRASVPGMIVTRFERLSDSSSPLARAAAKSAAIISKVARAKRFLISHNGIKIINADQVRKYHRDLLFAKIDGRDLQEVDDVKGVHSWLTDGTKMMSGQAFVESVKIRINALPVRSRRARGKLLPRNCAAGCQQPETLHHVLQVCDRTHGARIKRHDAVAAGLADFLRKGKYTVREEVLIKAVPENRKPDLIAIKDGKATVIDIQISGGQKPLNAAHQAKIARYDIPEVVKYAKDLGAETVTFGALIISYKGLVSRRSWKETLVPLGISKNMLRTLVVRTLECSTYIWHVFSRSTAHAWRRNKRWRSKT

SEQ ID NO: 4510 - protein, 1041 aa, Yoshiicerus persimilis
MEGVTMTLLTMTEEEMKLVAREEYRLRTSEGPKIMRRINMALQESMYKPSSDPSAGTSRDSGRNQRSVSQIQQMRKQPKYKALYEALERERESRRSPPRGPPPDEEAESNIEADKTGMEDIVQFLDLLISGDRDGEPGERFDENRLDGIIRQAIAGEAFVDDLKFYIQDVIQRHPDSGMAQGARELDLVETNDVPPPIVRKKPPKPDRPGGPGIGGPAKGPARKNVVARGKDGKLKSTSRLRKFNNRAQRKRDRFRRYQQLYDKNRSDLANRILSGTDDITVDPIPGICKVWGESFQEKPNEVNTSNMIPASLFIGDVWCHIPAEEVEMLKRKMMDSAPGPDRLTVKSLKSIPSVILSKVYNLILLSGELPVFLKHSATTLIPKGEEQKTASDYRPISVSSTFVRLLHKILAKRITDFVTLDVRQRAFLPVDGCAENIAILEAIINQAKLHRKNAYILNLDIRNAFGSVAHKAIVDALEKSGAQAPLVQYIEQLYTDFTTTIRSGKEECNAQINRGVLQGDPLSPILFNLVIDQILRALPNEIGCHVSKDVKSNGQGFADDLVLAAETEIGAKLLLSTVETLALSWGLVFNPKKCSYFALGASGHQKKVKVLTGLDLKLHGEVIKGVEVQETFKYLGMYFGMHGTLPAKSKLSLYLERVRKAPLNPQQRLYIIRVHVIPRLLYSLTMAPLHTTILNRYDALIRKTVREILHLPHTVPKAFYYAKHAGLGLLHLRASVPHMIVRRFERLSESTSPLARAAARSAAMLNRLARAKKALIMHEGKMIMSANDCERYHLDLLSTKIDGKDLEEVNAVPGVHSWLTDGTKLMTGQAFIESVKIRINALPTRSRRARGKLLPRNCAAGCLQPETLHHVLQVCERTHGARVKRHNAVASGLADFLRKSGHTVVEEPLIKADPENRKPDIVALKDAKATIIDVQICGAQKPLDTYHQGKVKHYSVREVKEYAENLGAKQVEFGALIISYKGIVAKRSYEETLKPLGISKTLLMVLVVRALERGTHIWHVFNKSTAHAWSRRKIRRNIIA

SEQ ID NO: 4511 - protein, 1077 aa, Tomocerus minor
MSETKKKIKLPSSGSNAGSAQTPSQGTSAEAVAEFACTVPDCPRTFPTKIGRGIHVQKGHPAVANDAIDLNRKNYKWTDEELRLLAREEFRLREDGHSKTINQSLFKSLYSGVNTSGGDVSVPDVQGRDQRTVSKIANVRKQARYLALYETLEREMNTQPSPSLTTMEEKESSGEATTDPESLGEIKTYLMTLCKVKKGGELDRFDVERLDAIVERAILGEFLAADLCSYIKEIIFPMKLPKKIWDAVDRMDLAETKGGRPPKPVRKKPHILRPKRVGHSRDGGPAKGRVQKTRTLRGKLSEKPTSASHRRYVRKPNVKSQTRKERFRRYQQLYDKNRSDLANRILDGTSDIVIQPIPGIAKVWGESFQQSPEGIDTSNMKKASLFRCDVWRKISVEELEWQLGRMSESAPGPDRISVGVLKSFPVVILAKIYNLFLLHGKLPDILKQSITSLVPKAAEPKTASDYRPISVASVLVRLFHKVLAARITASVILSVKQRAFIPVDGCAENIAILEAIISQAKQYCRSAFILSLDIKNAFGSVAHKAIIDALENAGAESTLIGYIQELYSGFVTDIKSGKEASSVTVQRGVLQGDPLSPILFNLVIDQILRALPDDIGCQVSRDVKSNGQGFADDLILAAETEAGAQKLLSIVESLAPPWGLEFNPKKCSYMALLASGWQKKLKVVTNLNLKLHGEVLRGTDVEESWKYLGMFFGARGILPSKTKLLEFLDRVRKAPLNPQQRLYIIRVHLIPRLLYGLVMAPLHVTTLNRYDAMIRKTVRAILHLPSSVPKAFFYANNAGLGLMQFRASVPGMIVSRFERLSSSSSELARAAANSAAMLNRVARAKRWLITHEGVTVTNAEQVRNYHVDLLLAKIDGSDLLEVDSVKGVHSWLSDGTKTMSGQAFVESVKIRINAIPVRSRRARGKLLSRNCAAGCQQPETLHHVLQVCHRTHGARVKRHNAVAAGLADFLRKADYTVKEEPLIKAEPENRKPDLIAFKDNKATIIDVQISGGQRPLNSAYQAKVKHYEIPEVVKYAKDLGVESVEFGALIISYKGRKDKHNTNDGTVNSSIIIFSLE

SEQ ID NO: 4512 - protein, 1113 aa, Tomocerus minor
MSENINNNQFNSSGSNAGSAQTPSQGTSAEAVVQFACTVPGCPRTFPTKIGVGLHIKRGHPAAANDAVDLTRKNYKWTDEELRLLAREEFRLREDGHAKTINQSLFNSLYSGVSSSGGDVSAPDVQGRDQRTVSKISNVRKQARYLSLYEDLKKEMNVVPVTNLSPMGNQDNSVEINNETESLKGIKTYLKTLCGIKREGEPKDRFDVERLDGIVERAILGEFLAADLCTYIKEILIPLKLPKKTGCAVGTLDVMETNGDRPPNQVRKKPHVLRPKKVGHSRDGGPAQGRAQKTGALRGKISEKPKSARQRKHIKKPNIKSLTRKERFRRHQQLYDKNRSDLANRILDGTSDIVVQPIPGIAKVWGESFEKCPEGIDTSNMKKASLFRCEVWRRISVEELEWQMGRMTESAPGPDRISVGVLKSIPVAILAKIYNLFLLNGKLPDLLKQSVTSLVPKAAEPKTASDYRPISVASVLVRLFHKVLAARITASVILSVKQRAFIPVDGCAENIAILEAIISQAKQHCRSAIILSLDIKNAFGSVAHKAIIDALENAGAESTLIGYIQELYSGFVTDIKSGKEASSVIVQRGVLQGDPLSPILFNLVIDQILRALPDDIGCQVSCEVKSNGQGFADDLILAAETEAGAQKLLSIVESLAPPWGLEFNPKKCSYFALLASGRQKKLKVVTSLNLKLHGEALRGINIDESWKYLGMYFGARGILPSKTKLLEFLDRVRKAPLNPQQRLYIIRVHLLPRLLYGLVMAPLHVTTLNRYDAMIRKAVRAILHLPNSVPKAFFYANNAGLGLMQLRASVPGMIVTRFERLSSSSSELARAAAKSAAMLNRVARATRRLIIHEGVTVTNAEQVRNYHVDLLLAKVDGSDLLEVDSVKGVHSWLSDGTKTMSGQAFVESVKIRINAIPVRSRRARGKLLPRNCAAGCQQPETLHHVLQVCHRTHGARIRRHNAVAAGLADFLRKVDYTVKEEPLIKSEPENRKPDLIAIKDSKATIIDVQISGGQRPLNSAYQAKVKHYDVPEVVKYAKDLGAESVEFGALIISYKGLVSRRSWEKTLKPLGITKSMLRTLVIRTLERSTYIWHVFSRSTAHAWSRRKPRRSTA

SEQ ID NO: 4513 - protein, 1112 aa, Tomocerus vulgaris
MSETKKKIKLPSSGSNAGSAQTPSQGTSAEAVAEFACTVPDCPRTFPTKIGRGIHVQKGHPAVANDAIDLNRKNYKWTDEELRLLAREEFRLREDGHSKTINQSLFKSLYSGVNTSGGDVSVPDVQGRDQRTVSKIANVRKQARYLALYETLEREMNTQPSPSLTTMEEKESSGEATTDPESLGEIKTYLMTLCKVKKGGELDRFDVERLDAIVERAILGEFLAADLCSYIKEIIFPMKLPKKIWDAVDRMDLAETKGGRPPKPVRKKPHILRPKRVGHSRDGGPAKGRVQKTRTLRGKLSEKPTSASHRRYVRKPNVKSQTRKERFRRYQQLYDKNRSDLANRILDGTSDIVIQPIPGIAKVWGESFQQSPEGIDTSNMKKASLFRCDVWRKISVEELEWQLGRMSESAPGPDRISVGVLKSFPVVILAKIYNLFLLHGKLPDILKQSITSLVPKAAEPKTASDYRPISVASVLVRLFHKVLAARITASVILSVKQRAFIPVDGCAENIAILEAIISQAKQYCRSAFILSLDIKNAFGSVAHKAIIDALENAGAESTLIGYIQELYSGFVTDIKSGKEASSVTVQRGVLQGDPLSPILFNLVIDQILRALPDDIGCQVSRDVKSNGQGFADDLILAAETEAGAQKLLSIVESLAPPWGLEFNPKKCSYMALLASGWQKKLKVVTNLNLKLHGEVLRGTDVEESWKYLGMFFGARGILPSKTKLLEFLDRVRKAPLNPQQRLYIIRVHLIPRLLYGLVMAPLHVTTLNRYDAMIRKTVRAILHLPSSVPKAFFYANNAGLGLMQFRASVPGMIVSRFERLSSSSSELARAAANSAAMLNRVARAKRWLITHEGVTVTNAEQVRNYHVDLLLAKIDGSDLLEVDSVKGVHSWLSDGTKTMSGQAFVESVKIRINAIPVRSRRARGKLLSRNCAAGCQQPETLHHVLQVCHRTHGARVKRHNAVAAGLADFLRKADYTVKEEPLIKAEPENRKPDLIAFKDNKATIIDVQISGGQRPLNSAYQAKVKHYEIPEVVKYAKDLGVESVEFGALIISYKGLVSRRSWEKTLKPLGITKSMLRTLVIRTLERSTYIWHVFSRSTAHAWSRRKPRRSTA

SEQ ID NO: 4514 - protein, 1202 aa, Amphibalanus amphitrite
MNATSDADDSDCHIAGFDPVGGKWIAAKSGPSETRPESQQQSHQQTEELQRCTACPRCDTTNKRKRRIQCKSCNRHWHLTCVRLKRAQADVLPCWWCPECIFTSGSPSQCSAGASNADPSVSAEVSCPPADPVQSPAAATTICDGGDLALKLANLKQTRPVVRRIPRGARIQAAGALATLIETAVGEKNEAAWTRLFLFAFLALHLPSTHQASADSSTLTAKVKRQIFMYMDSDSSLQRASAAAAGPNRNGTVHRKMERHRPAEMTGEILQRKVAAKLSDGDIQGSIRMLASSEEIVQNSTDVAESLKLKHPPAPSDLNMPPPPDAGTQPYFANEAEVRTTINSFDTGSSAGLDGLRPAHLKDLTSRSAGEAGVRLITALTALVNMALSGELPRSARAAFFGAALTALRKSDGGVRPIAVGCTYRRLAAKLALRPLSAEVGEQLRPTQLGYGTQGGCEAAAHATRAFSRSLGTESVMVKIDMKNAFNTVRRDHFLRRVRESAPSMYHLLWQAYSEPTPLFYGTSEISSATGLQQGDPCGPALFSLAVQQVISAATAPFNCWYLDDGTLGGKVSTICADLKELTTDMAKIGLDINPAKCEIILPSTATDEQRVSAVGKIHQLLPRAPVVTDAELTVLGAPITDTAARAVMAKKMEELDLMIERLHHLDAHSAFFLLCNCLWLPKLQYLLRAAPLYEQPDLLQMIDKKLKSSLAGLTNVRFDDASWEQAVLPVRYGGIGLRRTEDVALPSYVASLHCSQLNICALLPTACTASVMQERAKVTEVWQSKAGDRSAPDGEAKNHQRAWDSPLAERHLDSLLSQANQFARARMLSAATPESGAWLRAIPSATIGTLLNNETLRISIALRVGAAVCSPHRCRCGSLADGLGYHSLTCRYSAGRHPRHTALNDVLRRALLSANIPALLEPIGLDRGDGKRPDGMTLYPFSSGMSLVWDATCVSTFADCNIASAAVAAGQAARDAEVRKRYKYADLAQRYRFEPVAFETGGACGPGTRTLIRELGARLTAASGEKRETEWLWQRLSIAVMRGNATSVLLTSGLLPQQVNTTTNTASVKPPAVALATSPAAEAAKSLAGGAPASVPTPTSSYSSGKSYQNDDSGSRWRSSPRRSSSPLRARENELPSPRWLSDVSRRGGGSPHPPKARRPRPSRSVERASSCPDRADENLERLAVRRQSTDAAAVVIAQVQ

SEQ ID NO: 4515 - protein, 1140 aa, Penaeus chinensis
MSNTNVSNNDVNEAGTNLGEGLTSGRCPADRARGPGRHQATVRKKWSTQDNICVMTCYYDSQPEVTGYRQRLYAIWDEKGMAEVTEQRLCDQVRMIQGKGWLTELQLEEIRRNVQEGRIGDAGEVGENDVRAGVAQDQMRFIGEKQFVKMFGERSLDEAEFEGFVSFLEDVNRDGIDTVEKQSILEKILELMRKDDLPNPQNLRRIDRLRLKEKIRLVDEVIESIQTKNITEDNKLVKCGALVIAELLGVKEVKHAKKEEPFWKRRIEAKINALRKDVRLIERWEEGMLRKESHKTRLDRLYRVKRKGYKRAAEELKQRIMAKAATLKRYTNRVKQYRQNRLFQSNQSRFYQEIDGRSCDENVIPDKEETREFWSGIWEKDVRHNESADWIQDVAEEMQGNRQQDIQITATKVRKRIRKIANWKAPGPDGVHGYWIKGFVSLQERIASHLQDCITKGEVPDWMTTGRTALLLKDKSKGNEISNYRPITCLPLMWKLLTGIVADDVYDHLNENYVLPKEQKGCRRNSRGTKDQLLIDKTVLKNCRRRKVGLSMVWIDYRKAYDMLPHSWIKKSMEMCGVAENIVNLLSKSMESWRTILTSGNEELASVNIKRGIFQGDTLSPLLFVIGLIPLSHILRNVSAVYQLGKGNGKKINHLLFMDDLKLYGSNERETERLTNTVRVFSKDICMEFGLNKCAHVTLKAGKLASVGGMELSSGEVIPELESDKGYKYLGIIEVDDIMHAEMKDKIRKEYYRRVRQLTSSKLNGSNVITAVNSRAVSLVRYSAGILKWTKDELNIMDRKTRKIMTMNRMYHPQSDIDRLYIPRNEGGRGHLSIVKCVENEEHSLSLYVDQSEERFLKLVKSEGILPEYEEPVSATKKQRKEKRHRRWKEKQLHGKFLRETEEMRSEDTWGWIRKGYLKKETEGLIFAAQEQALRTNWIKKNIDGQDVSEKCRMCGERDESIAHLIAECKKLVQREYKQRHDSIARIVHLELCQKFELVGEVKWYNRRPESIMENDRVKILWDFNIQTDHVIQHRRPDIVVVYKDKRKCQIIDIAVPGDKRVELKEQEKIDNYSELRREVKKIWNMAQVVVVPVVVGALGVTSKKLNDWLNKLELQSSTEHLQKAALLGTARIVRHVLET

SEQ ID NO: 4516 - protein, 1046 aa, Penaeus chinensis
MIQGKGWLTELQLEEIRRNVQEGRIGDAGEVGENDVRAGVAQDQMMFIGEKQFVEMFGERSLDEAEFEGFVSFLEDVNRDGIDTVEKQSILEKILELMRKDDLPNPQNLRRIDRLRLKEKIRLVDEVIESIQTKNITEDNKLVKCGALVIAELLGVKEVKHTKKEEPFWKRRIEAKMNALRKDVRLIERWEEGMLRKESHKTRLDRLYLVERKGYKRAAEELKQRIMAKAATLKRYANRVKQYRQNRLFQSNQSRLYQELDGRSCDENVIPDKEETRGFWSGIWEKDVRHNESADWIQDVAEEMQGNRQQDIQITATKVRKRIRKIANWKAPGPEGDHGYWIKGFVSLQERIASHLQDCITRGEVPDWMTTGRTALLLKDKSKGNEISNYRPITCLPLMWKLLTGIVADDVYDHLNENDLLPEEQKGCRRNSRGTKDQLLIDKTVLKNCRRRKVGLSMVWIDYRKAYDMLPHSWIKKSMEMCGVAENIVNLLSKSMESWRTILTSGNEELASVNIKRGIFQGDTLSPLLFVIGLIPLSHILRNVSAVYQLGKGNGKKINHLLFMDDLKLYGSNERETERLTNTVRVFSKDICMEFGLNKCAHVTMKAGKIASVGGMELSSGEVIPELESDKGYKYLGILEVDDIMHAEMKNKIRKEYYRRVRQLTSSKLNGSNVITAVNSRAVSLVRYSAGILKWTKDELNIMDRKTRKIMTMNRMYHPQSDIDRLYIPRKEGGRGLISIVECVENEEHSLSLYVDQSEERLLKLVKSEGSLPEYEEPVSATKKQRKEERHRRWKEKQLHGKFLRETEEIRSEDTWGWIRKGYLKKETEGLIFAAQEQALRTNWIKKNIDGQDVSEKCRMCGERDESIAHLIAECKKLVQREYKQRHDSIARIVHLELCQKFELVGEVKWYNHRPESVMENDRVKILWDFNIQTDHVIQHRRPDIVVVYKDERKCQIIDIAVPGDKRVELKEQEKIDNYSELRREVKKIWNRAQVVVVPVVVGALGVTSKKLNDWLNKLELQSSTELLQKAALLGTARIVRHVLET

SEQ ID NO: 4517 - protein, 941 aa, Bolitophila cinerea
MDARWPCICGGAYNTEKGLKQHQRRYCKGHLENANTGQCPICDRSFPTYSGMRLHMAKSHKAEYNAEMEAESIGRKRLWTPEDIEELAAAEVDFDGTGNLLQHLQEVSGRTLEAVKNRRKLQQHKERVRSLKALREAAKEMMDTSDEESSPFVSANTSLADLENDVDPVREHLVTMNRDTLGEEGGRLLDTIDEEDIKTRVDSWLTGIITGLNIRPPRPQRPTRQLPPLTMMSGRRRRAVEYRRAQIAFTENQKQFADQLLTGSWGSTTPTARPTNTEIEAEYAEIFSNPQADDHEITDQRPDIANIYQPVTREEIERAIKESKSGAAGPDGISLKIMKQIPLAHLELLFNIMLFLQHTPACLMTSKTVLLPKLKTDTTLLKNYRPITISSILLRVCNRILSKRLQAVPLHASQRGFSQIDGCFANNATLHTIIKHCRQTIKPYIIVALDLKKAFDSVSLANIQRALKRLNIDEKTTRYVLSNYNSYSTTISCDGETICTLPVRRGVKQGDPLSPFLFNTIMDELLCELGEMTGISVGDISIPCLAYADDLLILANDTQQAKRLLKTCCMFFEKRGLKLNSSKCFSLSTDVVPSKKKLFTRTTSLFKVDGEDVKAVNTEETLSYLGLKFTTDGATKCSNQALSEMLLRIGGAPLKPQQKMAILKTHLIPRYICFYQNPTISNKILREADRLIRTSVKRFLHLPRTCHNAIFYAPMRNGGQGLFCFGDSIPLIMRNRWDRLSGRNEVLDRTLELSQPWMARILALIKPGMESKEQAHLHHASELEQSYSGNGVAQMGNNSACSAFLRFPPVFWSGEDFVRAVQLRHNLLPTVGIPSNPKSERWCRAGCARTESLSHVLQRCPLTHWPRIQRHDFVAKRIQKAAQGAGWCVTTEPHIRGRDGILKKPDLLCVKGDNVVISDVGIHWEGPRSLSVGYNDKIALY

SEQ ID NO: 4518 - protein, 1239 aa, Stegodyphus mimosarum
MATAPRPSTYANAVSSPPRSDQRPDAPAPRTTPPGHLIATERDADVLIVSVSPEESSDIICTDTTIETRNTDAPPPLTTENASTTAALEVPQSPRPSASPPRDPAVADEHLDCPTATCRVGLRIHLLFPVMDTMSCTETTCNRTFHSRTWTHLRHSLCRHLRYAHGIDVEGTTNWCNHCRCMIRTRVALHTCFRERPVITPSGLSHRWKCQTCDFSCQTRGGLLNHQARHRRERQRAAATELPQPPTNTRRRRRRRNPASSPAVDARPVDAASSHTPDSTPGEGTTTSQEPTRQAEALAPANNSDQQSSPPVLQDDTEHELNAPTEEHPSPHEQEDESPLAVFRPRYIEIINSDPNNCWRQFEETLEEMTAEAQRLVKLPSHPANRPSPPPPPTDHKRIQKLYRRNRRKAIRLITEGDSPRCPVDRQSVSEFFSAEATSLPVDSTIFATAECQRPEVDMSPFSSAEISTRLHACESTAPGPDRLSYQHWRSLDPECNVLTPIFNICLKAGRIPDCWKHSASILLFKKGDPTDLQNWRPITLGCTLAKLFTGCIAHRFSSWLLLNNVLSPCQKGFMPYDGVFEHNFILETRIRHAVRTGMDICIASLDVSDAFGSIQHQAILDALLMSGAGAPIVNIVRSLYLDASTQFLCTDGMTDPISITKGVRQGCPLSGLLFNLTINPLVAALQGSSATDHKVQAYADDLLLLASSPSELQSQLTLAADFAEKLSLQFNPVKCYSLHLSGQRPTGTRPTSFSLYNTVFPHLTDGDAGSFLGKPIGYQLPDDQDTLATYMRFGQKIMESALAPWQRIDAMKAFFFPALAFDMRTARLKKGAWSRLDDFLRPLLKKTISVPQEAANDYLYGDSTAGCFGVPMAAEDSDIARVDSAFKLLTSLDPTVRDLAWSDLEGFVAQRIGRPPSPSDLCLFLSASDSGPFRGTSNSSSSTWSTARAASRRLGISWIIDTDHRASLSYKELTLEPSMRRNIFRTLRRAKRAERTERLIALPNQGKAIECASASRASCHFFRAGDYTRFADWRFIHRARLNLVPLNANLRSNPQNKGCRRCNHPLETLPHVVGHCMRYSSSYQGRHNAIAQRIKKAARGRWDIMYENQCIPGTNLRPDLVLVKDSSALILDITVPFDNRLSSFEAARREKEDKYASVANILRSSFTDVRVEAIVVGALGSWDPKNDRIVRRLCPKKYANQMRRLIVSDTIRTTRDIYVEHLTGQRQVPWTERQEPSN

SEQ ID NO: 4519 - protein, 1124 aa, Physarum polycephalum
MARKKLKTVKDDEGEHRGREAVIKSTFNYYSKTAEARPIRDKVKYNFLANCTNTIGEIDPVSLEEILAPISMTETLRKVFQAGNGTAPGIDGIPYDVLKAMPDCVLRVMNKIQNIMISKAWCPDMFVTGDVFLLAKTAEPTEHKHWRPICLQSTIYKILMAIIADRVLHFALKNNIVSEEQKGFCPVSGCFDHSGLLMNIIENFKQSKGKLYILFVDFFNAYGSVDHRRLIQILDACKVPRKIVNFIKATLERSSYRIHTGYGPTDPITLFTGLKQGDPAAPVLFIIFLEALIRTIKKECVGYRFKYPFPHTVPPSSSQEFADDMAATTDEEKEAHLVIDILVEFDKWSNMKANASKCGVIAVESDGEGDVWDIDIKLKINNETIPALKLFQSYKYLGYCQNIMGNQADMVRLIEKKIETNIRVIDTTPVHKWHKITMAQWLLASIPMYFLVAGRIQTSRIRTWNKLSRAVVRKSIGARNMANSVIHLPTSEHGLGITDMEDINDERKLTVFTQFIHSNDKRLRESTIANLRMELGRRRMIIGKGHDVLTVPHAPNRELTRKYTLLHNIEKLLKKYDLTLAIKKEGECWCAFPEGLYSPMHECKECKRKRHEYCDPTVKNGKICALCRLKKKNKRLPEFTLTWKKYQDNRYNWTNHITPMPNPVWELLKEKNEERCKHHVFRHENGVWGVEISRTKEAIKYQVKAGKKTPTIAVLKEIIKIVKEAPRTHIEIKTNLKEVSLALSNWVFGWINKYHRNTTGIEPKYWQQYSEIVSEIKERLPALTIFTFDRLTETNGEIENGVNEEKDIPQPEVGIHNKGEILNPKTISKTVKIKQVNKNREEWTSKRVQGMVGRISQDRTRHTTYFINSTALSPDEKITFMKMSLGLCVTKADKKKWGLIENDTCPLCNKESETICHLLTSCGAMKHLYIARHNAILRIIMKKLVLLENLNMAYCDVEWDTINKVTNNRPDLVIITPTNMNMVPLPFGKNLEADHVTILDVAVSWDERLEERRKHKIEKYEPLLQTLKAEMNRDRGHCDAICIGVMGSISEGTWKTISKQLGLEKKEVDQIMKEINISLAAENTKIWKHLFLFASLPLFLSSSLSLFLSSSFSLPHLPSLSPPF

SEQ ID NO: 4520 - protein, 1142 aa, Branchiostoma floridae
MEDEPVGTDRMETTRVRSGLQTAIDKRKVVMRTCSCGWKKDTTYRGLRIHQGRTNCQGKRQHTRTVSTGQTEEDMGQVSTHRTQDLTSEAPSQGSSSTPLVSVDEVRDRTVPEVPEPRVAPVSQQEVVAGTTPRPQEPAPERREKIKWPRANNKEEWEKLDDDLHLILEQGLKGDVERKLNQFGNLVYSYCSERFGTYKKEGKEAREKQTSRREREIAILVRRRRQLRKRWRKAKQEEKEGLEQLWEEIKVKLKSLRRAERLRRKRKRKAKERNQFFKNPYKFARNLLEEKKGGSLQISREDLELHLKETYSDPQRDEELGSPGYVPRPTEPEIPFDVSLPRWSELETAIKKARAGSAPGPNGVSYQIYKKCPKIGRLLWKLFRVAWKKQCIPSAWRRAGGVLIPKEKVSTDIKQFRNISLLNVEGKLFFSILTKRMITYLLANKYIDTEVQKAGVPGFPGCIEHASTIWQQIQMARRQKEDLHVVWLDLTNAYGAVPHSVIHYALNFFWVPETIRTMIQNYFQDFRVSVTTPQFTTGWQQLEKGIAMGCTISPLLFVLGFEIFLIGARQVAGGIKLPSGQRLPPLRAFMDDVTSILRTAPCTRRVLQRLEELTDWARMRFKPSKSRSLSLRKGKISNRVFSINNQDIPTIQQEPVKSLGRLYTCDIADTKRGQELVKQAVEGLRAIDKCELPGKLKVWCLQSVLLPRLKWPMKMYDIPLSTADQVEGKANSFVRKWLGVPRCLSRTALAGRNKLTLPLTSITEEYKLEKVRTALELKWSQDNAVRAAYRGQKTGRKWNPDEVIDQAVSRLKHRDIVGAVQQGRCGLGWGERTLRWDKATQREKKQLVVDEVKKMMEEERKVKVVGQHQQGAWINWESTVDRKLTWKNMWEKPDLRLSFLIRAAYDILPCPRNLSRWYSKEESCELCGAKKANLKHILSACTTSLKQGRYTWRHNQALRILAATLEEGRKKASSNGVQNQSFIPFVKEGQKAAPASRRRSEGLMSKGGWEMSVDLDNRLVFPRTICETTLRPDIVLWSPAQRTVIIVELTVPWEENVQLAFERKKLKYQDLVQQCVENSWRALLYPVEVGCRGFVGTSITRLCRELSISHKQLVKALSEEVERCSFWLWVKRKDPKWGIKEK

SEQ ID NO: 4521 - protein, 934 aa, Parasteatoda tepidariorum
MSNPETTSPTSPVPVVNDSETILEVREISNPDSEISNSERETPGSTNSVLTPGPDPTSPPSTSLLFDPDETLIAGTIPYYVSELNTDRRLSPEFDSSSPEAYLDAAFDSYLHNQSEAKKSIDLYLHSVLPADSYEYKPSKKTPNENSKKSRMKVVQKKPMSKRTQKRKEFQKIQSLYSKNRRSAADAIFNQTSISDRLDSEDTFNFWRDLLTKVPLDANLRTTLDPTPSNPDDPRHHLLDPIYPDEVRNAKLNWQTAPGPDLITVKHLQNIPVRARCKLFTLFNLLAWIPAVVLNSNTIFIPKGNDVTEPSKLRPISMASILLRQHHKILAERLNSSISYDPFQFGFQKLDGIAMGVELLDKVIRNAKEGFHTTACAFLDFEKAFDSITFESIKNALRFKGIGEDFIHYVLSIYHQAKTTLILRKERSSPIHPTRGVRQGDPLSSCLFLCVMDVVLSQIEPILGVNIGGQKITHIAYADDLILIGQDVRALQRLITQITPTLTSSGLKVNISKSFHFAWKGDGHLKKALFDSRDKIAVYNRSLPRAGLGKEFKYLGVAYTPNGRVECVNLELKTMLTKLELSPLKPQQKLYLLNTHVIPKFLHSLTFSKIHLGYLKKLDAIIRKSLRKILHFPNDSPNSIFYTSVVDGGLGVVCLRWIIPLLALKRASPNKERTRAQLNHLGRSLDTTRKIQQMFKKDLYSRIDGKGLTASNKFKSTNRWISDGTRFISGRDFISCLHLRFEFLFNRSRAARGRPSKSSCCRRGCGQPETLNHILQQCYGTHQPRITRHDALVNYVARSADNRGFTVIKEPTYKFPEGDLKPDLVIFNESHTFIVDAQVINHQFNLDRAHENKTTKYRRLVNHLSGTRAYGPFVTSLTMNWKGIPSEKSISTLLGFNLISKKDIKILSTRTLIGGINIWKRHGTMTAAKQRCKV

SEQ ID NO: 4522 - protein, 1170 aa, Trichogramma pretiosum
MAVEPQQKVVLEGGVFTLLLPVSEDERLVCPACPARRGYSGNSKIENLLRHHKECHADAAVVFQCWGCGYTAPPDKRYPRREVTKHCGDCLPEFHGVRAGLADAARRAGIRGELRGDLSPAERHNNGRRVAAERARTPSPAPTQSGEVSLVPDGDAVASPRREVVSPPAHGGWPPAQQPVIVSPRSLPAFPSSSSGAGMEPDPPPSPPSPDAPIPDPTCPARLLSAAEDPVSQPAVRRRANPEGARRPNPERNAQRELVAELRAITSSDQLEEVMGRVNTFLARLTRRREPAPRRQRNVPPRPVDRTTEAKRLQRLYRLNKKRAAQQILAGPNRACEVNIANTERFFTNLAAHRVGGEEWPNVFDRPGPTPESTEHLCRPIEIGEVHACLGRRANSSPGPDGVTYADLKRADPGSRVLAALFDAVWRTEGVPSCWSESNTILLYKKGDPGDIGNWRPISLADTVPKLFAAVLADRVKEWAVTNAVYSKSQKGFLQFEGCFEHNFILQEILREAKDRKREVVVAWLDLSNAFPSLPHSSIFRALEGHGMPLKVRNVISSLYADMRTRVQVASGSTDPIHIRSGVRQGCPLSPDVFNLTLEVVLRCMANTGEGYTFGDVRFNNFAYADDMALVCDSMGGMRRLLEAAELGATAVGLQFNVAKCATLHIVDGQVQRSSLSIQGQPIPVQDAADAYEHLGIPTGYQVKQTPVNTIRGLLDDAHSIHTSLLAPWQKLDAVSTFLLPRLDFIMQGGKVEKGYLSEADKILKRLARQWLSLPQRASAELIFLPPSQGGGGLIPLADLYDVFTVAHAYRILYCADAAVSNLAKMLLGKTVTERIQRQATNTDMAAYLSSDPGMPRSSARTSFWAQVRASVARLHKKLGLKWRWCSDQETFHLDCGDGAAFSVSPGQKHQASAMLRKCLVEHYAGSLLAKKDQGKSFEVLRKSKVSNHFLRSGRNTRFCDWRFIHRARLNVLPVNSTLRWLTGADKRCRRCGAPSETLPHVLNHCTVHSAARQRRHNNVQDRLVKACARNPCPIRVNHSVQGVHGTLATLRPDIVLRDEIHRRIHIVDVCIPFENRLVAFTEAREEKRTKYAALAEQLRGQGYTVDVDAFVVGALGGWDGRNEAVLNRLGVSSRYAAMMRRFMVSDTIRWGRDIYVEHLSGERQYRQAQ

SEQ ID NO: 4523 - protein, 1136 aa, Nymphalis urticae
MAEEPQSKVLFAGGAFTILLPMRVDEQLLCPVCVGRGRYTGKTKIESFVRHQKSEHPDDDVVFQCWRCGFTAPPNKRYPRKVVSQHCETCLPEIRGIRSGGADVSRRAAIRRELRGNSPPAESPPEHRRIVEETVSAPLGALALYNNTSHHHEPNSTTAQSPILSPMNIVGSPRRRIIDASPQNTAEPPLDPTLNVNRAEPQPIAALPPATPHPARRLNLQRTLVTELDEITAHDQLEAVMGRVNNYLARLTRRKDAGQQNRRNHVPQVADRITEAKNLQRLFRNNRKRAVQKVLEGPNKSCEVNIATTEEYFSGLAAHRVGEVDWPNVFDRGGPTLESTEHLCKPLEIGEVQACLEKRANSAPGPNGITYADLKKADPGARVLTSLFNAVWRTERVPSCWSESNTILLYKKGDPGDISNWRPISLSDTVPKLFAAVLADRIKGWAMANQIYSKSQKGFLQFEGCFEHNFILQEILREAKGRKGEVFVAWLDLSNAFPSVPHSSIFRALEGHGVPLKVRNVIASLYEDMRTRVRVKEGCTNPIHVRSGVRQGCPLSPDVFNLTLEVVLRCIANTGEGYTFEGVRFNNFAYADDMALVADSEDGMRRLLEAAELGATAVGLRFNSAKCATLHIKGGEVQQSLLSIQDEPIPAMSSTDVYEHLGIPTGYQVRQTPLNTIQGLLDDANAIHNSLLAPWQKLDAVSSFLLPRLDFIMQGGCIEKEYLSEADRTIKRLAKQWLSLPQRASAEMVFLPPSQGGGGILPLADLYDIFTVAHAYRILYCADATVSNTAKSLLGKTVSERLRKQASNIDMARYLSGGLDLPRSGARTSFWAKVRTSAVRLNAKIGLRWHWYPEEEVFGLKCGNGGSEFSVMPSQRQQASGTMRRVLIEHYAGALLAKKDQGKCLEVIRKSKVSNHFLRTGRNTRFCDWRFIHRARLNVLPVNAALRWKMGVDKRCRRCGYQSETLPHVLNHCGRHAAARQRRHDNLQNRLVKAARCPGTIFVNRTVRGTQGLAAALRPDIVVRDDVNRRITIVDVCVPFENRLEAFDRARSEKRTKYGALAEQLKSQGYTVTVDAFVVGALGGWDGRNEPVLSRLKISNRYAAMMRRFMVSDTIRWSRDIYVEHVSGQRMYTDGP

SEQ ID NO: 4524 - protein, 1136 aa, Nymphalis urticae
MAEEPQSKVLFAGGAFTILLPMRVDEQLHCPVCVGRGRYTGKTKIESFVRHQKSEHPDDDVVFQCWRCGFTAPPDKRYPRKVVSQHCETCLPEIRGIRSGGADVSRRAAIRRELRGNSPPAESPPEHRRIVEETVSAPLGALALDNNTSHHHEPNSTTAQSPILSPMNIVGSPRRRIIDASPQNTAEPPLDPTLNVNRAEPQPIAALPPATPHPARRLNLQRTLVTELDEITAHDQLEAVMGRVNNYLARLTRRKDAGQQNRRNHVPQVADRITEAKNLQRLFRNNRKRAVQKVLEGPNKSCEVNIATTEEYFSGLAAHRVGEVNWPNVFDRGGPTLESTEHLCKPLEIGEVQACLERRANSAPGPDGITYADLKGADPGARVLTSLFNAVWRTERVPSCWSESNTILLYKKGDPGDISNWRPISLSDTVPKLFAAVLADRIKGWAMANQIYSKSQKGFLQFEGCFEHNFILQEILREAKGRKGEVFVAWLDLSNAFPSVPHSSIFRALEGHGVPLKVRNVIASLYEDMRTRVRVTEGCTNPIHIRSGVRQGCPLSPDVFNLTLEVVLRCIANTGEGYTFEGVRFNNFAYADDMALVADSEEGMRRLLEAAELGATAVGLRFNSAKCATLHIKGGEVQQSLLSIQDEPIPAMSSTDVYEHLGIPTGYQVRQTPLNTIQGLLDDANAIHNSLLAPWQKLDAVSSFLLPRLDFIMQGGCIEKEYLSEADRTIKRLAKQWLSLPQRASAEMVFLPPSQGGGGILPLADLYDIFTVAHAYRILYCADATVSNTAKSLLGKTVSERLRKQASNIDMARYLSGGLDLPRSGARTSFWAKVRTSAVRLNAKIGLRWHWYPEEEVFGLKCGNGGSEYSVMPSQRQQASGTMRRVLIEHYAGALLAKKDQGKCLEVIRKSKVSNHFLRTGRNTRFCDWRFIHRARLNVLPVNAALRWKMGVDKRCRRCGYHSETLPHVLNHCGRHAAARQRRHDNLQNRLVKAARCPGTIFVNRTVRGTQGLAAALRPDIVVRDDVNRRITIVDVCVPFENRLEAFDRARSEKRTKYGALAEQLKSQGYTVTVDAFVVGALGGWDGRNEPVLSRLKISNRYAAMMRRFMVSDTIRWSRDIYVEHVSGQRMYTDGP

SEQ ID NO: 4525 - protein, 1475 aa, Schmidtea mediterranea
MHGYIKCFIVNILCSNIQEEIVAIPRSISNAEMVFCPLNINNSHWILFVYCKKSHSSYFIDPILKNRNNLINKQMALKINIALNRFFNLKIAVSYNPHQNLQYQNNNFDCGPFTCAYAVIISKDLDNFPDGFIDEIRRDVHRNQMEIVGNLIGGAKTKMDMSSFNFKKAIAKTKYSNNNPNTSNILKSQMPCVSSIICKYYENNCKVSVLSAELTLNLIAQNNSFIADNVTFKQFKGIDHILCVIPKFNDWCLFIYSIKLKHSHIFDFNYRTIDDRLIEIGVKITDYLNQFCLNRNVKFLANHHISHSTFLSYDTQYFASHFIVLFEKLVYEIHLDCDKVYDSLSKIKTETCIEISPGLNLINGKITDKIIFEYFNKLKLSDDYILLNKTLCVTISDDCTQYMKDFLNIECMMKANVIFAIISPPKAHELLLVIDYSTEEHYYMSPVTTDLNVVSQHFCYNILIKINELRESNGRAMKTGHCRHDIRGSGLLSKILICAFIRNYALDYSLENINLHEIGKIVNSLVPIVDGSDNVKYEKREKLKAANTLKLNLKQRKEKINQLLIKLSDSDVDEIICTILTNIPRLENLQKKEFREPYLGKNHNKPKKFNNPAEFLTNMKTTVYRILNDQSVKIEPPFQEIINNFTHPDVVPECWDNVLKFSKISDELLELTYISSEEILSNLQKADNSSPGLDNVCYKDLLLLDPECKLLAFLFNRVIQQKSIPTSWKSFKTILIPKPDKNDQYHKVCSWRPIALLSVIYKVFASVLATKLSFWTSSNNLLHIGQKGGSEYEGCIEHNSILSAVVEHSKYSKSSPLEIAWLDIKDAFGSVPHEYMWTLLKHMNVSAEFVNILQLLYTDTSSFYQCNQMQTPDIPIKKGVKQGCPISMILFAIAINPVLEAISLSNTTPFMIGTSSVQVLAYADDIALIATNSSDLQNLIDVAVNTANMIGFEYRPEKCAYIQYPKVETVSEIIVNNVFIKKLASNEFYQYLGVPIGDNNDQSPYEIVSKVIEDTKKIAHSNLYGWQKLKAYKIFLHSRLIFPFRTREIKTSSLADPSRNSRINVNNTSQLRGHLRKILNLPNHSEISYFYNSTENGGAGCIDLLDEYHAQTIVYFFRLLTSTCGYSKTINTFSLLSVTSPRLGIKNPTLSQSFEWINGKESKLNHSGRKTRFHRLRTSIEYFSRVHNIKLLFEIFKQNPSIRITTSLTGTRIILPKLRKTLSKILHSALQDSYLSKWEMSNHSNLLVSAIKLCPLVNKLIFRSDLTDFEWKFIHRARTNTLSTFAKPHKAGEDRLCRRCKSEDETILHVLQTCKINQSLATNRHNACLIKIKDSIKDPELLVVVDHKCSLVPTSSERVDLIITNTEKKTILLVDMKCPIDSVSNFQLVDNLNLEKYAKLKLDIQAVKPDYKVELHTCIMGSLGSIESKTEDLLLKMGVQPNRIIGLMKECAISNIAHSAKIWYFHTKGMLPDFF

SEQ ID NO: 4526 - protein, 1039 aa, Schmidtea mediterranea
MPMRTLSNSWFLFYLDKRRRSAFIIDPLLDDSYSFHSDLANGILKSILNIESIVKDISFPLCRIEYPRSSNNLNTAFYVCHFIRCLNLNTTLTAPDIPLMTLDIKAIIEKFTSSKLPSNDPRKYFPFLKDLEYQIDHDITDLDSPLCEIEAINGNINPKKYFDKIINKKTDVIHLKNKAECELLCVRRFRFKAHQKDELDKIIQNRISYHKPTTENILLAFAKHDCPSSNTDLIEYPSYADTLSNSPADIDNINYIMKNFEASSPGIDKITIADWKTISPKNTFLLSICNHLLRNLTCPIRWKTFRTVLILKPGKNDSSHEASSWRPLAIMDTSYRIFTTLLNNRLLEWIRLGSLISQNQKAIGIPDGCAEHTATIQFIIDFSTRNKTELHIIWLDISDAFGSLPHDLIWNTLTRMGIKQETLTIIKNLYNDVKTFFDCEGTLSDTVPITKGVKQGCPLSMTLFCLSIDYILTNILKSFPFYLHENNISILAYADDIVLISDSFEKINNALLETVKLASLANLKFKPSKSGYFSLNNINDDIFKPSLYDEYLPIINDTNIYKYLGVDFSHKRKQNIDARLDSALTDAEMIFKSYLHPFQKLQAYKTFIHSRHVFTFRNCLIDHMVLDCARNRSTNSRDKQIGYDQKLRHLLRPLFGDKFHLLNNSFFYSSCKLGGLGITSAMDEYLIQSITNITRLHSPNINFFNMVKSELSAARGHNSFEAGLRWINNETSKSFPTASFFSKFQKSASRLKSKFGISVKLRFIENNLKLETVYKDRTAYFDGSNLKNISSDLHKTISLYYAEEWFKLHVQGHIAETIGSSPTASYFINSDTLNDAQFLFLIRSRNNILKLNYTPYRLKHNLNKLCRLCDHNPETQAHILNHCPKTPNAKRNKHERVLQCVSTFLLEKNFNLDIEQSPRYISPPTKLKPDLIIKSNKNELIHILDIKVPYDSVVNFDNARSNNYTKYKKLALQIKHAFKRETTVSALVVGSLGTWDRRNDSILKKIGLTKSEIIDLSRKACHAAIVSSYHIFREHVLTN

SEQ ID NO: 4527 - protein, 1040 aa, Schmidtea mediterranea
MPMRTLSNSWFLFYLDKRRRSAFIIDPLLDDSYSFHSDLANGILKSILNIESIVKDISFPLCRIEYPRSSNNLNTAFYVCHFIRCLNLNTSLTAPDIPLMTLDIKAIIEKFTSSKLPSNDPRKYFPFLKDLEYQIDHDITDLDSPLCEIEAINGNINPKKYFDKIINKKTDVIHLKNKAECELLCVRRFRFKAHQKDELDKIIQNRISHHKPTTENILLAFAKHDCPSSNTDLIEYPSYADTLSNSPTDIDNINYIMKNFETSSPGIDKITIADWKTISPKNTFLLSMCNHLLRNLTCPIRWKTFRTVLILKPGKNDSSHEASSWRPLAIMDTSYRIFTTLLNNRLLEWIRLGSLISQNQKAIGIPDGCAEHTATIQFIIDFSTRNKTELHIIWLDISDAFGSLPHDLIWNTLTRMGIKQETLTIIKNLYNDVKTFFDCEGTLSDTVPITKGVKQGCPLSMTLFCLSIDYILTNILKSFPFYLHENNISILAYADDIVLISDSFEKINNALLETVKLASLANLKFKPSKSGYFSLNNINDDIFKPSLYDEYLPIINDTNIYKYLGVDFSHKRKQNIDARLDSALTDAEMIFKSYLHPFQKLQAYKTFIHSRHVFTFRNCLIDHMVLDCARNRSTNGRDKQIGYDQKLRHLLRPLFGDKFHLLNNSFFYSSCKLGGLGITSAMDEYLIQSITNITRLLNSPNINFFNMVKSELSAARGHNSFEAGLRWINNEASKSFPTASFFSKFQKSASRLKSKFGISVKLRFIENSLKLETIYKDRTVYFDGSNLKNISSDLHKTISLYYAEEWFKLHVQGHIAETIGSSPTASYFINTDTLNDAQFLFLIRSRNNILKLNYTPYRLKHNLNKLCRLCDRDPETQAHILNHCPKTPNAKRNKHERVLQCVSTFLLEKNFNLDIEQSPRYISPPTNLKPDLVIKSSRNDLIHILDIKVPYDSEINFNNARFDNFTKYKKLALQIKHAFKRQTTVSALVIGSLGTWDRHNDPILKKIGLSKSEIINLSRKACYAAIVSSYHIFREHVLTN

SEQ ID NO: 4528 - protein, 941 aa, Schmidtea mediterranea
MTLDIKAIIEKFTSSKLPSNDPRKYFPFLKDLEYQIDHDITDLDSPLCEIEAINGNINPKKYFDKIINKKTDVIHLKNKAECELLCVRRFRFKAHQKDELNKIIQNRISHHKPTTENILLAFAKHDCPSSNTDLIEYPSYADTLSNSPTDIDNINYIMKNFETSSPGIDKITIADWKTISPKNTFLLSMCNHLLRNLTCRIRWKTFRTVLILKPGKNDSSHEASSWRPLAIMDTSYRIFTTLLNNRLLEWIRLGSLISQNQKAIGIPDGCAEHTATIQFIIDFSTCNKTELHIIWLDISDAFGSLPHDLIWNTLTRMGIKQETLTIIKNLYNDVKTFFDCEGTLSDTVPITKGVKQGCPLSMTLFCLSIDYILTNILKSFPFYLHENNISILAYADDIVLISDSFEKINNALLETVKLASLANLKFKPSKSGYFSLNNINDDIFKPSLYDEYLPIINDTNIYKYLGVDFSHKRKQNIDARLDSALTDAEMIFKSYLHPFQKLQAYKTFIHSRHVFTFRNCLIDHMVLDCARNRSTNSRDKQIGYDQKLRHLLRPLFGDKFHLLNNSFFYSSCKLGGLGITSAMDEYLIQSITNITRLLNSPNINFFNMVKSELSAARGHNSFEAGLRWINNETSKSFPTASFFSKFQKSASRLKSKFGILVKLRFIENNLKLETVYKDRTAYFDGSNLKNISSDLHKTISLYYAEEWFKLHVQGHIAETIGSSPTASYFINSDTLNDAQFLFLIRSRNNILKLNYTPYRLKHNLNKLCRLCDHNPETQAHILNHCPKTPNAKRNKHERVLQCVSTFLLEKNFNLDIEQSPRYISPPTKLKPDLIIKSNKNELIHILDIKVPYDSVVNFDNARSNNYTKYKKLALQIKHAFKRETTVSALVVGSLGTWDRRNDSILKKIGLTKSEIIDLSRKACHAAIVSSYHIFREHVLTN

SEQ ID NO: 4529 - protein, 2201 aa, Caenorhabditis nigoni
MSKARRQCYPDSAHGSSESSGTSRRVGSAPKGNSRHGASSHGKLATPAKRPKTARSSSKRVVRSKSGGTTAMRPAGNVLRKGPTKSMDSNKSMANQRPHNNGKRRKAPYVPRDAFHPRAIPERPNNIRAWPNPLSKEEAPHPRQKSSSSGYYEAPQHSRGASCICTGGESTYLYGRCEYPQILSCPHGGTVRSSAAHNRGASCICTGGESTYHYVRCEYPQILSCPHGGTVRSSATHNRGASCSCTGPTASMPRAFSEPLGGKPEVPRESTSLCGRCKYPQVCPNGGTAMSSVPCVVDALRGGGLSIYIGPSFARDPNISIHLNVDRPPPCSDADRTTQCVPWISWRPRAALNASPSLHEHSQTPVQGVAHREANPWPPSSERPQSYAEAVRSVRTDAGTKSSVQRASNEANRHRPQNGKASLQTKAPQKIKNPQNPWWKRKSEHKEAPIPNDKPCNVQKPDTNPQRIASPTPLAPKPPKNGLRSGPKKKDDKGWQVPKKKNTSKVIRVSPIRDPRLIAPATLRGGVEPKDGEVDMDKSGRFPRLAGGGDSVDSTKDIVLKKLDMKLTDDPETVICKMVHPSNDLFRCFADGCKASSEGGYGAEDLKYLTRHIKDAHGMKVQWAYTCGKCSESTKQFGVKATTWLKNHLQLRHGIHAEHRFKMGKGLKVTSAEILERAAPSLSNPRRLAKPMNMTERQMTPEKLEGMIQTRSVAKSLSVLKQSSKKVEDKKDEVPKQQPRIAGIFKPTARRSLANIVAPEKSLNDSTSGRPSIATNDLKDLSASERVKKVREMSSKQARLSIQSRLSLQPAKHRPSNSPESTMDPQSFPKGSEKKETTVIESSSDNETLTSTGYAPLTTANTSGSPAKVMVSDIADVSAEGKPSTVATPPRPPVRTVVSDFADVSAEGKPQSEASPPVTPDQSRPASSGSGDVDDHNKTFAIADWEPIPRKFNTWCLDHETTKEAWLGDETVKWYLEALCEHHAEYEVINPIWWEMYKHQGIMSIKQRLYSSKTNFFAICEKKHWVMLIFDSESIWFANSMAKVPTGLVAQFIRELNRNLKWFKTPVPSQKDAVNCGVHVCLVAKSIVTGTYWYDERDVASFRRSMKKMLVERGYELYSEPPEESKVQLKSDNAINISDDDEIKIIEKSPVRQDDTAHDTSSKESPHPEEPHTKLMELNISPPRATTPEAAKPAANQETPKPKPKAQKAKVKKVPEGKPDELVLKVRQWFESQYNEYVASGKSFQRLEWITNVLTASIQKAAAGDESMLEKISKRSPPPEVLEGEMSTQTERKKRPQGEKRESKATGEGSPMEMYWKNRAKTYNQIIGKESKQCEIPVDTLEKFFTQTTSVTNVPQDVLDKVTSRLPNITVGSWIEDPFTKEEVLAATKKTKDTAPGVDGLRYYHLSWFDPEGEALTRLYNECLVHQRIPSHWKEAETVLLYKGGDESKPENWRPISLMPTIYKLYSSLWNRRIRSIGGVMSKCQRGFQEREGCNESIGILRSAIDVAKGQRKHLSVAWLDLTNAFGSVPHELIEATLKAYGFPKMIVSIIRDMYNGATIRVKSKTDKTDQIAIKSGVKQGDPISPTLFNMCLENIIRKHLKESPGHRCLSTRIKILAFADDMAILADSKEQLQRELTAMDEDCTPLNLIFKPAKCASLIIESGNVKGHATIQLKGQAIRNLSHDDSYKYLGVKTGLESRVSEIDLIKSVITEVDKVNRSPLAPPQKLDCLKTFVLPKMTYMYGNSIPKLTELKAFANMVMRGVKIIHQIPVKGSPLEYVQLPIGKGGLGVACPRITAMTTFLVSTLKKLWSTDNYIRKLYREYLTEVVSCEIGKLKNDVTVADIVSFLSNEVPSKKQAFGFNCFHRIREVCRGLCQNKDSPLALIKLVVKDDNLALMVQATDKSKVKIFEESQVKRLQQLLKNEIVSAQLHRFLTEKKVKSEVVEVILQHPASNKFVRSGGKVSLASHRFVHRARLNLLSCNYNTYDKTVTKACRRCGYPTESQWHILQSCTYGLAKNITARHDAVLHKIKSLVESGDKKDWKMQIDQEIPGFTRLRPDIFLESPDKKTVLIADVACPYEHGKRAMEESWNTKVDKYEKGFQHLTDQGVEVTVLPIVIGSLGTWWSPTSESLLALGIPKSTIRNIIPELCSTVLEHSKNTYWNHIHGEKYNNIPIRYGYQKPTGHQWKKERTNSSKEATE

SEQ ID NO: 4530 - protein, 1100 aa, Caenorhabditis sp.
MYDLYSEAPKLYISRTPTRDEVVYSDDSDIEIITEVKSKSEETSEEVKPSEEAKSDEEKIELESSATVQKLMEIVVASPPKSSQKVLPTQAPSQKKPKAKAASQKGKTRKVPNGKPDELVKKVRQWFEVQFKSYLNDGRSFQRLEWITSMLTAAIQKASAGDVQTVEKIGKRCPPLEVQEGEMSTQTVVKKSQGARREGKSDDRGDDVSLIRSYWDNRSKTFNKIVGKEAKQCEIPIEELEKFFTKTTSVTNVPKKILDKVTSRLPRVEVGEWIEDSFEEKEVAAALKKTKDTAPGVDGLRYHHLNWFDPECRVLAQIYNECRLHRKIPSHWKEAETILLYKGGEESKPENWRPISLMPTIYKLYSSLWNRRIRAVGGVMSSCQRGFQEREGCNESIGILRTAIDVAKGRRGNLSIAWLDLTNAFGSVPHELIESTLIAYGFPETVVQVVKDMYRGASIRVKSKTEKSEQIRIKSGVKQGDPISPTLFNMCLESVIRKHLEESSGHHCLSTKIKLLAFADDMAILAESKEQLQRELTAMDQDCTPLNLIFKPAKCASLVIEYGKVRKEAEVKLKSQSIRNLCEKDTYKYLGVQTGVENRISEMDLIKKVITEMDTLNRSCLTPPQKLDCLKTFVLPKMTYMYGNSIPKLTELKVFANMVMRGVKIIHSIPVKGSPTEYIHLPVGKGGLGVACPRITAMTTFLVSTLKKLWSQDEYIRRLYREYLTEVVQKETGKEKDEVQVTDIAAYLSNEIPANKQAFGFNCFTRIKEVCRGLSQNQDAPLHKLKFIEKHGNLALMVQATEKSKRKVFGEWDVKRLQQLLKNEVITAELHRFLTEKPVKSEVVQVLQQYPACNSFVRSGGKVSLACHRFIHRARMNLLSCNYNTYEKNKSKACRRCGYPTESQGHILQNCTYGMAKLISARHDAVLHKVKTLIESGEMKHWKMRIDQEIPGYTRLRPDIYLESPDKKEVVIADVACPYEHGVKAMQASWDRKVEKYEVGFQHLKDQDIKIKVLPIIIGSLGTWWAPTTKSLEGLGISKSVIRSVIPELCSTVMEHSKNTYWNHIFGDAYTNVPIRYGFEKPNGSKWKKERSNLQKPLAH

SEQ ID NO: 4531 - protein, 1945 aa, Caenorhabditis nigoni
MYCSCGQEPQISIAHVNGNIRKEVNVHIVKCTVSCCKNGQKVYTHIIPCEYTNVPSVDSNHVYSRCVGGSPDNQVFIRDENWRMGTQRWIPKRQEEIPAHFPRNIDLHPASLSPRGSGKQKEDGKDYGRAQRSYAEVVTVRKNPKKVQQLKEKTSSQWKDTVKPGKSLDTHRKDVESKRSRRVTWKDQETQKSHKKSKDPKTPWWARMPLMKVDPKAQSKPGAKSSAPGRVGEAKRAHKNEQGTPEAPRSLEVRKVQKPHQQGNWKGGNTGNRGKIAPATPLTRKQRARMRVQQESKPSVPSRKEASKMEPAPSEIRHSWQKPSKRKTSWWKRDSPTRDPRLVAPAFLPKPGRFSRLVGGGDPEESEPEIVIKKLEMKTTDDPLTVTCKMVHPSKALFRCYAEGCTASSRGGYGAEDLKYLTRHIRDAHGMKVQWAYTCGKCRKSTKEFGVKATNWLKTHLSLQHGIQAEHRFKVGKGLKMTTAEILEKTAPSLSIPKRIMKPVNMMNRQMTPEKLEGMIQTRSVVKTLSVLKESSKKIDDSKEDEAKKDAPKQQPRIAGIFKPTARRSLANMVVPGKAVNDSTGRPSIAKEDLKDLSASERVKKVRELSSKQARLSVQGRLSLQPSKPRPSIVPGTMDRKEDLQVMETKEKMNDDSSSEEETLDKTFGIEDWEPKVKRFNTWCLDHETSKEAWLGDEVLKWYTDWLCSNHKEFKPIDPMWWEMYKREGIMYIKQKIISTVTYLFPICEDEHWILVVFNSSSIWYANTLGYEPRGRVKRFMEEMNRTREWFEVPVPEQKDGWNCGVHVCLMAKSIATNHYWYGEEEVRGFRTAMKQMLKEKRYELYSEPPNRPSVSKTPVNRDAVNSDDSDILEIPPDTPISDDTSPKKDVLEMMQKSEPKSVEKTSEESSTSALPKLMEAVVSPPPVLTPKSDPIDPKCQKSKREKASGQREKQRKVPEGKPDELVLKVREWFQSQFKSYEEEGRSFQRLEWLTSALTAAIQKASAGDEQTVEKIEKRCPPPELQEGEMATQTEIKKRPRVKREAKTPDDDQSIMKSYWENRSKTYNKIIGKEAKQCEIPVGKLEEFFTKTTAVTNVPKEILDKVTSRLPEVDVGKWIEDPFTSKEVAAALKKTKDTAPGVDGLRYHHLNWFDPDCKLMTKVFNECRRHRKIPAHWKEAETILLYKGGDESKPDNWRPISLMPTIYKLYSSLWNRRIRSVGGVMSKCQRGFQEREGCNESIGILRSAIDIAKGMRKHLSVAWLDLTNAFGSVPHELIESTLVAYGFPDMVVSVIRDMYRGASIRVKNRSEKTDPIQIKSGVKQGDPISPTLFNMCLENVIRKHLSESSGHHCLSSNIKLLAFADDMAILAGSKEQLQRELDAMDEQCTPLNLIFKPAKCASLVIEFGKIRQHAELKLKGQPIRNLSEKDSYKYLGVQTGIDSRISEMDLIKSVIKDVDTVNRSGLAPPQKLDCLKTFVLPKMTYMYANSIPKITELKVFANMVMRGVKIIHRIPVKGSPLEYIQLPVGKGGLGVACPKITAMTTFLVSTLKKLWSDDPYIRRLYREYLTVVVQYELGKKKEEVTIQDIASYLSNELPSKKDAFGYNCYSRVKEVCRGLSQNQDSPLHTLKFTVVNHNLALLVQATEASSKKIYTEIDIKRLQKNLKNQLLAAQLHRFMVEKPVKSQIVQVIQQYPQSNSFVRTGGKVSIACHNFVHRARLNMLACNFNTYDKSKSKSCRRCGYMIESQMHILQNCTYGMSNLVTARHDAVLHTVKNMIEKGGKKDWKMKIDEEFPGYTRLRPDIFLQSPDKKEVILADVSVPYENGIEAMHASWNRKVEKYEEGFPHLKDQGIKLTVLPIIIGSLGTWWAPTTDSLVELGISKAAVRKVIPELCSTVLEHSKNIYWKHIFGDAYKQVPIRYGFEKPEGNQWKKERNPLPEALEE

SEQ ID NO: 4532 - protein, 1945 aa, Caenorhabditis nigoni
MYCSCGQEPQISIAHVNGNIRKEVNVHIVKCTVSCCKNGQKVYTHIIPCEYTNVPSVDSNHVYSRCVGGSPDNQVFIRDENWRMGTQRWIPKRQEEIPAHFPRNIDLHPASLSPRGSGKQKEDGKDYGRAQRSYAEVVTVQKNPKKVQQLKEKTSSQWKDTVKPGKSLDTHRKDVESKRSRRVTWKDQETQKSHKKSKDPKTPWWARMPLMKVDPKAQSKPGAKSSAPGRVGEAKRAHKNEQGTPEAPRSLEVRKVQKPHQQGNWKGGNTGNRGKIAPATPLTRKQRARMRVQQESKPSVPSRKEASKMEPAPSEIRHSWQKPSKRKTSWWKRDSPTRDPRLVAPAFLPKPGRFSRLVGGGDPEESEPEIVIKKLEMKTTDDPLTVTCKMVHPSKALFRCYAEGCTASSRGGYGAEDLKYLTRHIRDAHGMKVQWAYTCGKCRKSTKEFGVKATNWLKTHLSLQHGIQAEHRFKVGKGLKMTTAEILEKTAPSLSNPKRIMKPVNMMNRQMTPEKLEGMIQTRSVVKTLSVLKESSKKIDDSKEDEAKKDAPKQQPRIAGIFKPTARRSLANMVVPGKAVNDSTGRPSIAKEDLKDLSASERVKKVRELSSKQARLSVQGRLSLQPSKPRPSIVPGTMDRKEDLLVMETKEKMNDDSSSEEETLDKTFGIEDWEPKVKRFNTWCLDHETSKEAWLGDEVLKWYTDWLCSNHKEFKPIDPMWWEMYKREGIMYIKQKIISTVTYLFPICEDDHWILVVFNSSSIWYANTLGYEPRGRVKRFMEEMNRTREWFEVPVPEQKDGWNCGVHVCLMAKSIATNHYWYGEEEVRGFRTAMKQMLKEKRYELYSEPPNRPSVSKTPVNRDAVNSDDSDILEIPPDTPISDDTSPKKDVLEKMQKSEPKSVEKTSEESSTSALPKLMEAVVSPPPVLTPKSDPIDPKCQKSKREEASGQREKQRKVPEGKPDELVLKVREWFQSQFKSYEEEGRSFQRLEWLTSALTAAIQKASAGDEQTVEKIEKRCPPPELQEGEMATQTEIKKRPRVKREAKTPDDDQSIMKSYWENRSKTYNKIIGKEAKQCEIPVRKLEEFFTKTTAVTNVPKEILDKVTSRLPEVDVGKWIEDPFTSKEVAAALKKTKDTAPGVDGLRYHHLNWFDPDCKLMTKVFNECRRHRKIPAHWKEAETILLYKGGDESKPDNWRPISLMPTIYKLYSSLWNRRIRSVGGVMSKCQRGFQEREGCNESIGILRSAIDIAKGMRKHLSVAWLDLTNAFGSVPHELIESTLVAYGFPDMVVSVIRDMYRGASIRVKNRSEKTDPIQIKSGVKQGDPISPTLFNMCLENVIRKHLSESSGHHCLSSNIKLLAFADDMAILAGSKEQLQRELDAMDEQCTPLNLIFKPAKCASLVIEFGKIRQHAELKLKGQPIRNLSEKDSYKYLGVQTGIDSRISEMDLIKSVIKDVDTVNRSGLAPPQKLDCLKTFVLPKMTYMYANSIPKITELKVFANMVMRGVKIIHRIPVKGSPLEYIQLPVGKGGLGVACPKITAMTTFLVSTLKKLWSDDPYIRRLYREYLTVVVQYELGKKKEEVTIQDIASYLSNELPSKKDAFGYNCYSRVKEVCRGLSQNQDSPLHTLKFTVVNHNLALLVQATEASSKKIYTEIDIKRLQKNLKNQLLAAQLHRFMVEKPVKSQIVQVIQQYPQSNSFVRTGGKVSIACHNFVHRARLNMLACNFNTYDKSKSKSCRRCGYMIESQMHILQNCTYGMSNLVTARHDAVLHTVKNMIEKGGKKDWKMKIDEEFPGYTRLRPDIFLQSPDKKEVILADVSVPYENGIEAMQASWNRKVEKYEEGFQHLKDQGIKLTVLPIIIGSLGTWWAPTTDSLVELGISKAAVRKAIPELCSTVLEHSKNIYWKHIFGDAYKQVPIRYGFEKPEGNQWKKERNPLPEALED

SEQ ID NO: 4533 - protein, 1299 aa, Caenorhabditis nigoni
METKEKMNDDSSSEEETLDKTFGIEDWEPKVKRFNTWCLDHETSKEAWLGDEVLKWYTDWLCSNHKEFKPIDPMWWEMYKREGIMYIKQKIISTVTYLFPICEDDHWILVVFNSSSIWYANTLGYEPRGRVKRFMEEMNRTREWFEVPVPEQKDGWNCGVHVCLMAKSIATNHYWYGEEEVRGFRTAMKQMLKEKRYELYSEPPNRPSVSKTPVNRDAVNSDDSDILEIPPDTPISDDTSPKKDVLEKMQKSEPKSVEKTSEESSTSALPKLMEAVVSPPPVLTPKSDPIDPKCQKSKREEASGQREKQRKVPEGKPDELVLKVREWFQSQFKSYEEEGRSFQRLEWLTSALTAAIQKASAGDEQTVEKIEKRCPPPELQEGEMATQTEIKKRPRVKREAKTPDDDQSIMKSYWENRSKTYNKIIGKEAKQCEIPVRKLEEFFTKTTAVTNVPKEILDKVTSRLPEVDVGKWIEDPFTSKEVAAALKKTKDTAPGVDGLRYHHLNWFDPDCKLMTKVFNECRRHRKIPAHWKEAETILLYKGGDESKPDNWRPISLMPTIYKLYSSLWNRRIRSVGGVMSKCQRGFQEREGCNESIGILRSAIDIAKGMRKHLSVAWLDLTNAFGSVPHELIESTLVAYGFPDMVVSVIRDMYRGASIRVKNRSEKTDPIQIKSGVKQGDPISPTLFNMCLENVIRKHLSESSGHHCLSSNIKLLAFADDMAILAGSKEQLQRELDAMDEQCTPLNLIFKPAKCASLVIEFGKIRQHAELKLKGQPIRNLSEKDSYKYLGVQTGIDSRISEMDLIKSVIKDVDTVNRSGLAPPQKLDCLKTFVLPKMTYMYANSIPKITELKVFANMVMRGVKIIHRIPVKGSPLEYIQLPVGKGGLGVACPKITAMTTFLVSTLKKLWSDDPYIRRLYREYLTVVVQYELGKKKEEVTIQDIASYLSNELPSKKDAFGYNCYSRVKEVCRGLSQNQDSPLHTLKFTVVNHNLALLVQATEASSKKIYTEIDIKRLQKNLKNQLLAAQLHRFMVEKPVKSQIVQVIQQYPQSNSFVRTGGKVSIACHNFVHRARLNMLACNFNTYDKSKSKSCRRCGYMIESQMHILQNCTYGMSNLVTARHDAVLHTVKNMIEKGGKKDWKMKIDEEFPGYTRLRPDIFLQSPDKKEVILADVSVPYENGIEAMQASWNRKVEKYEEGFQHLKDQGIKLTVLPIIIGSLGTWWAPTTDSLVELGISKAAVRKAIPELCSTVLEHSKNIYWKHIFGDAYKQVPIRYGFEKPEGNQWKKERNPLPEALED

SEQ ID NO: 4534 - protein, 1945 aa, Caenorhabditis nigoni
MYCSCGQEPQISIAHVNGNIRKEVNVHIVKCTVSCCKNGQKVYTHIIPCEYTNVPSVDSNHVYSRCVGGSPDNQVFIRDENWRMGTQRWIPKRQEEIPAHFPRNIDLHPASLSPRGSGKQKEDGKDYGRAQRSYAEVVTVQKNPKKVQQLKEKTSSQWKDTVKPGKSLDTHRKDVESKRSRRVTWKDQETQKSHKKSKDPKTPWWARMPLMKVDPKAQSKPGAKSSAPGRVGEAKRAHKNEQGTPEAPRSLEVRKVQKPHQQGNWKGGNTGNRGKIAPATPLTRKQRARMRVQQESKPSVPSRKEASKMEPAPSEIRHSWQKPSKRKTSWWKRDSPTRDPRLVAPAFLPKPGRFSRLVGGGDPEESEPEIVIKKLEMKTTDDPLTVTCKMVHPSKALFRCYAEGCTASSRGGYGAEDLKYLTRHIRDAHGMKVQWAYTCGKCRKSTKEFGVKATNWLKTHLSLQHGIQAEHRFKVGKGLKMTTAEILEKTAPSLSNPKRIMKPVNMMNRQMTPEKLEGMIQTRSVVKTLSLLKESSKKIDDSKEDEAKKDAPKQQPRIAGIFKPTARRSLANMVVPGKAVNDSTGRPSIAKEDLKDLSASERVKKVRELSSKQARLSVQGRLSLQPSKPRPSIVPGTMDRKEDLLVMETKEKMNDDSSSEEETLDKTFGIEDWEPKVKRFNTWCLDHETSKEAWLGDEVLKWYTDWLCSNHKEFKPIDPMWWEMYKRVGIMYIKQKIISTVTYLFPICEDDHWILVVFNSSSIWYANTLGYEPRGRVKRFMEEMNRTREWFEVPVPEQKDGWNCGVHVCLMAKSIATNRYWYGEEEVRGFRTAMKQMLKEKRYELYSEPPNRPRVSKTPVNRDAVNSDDSDILEIPPDTPISDDTSPKKDVLEKMQKSEPKPVEKTSEESSTSALPKLMDAVVSPPPVLTPKSDPIDPKCQKSKREKASGQREKQRKVPEGKPDELVLKVREWFQSQFKSYEEEGRSFQRLEWLTSALTAAIQKASAGDEQTVEKIEKRCPPPELQEGEMATQTEIKKRPRVKREAKTPDDDQSIMKSYWENRSKTYNKIIGKEAKQCEIPVGKLEEFFTKTTAVTNVPKEILDKVTSRLPEVDVGKWIEDPFTSKEVAAALKKTKDTAPGVDGLRYHHLNWFDPDCKLMTKVFNECRRHRKIPAHWKEAETILLYKGGDESKPDNWRPISLMPTIYKLYSSLWNRRIRSVGGVMSKCQRGFQEREGCNESIGILRSAIDIAKGMRKHLSVAWLDLTNAFGSVPHELIESTLVAYGFPDMVVSVIRDMYRGASIRVKNRSEKTDPIQIKSGVKQGDPISPTLFNMCLENVIRKHLSESSGHHCLSSNIKLLAFADDMAILAGSKEQLQRELDAMDEQCTPLNLIFKPAKCASLVIEFGKIRQHAELKLKGQPIRNLSEKDSYKYLGVQTGIDSRISEMDLIKSVIKDVDTVNRSGLAPPQKLDCLKTFVLPKMTYMYANSIPKITELKVFANMVMRGVKIIHRIPVKGSPLEYIQLPVGKGGLGVACPKITALTTFLVSTLKKLWSDDPYIRRLYREYLTVVVQYELGKKKEEVTIQDIASYLSNELPSKKDAFGYNCYSRIKEVCRGLSQNQDSPLHTLKFTVVNHNLALLVQATEASSKKIYTEIDIKRLQKNLKNQLLAAQLHRFMVEKPVKSQIVQVIQQYPQSNSFVRTGGKVSIACHNFVHRARLNMLACNFNTYDKSKSKSCRRCGYMIESQMHILQNCTYGMSNLVTARHDAVLHTVKNMIEKGGKKDWKMKIDEEFPGYTRLRPDIFLQSPDKKEVILADVSVPYENGIEAMQASWNRKVEKYEEGFQHLKDQGIKLTVLPIIIGSLGTWWAPTTDSLVELGISKAAVRKVIPELCSTVLEHSKNIYWKHIFGDAYKQVPIRYGFEKPEGNQWKKERNPLPEALEE

SEQ ID NO: 4535 - protein, 1945 aa, Caenorhabditis nigoni
MYCSCGQEPQISIAHVNGNIRKEVNVHIVKCIVSCCKNGQKVYTHIIPCEYTNVPSVDSNHVYSRCVGGSPDNQVFIRDENWRMGTQRWIPKRQEEIPAHFPRNIDLHPASLSPRGSGKQKEDGKDYGRAQRSYAEVVTVQKNPKKVQQLKEKTSSQWKDTVKPGKSLDTHRKDVESKRSRRVTWKDQETQKSHKKSKDPKTPWWARMPLMKVDPKAQSKPGAKSSAPGRVGEAKRAHKNEQGTPEAPRSLEVRKVQKPHQQGNWKGGNTGNRGKIAPATPLTRKQRARMRVQQESKPSVPSRKEASKMEPAPSEIRHSWQKPSKRKTSWWKRDSPTRDPRLVAPAFLPKPGRFSRLVGGGDPEESEPEIVIKKLEMKTTDDPLTVTCKMVHPSKALFRCYAEGCTASSRGGYGAEDLKYLTRHIRDAHGMKVQWAYTCGKCRKSTKEFGVKATNWLKTHLSLQHGIQAEHRFKVGKGLKMTTAEILEKTAPSLSNPKRIMKPVNMMNRQMTPEKLEGMIQTRSVVKTLSVLKESSKKIDDSKEDEAKKDAPKQQPRIAGIFKPTARRSLANMVVPGKAVNDSTGRPSIAKEDLKDLSASERVKKVRELSSKQARLSVQGRLSLQPSKPRPSIVPGSMDRKEDLLVMETKEKMNDDSSSEEETLDKTFGIEDWEPKVKRFNTWCLDHETSKEAWLGDEVLKWYTDWLCSNHKEFKPIDPMWWEMYKREGIMYIKQKIISTVTYLFPICEDDHWILVVFNSSSIWYANTLGYEPRGRVKRFMEEMNRTREWFEVPVPEQKDGWNCGVHVCLMAKSIATNHYWYGEEEVRGFRTAMKQMLKEKRYELYSEPPNRPSVSKTPVNRDAVNSDDSDILEIPPDTPISDDTSPKKDVLEKMQKSEPKSVEKTSEESSTSALPKLMEAVVSPPPVLTPKSDPIDPKCQKSKREEASGQREKQRKVPEGKPDELVLKVREWFQSQFKSYEEEGRSFQRLEWLTSALTAAIQKASAGDEQTVEKIEKRCPPPELQEGEMATQTEIKKRPRVKREAKTPDDDQSIMKSYWENRSKTYNKIIGKEAKQCEIPVRKLEEFFTKTTAVTNVPKEILDKVTSRLPEVDVGKWIEDPFTSKEVAAALKKTKDTAPGVDGLRYHHLNWFDPDCKLMTKVFNECRRHRKIPAHWKEAETILLYKGGDESKPDNWRPISLMPTIYKLYSSLWNRRIRSVGGVMSKCQRGFQEREGCNESIGILRSAIDIAKGMRKHLSVAWLDLTNAFGSVPHELIESTLVAYGFPDMVVSVIRDMYRGASIRVKNRSEKTDPIQIKSGVKQGDPISPTLFNMCLENVIRKHLSESSGHHCLSSNIKLLAFADDMAILAGSKEQLQRELDAMDEQCTPLNLIFKPAKCASLVIEFGKIRQHAELKLKGQPIRNLSEKDSYKYLGVQTGIDSRISEMDLIKSVIKDVDTVNRSGLAPPQKLDCLKTFVLPKMTYMYANSIPKITELKVFANMVMRGVKIIHRIPVKGSPLEYIQLPVGKGGLGVACPKITAMTTFLVSTLKKLWSDDPYIRRLYREYLTVVVQYELGKKKEEVTIQDIASYLSNELPSKKDAFGYNCYSRVKEVCRGLSQNQDSPLHTLKFTVVNHNLALLVQATEASSKKIYTEIDIKRLQKNLKNQLLAAQLHRFMVEKPVKSQIVQVIQQYPQSNSFVRTGGKVSIACHNFVHRARLNMLACNFNTYDKSKSKSCRRCGYMIESQMHILQNCTYGMSNLVTARHDAVLHTVKNMIEKGGKKDWKMKIDEEFPGYTRLRPDIFLQSPDKKEVILADVSVPYENGIEAMQASWNRKVEKYEEGFQHLKDQGIKLTVLPIIIGSLGTWWAPTTDSLVELGISKAAVRKAIPELCSTVLEHSKNIYWKHIFGDAYKQVPIRYGFEKPEGNQWKKERNPLPEALED

SEQ ID NO: 4536 - protein, 970 aa, Bembecia ichneumoniformis
MSSQPVADLVSCHLCASNKIRFRGTRGLRIHISKVHNSNSQPVASVPYCSTKLEVSAQQAVSNNAIQPTSAPLSASFGEELQLLRVNAPILKRIPRGARIQTANKLTEVINQCVSKNSQASWEDLFKFTYKILHVNATGAKRCNLTSIIKKNIKEYTTDVSSQNFTNDNHKPYSLWKCVERKVFDGNVKGAVRLITSEDSIADNDVDTLRSLQQKHPQPSRPLNIPDKESIEIEQISCDKEDVLHALASFPNGSAAGMDGLSPSHLKDLTAASLGQAAQDLLTALTNLCNMMLQGKVTDDFTPYIYGASLIALKKKEGGIRPIAIGSSIRRICSKIVCKKINVKLSSLFQPVQLGFGTKGGCEVAVHAARSFLDSRRDPHVFIKLDVSNAFNSIERDSLLGAVREHIPETYKYLHQCYSKSSQLLFRQTVIDSAVGCQQGDPLGPAIFSLGILDTIKKIKSNLNIWYLDDGALGGDYETAKNDCIKIIHNFNHLGLKLNFTKCEIYLCDSFSEIEKKSILNVFNSILPGVKQIKKENFFLLGAPITAESITPLIEDKQNKIELFTNRLININRHVALFLLRHCLSIPKLTYFLRCSPIWMHKEGLQAMDNSIKSCVQLLLNSDINGLSWNQFTLPVSFGGVGVRRIEDVALPAFLSSCHAGLDLIGKIVNPSLGEFEVSHMDDALDRWKSLCPDTDFPSPRGSQRGWDIPLIKKAFSEILDATTGADRARVLASAESEAGAWLNAFPSPHLGTLLDTNSIRIAVSLRVGARVCHPHMCVCGSSVDSYGHHGLSCIRSAGRRTRHSSINNIIKRALGTVNIPSMLEPPGLCRDDGKRPDGMTLVPWCRGKALVWDATCADTLAPSHLSGSSRSAGSAALSAENSKKGKYSGLANHFEFLAFAVETLGVWSPDAKSFGKELGKLLIEKSGDRRARSFFTQRIAIEIQRGNTASVLGTAENPDELDELFFLAN

SEQ ID NO: 4537 - protein, 970 aa, Bembecia ichneumoniformis
MSSQPVADLVSCHLCASNKIRFRGTRGLRIHISKVHNSNSQPVASVPYCSTKLEVSAQQAVSNNAIQPTSAPLSASFGEELQLLRVNAPILKRIPRGARIQTANKLTEVINQCVSKNSQASWEDLFKFTYKILHVNATGAKRCNLTSIIKKNIKEYTTDVSSQNFTNDNHKPYSLWKCVERKVFDGNVKGAVRLITSEDSIADNDVDTLRSLQQKHPQPSRPLNIPDKESIEIEQISCDKEDVLHALASFPNGSAAGMDGLSPSHLKDLTAASLGQAAQDLLTALTNLCNMMLQGKVTDDFTPYIYGASLIALKKKEGGIRPIAIGSSIRRICSKIVCKKINVKLSSLFQPVQLGFGTKGGCEVAVHAARSFLDSRRDPHVFIKLDVSNAFNSIERDSLLGAVREHIPETYKYLHQCYSKSSQLLFRQTVIDSAVGCQQGDPLGPAIFSLGILDTIKKIKSNLNIWYLDDGALGGDYETAKNDCIKIIHNFNHLGLKLNFTKCEIYLCDSFSEIEKKSILNVFNSILPGVKQIKKENFFLLGAPITAESITPLIEDKQNKIELFTNRLININRHVALFLLRHCLSIPKLTYFLRCSPIWMHKEGLQAMDNSIKSCVQLLLNSDINGLSWNQFTLPVSFGGVGVRRIEDVALPAFLGSFHAGLDLIGKIVNPSLGEFEVSHMDDALDRWKSLCPDTDFPSPRGSQRGWDIPLIKKAFCEILDATTGADRARVLASAESEAGAWLNAFPSPHLGTLLDTNSIRIAVSLRVGARVCHPHMCVCGSSVDSYGHHGLSCIRSAGRRTRHSSINNIIKRALGTVNIPSMLEPPGLCRDDGKRPDGMTLVPWCRGKALVWDATCADTLAPSHLSGSSRSAGSAALSAENSKKGKYSGLANHFEFLAFAVETLGVWSPDAKSFGKELGKLLIEKSGDRRARSFFTQRIAIEIQRGNTASVLGTAENPDELDELFFLAN

SEQ ID NO: 4538 - protein, 970 aa, Bembecia ichneumoniformis
MSSQPVADLVSCHLCASNKIRFRGTRGLRIHISKVHNSNSQPVASVPYCSTKLEVSAQQAVSNNAIQPTSAPLSASFGEELQLLRVNAPILKRIPRGARIQTANKLTEVINQCVSKNSQASWEDLFKFTYKILHVNATGAKRCNLTSIIKKNIKEYTTDVSSQNFTNDNHKPYSLWKCVERKVFDGNVKGAVRLITSEDSIADNDVDTLRSLQQKHPQPSRPLNITDKESIEIEQISCDKEDVLHALASFPNGSAAGMDGLSPSHLKDLTAASLGQAAQDLLTALTNLCNMMLQGKVTDHFTPYIYGASLIALKKKEGGIRPIAIGSSIRRICSKIVCKKINVKLSSLFQPVQLGFGTKGGCEVAVHAARSFLDSRRDPHVFIKLDVSNAFNSIERDTLLGAVREHIPETYKYLHQCYSKSSQLLFRQTVIDSAVGCQQGDPLGPAIFSLGILDTIKKIKSNLNIWYLDDGALGGDYETAKNDCIKIIHNFNHLGLKLNFTKCEIYLCDSFSEIEKKSILNVFNSILPGVKQIKKENFFLLGAPITAESITPLIEDKQNKIELFTNRLININRHVALFLLRHCLSIPKLTYFLRCSPIWMHKEGLQAMDNSIKSCVQLLLNSDINGLSWNQFTLPVSFGGVGVRRIEDVALPAFLGSCHAGLDLIGKIVNPSLGEFEVSHMDDALDRWKSLCPDTDFPSPRGSQRGWDIPLIKKAFSEILDATTGADRARVLASAESEAGAWLNAFPSPHLGTLLDTNSIRIAVSLRVGARVCHPHMCVCGSSVDFYGHHGLSCIRSAGRRTRHSSINNIIKRALGTVNIPSMLEPPGLCRDDGKRPDGMTLVPWCRGKALVWDATCADTLAPSHLSGSSRSAGSAALSAENSKKGKYSGLANHFEFLAFAVETLGVWSPDAKSFGKELGKLLIEKSGDRRARSFFTQRIAIEIQRGNTASVLGTAENPDELDELFFLAN

SEQ ID NO: 4539 - protein, 970 aa, Bembecia ichneumoniformis
MSSQPVAELVSCHLCASNKIRFRGTRGLRIHISKVHNSNSQPVASVPYCSTKLEVSAQQAVSNNATQPTSAPLSASFGEELQLLRVNAPILKRIPRGARIQTANKLTEVINQCVSKNSQASWEDLFKFTYKILHVNATGAKRCNLTSIIKKNIKEYTTDVSSQNFTNDNHKPYSLWKCVERKVFDGNVKGAVRLITSEDSIADNDGDTLRSLQQKHPQPSRPLNIPEKDSIEIEQISCDKEDFLHALASFPNGSAAGMDGLSPSHLKDLTAASLGQAAQDLLTALTNLCNMMLQGKVTDDFTPYIYGASLIALKKKEGGIRPIAIGSTIRRICSKIVCKKVNVKLSSLFQPVQLGFGTKGGCEVAVHAARSFLDLRRDPHVFIKLDVSNAFNSIERDSLLGAVREHIPETYKYLHQCYSKSSQLLFRQTVIDSAVGCQQGDPLGPAIFSLGILDTIKKIKSNLNIWYLDDGALGGDYETAKNDCIKIIHNFNQLGLKLNFTKCEIYVCDSFSETEKKSILNVFNSILPGVKQINKENFFLLGAPITAESITPLIADKQNKIELFTNRLININRHVALFLLRHCFSIPKLTYFLRCSPIWMHKEGLQAMDNSIKSCVQLLLNSDINGLSWNQFTLPVSFGGVGVRRIEDVALPAFLGSCHAGLDLIGKIVNPSLGEFEVSHMDDALDRWKSLCPDTDFPSPRGSQRGWDIPLIKKAFSEILDATTGADRARVLASAESEAGAWLNAFPSPHLGTLLDTNSIRIAVSLRVGARVCHPHMCVCGSSVDSYGHHGLSCIRSAGRRTRHSSINNIIKRALGTVNIPSMLEPPGLCRDDGKRPDGMTLIPWCRGKTLVWDATCADTLAPSHLSGSSRSAGSAALSAENSKKGKYSGLANHFEFLAFAVETLGVWSPDAKLFGKELGKLLIEKSGDRRARSFFTQRIAIEIQRGNTASVLGTAENPDELDELFFLAN

SEQ ID NO: 4540 - protein, 964 aa, Bembecia ichneumoniformis
MNNSTAQANRSCPICTDGKVYKGSRGLNIHLSRAHRPSTNSAVALSQAPASAADINSINVLPSPTSVPRSFCEELQLLRLNAPVLKRIPRGARIQVASKLAEVVNECVDKNSQASWEELFKFSYKILHAHSSDDRRCSLTNKIKKNVSEYTVGEVYDNFTNITRKNSSLWKRAERKVFDGDVKGAVRLLTSEDTFADNDTDTLTSLRQKHPQPSRSLDIPDKDTIEVEQISCDKDDFLHALASFPNGSAAGMDGLSPSHLKDLTSASLGQAGQDLLTALIKLCNIMLQGKVNEDFTAYIYGASLIALKKKEGGIRPIAIGSTIGRICSKIVCKKINIKLSNLFQPVQLGFGTKEGCEVAVHAARSFLDSKRDPYVFIKLDVSNAFNSLERDSMLGAVREHIPESYNYLHQCYSKSSLLLFRHSVINSVVGCQQGDPLGPPIFSLGILDSIKKINSNFNLWYLDDGTLGGDKETVKDDCIKIIQNFNNIGLKLNFSKCEIYVSDSFTEMEKVSILNEFNLILPGIKQIKKEKFFLLGAPLTAESITPLIKDKQNKIEIFTNRLTYINRHVALFLLRHCFLIPRLTYFLRCSPIWMHEQSIRAMDNTIKGCVQLILNSDINGISWKQFTLPVSSGGIGIRRIGDVALPAFLASSHAGLDLIGKILNPSLGEFEVSHMDDALERWKSLCPESDLPTHPGSQRAWDDPLIKKSFREILNAVSGADRARVLASAEREAGAWLNAHPSPHLGTLLDMHSVRIAVSLRVGAKVCQTHTCVCGASVDPYGHHGLSCQRSAGRRSRHHSLNNIIKRALGTANIPSLLEPPGLCRDDGKRPDGMTLVPWCRGRALVWDATCVDTLAPSHLSASTNSAGSAALSAENLKRSKYSGLADHFEFLAFAVETLGVWSPEAKIFGKKLGKLLIEKSGDRRAGSFFMQRIALEIQRGNTASVLGTVGESAELDELFFLAQ

SEQ ID NO: 4541 - protein, 964 aa, Bembecia ichneumoniformis
MNNSTAQANRSCPICTDGKVYKGSRGLNIHLSRAHRPSTNSAVALSQAPASAADINSINVLPSPTSVPRSFCEELQLLRLNAPVLKRIPRGARIQVASKLAEVVNECVDKNSQASWEELFKFSYKILHAHSSDDRRCSLTNKIKKNVSEYTVGEVYDNFTNITRKNSSLWKRAERKVFDGDVKGAVRLLTSEDTFADNDTDTLTSLRQKHPQPSRSLDIPDKDTIEVEQISCDKDDFLHALASFPNGSAAGMDGLSPSHLKDLTSASLGQAGQDLLTALIKLCNIMLQGKVNEDFTAYIYGASLIALKKKEGGIRPIAIGSTIRRICSKIVCKKINIKLSNLFQPVQLGFGTKEGCEVAVHAARSFLDSKRDPYVFIKLDVSNAFNSLERDSMLGAVREHIPESYNYLHQCYSKSSLLLFCHSVINSAVGCQQGDPLGPPIFSLGILDSIKKINSNFNLWYLDDGTLGGDKETVKDDCIKIIQNFNNLGLKLNFSKCEIYVSDSFTEMEKVSILNEFNLILPGIKQIKKEKFFLLGAPLTAESITPLIKDKQNKIEIFTNRLTYINRHVALFLLRHCFLIPRLTYFLRCSPIWMHEQSIRAMDNTIKGCVQLILNSDINGISWKQFTLPVSSGGIGIRRIGDVALPAFLASSHAGLDLIGKILNPSLGEFEVSHMDDALERWKSLCPESDLPTHPGSQRAWDDPLIKKSFREILNAVSGADRARVLASAEREAGAWLNAHPSPHLGTLLDMHSVRIAVSLRVGAKVCQTHTCVCGASVDPYGHHGLSCQRSAGRRSRHHSINNIIKRALGTANIPSLLEPSGLCRDDGKRPDGMTLVPWCRGRALVWDATCVDTLAPSHLSASTNSAGSAALSAENLKRSKYSGLADHFEFLAFAVETLGVWSPEAKIFGKKLGKLLIEKSGDRRAGSFFMQRIALEIQRGNTASVLGTVGESAELDELFFMAQ

SEQ ID NO: 4542 - protein, 974 aa, Ennomos quercinarius
MKYNRLNNIGQKNNDEVEYVQCPHCSQPRYFKGQRGLNVHLGKTHKNLSQDVLSNNLQVRPSSDSPLLSLSQTPHQQPFWLTLSNLKSSVPLVKRIPRGARITVAQNLSAKIQKVLSENSERAWEQLLTFTFQVLHATNTKKSLTSTIKSNCINSSSCSDSNNIVDNGLLPSNSCQQATHNIFQKVEYKVSDGDLKGAAQLLFTSDVIAPDTPVTLAALVDKHPPSSTPVPISPSSSQPPVDPLQVTEKGVKAAVMSFKNGSAGGLDGLTPQHIKDLIFGATGDAGRVLLQDITALVNLMLSGKVNSNIAPLLYGANLCALKKKDGGIRPIAIGCTYRRIASKVCCKHIFPKLNETFQPLQLGFGSKGGCEAAVHALRTFITHDGGEVLLKVDVKNAFNSVDRSTLLAEIQKNVPEIYNYLWQCYGFKSNLLYRNHLIDSCTGCQQGDPLGPAIFSLAIQPIISALNSKFNLWYLDDGSLGGDANTVIQDLEILVDKFQSIGLELNFSKCELFITDLVASDKRAEIIQKFNSLAPNLKILNNQSLRLLGAPILKDSFPAYINEQRTKFEETSDRLLKIHSHVAFHIIRFCLFVPKLTYVLRCCPLWDQSDLKTLDETIRNILTQILNCSLSDKSWNQASLPIRFGGIGIRKISSVALPAFLSSVHSTAALFAKIVKPSIGGVPVLCLDEAINAWNMACPGEDFPKSPRSQRQWDEPLCRIIQSSLLHDSNTPDRARLLATSERESGYWLHAVPSSNIGTLLDNSSFSIAVGLRLGISRTEPHLCHCGGEVDRLGHHGLSCRRSAGRLSRHAALNDVIRRALATVNVPAILEPNGISRDDGKRPDGMTLIPWCRGRPLVWDATCVDTLAPSHINNSARAACAAAEAAENLKRRKYESLGEGYIFVPFGVETMGPWGPQARLLVRELSRRLVELTRDQRAGTYLGQRISLAIQRGNVASFLGTLPADSDLNSVFYL

SEQ ID NO: 4543 - protein, 1000 aa, Ennomos quercinarius
MFLFLLILFLLCCSYELLRKTISMSQSHSAGTSNIGQKNNDEVEYVQCPHCSQPRYFKGQRGLNVHLGKTHKNLSQDVLSNNLQVRPSSDSPLLSLSQTPHQQPFWLTLSNLKSSVPLVKRIPRGARITVAQNLSAKIQKVLSENSERAWEQLLTFTFQVLHATNTKKSLTSTIKSNCINSSSCSDSNNIVDNGLLPSNSCQQATHNIFQKVEYKVSDGDLKGAAQLLFTSDVIAPDTPVTLAALVDKHPPSSTPVPISPSSSQPPVDPLQVTEKGVKAAVMSFKNGSAGGLDGLTPQHIKDLIFGATGDAGRVLLQDITALVNLMLSGKVNSNIAPLLYGANLCALKKKDGGIRPIAIGCTYRRIASKVCCKHIFPKLNETFQPLQLGFGSKGGCEAAVHALRTFITHDGGEVLLKVDVKNAFNSVDRSTLLAEIQKNVPEIYNYLWQCYGFKSNLLYRNHLIDSCTGCQQGDPLGPAIFSLAIQPIISALNSKFNLWYLDDGSLGGDANTVIQDLEILVDKFQSIGLELNFSKCELFITDLVASDKRAEIIQKFNSLAPNLKILNNQSLRLLGAPILKDSFPAYINEQRTKFEETSDRLLKIHSHVAFHIIRFCLFVPKLTYVLRCCPLWDQSDLKTLDETIRNILTQILNCSLSDKSWNQASLPIRFGGIGIRKISSVALPAFLSSVHSTAALFAKIVKPSIGGVPVLCLDEAINAWNMACPGEDFPKSPRSQRQWDEPLCRIIQSSLLHDSNTPDRARLLATSERESGYWLHAVPSSNIGTLLDNSSFSIAVGLRLGISRTEPHLCHCGGEVDRLGHHGLSCRRSAGRLSRHAALNDVIRRALATVNVPAILEPNGISRDDGKRPDGMTLIPWCRGSPLVWDATCVDTLAPSHINNSARAACAAAEAAENLKRRKYESLGEGYIFVPFGVETMGPWGPQARLLVRELSRRLVELTRDQRAGTYLGQRISLAIQRGNVASFLGTLPADSDLNSVFYL

SEQ ID NO: 4544 - protein, 1000 aa, Ennomos quercinarius
MFLFLLILFLLCCSYELLRKTISMSQSHSAGTSNIGQKNNDEVEYVQCPHCSQPRYFKGQRGLNVHLGKTHKNLSQDVLSNNLQVRPSSDSPLLSLSQTPHQQPFWLTLSNLKSSVPLVKRIPRGARITVAQNLSAKIQKVLSENSERAWEQLLTFTFQVLHATNTKKSLTSTIKSNCINSSSCSDSNNIVDNGLLPSNSCQQATHNIFQKVEYKVSDGDLKGAAQLLFTSDVIAPDTPVTLAALVDKHPPSSTPVPISPSSSQPPVDPLQVTEKGVKAAVMSFKNGSAGGLDGLTPQHIKDLIFGATGDAGRVLLQDITALVNLMLSGKVNSNIAPLLYGANLCALKKKDGGIRPIAIGCTYRRIASKVCCKHIFPKLNETFQPLQLGFGSKGGCEAAVHALRTFITHDGGEVLLKVDVKNAFNSVDRSTLLAEIQKNVPEIYNYLWQCYGFKSNLLYRNHLIDSCTGCQQGDPLGPAIFSLAIQPIISALNSKFNLWYLDDGSLGGDANTVIQDLEILVDKFQSIGLELNFSKCELFITDLVASDKRAEIILKFNSLAPNLKILNNQSLRLLGAPILKDSFPAYINEQRTKFEETSDRLLKIHSHVAFHIIRFCLFVPKLTYVLRCCPLWDQSDLKTLDETIRNILTQILNCSLSDKSWNQASLPIRFGGIGIRKISSVALPAFLSSVHSTAALFAKIVKPSIGGVPVLCLDEAINAWNMACPGEDFPKSPRSQRQWDEPLCRIIQSSLLHDSNTPDRARLLATSERESGYWLHAVPSSNIGTLLDNSSFSIAVGLRLGISRTEPHLCHCGGEVDRLGHHGLSCRRSAGRLSRHAALNDVIRRALATVNVPAILEPNGISRDDGKRPDGMTLIPWCRGRPLVWDATCVDTLAPSHINNSARAACAAAEAAENLKRRKYESLGEGYIFVPFGVETMGPWGPQARLLVRELSRRLVELTRDQRAGTYLGQRISLAIQRGNVASFLGTLPADSDLNSVFYL

SEQ ID NO: 4545 - protein, 1000 aa, Ennomos quercinarius
MFLFLLILFLLCCSYELLRKTISMSQSHSAGTSNIGQKNNDEVEYVQCPHCSQPRYFKGQRGLNVHLGKTHKNLSQDVLSNNLQVRPSSDSPLLSLSQTPHQQPFWLTLSNLKSSVPLVKRIPRGARITVAQNLSAKIQKVLSENSERAWEQLLTFTFQVLHATNTKKSLTSTIKSNCINSSSCSDSNNIVDNGLLPSNSCQQATHNIFQKVEYKVSDGDLKGAAQLLFTSDVIAPDTPVTLAALVDKHPPSSTPVPISPSSSQPPVDPLQVTEKGVKAAVMSFKNGSAGGLDGLTPQHIKDLIFGATGDAGRVLLQDITALVNLMLSGKVNSNIAPLLYGANLCALKKKDGGIRPIAIGCTYRRIASKVCCKHIFPKLNETFQPLQLGFGSKGGCEAAVHALRTFITHDGGEVLLKVDVKNAFNSVDRSTLLAEIQKNVPEIYNYLWQCYGFKSNLLYRNHLIDSCTGCQQGDPLGPAIFSLAIQPIISALNSKFNLWYLDDGSLGGDANTVIQDLEILVDKFQSIGLELNFSKCELFITDLVASDKRAEIIQKFNSLAPNLKILNNQSLRLLGAPILKDSFPAYINEQRTKFEETSDRLLKIHSHVAFHIIRFCLFVPKLTYVLRCCPLWDQSDLKTLDETIRNILTQILNCSLSDKSWNQASLPIRFGGIGIRKISSVALPAFLSSVHSTAALFAKIVKPSIGGVPVLCLDEAINAWNMACPGEDFPKSPRSQRQWDEPLCRIIQSSLLHDSNTPDRARLLATSERESGYWLHAVPSSNIGTLLDNSSFSIAVGLRLGISRTEPHLCHCGGEVDRLGHHGLSCRRSAGRLSRHAALNDVIRRALATVNVPAILEPNGISRDDGKRPDGMTLIPWCRGRPLVWDATCVDTLAPSHINNSARAACAAAEAAENLKRRKYESLGEGYIFVPFGVETMGPWGPQARLLVRELSRRLVELTRDQRAGTYLSQRISLATQRGNVASFLGTLPADSDLNSVFYL

SEQ ID NO: 4546 - protein, 1000 aa, Ennomos quercinarius
MFLFLLILFLLCCSYELLRKTISMSQSHSAGTSNIGQKNNDEVEYVQCPHCSQPRYFKGQRGLNVHLGKTHKNLSQDVLSNNLQVRPSSDSPLLSLSQTPHQQPFWLTLSNLKSSVPLVKRIPRGARITVAQNLSAKIQKVLSENSERAWEQLLTFTFQVLHATNTKKSLTSTIKSNCINSSSCSDSNNIVDNGLLPSNSCQQATHNIFQKVEYKVSDGDLKGAAQLLFTSDVIAPDTPVTLAALVDKHPPSSTPVPISPSSSQPPVDPLQVTEKGVKAAVMSFKNGSAGGLDGLTPQHIKDLIFGATGDAGRVLLQDITALVNLMLSGKVNSNIAPLLYGANLCALKKKDGGIRPIAIGCTYRRIASKVCCKHIFPKLNETFQPLQLGFGSKGGCEAAVHALRTFITHDGGEVLLKVDVKNAFNSVDRSTLLAEIQKNVPEIYNYLWQCYGFKSNLLYRNHLIDSCTGCQQGDPLGPAIFSLAIQPIISALNSKFNLWYLDDGSLGGDANTVIQDLEILVDKFQSIGLELNFSKCELFITDLVASDKRAEIIQKFNSLAPNLKILNNQSLRLLGAPILKDSFPAYINEQRTKFEETSDRLLKIHSHVAFHIIRFCLFVPKLTYVLRCCPLWDQSDLKTLDETIRNILTQILNCSLSDKSWNQASLPIRFGGIGIRKISSVALPAFLSSVHSTAALFAKIVKPSIGGVPVLCLDEAINAWNMACPGEDFPKSPRSQRQWDEPLCRIIQSSLLHDSNTPDRARLLATSERESGYWLHAVPSSNIGTLLDNSSFSIAVGLRLGTSRTEPHLCHCGGEVDRLGHHGLSCRRSAGRLSRHAALNDVIRRALATVNVPAILEPNGISRDDGKRPDGMTLIPWCRGRPLVWDATCVDTLAPSHINNSARAACAAAEAAENLKRRKYESLGEGYIFVPFGVETMGPWGPQARLLVRELSRRLVELTRDQRAGTYLCQRISLAIQRGNVASFLGTLPADSDLNSVFYL

SEQ ID NO: 4547 - protein, 683 aa, Thyatira batis
MTDLINFMISGRVHDQIAAILYGANLCALKKKDGGIRPIAIGCTYRRLASKVCCKHILPKLMEKFQPYQLGFGSKGGCEAAVHALRTYIGHSGGEVVSKVDVKNAFNSVDRTTLLTEIQNYIPETFKYLWQCYGLHSNLVYRNHLINSCTGCQQGDPLGPAIFSLAIHPVISSLNSKLNMWYLDDGTLGGDADTVLQDLEMLITKFHSIGLDLNFNKCELFITDAVLSEDRKNIINKFNILAPNLKILTKQSLNLLGAPILDDSYPTFINEQRSKFEETSDRLTKINSHVAYHIIRFCLFVPQFTYILRCCPLWKFANFLSSLDETIKHILTKILNCSLSEKSWCQASLPIRHGGIGIRKISDVSLPGFLSSVHSTAELYSKIINTSLGNVRILYMEETRNAWYIACPSEGLPSNLRSQKFWDEPLCQILKNKLFVESNDLRDQARLLASSERESGFWLQAIPSFNIGTLLDNTSFSIAVGLRLGVSKTEPHLCRCGDGVDKLGHHGLSCRRSAGRMSRHASLNDVIRRALATVNVPAILEPNGISRDDGKRPDGMTLIPWSHGWPLVWDATCADTLAPSHLQATSREAGAAAAVAESQKHRKYASLGDGYIFHPFGVETMGPWGKEAKFLFKEMSRRLKEKTGDRAGTYLGQRISLAIQRGNVASFLGTLPTDSDLGAVFYL

SEQ ID NO: 4548 - protein, 1009 aa, Ennomos quercinarius
MLFIVCIFILLILVYFARKNVPMSLSVDTSAGVSLVGRRINGDEVELVQCPHCPQARYFKGQRGLNVHIGKAHKPSTQCTSSSHADLSTVVSPTSLSSQTSQPLWQSFSVLKTTIPIVKRIPRGARITIAQTLSTKIKNAINENTEKAWEQLLTFPFQILHASSSKKSLTATLKNNCMHPHTHTQTIPLTQTITRNENRRLNATHGLSQKVESKVSDGDLKGAAQLLFSNDVIAPDTPETLNALVEKHPPSLAPPQLQPLISQTSVVPIQVSEKDVKGALMSFKNGSAGGLDGLTPQHLKDLALGATGDAGRALLLDITALINFMLQGEINTNIATLLYGANLCALKKKDGGIRPIAVGCTYRRIASKLCCKYISSKLTDKFQPLQLGFGSKGGCEAAVHALRTFINHNGGEVVLKVDVRNAFNSVDRTTLLNEIQNSIPETYNYLWQCYGFESKLIYRNHLINSATGCQQGDPLGPAIFSLAIHPIISSLNSKLNMWYLDDGTLGGDASTVLQDLETIVDKFHAIGLELNFAKCELFLTDVVPNDKKDELINKFKVLAPNIKIVNKQSLRLLGAPILEDSFPAFIEEQKIKFETSSDRLLQIHSHVAFHIIRFCLFVPKLTYVLRCCPFWKHNDILSILDVTVQNLLSQILNCSLSDNSWSQASLPIRFGGIGIRKITSVSLPAFLSSVHSIGRLFFDIVNPSLGNVPVMCMEEARNAWSMACPGDSFPISPHSQRLWDEPLCKRVKQNLLQDCSNASDRARLLATAERESGYWLQAIPSPNIGTLMDNNSFSVAIGLRLGISRTEPHLCRCGGEVDRLGYHGLSCRRSAGRLSRHASLNDVLRRTLATVNVPACLEPNGISRDDGKRPDGLTLVPWSRGRPLVWDATCVDTLATSYLQGTSRAAGAAAEVAENLKRTKYESLGERYIFLPFGVETMGPWGPSARGFVKELSRRLIETTGDQRAGSYLGQRLSMAIQRGNVASFLGTLPADSDLNAGFFIYKFSFSFR

SEQ ID NO: 4549 - protein, 992 aa, Crocallis elinguaria
MFFCIVLVFIVLFLMSLYRNSTNASLSLSPGPSTIARRNNEVEFVQCSLCSQPRYFKGQRGLNVHIGKSHKPLSHCVHSANPDPSVACPQQVQSLSQPFWLTLSNLKSATPIVKRIPRGARIVVAQNLSSKIQKVLSENSEQAWEQLLTFSFQVLHATNRQRSLTKIIKSNCTSYSNNTTNLTNKLNNFESRLPTDHNKFQKVESKVSDGDLRGAAQLLFSNDVIALDSPETLSALIEKHPPAQASLLPPSSSQPSVEPLQVTEKDVKAAVMSFKNGSAGGLDGLTPQHIKDLLFGTIGDAGRVLLQDITALINFMLLGKVNDKIAPLLYGANLCALKKKDGGIRPIAVGCTYRRIASKVCCKHILPKLTEKFQPLQLGFGSKGGCEAAIHALRTFISHNGGEVLLKVDVKNAFNSVDRTTLLSEIQNSIPEIYNYLWQCYGLESKLLFRNHLINSCTGCQQGDPLGPAIFSLAIHPIISTLNSKFNLWYLDDGTLGGDASTVVRDLETLIEKFHSIGLDLNFSKCELFLSDMVPTNTRDEIILKFNRLAPNLKILNKESLRLLGAPILEDSFPNFIDEQRTKFEATSDNLIKIHSHVAFHIIRFCLFVPKFTYVLRCCPFWNHISLLTSLDDTIKNILTQILNCSLSDNSWGQASLPVRFGGIGIRKITSISLPAFLSSVHSTSGLYRKIINPCLDGIQPVCMDEAKNAWILACPSEGFPKSLHSQKQWDEPLCKIVQQSLLNSSNDLFVRARLLATSERESGFWLQAIPSSNIGTLLDNTSFTVAVGLRLGISTTTPHHCHCGGEVDNLGYHGLSCRRSAGRLSRHAALNDVIRRALTTVNVPATLEPNGISRYDGKRPDGMTLIPWSRGRPLVWDATCVDTLAPSHVQLSSRAAGSAAEAAEILKRRKYASLGDGYIFLPFGVETMGPWGPDAKLFFKELSRRLVEVTGDQRAGAYLGQRISLAIQRGNVASFLGTLPAEGDLNAVFYL

SEQ ID NO: 4550 - protein, 1003 aa, Erannis defoliaria
MLFVITIFIVLLCILISKKYVIGWFSISMSLSSDLANVGRRTSSDDVELVQCPHCPQARYFKGQRGLNVHIGKAHRPFTQSVSSSRFVLPSSTSHTQSSLSPQTSQPFWQYISSLKSSIPVVKRIPRGARIIIAQNLSTRIKKAITENSDQGWEQLLAFSFQVLHASSSQKSLTSTLKNNCTNIIPLTQYVIPNSSNNLNSRLNSSHNFAHKVESKVSDGDLKGAAQLLFSSDVVAPDTPETLSALIEKHPPSLTPPLPQSLASQPSVEPLQVSEKDVKDALMSFKNGSAGGLDGLTPQHIKDLVFGGTGDAGRALLHDITTLMNFMLLGKVNENTASLLYGANLCALKKKDGGVRPIAVGCTYRRIASKLCCKHILLKLTEKFQPLQLGFGSKGGCEAAVHALRTFISHNGGEVILKVDVKNAFNSVDRTAILNEIQDSIPEIYSYLWQCYGCESKLLYRNNLINSCTGCQQGDPLGPAIFSLAIHPIISSLNSKLNMWYLDDGTLGGDASTVLQDLEFLIGKFHEIGLELNFSKCELFFSDAVPLDKKNELISKFNVLAPNIKILNKQTLRLLGAPILEDSFSAFIDEQQTKFEATSDRLLKIHSHVAFHIIRFCLFVPKLTYVLRCCPFWNHNVLLSNLDVTIKNVLSQILNCSLSDKSWCQASLPIRFGGIGIRKITSVSLPAFLSSVHSCGGLFSKIVRPALGSIPVLYIEEARNTWSAICPGECFPLSLRSQRLWDEPLCKKVQQNLLQDCVNVSDRARLLATSERESGYWLQAIPSSNIGTLMDNSSFSIAIGLRLGIPRTEPHFCRCGSEVDRSGHHGLSCRRSAGRLSRHAALNDVIRRALATVNVPARLEPNGISRDDGKRPDGLTLVPWGRGRPLVWEATCADTLAPSHLQSTSRAAGAAAEEAESLKRRKYESLGDGYIFLPFGVETMGPWGPAARVLVKELSRRLADVTGDQRAGAYLGQRISLAIQRGNVASFLGTLPEDSDLNVVFYL

SEQ ID NO: 4551 - protein, 1003 aa, Erannis defoliaria
MLFVITIFIVLLCILISKKYVIGWFSISMSLSSDLANVGRRTSSDDVELVQCPHCPQARYFKGQRGLNVHIGKAHRPFTQSVSSSRFVLPSSTSHTQSPLSPQTSQPFWQYISSLKSSIPVVKRIPRGARIIIAQNLSTRIKKAITENSDQGWEQLLAFSFQVLHASSSQKSLTSTLKNNCTNIIPLTQYVIPNSSNNLNSRPNSSHNFAHKVESKVSDGDLKGAAQLLFSSDVVAPDTPETLSALIEKHPPSLTPPLPQSLASQPSVEPLQVSEKDVKDALMSFKNGSAGGLDGLTPQHIKDLVFGGTGDAGRALLHDITTLMNFMLLGKVNENTASLLYGANLCALKKKDGGVRPIAVGCTYRRIASKLCCKHILLKLTEKFQPLQLGFGSKGGCEAAVHALRTFISHNGGKVILKVDVKNAFNSVDRTAILNEIQDSIPEIYSYLWQCYGCESKLLYRNNLINSCTGCQQGDPLGPAIFSLAIHPIISSLNSKLNMWYLDDGTLGGDASTVLQDLEFLIGKFHEIGLELNFSKCELFFSDAVPLDKKNELISKFNVLAPNIKILNKQTLRLLGAPILEDSFSAFIDEQQTKFEATSDRLLKIHSHVAFHIIRFCLFVPKLTYVLRCCPFWNHNVLLSNLDVTIKNVLSQILNCSLSDKSWCQASLPIRFGGIGIRKITSVSLPAFLSSVHSCGGLFSKIVRPALGSIPVLYIEEARNTWSAICPGECFPLSLRSQRLWDEPLCKKVQQNLLQDCVNVSDRARLLATSERESGYWLQAIPSSNIGTLMDNSSFSIAIGLRLGIPRTEPHFCRCGSEVDRSGHHGLSCRRSAGRLSRHAALNDVIRRALATVNVPARLEPNGISRDDGKRPDGLTLVPWSRGRPLVWDATCADTLAPSHRQSTSRAAGAAAEEAESLKRRKYESLGDGYIFLPFGVETMGPWGPAARVLVKELSRRLADVTGDQRAGAYLGQRISLAIQRGNVASFLGTLPKDSDFNVVFYL

SEQ ID NO: 4552 - protein, 1001 aa, Ennomos quercinarius
MLFIVCIFILLILVYFARKNVPMSLSVDTSAGVSLVGRRINGDEVELVQCPHCPQARYFKGQRGLNVHIGKAHKPSTHCTSSSHADLSTVVSPTSLSSQTSQPLWQSFSVLKTTIPIVKRIPRGARITIAQTLSTKIKNAINENTEKAWEQLLTFPFQILHASSSKKSLTATLKNNCMHPHTHTQTIPLTQTITRNENRRLNATHGLSQKVESKVSDGDLKGAAQLLFSNDVIAPDTPETLNALVEKHPPSLAPPQLQPLISQTSVVPIQVSEKDVKGALMSFKNGSAGGLDGLTPQHLKDLALGATGDAGRALLLDITALINFMLQGEINTNIATLLYGANLCALKKKDGGIRPIAVGCIYRRIASKLCCKYISSKLTDKFQPLQLGFGSKGGCEAAVHALRTFINHNGGEVVLKVDVRNAFNSVDRTTLLNEIQNSIPETYNYLWQCYGFESKLIYRNHLINSATGCQQGDPLGPAIFSLAIHPIISSLNSKLNMWYLDDGTLGGDASTVLQDLETIVDKFHAIGLELNFAKCELFLTDVVPNDKKDELINKFKVLAPNIKIVNKQSLRLLGAPILEDSFPAFIEEQKIKFETSSDRLLQIHSHVAFHIIRFCLFVPKLTYVLRCCPFWKHNDILSILDVTVQNLLSQILNCSLSDNSWSQASLPIRFGGIGIRKITSVSLPAFLSSVHSIGRLFFDIVNPSLGNVPVMCMEEARNAWSMACPGDSFPISPHSQRLWDEPLCKRVKQNLLQDCSNASDRARLLATAERESGYWLQAIPSPNIGTLMDNNSFSVAIGLRLGISRTEPHLCHCGGEVDRLGYHGLSCRRSAGRLSRHASLNDVLRRTLATVNVPACLEPNGISRDDGKRPDGLTLVPWSRGRPLVWDATCVDTLATSYLQGTSRAAGAAAEVAENLKRTKYESLGERYIFLPFGVETMGPWGPSARGFVKELSRRLIETTGDQRAGSYLGQRLSMAIQRGNVASFLGTLPADSDLNAVFYL

SEQ ID NO: 4553 - protein, 1003 aa, Erannis defoliaria
MLFVITIFIVLLCILISKKYVIGWFSISMSLSSDLANVGRRTSSDDVELVQCPHCPQARYFKGQRGLNVHIGKAHRPFTQSVSSSRFVLPSSTSHTQSSLSPQTSQPFWQYISSLKSSIPVVKRIPRGARIIIAQNLSTRIKKAITENSDQGWEQLLAFSFQVLHASSSQKSLTSTLKNNCTNIIPLTQYVIPNSSNNLNSRLNSSHNFAHKVESKVSDGDLKGAAQLLFSSDVVAPDTPETLSALIEKHPPSLTPPLPQSLASQPSVEPLQVSEKDVKDALMSFKNGSAGGLDGLTPQHIKDLVFGGTGDAGRALLHDITTLMNFMLLGKVNENTASLLYGANLCALKKKDGGVRPIAVGCTYRRIASKLCCKHILLKLTEKFQPLQLGFGSKGGCEAAVHALRTFISHNGGEVILKVDVKNAFNSVDRTAILNEIQDSIPEIYSYLWQCYGCESKLLYRNNLINSCTGCQQGDPLGPAIFSLAIHPIISSLNSKLNMWYLDDGTLGGDASTVLQDLEFLIGKFHEIGLELNFSKCELFFSDAVPLDKKNEFISKFNVLAPNIKILNKQTLRLLGAPILEDSFSAFIDEQQTKFEATSDRLLKIHSHVAFHIIRFCLFVPKLTYVLRCCPFWNHNVLLSNLDVTIKNVLSQILNCSLSDKSWCQASLPIRFGGIGIRKITSVSLPAFLSSVHSCGGLFSKIVRPALGSIPVLYIEEARNTWSAICPGECFPLSLRSQRLWDEPLCKKVQQNLLQDCVNVSDRARLLATSERESGYWLQAIPSSNIGTLMDNSSFSIAIGLRLGIPRTEPHFCRCGSEVDRSGHHGLSCRRSAGRLSRHAALNDVIRRALATVNVPARLEPNGISRDDGKRPDGLTLVPWSRGRPLVWDATCADTLAPSHLQSTSRAAGAAAEEAESLKRRKYESLGDGYIFLPFGVETMGPWGPAARVLVKELSRRLADVTGDQRAGAYLGQRISLAIQRGNVASFLGTLPEDSDLNVVFYL

SEQ ID NO: 4554 - protein, 1003 aa, Erannis defoliaria
MLFVITIFIVLLCILISKKYVIGWFSISMSLSSDLANVGRRTSSDDVELVQCPHCPQARYFKGQRGLNVHIGKAHRPFTQSVSSSRFVLPSSTSHTQSSLSPQTSQPFWQYISSLKSSIPVVKRIPRGARIIIAQNLSTRIKKAITENSDQGWEQLLAFSFQVLHASSSQKSLTSTLKNNCTNIIPLTQYVIPNSSNNLNSRLNSSHNFAHKVESKVSDGDLKGAAQLLFSSDVVAPDTPETLSALIEKHPPSLTPPLPQSLASQPSVEPLQVSEKDVKDALMSFKNGSAGGLDGLTPQHIKDLVFGGTGDAGRALLHDITTLMNFMLLGKVNENTASLLYGANLCALKKKDGGVRPIAVGCTYRRIASKLCCKHILLKLTEKFQPLQLGFGSKGGCEAAVHALRTFISHNGGEVILKVDVKNAFNSVDRTAILNEIQDSIPEIYSYLWQCYGCESKLLYRNNLINSCTGCQQGDPLGPAIFSLAIHPIISSLNSKLNMWYLDDGTLGGDASTVLQDLEFLIDKFHEIGLELNFSKCELFFSDAVPLDKKNELISKFNVLAPNIKIRNKQTLRLLGAPILEDSFSAFIDEQQTKFEATSDRLLKIHSHVAFHIIRFCLFVPKLTYVLRCCPFWNHNVLLSNLDVTIKNVLSEILNCSLSDKSWCQASLPIRFGGIGIRKITSVSLPAFLSSVHSCGGLFSKIVRPALGSIPVLYIEEARNTWSAICPGECFPLSLRSQRLWDEPLCKKVQQNLLQDCVNVSDRARLLATSERESGYWLQAIPSSNIGTLMDNSSFSIAIGLRLGIPRTEPHFCRCGSEVDRSGHHGLSCRRSAGRLSRHVALNDVIRRALATVNVPARLEPNGISRDDGKRPDGLTLVPWSRGRPLVWDATCADTLAPSHLQSTSRAAGAAAEEAESLKRRKYESLGDGYIFLPFGVETMGPWGPAARVLVKELSRRLADVTGDQRAGAYLGQRISLAIQRGNVASFLGTLPEDSDLNVVFYL

SEQ ID NO: 4555 - protein, 1003 aa, Erannis defoliaria
MLFVITIFIVLLCILISKKYVIGWFSISMSLSSDLANVGRRTSSDDVELVQCPHCPQARYFKGQRGLNIHIGKAHRRFTQSVSSSRFVLPSSTSHTQSSLSPQISQPFWQYISSLKSSIPVVKRIPRGARIIIAQNVSTRIKKAITENSDQGWEQLLAFSFQVLHASSSQKSLTSTLKNNCTNIIPLTQYVIPNSSNNLNSRLNSSHNFAHKVESKVSDGDLKGAAQLLFSSDVVAPDTPETLSALIEKHPPSLTPPLPQSLASQPSVEPLQVSEKDVKDALMSFKNGSAGGLDGLTPQHIKDLVFGGTGDAGRALLHDITTLMNFMLLGKVNENTASLLYGANLCALKKKDGGVRPIAVGCTYRRIASKLCCKHILLKLTEKFQPLQLGFGSKGGCEAAVHALRTFISHNGGEVIMKVDVKNAFNSVDRTAILNEIQDSTPEIYSYLWQCYGCESKLLYRNNLINSCTGCQQGDPLGPAIFSLAIHPIISSLNSKLNMWYLDDGTLGGDASTVLQDLEFLIGKFHEIGLELNFSKCELFFSDAVPLDKKNELISKFNVLAPNIKILNKQTLRLLGAPILEDSFSAFIDEQQTKFEATSDRLLKIHSHVAFHIIRFCLFVPKLTYVLRCCPFWNHNVLLSNLDVTIKNVLSQILNCSLSDKSWCQASLPIRFGGIGIRKITSVSLPAFLSSVHSCGGLFSKIVRPALGSIPMLYIEEARNTWSAICPGECFPLSLRSQRLWDEPLCKKVQQNLLQDCVNVSDRARLLATSERESGYWLQAIPSSNIGTLMDNSSFSIAIGLRLGIPRTEPHFCRCGSEVDRSGHHGLSCRRSAGRLSRHAALNDVIRRALATVNVPARLEPNGISRDDGKRPDGLTLVPWSRGRPLVWDATCADTLAPSHLQSTSRAAGAAAEEAESLKRRKYESLGDGYIFLPFGVETMGPWGPAARVLVKELSRRLADVTGDQRAGAYLGQRISLAIQRGNVASFLGTLPEDSDLNVVFYL

SEQ ID NO: 4556 - protein, 1003 aa, Erannis defoliaria
MLFVITIFIVLLCILISKKYVIGWFSISMSLSSDLANVGRRTSSDDVELVQCPHCPQARYFKGQRGLNVHIGKAHRPFTQSVSSSRFVLPSSTSHTQSSLSPQTSQPFWQYISSLKSSIPVVKRIPRGARIIIAQNLSTRIKKAITENSDQGWEQLLAFSFQVLHASSSQKSLTSTLKNNCTNIIPLTQYVIPNSSNNLNSRPNSSHNFAHKVESKVSDGDLKGAAQLLFSSDVVAPDTPETLSALIEKHPPSLTPPLPQSLASQPSVEPLQVSEKDVKDALMSFKNGSAGGLDGLTPQHIKDLVFGGTGDAGRALLHDITTLMNFMLLGKVNENTASLLYGANLCALKKKDGGVRPIAVGCTYRRIASKLCCKHILLKLTEKFQPLQLGFGSKGGCEAAVHALRTFISHNGGEVILKVDVKNAFNSVDRTAILNEIQDSIPEIYSYLWQCYGCESKLLYRNNLINSCTGCQQGDPLGPAIFSLAIHPIISSLNSKLNMWYLDDGTLGGDASTVLQDLEFLIGKFHEIGLELNFSKCELFFSDAVPLDKKNELISKFNVLAPNIKILNKQTLRLLGAPILEDSFSAFIDEQQTKFEATSDRLLKIHSHVAFHIIRFCLFVPKLTYVLRCCPFWNHNVLLSNLDVTIKNVLSQILNCSLSDKSWCQASLPIRFGGIGIRKITSVSLPAFLSSVHSCGGLFSKIVRPALGSIPVLYIEEARNTWSAICPGECFPLSLRSQRLWDEPLCKKVKQNLLQDCVNVSDRARLLATSERESGYWLQAIPSSNIGTLMDNSSFSIAIGLRLGIPRTEPHFCRCGSEVDRSGHHGLSCRRSAGRLSRHAALNDVIRRALATVNVPARLEPNGISRDDGKRPDGLTLVPWSRGRPLVWDATCADTLAPSHLQSTSRAAGAAAEEAESLKRRKYESLGDGYIFLPFGVETMGPWGPAARVLVKELSRRLADVTGDQRAGAYLGQRISLAIQRGNVASFLGTLPEDSDLNVVFYL

SEQ ID NO: 4557 - protein, 926 aa, Crocallis elinguaria
MGYTPTDADDSALHPSDPSVACPQQVQSQSQPFWLTLSNLKSATPIVKRIPRGARIVVAQNLSSKIQKVLSENSEQAWEQLLTFSFQVLHATNRQRSLTKIIKSNCTSYSNNTTNLTNKLNNFESRLPTDHNKFQKVESKVSDGDLRGAAQLLFSNDVIALDSPETLSALIEKHPPAQASLLPPSSSQPSVEPLQVTEKDVKAAVMSFKNGSAGGLDGLTPQHIKDLLFGTIGDAGRVLLQDITALINFMLLGKVNDKIAPLLYGANLCALKKKDGGIRPIAVGCTYRRIASKVCCKHILPKLTEKFQPLQLGFGSKGGCEAAIHALRTFISHNGGEVLLKVDVKNAFNSVDRTTLLSEIQNSIPEIYNYLWQCYGLESKLLFRNHLINSCTGCQQGDPLGPAIFSLAIHPIISTLNSKFNLWYLDDGTLGGDASTVVRDLETLIEKFHSIGLDLNFSKCELFLSDMVPTNARDEIILKFNRLAPNLKILNKESLRLLGAPILEDSFPNFIDEQRTKFEATSDNLIKIHSHVAFHIIRFCLFVPKFTYVLRCCPFWNHISLLTSLDDTIKNILTQILNCSLSDNSWGQASLPVRFGGLGIRKITSISLPAFLSSVHSTSGLYRKIINPCLDGIQPVCMDEAKNAWILACPSEGFPKSLHSQKQWDEPLCKIVQQSLLNSSNDLFVRARLLATSERESGFWLQAIPSSNIGTLLDNTSFTVAVGLRLGISTTTPHHCHCGGEVDNLGYHGLSCRRSAGRLSRHAALNDVIRRALTTVNVPATLEPNGISRDDGKRPDGMTLIPWSRGRPLVWDATCVDTLAPSHVQLSSRAAGSAAEAAEILKRRKYASLGDGYIFLPFGVETMGPWGPDAKLFFKELSRRLVEVTGDQRAGAYLGQRISLAIQRGNVASFLGTLPAEGDLNAVFYL

SEQ ID NO: 4558 - protein, 992 aa, Crocallis elinguaria
MFFCIVLVFIVLFLMSLYRNSTNASLSLSPGPSTIARRNNEVEFVQCSLCSQPRYFKGQRGLNVHIGKSHKPLSHCVHSANPDPSVACPQQVQSLSQPFWLTLSNLKSATPIVKRIPRGARIVVAQNLSSKIQKVLSENSEQAWEQLLTFSFQVLHATNRQRSLTKIIKSNCTSYSNNTTNLTNKLNNFESRLPTDHIKFQKVESKVSDGDLRGAAQLLFSNDVIALDSPETLSALIEKHPPAQASLLPPSSSQPSVEPLQVTEKDVKAAVMSFKNGSAGGLDGLTPQHIKDLLFGTIGDAGRVLLQDITALINFMLLGKVNDKIAPLLYGANLCALKKKDGGIRPIAVGCTYRRIASKVCCKHILPKLTEKFQPLQLGFGSKGGCEAAIHALRTFISHNGGEVLLKVDVKNAFNSVDRTTLLSEIQNSIPEIYNYLWQCYGLESKLLFRNHLINSCTGCQQGDPLGPAIFSLAIHPIISTLNSKFNLWYLDDGTLGGDASTVVRDLETLIEKFHSIGLDLNFSKCELFLSDMVPTNTRDEIILKFNRLAPNLKILNKESLRLLGAPILEDSFPNFIDEQRTKFEATSDNLIKIHSHVAFHIIRFCLFVPKFTYVLRCCPFWNHISLLTSLDDTIKNILTQILNCSLSDNSWGQASLPVRFGGIGIRKITSISLPAFLSSVHSTSGLYRKIINPCLDGIQPVCMDEAKNAWILACPSEGFPKSLHSQKQWDEPLCKIVQQSLLNSSNDLFVRARLLATSERESGFWLQAIPSSNIGTLLDNTSFTVAVGLRLGISTTTPHHCHCGGEVDNLGYHGLSCRRSAGRLSRHAALNDVIRRALTTVNVPATLEPNGISRYDGKRPDGMTLIPWSRGRPLVWDATCVDTLAPSHVQLSSRAAGSAAEAAEILKRRKYASLGDGYIFLPFGVETMGPWGPDAKLFFKELSRRLVEVTGDQRAGAYLGQRISLAIQRGNVASFLGTLPAEGDLNAVFYL

SEQ ID NO: 4559 - protein, 964 aa, Erannis defoliaria
MLFVITIFIVLLCILISKKYVIGWFSISMSLSSDLANVGRRTSSDDVELVQCPHCPQARYFKGQRGLNVHIGKAHRPFTQSVSSSRYVLPSSTSHTQSSLSPQTSQPFWQYISSLKSSIPVVKRIPRGARIIIAQNLSTRIKKAITENSDQGWEQLLAFSFQVLHASSSQKSFTSTLKNNCTNIIPLTQYVIPNSSNNLNSRPNSSHNFAHKVESKVSDGDLKGAAQLLFSSDVVAPDTPETLSALIEKHPPSLTPPLPQSLASQPSVEPLQVSEKDVKDALMSFKNGSAGGLDGLTPQHIKDLVFGGTGDAGRALLHDITTLMNFMLLGKVNENTASLLYGANLCALKKKDGGVRPIAVGCTYRRIASKLCCKHILLKLTEKFQPLQLGFGSKGGCEAAVHALRTFISHNGGEVILKVDVKNAFNSVDRTAILNEIQDSIPEIYSYLWQCYGCETKLLYRNNLINSCTGCQQGDPLGPAIFSLAIHPIISSLNSKLNMWYLDDGTLGGDASTVLQDLEFLIDKFHEIGLELNFSKCELFFSDAVPLDKKNELISKFNVLAPNIKILNKQTLRLLGAPILEDSFSAFIDEQQTKFEATSDRLLKIHSHVAFHIIRFCLFVPKLTYVLRCCPFWNHNVLLSNLDVTIKNVLSQILNCSLSDKSWCQASLPIRFGGIGIRKITSVSLPAFLSSVHSCGGLFSKIVRPALGSIPVLYIEEARNTWSAICPGECFPLSLRSQRLWDEPLCKKVQQNLLQDCVNVSDRARLLATSERESGYWLQAIPSSNIGTLMDNSSFSIAIGLRLGIPRTEPHFCRCGSEVDRSGHHGLSCRRSAGRLSRHAALNDVIRRALATVNVPARLEPNGISRDDGKRPDGLTLVPWSRGRPLVWDATCADTLAPSHLQSTSRAAGAAAEEAESLKRRKYESLGDGYIFLPFGVETMGPWGPAARVLFYLFYLFILFYSGN

SEQ ID NO: 4560 - protein, 1003 aa, Erannis defoliaria
MLFVITIFIVLLCILISKKYVIGWFSISMSLSSDLANVGRRTSSDDVELVQCPHCPQARYFKGQRGLNVHIGKAHRPFSQSVSSSRYVLPSSTSHTQSSLSPQTSQPFWQYISSLKSSIPVVKRIPRGARIIKAQNLSTRIKKAITENSDQGWEQLLAFSFQVLHASSSQKSLTSTLKNNCTNIIPLTQYVIPNSSNNLNSRPNSSHNFAHKVESKVSDGDLKGAAQLLFSSDVVAPDTPETLSALIEKHPPSLTPPLPQSLASQPSVEPLQVSEKDVKDALMSFKNGSAGGLDGLTPQHIKDLVFGGTGDAGRALLHDITTLMNFMLLGKVNENTASLLYGANLCALKKKDGGVRPIAVGCTYRRIASKLCCKHILLKLTEKFQPLQLGFGSKGGCEAAVHALRTFISHNGGEVILKVDVKNAFNSVDRTAILNEIQDSIPEIYSYLWQCYGCETKLLYRNNLINSCTGCQQGDPLGPAIFSLAIHPIISSLNSKLNMWYLDDGTLGGDASTVLQDLEFLIDKFHEIGLELNFSKCELFFSDAVPLDKKNELISKFNVLAPNIKILNKQTLRLLGAPILEDSFSAFIDEQQTKFEATSDRLLKIHSHVAFHIIRFCLFVPKLTYVLRCCPFWNHNVLLSNLDVTIKNVLSQILNCSLSDKSWCQASLPIRFGGIGIRKITSVSLPAFLSSVHSCGGLFSKIVRPALGSIPVLYIEEARNTWSAICPGECFPLSLRSQRLWDEPLCKKVQQNLLQDCVNVSDRARLLATSERESGYWLQAIPSSNIGTLMDNSSFSIAIGLRLGIPRTEPHFCRCGSEVDRSGHHGLSCRRSAGRLSRHAALNDVIRRALATVNVPARLEPNGISRDDGKRPDGLTLVPWSRGRPLLWDATCADTLAPSHLQSTSRAAGAAAEEAESLKRRKYESLGDGYIFLPFGVETMGPWGPAARVLVKELSRRLADVTGDQRAGAYLGQRISLAIQRGNVASFLGTLPEDSDFNVVFYL

SEQ ID NO: 4561 - protein, 1001 aa, Ennomos quercinarius
MLFIVCIFILLILVYFARKNVPMSLSVDTSAGVSLVGRRINGDEVELVQCPHCPQARYFKGQRGLNVHIGKAHKPSTQCTSSSHADLSTVVSPTSLSSQTSQPLWQSFSVLKTTIPIVKRIPRGARITIAQTLSTKIKNAINENTEKAWEQLLTFPFQILHASSSKKSLTATLKNNCMHPHTHTQTIPLTQTITRNENRRLNATHGLSQKVESKVSDGDLKGAAQLLFSNDVIAPDTPETLNALVEKHPPSLAPPQLQPLISQTSVVPIQVSEKDVKGALMSFKNGSAGGLDGLTPQHLKDLALGATGDAGRALLLDITALINFMLQGEINTNIATLLYGANLCALKKKDGGIRPIAMGCTYRRIASKLCCKYISSKLTDKFQPLQLGFGSKGGCEAAVHALRTFINHNGGEVVLKVDVRNAFNSVDRTTLLNEIQNSIPETYNYLWQCYGFESKLIYRNHLINSATGCQQGDPLGPAIFSLAIHPIISSLNSKLNMWYLDDGTLGGDASTVLQDLETIVDKFHAIGLELNFAKCELFLTDVVPNDKKDELINKFKVLAPNIKIVNKQSLRLLGAPILEDSFPAFIEEQKIKFETSSDRLLQIHSHVAFHIIRFCLFVPKLTYVLRCCPFWKHNDILSILDVTVQNLLSQILNCSLSDNSWSQASLPIRFGGIGIRKITSVSLPAFLSSVHSIGRLFFDIVNPSLGNVPVMCMEEARNAWSMACPGDSFPISPHSQRLWDEPLCKRVKQNLLQDCSNASDRARLLATAERESGYWLQAIPSPNIGTLMDNNSFSVAIGLRLGISRTEPHLCHCGGEVDRLGYHGLSCRRSAGRLSRHASLNDVLRRTLATVNVPACLEPNGISRDDGKRPDGLTLVPWSRGRPLVWDATCVDTLATSYLQGTSRAAGAAAEVAENLKRTKYESLGERYIFLPFGVETMGPWGPSARGFVKELSRRLIETTGDQRAGSYLGQRLSMAIQRGNVASFLGTLPADSDLNAVFYL

SEQ ID NO: 4562 - protein, 1001 aa, Ennomos quercinarius
MLFIVCIFILLILVYFARKNVPMSLSVDTSAGVSLVGRRINGDEVELVQCPHCPQARYFKGQRGLNVHIGKAHKPSTQCTSSSHADLSTVVSPTSLSSQTSQPLWQSFSVLKTTIPIVKRIPRGARITIAQTLSTKIKNAINENTEKAWEQLLTFPFQILHASSSKKSLTATLKNNCMHPHTHTQTIPLTQTITRNENRRLNATHGLSQKVESKVSDGDLKGAAQLLFSNDVVAPDTPETLNALVEKHPPSLAPPQLQPLISQTSVVPIQVSEKDVKGALMSFKNGSAGGLDGLTPQHLKDLALGATGDAGRALLLDITALINFMLQGEINTNIATLLYGANLCALKKKDGGIRPIAVGCTYRRIASKLCCKYISSKLTDKFQPLQLGFGSKGGCEAAVHALRTFINHNGGEVVLKVDVRNAFNSVDRTTLLNEIQNSIPETYNYLWQCYGFQSKLIYRNHLINSATGCQQGDPLGPAIFSLAIHPIISSLNSKLNMWYLDDGTLGGDASTVLQDLETIVDKFHAIGLELNFAKCELFLTDVVPNDKKDELINKFKVLAPNIKIVNKQSLRLLGAPILEDSFPAFIEEQKIKFETSSDRLLQIHSHVAFHIIRFCLFVPKLTYVLRCCPFWKHNDILSILDVTVQNLLSQILNCSLSDNSWSQASLPIRFGGIGIRKITSVSLPAFLSSVHSIGRLFFDIVNPSLGNVPVMCMEEARNAWSMACPGDSFPISPHSQRLWDEPLCKRVKQNLLQDCSNASDRARLLATAERESGYWLQAIPSPNIGTLMDNNSFSVAIGLRLGISRTEPHLCRCGGEVDRLGYHGLSCRRSAGRLSRHASLNDVLRRTLATVNVPACLEPNGISRDDGKRPDGLTLVPWSRGRPLVWDATCVDTLATSYLQGTSRAAGAAAEVAENLKRTKYESLGERYIFLPFGVETMGPWGPSARRFVKELSRRLIETTGDQRAGSYLGQRLSMAIQRGNVASFLGTLPADSDLNAVFYL

SEQ ID NO: 4563 - protein, 992 aa, Crocallis elinguaria
MFFCIVLVFIVLFLMSLYRNSTNASLSLSPGPSTIARRNNEVEFVQCSLCSQPRYFKGQRGLNVHIGKSHKPLSHCVHSANPDPSVACPQQVQSQSQPFWLTLSNLKSATPIVKRIPRGARIVVAQNLSSKIQKVLSENSEQAWEQLLTFSFQVLHATNRQRSLTKIIKSNCTSYSNNTTNLTNKLNNFESRLPTDHNKFQKVESKVSDGDLRGAAQLLFSNDVIALDSPETLSALIEKHPPAQASLLPPSSSQPSVEPLQVTEKDVKAAVMSFKNGSAGGLDGLTPQHIKDLLFGTIGDAGRVLLQDITALINFMLLGKVNDKIAPLLYGANLCALKKKEGGIRPIAVGCTYRRIASKVCCKHILPKLTEKFQPLQLGFGSKGGCEAAIHALRTFISHNGGEVLLKVDVKNAFNSVDRTTLLSEIQNSIPEIYNYLWQCYGLESKLLFRNHLINSCTGCQQGDPLGPAIFSLAIHPIISTLNSKFNLWYLDDGTLGGDASTVVRDLETLIEKFHSIGLDLNFSKCELFLSDMVPTNARDEIILKFNRLAPNLKILNKESLRLLGAPILEDSFPNFIDEQRTKFEATSDNLIKIHSHVAFHIIRFCLFVPKFTYVLRCCPFWNHISLLTSLDDTIKNILTQILNCSLSDNSWGQASLPSRFGGIGIRKITSISLPAFLSSVHSTSGLYRKIINPCLDGIQPVCMDEAKNAWILACPSEGFPKSLHSQKQWDEPLCKIVQQSLLNSSNDLFVRARLLATSERESGFWLQAIPSSNIGTQLDNTSFTVAVGLRLGISTTTPHHCHCGGEVDNLGYHGLSCRRSAGRLSRHAALNDVIRRALTTVNVPATLEPNGISRDDGKRPDGMTLIPWSRGRPLVWDATCVDTLAPSHVQLSSRAAGSAAEAAEILKRRKYASLGDGYIFLPFGVETMGPWGPDAKLFFKELSRRLVEVTGDQRAGAYLGQRISLAIQRGNVASFLGTLPAEGDLNAVFYL

SEQ ID NO: 4564 - protein, 1001 aa, Ennomos quercinarius
MLFIVCIFILLILVYFARKNVPMSLSVDTSAGVSLVGRRINGDEVELVQCPHCPQARYFKGQRGLNVHIGKAHKPSTQCTSSSHADLSTVVSPTSLSSQTSQPLWQSFSVLKTTIPIVKRIPRGARITIAQTLSTKIKNAINENTEKAWEQLLTFPFQILHASSSKKSLTATLKNNCMHPHTHTQTIPLTQTITRNENRRLNATHGLSQKVESKVSDGDLKGAAQLLFSNDVIAPDTPETLNALVEKHPPSLAPPQLQPLISQTSVVPIQVSEKDVKGALMSFKNGSAGGLDGLTPQHLKDLALGATGDAGRALLLDITALINFMLQGEINTNIATLLYGANLCALKKKDGGIRPIAVGCTYRRIASKLCCKYISSKLTDKFQPLQLGFGSKGGCEAAVHALRTFINHNGGEVVLKVDVRNAFNSVDRTTLLNEIQNSIPETYNYLWQCYGFESKLIYRNHLINSATGCQQGDPLGPAIFSLAIHPIISSLNSKLNMWYLDDGTLGGDASTVLQDLETIVDKFHAIGLELNFAKCELFLTDVVPNDKKDELINKFNVLAPNIKIVNKQSLRLLGAPILEDSFPAFIEEQKIKFETSSDRLLQIHSHVAFHIIRFCLFVPKLTYVLRCCPFWKHNDILSILDVTVQNLLSQILNCSLSDNSWSQASLPIRFGGIGIRKITSVSLPAFLSSVHSIGRLFFDIVNPSLGNVPVMCMEEARNAWSMACPGDSFPISPHSQRLWDEPLCKRVKQNLLQDCSNASDRARLLATAERESGYWLQAIPSPNIGTLMDNNSFSVAIGLRLGISRTEPHLCHCGGEVDRLGYHGLSCRRSAGRLSRHASLNDVLRRTLATVNVPACLEPNGISRDDGKRPDGLTLVPWSRGRPLVWDATCVDTLATSYLQGTSRAAGAAAEVAENLKRTKYESLGERYIFLPFGVETMGPWGPSARGFVKELSRRLIETTGDQRAGSYLGQRLSMAIQRGNVASFLGTLPADSDLNAVFYL

SEQ ID NO: 4565 - protein, 1003 aa, Erannis defoliaria
MLFVITIFIVLLCILISKEYVIGWFSISMSLSSDLANVGRRTSSDDVELVQCPHCPQARYFKGQRGLNVHIGKAHRPFTQSVSSSRFVLPSSTSHTQSSLSPQTSQPFWQYISSLKSSIPVVKRIPRGARIIIAQNLSTRIKKAITENSDQGWEQLLAFSFQVLHASSSQKSLTSTLKNNCTNIIPLTQYVIPNSSNNLNSRPNSSHNFAHKVESKVSDGDLKGAAQLLFSSDVVAPDTPETLSALIEKHPPSLTPPLPQSLASQPSVEPLQVSEKDVKDALMSFKNGSAGGLDGLTPQHIKDLVFGGTGDAGRALLHDITTLMNFMLLGKVNENTASLLYGANLCAFKKKDGGVRPIAVGCTYRRIASKLCCKHILLKLTEKFQPLQLGFGSKGGCEAAVHALRTFISHNGGEVILKVDVKNAFNYVDRTAILNEIQDFIPEIYSYLWQCYGCESKLLYRNNLINSCTGCQQGDPLGPAIFSLAIHPIISSLNSKLNMWYLDDGSLGGDASTVLQDLEFLIGKFHEIGLELNFSKCELFFSDAVPLDKKNELISKFNVLAPNIKILNKQTLRLLGAPILEDSFSAFIDEQQTKFEATSDRLLKIHSHVAFHIIRFCLFVPKLTYVLRCCPFWNHNVLLSNLDVTIKNVLSQILNCSLSDKSWCQASLPIRFGGIGIRKITSVSLPAFLSSVHSYGGLFSNIVRPALGSIPVLYIEEARNTWSAICPGECFPLSLRSQRLWDEPLCKKVQQYLLQDCVNVSDRARLLATSERESGYWLQAIPSSNIGTLMDNSSFSIAIGLRLGIPRTEPHFCRCGSEVDRSGHHGLSCRRSAGRLSRHAALNDVIRRALATVNVPARLEPNGISRDDGKRPDGLTLVPWSRGRPLVWDATCADTLAPSHLQSTSRAAGAAAEEAESLKRRKYESLGDGYIFLPFGVETMGPWGPAARVLVKELSRRLVDVTGDQRAGAYLGQRISLAIQRGNVASFLGTLPEDSDLNVVFYL

SEQ ID NO: 4566 - protein, 1059 aa, Andrena haemorrhoa
MTRAAARLRTGHPVEQELESSGISAAGSSVRRAPPVGGGHVPLPALQHQCPHCPKSFTTATGLGLHKKSAHREAFNAAINVDRVRRGWSEEELHLLAREEVAAVRRRIRYLNQHLLSIVPNRTIDAIKGARRGPEYRALVASLLQDNPEAPRVDPPTEEVSTAEEVTAPPEMPHPPLSAEEPTGAPAVTAPRDAVESLLHAVEDIHGWNTVDLVRLTRKFLCGGCVLADVSQWLEDTIPSGPSIGVAPGRRLQPYASGSKKMLRRQEYSRIQRLFRKDMSRAAREILDGTGQEDEVPQANVMAAYWGPLVSSPSPPVPPSSPAPIRAELASLWAAVTIEEVGKSPPPLNAAPGLDGITPRLWRSVPAAVKALLFNIVLCTGSWPASLLASRTVFIPKKVPNPTPADYRPISITSVIVRHLHGILARRVRSLGLVDLKQRCFDDGCAENIAVLATILQDARRKLREVHIASLDFAKAFDSVSHSALSDVLARLGVPAEFRGYVDTLYRHSTTTFEVRGERTEYFPLGRGIRQGDPLSPVLFCLVVDRVLGSIPQGVGYLVGEERVAGLAFADDVLLFASTKWGLQTSLDRVTAEAAACGLVLNEKKSSVLSIVPSGKEKKTKIVADPTFKGRGGTILPQLASTAAWRYLGVDFDPDGIRSTRHDLGAYLESIRKAPLKPQQRLKILRCFLLPRLYHGLVLGRTTQGRLRALDRAVRASVRKWLRLPADVAVGYFHAPVREGGLGIPAMTTTIPGLMHDRLVRLEGSSSPAVRACAGLPWAVDRLRWARSVLTRGGEDLTTHYRRGKWWGRKLHASTDGCELRECPGTTLSTHWIDAGSTAVPGRDYVQYVHVHVNCLPTQIRTSRGPRRAHRDVRCRAGCGVAETAAHIVQSCHRTHGGRIQRHNAVARTVAAALRDKGWTVGDEPVFDTEAGRRKPDIVATKGDELSVVDAQIVSGATPLDGAHDRKVNYYAGNIDLRRALQQKYGVAEDKITFRSCTLSWRGVWSAKSARGLQHLGLTKALLRSIVTRVLQGSHTNWSRWNKITSMAPPTRRVREGVG

SEQ ID NO: 4567 - protein, 888 aa, Andrena haemorrhoa
MPHPPLSAEEPTGAPAVTAPRDAVESLLHAVEDIHGWNTVDLVRLTRKFLCGGCVLADVSQWLEDTIPSGPSIGVAPGRRLQPYASGSKKMLRRQEYSRIQRLFRKDMSRAAREILDGTGQEDEVPQANVMAAYWGPLVSSPSPPVPPSSPAPIRAELASLWAAVTIEEVGKSPPPLNAAPGLDGITPRLWRSVPAAVKALLFNIVLCTGSWPASLLASRTVFIPKKVPNPTPADYRPISITSVIVRHLHGILARRVRSLGLVDLKQRCFDDGCAENIAVLATILQDARRKLREVHIASLDFAKAFDSVSHSALSDVLARLGVPAEFRGYVDTLYRHSTTTFEVRGERTEYFPLGRGIRQGDPLSPVLFCLVVDRVLGSIPQGVGYLVGEERVAGLAFADDVLLFASTKWGLQTSLDRVTAEAAACGLVLNEKKSSVLSIVPSGKEKKTKIVADPTFKGRGGTILPQLASTAAWRYLGVDFDPDGVRSTRHDLGAYLESIRKAPLKPQQRLKILRCFLLPRLYHGLVLGRTTQGRLRALDRAVRASVRKWLRLPADVAVGYFHAPVREGGLGIPAMTTTIPGLMHDRLVRLEGSSSPAVRACAGLPWAVDRLRWARSVLTRGGEDLTTHYRRGKWWGRKLHASTDGCELRECPGTTLSTHWIDAGSTAVPGRDYVQYVHVHVNCLPTQIRTSRGPRRAHRDVRCRAGCGVAETAAHIVQSCHRTHGGRIQRHNAVARTVAAALRDKGWTVGEEPVFDTEAGRRKPDIVATKGDELSVVDAQIVSGATPLDGAHDRKVNYYAGNIDLRRALQQKYGVAEDKITFRSCTLSWRGVWSAKSARGLQHLGLTKALLRSIVTRVLQGSHTNWSRWNKITSMAPPTRRVREGVG

SEQ ID NO: 4568 - protein, 1059 aa, Andrena haemorrhoa
MTRAAARLRTGHPVEQELESSGISAAGSSVRRAPPVGGGDVPLPALQHQCPHCPKSFTTATGLGLHKKSAHREAFNAAINVDRVRRGWSEEELHLLAREEVAAVRRRIRYLNQHLLSIVPNRTIDAIKGARRGPEYRALVASLLQDNPEAPRVDPPTEEVSTAEEVTAPPEMPHPPLSAEEPTGAPAVTAPRDAVESLLHAVEDIHGWNTVDLVRLTRKFLCGGCVLADVSQWLEDTIPSGPSIGVAPGRRLQPYASGSKRMLRRQEYSRIQRLFRKDMSRAAREILDGTGQEDEVPQANVMAAYWGPLVSSPSPPVPPSSPAPIRAELASLWAAVTIEEVGKSPPPLNAAPGLDGITPRLWRSVPAAVKALLFNIVLCTGSWPASLLASRTVFIPKKVPNPTPADYRPISITSVIVRHLHGILARRVRSLGLVDLKQRCFDDGCAENIAVLATILQDARRKLREVHIASLDFAKAFDSVSHSALSDVLARLGVPAEFRGYVDTLYRHSTTTFEVRGERTEYFPLGRGIRQGDPLSPVLFCLVVDRVLGSIPQGVGYLVGEERVAGLAFADDVLLFASTKWGLQTSLDRVTAEAAACGLVLNEKKSSVLSIVPSGKEKKTKIVADPTFKGRGGTILPQLASTAAWRYLGVDFDPDGVRSTRHDLGAYLESIRKAPLKPQQRLKILRCFLLPRLYHGLVLGRTTQGRLRALDRAVRASVRKWLRLPADVAVGYFHAPVREGGLGIPAMTTTIPGLMHDRLVRLEGSSSPAVRACAGLPWAVDRLRWARSVLTRGGEDLTTHYRRGKWWGRKLHASTDGCELRECPGTTLSTHWIDAGSTAVPGRDYVQYVHVHVNCLPTQIRTSRGPRRAHRDVRCRAGCGVAETAARIVQSCHRTHGGRIQRHNAVARTVAAALRDKGWTVGEEPVFDTEAGRRKPDIVATKGDELSVVDAQIVSGATPLDGAHDRKVNYYAGNIDLRRALQQKYGVAEDKITFRSCTLSWRGVWSAKSARGLQHLGLTKALLRSIVTRVLQGSHTNWSRWNKITSMAPPTRRVREGVG

SEQ ID NO: 4569 - protein, 1059 aa, Andrena haemorrhoa
MTRAAARLRTGHPVEQELESSGISAAGSSVRRAPPVGGGHVPLPALQHQCPHCPKSFTTATGLGLHKKSAHREAFNAAINVDRVRRGWSEEELHLLAREEVAAVRRRIRYLNQHLLSIVPNRTIDAIKGARRGPEYRALVASLLQDNPEAPRVDPPTEEVSTAEEVTAPPEMPHPPLSAEEPTGAPAVTAPRDAVESLLHAVEDIHGWNTVDHVRLTRKFLCGGCVLADVSQWLEDTIPSGPSIGVAPGRRLQPYASGSKKMLRRQEYSRIQRLFRKDMSRAAREILDGTGQEDEVPQANVMAAYWGPLVSSPSPPVPPSSPAPIRAELASLWAAVTIEEVGKSPPPLNAAPGLDGITPRLWRSVPAAVKALLFNIVLCTGSWPASLLASRTVFIPKKVPNPTPADYRPISITSVIVRHLHGILARRVRSLGLVDLKQRCFDDGCAENIAVLATILQDARRKLREVHIASLDFAKAFDSVSHSALSDVLARLGVPAEFRGYVDTLYRHSTTTFEVRGERTEYFPLGRGIRQGDPLSPVLFCLVVDRVLGSIPQGVGYLVGEERVAGLAFADDVLLFASTKWGLQTSLDRVTAEAAACGLVLNEKKSSVLSIVPSGKEKKTKIVADPTFKGRGGTILPQLASTAAWRYLGVDFDPDGVRSTRHDLGAYLESIRKAPLKPQQRLKILRCFLLPRLYHGLVLGRTTQGRLRALDRAVRASVRKWLRLPADVAVGYFHAPVREGGLGIPAMTTTIPGLMHDRLVRLEGSSSPAVRACAGLPWAVDRLRWARSVLTRGGEDLTTHYRRGKWWGRKLHASTDGCDLRECPGTTLSTHWIDAGSTAVPGRDYVQYVHVHVNCLPTQIRTSRGPRRAHRDVRCRAGCGVAETAAHIVQSCHRTHGGRIQRHNAVARTVAAALRDKGWTVGDEPVFDTEAGRRKPDIVATKGDELSVVDAQIVSGATPLDGAHDRKVNYYAGNIDLRRALQQKYGVAEDKITFRSCTLSWRGVWSAKSARGLQHLGLTKALLRSIVTRVLQGSHTNWSRWNKITSMAPPTRRVREGVG

SEQ ID NO: 4570 - protein, 1040 aa, Harmonia axyridis
MKNTKKPRMENNGRSTDRATPVLPVNPGPSTSNSDNTYPCRFSNCDRRFTTATGRGVHERRAHADANDVRQLQKQENKKERWSEEEKRLMARKEAQLTKEGYRFINQELIKHFNRTLESIKGQRRQQEYKNLVQEYLKEGVDASNGSDSEQEQAVDEVSRENTRDEDSNDKVRNILTEHLVNLPPLTHSGFNAVWMNRICYMVKDQPIPRVLTEITAYLLETFPPVNKKKNSNNLNNPPNTNNSSKKKKRREDYARVQDMWKKKPGKCVKRILEDDLERNEGMNKNIMEPYWKAVFTRDIRSSPNLPKAHRVEEDLWNPITELEIKVALPKGSSAPGPDGLTNKKLKEVPHDILARLFSLFMWCGQLPQHLCLSRTVLIPKKKNAEDPGLYRPLTMSSVMVRLFHKVFANRLSKIEMDERQRAFRKTNGCAENIALLDMVLTQHRKKTKKLFLAVIDMAKAFDSISINAIINILRAKGLPDAMVNYLRAIYDSSETVIDHAGWCSARIHPTCGVKQGDPLSPILFNLVIDAMLKQIPKEIGAEMEGSIINVLAFADDLVLMASTEKGLQTLMDNTAEFLKNCGLEINQGKSSTIAIKTIPKMKKIAIDPYCTFKIQGTTLRALKRTDEWEYLGVLFTSEGASKQNQIEILEKQLTSISKAPLKPQQRMWALRNVLIPGLTYKLVMSRVRFGYLKKIDRKIRLYIRKWLHLPHDTPNGYFHASVQDGGLGVPSLRWKGPLLRLECLKNMLRVDYLKNRSMDTYLQNEIRLVENRLKDNTNNIINTSKKLSKYWALTLHNSIDGGPLRNSEKVPGQHLWITQHTRFLTGRDYINSCKLRINALPTRSRTARGRDKDRLCRAGCGLKETLNHITQVCHRTHRMRIQRHNAISHYLARNLIKRGFNVEEEPHLITDEGLRKPDIVATMGQTSIILDSQVVGEQADLERENKNKVNYYGNNRSLHNLIKAKYGSQNVITLAATISSRGVWSKQSAEELLRRDIIKKSELRILTSRVLIGSVACWNIFNRMTSTRLAGGRTQQGIG

SEQ ID NO: 4571 - protein, 1040 aa, Harmonia axyridis
MKNTKKPRMENNGRSTDRATPVLPVNPGPSTSNSDNTYPCRFSNCDRRFTTATGRGVHERRAHADANDVRQLQKQENKKERWTEEEKRLMARKEAQLTKEGYRFINQELIKHFNRTLESIKGQRRQQEYKNLVQEYLKEGVDASNGSDSEQEQAVDEVSRENTRDEDSNDKVRNILTEHLVNLPPLTHSGFNAVWMNRICYMVKDQPIPRVLTEITAYLLETFPPVNKKKNSNNLNNPPNTNNSSKKKKRREDYARVQDMWKKKPGKCVKRILEDDLERNEGMNKNIMEPYWKAVFTRDIRSSPNLPKAHRVEEDLWNPITELEIKVALPKGSSAPGPDGLTNKKLKEVPHDILARLFSLFMWCGQLPQHLCLSRTVLIPKKKNAEDPGLYRPLTMSSVMVRLFHKVFANRLSKIEMDERQRAFRKTNGCAENIALLDMVLTQHRKKTKKLFLAVIDMAKAFDSISINAIINILRAKGLPDAMVNYLRAIYDSSETVIDHAGWCSARIHPTCGVKQGDPLSPILFNLVIDAMLKQIPKEIGAEMEGSIINVLAFADDLVLMASTEKGLQTLMDNTAEFLKNCGLEINQGKSSTIAIKTIPKMKKIAIDPYCTFKIQGTTLRALKRTDEWEYLGVLFTSEGASKQNQIEILEKQLTSISKAPLKPQQRMWALRNVLIPGLTYKLVMSRVRFGYLKKIDRKIRLYIRKWLHLPHDTPNGYFHASVQDGGLGVPSLRWKGPLLRLECLKNMLRVDYLKNRSMDTYLQNEIRLVENRLKDNTNNIINTSKKLSKYWALTLHNSIDGGPLRNSEKVPGQHLWITQHTRFLTGRDYINSCKLRINALPTRSRTARGRDKDRLCRAGCGLKETLNHITQVCHRTHRMRIQRHNAISHYLARNLIKRGFNVEEEPHLITDEGLRKPDIVATMGQTSIILDSQVVGEQADLERENKNKVNYYGNNRSLHNLIKAKYGSQNVITLAATISSRGVWSKQSAEELLRRDIIKKSELRILTSRVLIGSVACWNIFNRMTSTRLAGGRTQQGIG

SEQ ID NO: 4572 - protein, 951 aa, Harmonia axyridis
MARKEAQLTKEGYRFINQELIKHFNRTLESIKGQRRQQEYKNLVQEYLKEGVDASNGSDSEQEQAVDEVSRENTRDEDSNDKVRNILTEHLVNLPPLTHSGFNAVWMNRICYMVKDQPIPRVLTEITAYLLETFPPVNKKKNSNNLNNPPNTNNLSKKKKRREDYARVQDMWKKKPGKCVKRILEDDLERNEGMNKNIMEPYWKAVFTRDIRSSPNLPKAHRVEEDLWNPITELEIKVALPKGSSAPGPDGLTNKKLKEVPHDILARLFSLFMWCGQLPQHLCLSRTVLIPKKKNAEDPGLYRPLTMSSVMVRLFHKVFANRLSKIEMDERQRAFRKTNGCAENIALLDMVLTQHRKKTKKLFLAVIDMAKAFDSISINAIINILRAKGLPDAMVNYLRAIYDSSETVIDHAGWCSARIHPTCGVKQGDPLSPILFNLVIDAMLKQIPKEIGAEMEGSIINVLAFADDLVLMASTEKGLQTLMDNTAEFLKNCGLEINQGKSSTIAIKTIPKMKKIAIDPYCTFKIQGTTLRALKRTDEWEYLGVLFTSEGASKQNQIEILEKQLTSISKAPLKPQQRMWALRNVLIPGLTYKLVMSRVRFGYLKKIDRKIRLYIRKWLHLPHDTPNGYFHASVQDGGLGVPSLRWKGPLLRLECLKNMLRVDYLKNRSMDTYLQNEIRLVENRLKDNTNNIINTSKKLSKYWALTLHNSIDGGPLRNSEKVPGQHLWITQHTRFLTGRDYINSCKLRINALPTRSRTARGRDKDRLCRAGCGLKETLNHITQVCHRTHRMRIQRHNAISHYLARNLIKRGFNVEEEPHLITDEGLRKPDIVATMGQTSIILDSQVVGEQADLERENKNKVNYYGNNRSLHNLIKAKYGSQNVITLAATISSRGVWSKQSAEELLRRDIIKKSELRILTSRVLIGSVACWNIFNRMTSTRLAGGRTQQGIG

SEQ ID NO: 4573 - protein, 1040 aa, Harmonia axyridis
MKNTKKPRMENNGRSTDRATPVLPVNPGPSTSNSDNTYPCRFSNCDRRFTTATGRGVHERRAHADANDVRQLQKQENKKERWTEEEKRLMARKEAQLTKEGYRFINQELIKHFNRTLESIKGQRRQQEYKNLVQEYLKEGVDASNGSDSEQEQAVDEVSRENTRDEDSNDKVRNILTEHLVNLPPLTHSGFNAVWMNKICYMVKDQPIPRVLTEITAYLLETFPPVNKKKNSNNLNNPPNTNNSSKKKKRREDYARVQDMWKKKPGKCVKRILEDDLERNEGMNKNIMEPYWKAVFTRDIRSSPNLPKAHRVEEDLWNPITELEIKVALPKGSSAPGPDGLTNKKLKEVPHDILARLFSLFMWCGQLPQHLCLSRTVLIPKKKNAEDPGLYRPLTMSSVMVRLFHKVFANRLSKIEMDERQRAFRKTNGCAENIALLDMVLTQHRKKTKKLFLAVIDMAKAFDSISINAIINILRAKGLPDAMVNYLRAIYDSSETVIDHAGWCSARIHPTCGVKQGDPLSPILFNLVIDAMLKQIPKEIGAEMEGSIINVLAFADDLVLMASTEKGLQTLMDNTAEFLKNCGLEINQGKSSTIAIKTIPKMKKIAIDPYCTFKIQGTTLRALKRTDEWEYLGVLFTSEGASKQNQVEILEKQLTSISKAPLKPQQRMWALRNVLIPGLTYKLVMSRVRFGYLKKIDRKIRLYIRKWLHLPHDTPNGYFHASVQDGGLGVPSLRWKGPLLRLECLKNMLRVDYLKNRSMDTYLQNEIRLVENRLKDNTNNIINTSKKLSKYWALTLHNSIDGGPLRNSEKVPGQHLWITQHTRFLTGRDYINSCKLRINALPTRSRTARGRDKDRLCRAGCGLKETLNHITQVCHRTHRMRIQRHNAISHYLARNLIKRGFNVEEEPHLITDEGLRKPDIVATMGQTSIILDSQVVGEQADLERENKNKVNYYGNNRSLHNLIKAKYGSQNVITLAATISSRGVWSKQSAEELLRRDIIKKSELRILTSRVLIGSVACWNIFNRMTSTRLAGGRTQQGIG

SEQ ID NO: 4574 - protein, 1040 aa, Harmonia axyridis
MKNTKKPRMENNGRSTDCATPVLPVNPGPSTSNSDNTYPCRFSNCDRRFTTATGRGVHERRAHADANDVRQLQKQENKKERWSEEEKRLMARKEAQLTKEGYRFINQELIKHFNRTLESIKGQRRQQEYKNLVQEYLKEGVDASNGSDSEQEQAVDEVSRENTRDEDSNDKVRNILTEHLVNLPPLTHSGFNAVWMNRICYMVKDQPIPRVLTEITAYLLETFPPVNKKKNSNNLNNPPNTNNSSKKKKRREDYARVQDMWKKKPGKCVKRILEDDLERNEGMNKNIMEPYWKAVFTRDIRSSPNLPKAHRVEEDLWNPITELEIKVALPKGSSAPGPDGLTNKKLKEVPHDILARLFSLFMWCGQLPQHLCLSRTVLIPKKKNAEDPGLYRPLTMSSVMVRLFHKVFANRLSKIEMDERQRAFRKTNGCAENIALLDMVLTQHRKKTKKLFLAVIDMAKAFDSISINAIINILRAKGLPDAMVNYLRAIYDSSETVIDHAGWCSARIHPTCGVKQGDPLSPILFNLVIDAMLKQIPKEIGAEMEGSIINVLAFADDLVLMASTEKGLQTLMDNTAEFLKNCGLEINQGKSSTIAIKTIPKMKKIAIDPYCTFKIQGTTLRALKRTDEWEYLGVLFTSEGASKQNQIEILEKQLTSISKAPLKPQQRMWALRNVLIPGLTYKLVMSRVRFGYLKKIDRKIRLYIRKWLHLPHDTPNGYFHASVQDGGLGVPSLRWKGPLLRLECLKNMLRVDYLKNRSMDTYLQNEIRLVENRLKDNTNNIINTSKKLSKYWALTLHNSIDGGPLRNSEKVPGQHLWITQHTRFLTGRDYINSCKLRINALPTRSRTARGRDKDRLCRAGCGLKETLNHITQVCHRTHRMRIQRHNAISHYLARNLIKRGFNVEEEPHLITDEGLRKPDIVATMGQTSIILDSQVVGEQADLERENKNKVNYYGNNRSLHNLIKAKYGSQNVITLAATISSRGVWSKQSAEELLRRDIIKKSELRILTSRVLIGSVACWNIFNRMTSTRLAGGRTQQGIG

SEQ ID NO: 4575 - protein, 951 aa, Harmonia axyridis
MARKEAQLTKEGYRFINQELIKHFNRTLESIKGQRRQQEYKNLVQEYLKEGVDASNGSDSEQEQAVDEVSRENTRDEDSNDKVRNILTEHLVNLPPLTHSGFNAVWMNRICYMVKDQPIPRVLTEITAYLLETFPAVNKKKNSNNLNNPPNTNNSSKKKKRREDYARVQDMWKKKPGKCVKRILEDDLERNEGMNKNIMEPYWKAVFTRDIRSSPNLPKAHRVEEDLWNPITELEIKVALPKGSSAPGPDGLTNKKLKEVPHDILARLFSLFMWCGQLPQHLCLSRTVLIPKKKNAEDPGLYRPLTMSSVMVRLFHKVFANRLSKIEMDERQRAFRKTNGCAENIALLDMVLTQHRKKTKKLFLAVIDMAKAFDSISINAIINILRAKGLPDAMVNYLRAIYDSSETVIDHAGWCSAGIHPTCGVKQGDPLSPILFNLVIDAMLKQIPKEIGAEMEGSIINVLAFADDLVLMASTEKGLQTLMDNTAEFLKNCGLEINQGKSSTIAIKTIPKMKKIAIDPYCTFKIQGTTLRALKRTDEWEYLGVLFISEGASKQNQIEILEKQLTSISKAPLKPQQRMWALRNVLIPGLTYKLVMSRVRFGYLKKIDRKIRLYIRKWLHLPHDTPNGYFHASVQDGGLGVPSLRWKGPLLRLECLKNMLRVDYLKNRSMDTYLQNEIRLVENRLKDNTNNIINTSKKLSKYWALTLHNSIDGGPLRNSEKVPGQHLWITQHTRFLTGRDYINSCKLRINALPTRSRTARGRDKDRLCRAGCGLKETLNHITQVCHRTHRMRIQRHNAISHYLARNLIKRGFNVEEEPHLITDEGLRKPDIVATMGQTSIILDSQVVGEQADLERENKNKVNYYGNNRSLHNLIKAKYGSQNVITLAATISSRGVWSKQSAEELLRRDIIKKSELRILTSRVLIGSVACWNIFNRMTSTRLAGGRTQQGIG

SEQ ID NO: 4576 - protein, 1018 aa, Notocelia uddmanniana
MRTGRANNPRRGERGGGESVVVEPADHRCPICGREFKTKIGLGVHKRSAHPVQANNDVAPIVAKRRWRDEEVAIMAKTEARLVHEQGSCGNAELLDALVGFGRTLEALKGRRRYPEYRALVQSYLAEYQEASDIQVEATPEVLPDVPLESPPPADEHPAVSCDGPSAADVLAALLRGAATRLAKRSSEQRAAGQRHMNDQTDNDHCTEPVRLSRRKRRRAEYARVQNLYRKCRSRAAAEIINGACRRVGHSLGELEAYWRPLLEKVSDAPGPTPKALAEIRRTVEDGGRARDFSQLWAPFSPDEIKASRIDLNTAPGPDGIRAEDWRSVSVAHKAELFNAWMTKGQIPSELRQCRTIFVPKTDAPAAPGEYRPITIASVPLRHMHALLAKRLLACCPPDIRQRGFITANGTLENTAVLDAILGDCRKNLRECHVAVLDFAKAFDTVSHAALCDLLKTRGLPGPFCDYVAGLYRSASTTLAVNGETSRPVVVGRGVRQGDPLSPILFNMVLDVVLAGLPGEVGYRLEGERVSALAYADDLVLLGSSKVGLQESLDCVDRVGAMMGLTLNPPKCSVLSMVPNCHIKKHKYLTESTFKLGGRYLKQVSCIERWRYLGVDFSAAGSERLECLIGAALTNIKRAPLKPQQRLEITRDHLIPRFVHGLVLGKISDDRLRMLDLQIRNSVREWLRLPKDVPLAYFHASTADGGLGVPSFRAFIPDLIIKRYGRLSSSEWQVARAASRSDRIRKKLKWGMRLFQRLSAEHPTSHRRTVCQYWREKLHASCDGYELRESSRAPESTKWIRERCLEYTGRDFVQFVHCHINALPSRVRNSRGRRAGRESELLCRAGCKVQETTAHTIQQCHRTHGGRIERHNCVARFVAKSMESRGWKVQLEPNIRTAVGLKKPDIIAVKGGMGVIVDAQVVSGRIPLNDAHYEKRKKYGNHVELVEKVAGILGLPGPECVRTTSCTISWRGVWSSSSLKDLKTLLGLPNKACQIVPGLVLRGSHMNWTRWNQMTTTV

SEQ ID NO: 4577 - protein, 1018 aa, Notocelia uddmanniana
MRTGRANNPRRGERGGGESVVVEPADHRCPICGREFKTKIGLGVHKRSAHPVQANNDVAPIVAKRRWRDEEVAIMAKTEARLVHEQGSCGNAELLDALVGFGRTLEALKGRRRYPEYRALVQSYLAEYQEASDIQVEATPEVLPDVPLESPPPADEHPAVSCDGPSAADVLAALLRGAATRLAKRSSEQRAAGQRHMNDQTDNDHCTEPVRLSRRKRRRAEYARVQNLYRKCRSRAAAEIINGACRRVGHSLGELEAYWRPLLEKVSDAPGPTPKALAEIRRTVEDGGRARDFSQLWAPFSPDEIKASRIDLNTAPGPDGIRAEDWRSVSVAHKAELFNAWMTKGQIPIELRQCRTIFVPKTDAPAAPGEYRPITIASVPLRHMHALLAKRLLACCPPDIRQRGFITANGTLENTAVLDAILGDCRKNLRECHVAVLDFAKAFDTVSHAALCDLLKTRGLPGPFCDYVAGLYRSASTTLAVNGETSRPVVVGRGVRQGDPLSPILFNMVLDVVLAGLPGEVGYRLEGERVSALAYADDLVLLGSSKVGLQESLDCVDRVGAMMGLTLNPPKCSVLSMVPNCHIKKHKYLTESTFKLGGRYLKQVSCIERWRYLGVDFSAAGSERLECLIGAALTNIKRAPLKPQQRLEITRDHLIPRFVHGLVLGKISDDRLRMLDLQIRNSVREWLRLPKDVPLAYFHASTADGGLGVPSFRAFIPDLIIKRYGRLSSSEWQVARAASRSDRIRKKLKWGMRLFQRLSAEHPTSHRRTVCQYWREKLHASCDGYELRESSRAPESTKWIRERCLEYTGRDFVQFVHCHINALPSRVRNSRGRRAGRESELLCRAGCKVQETTAHTIQQCHRTHGGRIERHNCVARFVAKSMESRGWKVQLEPNIRTAVGLRKPDIIAVKGGMGVIVDAQVVSGRIPLNDAHYEKRKKYGNHVELVEKVAGILGLPGPECVRTTSCTISWRGVWSSSSLKDLKTLLGLPNKACQIVPGLVLRGSHMNWTRWNQMTTTV

SEQ ID NO: 4578 - protein, 875 aa, Notocelia uddmanniana
MAKTEARLVHEQGSCGNAELLDALVGFGRTLEALKGRRRYPEYRALVQSYLAEYQEAPDIQVEATPEVLPDVPLESPPPADEHPAVSCDGPSAADVLAALLRGAATRLAKRSSEQRAAGQRHMNDQTDNDHCTEPARLSRRKRRRAEYARVQNLYRKCRSRAAAEIIDGACRRVGHSLGELEAYWRPLLEKLSDAPGPTPKALTDLRRTVEDGGRARDFSQLWAPFSPDEIKASRIDLNTAPGPDGIRAEDWRSVSVAHKAELFNAWMTEGEIPSELRQCRTIFVPKTDAPAAPGEYRPITIASVPLRHMHALLAKRLLACCPPDIRQRGFITADGTLENTAVLDAILGDCRKNLRECHVAVLDFAKAFDTVSHAALCDLLKARGLPEPFCDYVAGLYRSASTTLAVNGETSRPVVVGRGVRQGDPLSPILFNMVLDVVLAGLSGEVGYRLEGERVSALAYADDLVLLGGSKVGLQESLDCVDRVGAMMGLTLNRPKCSVLSMVPNCHIKKHKYLTESTFKLGGRYLKQVSCIERWRYLGVDFSAAGSERLECLIGAALTNIKRAPLKPQQRLEITRDHLIPRFVHGLVLGKISDDRLRMLDLQIRNSVREWLRLPKDVPLAYFHASTADGGLGVPSFRAFIPDLIIKRYGRLSSSEWQVARAASRSDRIRKKLKWGMRLFQRLSAEHPTSHRRTVCQYWREKLHASCDGYELRESSRAPESTKWIRERCLEYTGRDFVQFVHCHINALPSRVRNSRGRRVGRESELLCRAGCKVQETTAHTIQQCHRTHGGRIERHNCVARFVAKSMESRGWKVQLEPNIRTAVGLRKPDIIAVKGGMGVIVDAQVVSRAAYLLMTRITKSVKSMATMLSWLRR

SEQ ID NO: 4579 - protein, 1018 aa, Notocelia uddmanniana
MRTGRANNPRRGERGGGESVVVEPADHRCPICGREFKTKIGLGVHKRSAHPVQANNDVAPIVAKRRWRDEEVAIMAKTEARLVHEQGSCGNAELLDALVGFGRTLEALKGRRRYPEYRALVQSYLAEYQEASDIQVEATPEVLPDVPLESPPPADEHPAVSCDGPSAADVLAALLRGAATRLAKRSSEQRAAGQRHMNDQTDNDHCTEPVRLSRRKRRRAEYARVQNLYRKCRSRAAAEIINGACRRVGHSLGELEAYWRPLLEKVSDAPGPTPKALAEIRRTVEDGGRARDFSQLWAPFSPDEIKASRIDLNTAPGPDGIRAEDWRSVSVAHKAELFNAWMTKGQIPSELRQCRTIFVPKTDAPAAPGEYRPITIASVPLRHMHALLAKRLLACCPPDIRQRGFITANGTLENTAVLDAILGDCRKNLRECHVAVLDFAKAFDTVSHAALCDLLKTRGLPGPFCDYVAGLYRSASTTLAVNGETSRPVVVGRGVRQGDPLSPILFNMVLDVVLAGLPGEVGYRLEGERVSALAYADDLVLLGSSKVGLQESLDCVDRVGAMMGLTLNPPKCSVLSMVPNCHIKKHKYLTESTFKLGGRYLKQVSCIERWRYLGVDFSAAGSERLECLIGAALTNIKRAPLKPQQRLEITRDHLIPRFVHGLVLGKISDDRLRMLDLQIRNSVREWLRLPKDVPLAYFHASTADGGLGVPSFRAFIPDLIIKRYGRLSSSEWQVARAASRSDRIRKKLKWGMRLFQRLSAEHPTSHRRTVCQYWREKLHASCDGYELRESSRAPESTKWIRERCLEYTGRDFVQFVHCHINALPSRVRNSRGRRAGRESELLCRAGCKVQETTAHTIQQCHRTHGGRIERHNCVARFVAKSMESRGWKVQLEPNIRTAVGLKKPDIIAVKGGMGVIVDAQVVSGRIPLNDAHYEKRKKYGNHVELVEKVAGILGLPGPECVRTTSCTISWRGVWSSRSLKDLKTLLGLPNKACQIVPGLVLRGSHMNWTRWNQMTTTV

SEQ ID NO: 4580 - protein, 1596 aa, Trachurus trachurus
MSRLLTLCDESNTKCVHSRIVNRYFQLYSNNKTLKLLLTENLKNVGNLYRKTEEYHSLLVEKFKEVIPDWESQVMLLNEPTLKNTDTTEDAIFCGDSNDVSHASTNETIEEKSTNLGSEPTTLATTCLLKVPKNQESVHPPIQTTDGRIVESISNVSDHCSPCGPSQNDETHATTVNSSIVPVNQQTSTKVSKLFSFEQLEKFLPFFQTNNEKRSINRRRATLVDLCKRLKTFAIEDIRNGSLDTLGLTNSDGSISIGFGVVIGSNLLNNNAPLTSMATQPAPVTPITSISPTEQLINICTYEIDELTSATYPSTEDTTNTDTTLDPTITNNEVICCDSNVIDRSVDVVKPPSESDGSPPIEPTTVTGIANPGNGNTTSAFFNLSKKRINFNQEDPSSLESEISVESDDNLETDVVYQFSQPTKRNEPCRLNDNIVTSKKQPKFITIGTDSNPASYLNTTDLSTPTPIMNSQDIADFISYERSAFSKSNTPKEAENSCQTTTLSTQPEEFEPHTDEDEFAETTQAESQPSIHENVQQPSTEQLLTQDVEDLVTQPPNPETTGTVDENNPPAPISYRERKEARRKDKEDASIELIAILNSNNSLEAPALYTLFIRKATEYAKKLGYHYIPQFGPKESTSSIRPPPTESTDPNTNQVQPNSIEHQTQLNTPQNTNSPENNPISQLPQLTQLHSQLQPNSQDEGRKATKRLRGLYRTNPKRCFREVTENKPMWCTADANSIASALTPVPPILPIPSSTIITPSQHSIPLTESTNLNLNINNQQQQAAATPYYEGTEDEIFYLHNEEVALAINRAKSDTSAGTDGIHVKFWKELPRSEYLLTTLFNRILKDGNPPKEWLEGRLILLPKEEHPVMTDPLQYRPISVTQTIYRLFTASLNLKIRPHVAPQLSKSQKGFIGSDGCAEHTFTLQETLDHCRRKRKKATLVWIDLKKAFDSVPHFAIFKVLEDYTFPKPLQEILKTLYTEGYNKYTDATGTTVHIPTNGRGVRQGCPLSPLIFNMVINPFLEKVDKGSLGFQLRDQRIGAQAFADDIVLMANDRLEMNTLVRQCEEFFDSLQMSANPKKCCQLSISFKKGKRVANDPDFVDANPLRLNNENIPLLQDFYKYLGTESNLLSFKDLPKVFVDFETKLNKLAKSKLLPFQKTELLKSYLIPTLDFTIKNHTLKVEQLKKVDRLVLFNVRTWIDLPKCTSNMFFYTPIALGGLGLKNLRKDYAALRLASGLSLLHSDDDLVRRTAMESMDEIISQRTQHQIPFLQFMNADREHINSKDIRSLFSSLRIHRKALGIKLTASPRNIAEHLTTLDLDLATLKVPSNIHPKSLESPTRIRRLRWHISEVHFQSWRAQPDQGRLVDCFSWLPKNNAWLRECNMKPSTYRFAAMGRLNCLPTKSVMARTQRAPDTQCRHCTCSVETLGHCLGGCRRGERLRTIRHNEVVKIIAERIRPRKYWDLLLDTHVPLTNSIRRPDIVLFNFKQKLVRIIDVTICYENGMSRFEQVLQHKREKYAQEGRLLEQQGYGVLRGALVFGALGSHHPSTMSTLSTLLNITAKKTHKQLLNDITHSVLDNSRLVWNNHVQSVVIPH

SEQ ID NO: 4581 - protein, 1177 aa, Poecilobdella manillensis
MHCNKYNSNSLYLQKLNAAILADQNKRRAEIRSVVSLSSSNSHQTETQSQNGLSEDYRSTVKVNNSKLANKKQQWTKEQYAELMWCFYYAQANKNEGGVVKGTYTTWRSRNPEIHQNINKDTLANTRRWIINTKKFSDMELQGIKNRACQNAERHLSETQTEIVIESISEGKFHSPQKAIDSLTIQYPQDPATNITDLEQQIKSRLLENKHLDFNNRPKLNKVRICKDTLEKIKAANEILSKMISGRQLNISEINVYCSASVIAGVQKPRDGPVGRKEPAWKVRISNKVEQYRKDLSIISEIKKGVATKRVHNKAKHLFKDESKSLEEKEQDIKMKLQATAQRLKRYCKRNDGYHQNKLFQEDAKKFYRHLCKRNEAISDPPSAEKIEEFWRGILENEIVHNTEAAWVRDEEIAFRNVVTEEWKEFTISEIQEVIKKSSNWKSPGPDNIQNFWIKRFTSLHSILTIAFNDLINNPENIPSWLTSGITFLLSKGANQNNPKNYRPITCLPTLYKLLTSAISNRLYTHLDKNNILPIEQKGCQRGSRGCKDQLLINKMIVSTAKRMKRNLAVAWIDYKKAFDSVPHSWILASMKMYGVPARITGFMECSMKEWKTELMLCHQLGCIKTNRISIKRGIFQGDSLSPLLFCLALVPLSNMLNKLKVGYEIEPKEQISHLLYMDDLKIFTKTETQLNKALTTVKTFTDDICMEFGLDKCAVAIMKRGKQIKSRNMPFDDHNSIQSLNEEEAYKYLGIYENGDIKHPEMKEKIAREYYRRVRLILKSELNSKNKLSAIPVLTYSFGIIDWRKSEIDKMDRKTRKLLTMHGLHHPKGDVSQLYIKRRNGGRGLIQLMSAYSCSMVNLSDYIEQGKDRLCSLVKKHEAGKAKYSLLKEAKTIKNKYLSLPTVQTSVKEMLKDNMEKERINELREKPMHGQFFCNLEKNWVDKEASCAWLRSAGLKGETESLLIMAAQDQTLNTRYHQRMILKQKIDGNCRICGKAQETISHITSGCTVLAATEYLHRHNKVASYIHWVVCRELGWEVPKKWYEHTPQSVTNIKDYTILWDYAIITDRKILANRPDIVIHDRRSKSCMLIDVSVPDDKNIALKEAEKISKYKDLEIEINRMWKVKSKVVPVIVGALGTLRKDFTKYVELIPGRPKTSEIQKISLLGTAHILRKVLG

SEQ ID NO: 4582 - protein, 1041 aa, Poecilobdella manillensis
MELQDIKNRAERHLSETQTEIVIESISEGKFQSPQKAIDSLTIQYPQDPATNITALEQQIKSRLLENKHLDFNNRPKLNKVRICKDTLEKIKATNEILSKMISGRQLNISEINDLIYCSASVIAGVQKPRDGPVGRKEPAWKVRIINKVEQYRKDLSIISEIKKGVATKRVHNKAKHLFKDESKSLEEKEQDIKMKLQATAQRLKRYCKRNDGYHQNKLFQEDAKKFYRHLCKRNEAISDPPSAEKIEEFWRGILENEIVHNTEAAWVRDEEIAFRNVVTEEWKEFTISEIQEVIKKSSNWKSPGPDNIQNFWIKRFTSLHSILTIAFNDLINNPENIPSWLTSGITFLLSKGANQNNPKNYRPITCLPTLYKLLTSAISNRLYTHLDKNNILPIEQKGCQRGSRGCKDQLLINKMIVSTAKRMKRNLAMAWIDYKKAFDSVPHSWILASMKMYGVPARITGFMECSMKEWKTELMLCHQLGCIKTNRISIKRGIFQGDSLSPLLFCLALVPLSNMLNKLKLGYEIEPKEQISHLLYMDDLKIFTKTETQLNKALTTVKTFTDDICMEFGLDKCAVAIMKRGKQIKSRNMSFDDHNSIQSLNEEEAYKYLGIDENGDIKHPEMKEKIAREYYRRVRLILKSELNSKNKLSAINALAIPVLTYSFGIIDWRKSEIDKMDRKTRKLLTMHGLHHPKGDVSRLYIKRRNGGRGLIQLMSAYSCSMVNLSDYIEQGKDRLCSLVKKHEAGKAKYSLLKEAKTIKNKYLSLPTVQTSVKEMLKDNMEKERINELRKKPMHGQFFCNLEKNWVDKEASCAWLRSAGLKGETESLIMAAQDQTLNTRYHQRMILKQKIDGNCRICGKAQETISHITSGCTVLAATEYLHRHNKVASYIHWVVCRELGWEVPKKWYEHMPQSVTNIKDYTILWDYAIITDRKILANRPDIVIHDRRSKSCMLIDVSVPDDKNIALKEAEKISKYKDLEIEINRMWKVKSKVVPVIVGALGTLRKDFTKYVELIPGRPKTSEIQKISLLGTAHILRKVLG

SEQ ID NO: 4583 - protein, 1180 aa, Poecilobdella manillensis
MHFNKYNSNSLYLQKLNAAILADQNKRRAEIRSVVSLSSSNSHQTETQSQNGLSEDYKSTVKVNNSKLANKKQQWTKEQYAELMWCFYYAQANKNEGGVVKGTYTTWRSRNPEIHQNINKDTLANTRRWIINTKKFNDKELQCIKNRACQNAERHLSETQTEIVIESEGKFQSPQKAIDSLTIQYPQDPATNITELEQQIKSRLLENKHLDFNNRPKLNKVRICKDTLEKIKAANEILSKMISGRQLNISEINDLIYCSASVIAGVQKPRDGPVGRKEPAWKVRISNKVEQYRKDLSIISEIKKGVATKRVHNKAKHFFKDESKSLEEKEQDIKMKLQATAQRLKRYCKRNDGYHQNKLFQEDAKKFYRHLCKRNEAISDPPSAEKIEEFWRGILENEIVHNTEAAWVRDEEIAFRNVVTEEWKEFTISEIQEVIKKSSNWKSPGPDNIQNFWIKRFTSLHSILTIAFNDLINNPENIPSWLTSGITFLLSKGANQHNPKNYRPITCLPTLPVLTSAISNRLYTHLDKNNILPIEQKGCQRGSRGCKDQLLINKMIVSTAKRMKRNLAVAWIDYKKAFDSVPHSWILASMKMYGVPARITGFMECSMKEWKTELMLCHQLGCIKTNRISIKRGIFQGDSLSPLLFCLALVPLSNMLNKLKLGYEIEPKEQISHLLYMDDLKIFTKTETQLNKALTTVKTFTDDICMEFGLDKCAVAIMKRGKQIKSRNMPFDDHNSIQSLNEEEAYKYLGIDENGDIKHPEMKEKIAREYYRRVRLILKSELNSKNKLSAINALAIPVLTYSFGIIDWRKSEIDKMDRKTRKLLTMHGLHHPKGDVSRLYIKRRNGGRGLIQLMSAYSCSMVNLSDYIEQGKDRLCSLVKKHEAGKAKYSLLKEAKTIKNKYLSLPTVQTSVKEMLKDNMEKERINELRVKPMHGQFFCNLEKNWVDKEASCAWLRSAGLKGETESLIMAAQDQTLNTRYHQRMILKQKIDGNCRICGKAQETISHITSGCTVLAATEYLHRHNKVASYIHWVVCRELGWEVPKKWYEHTPQSVTNIKDYTILWDYAIITDRKILANRPDIVIHDRRSKSCLLIDVSVPDDKNIALKEAEKISKYKDLEIEINRMWKVKSKVVPVIVGALGTLRKDFTKYVELIPGRPKTSEIQKISLLGTAHILRKVLG

SEQ ID NO: 4584 - protein, 1183 aa, Poecilobdella manillensis
MHFNKYNSNSLYLQKLNAAILADQNKRRAEIRSVVSLSSSNSHQTETQSQNGLSEDYRSTVKVNNSKLANKKQQWTKEQYAELMWCFYYAQANKNEGGVVKGTYTTWRSRNPEIHQNINKDTLANTRRWIINTKKFSDMELQGIKNRACQNAERHLSETQTEIVIESISEGKFQSPQKAIDSLTIQYPQDPVTNIADLEQQIKSRLLENKHLDFNNRPKLNKVRICKDTLEKIKAANEILSKMISGRQLNISEINDLIYCSASVIAGVQKPRDGPVGRKEPSWKVRISNKVEQYRKDLSIISEIKKGVATKRVHNKAKHLFKDESKSLEEKEQDIKMKLQATAQRLKRYCKRNDGYHQNKLFQEDAKKFYRHLCKRNEAISDPPSAEKIEEFWRGILENEIVHNTEAAWVRDEEIAFRNVVTEEWKEFTISEIQEVIKKSSNWKSPGPDNIHNFWIKRFTSLHSILTIAFNDLINNPENIPSWLTSGITFLLSKGANQNNPKNYRPITCLPTLYKLLTSAISNRLYTHLDKNNILPIEQKGCQRGSRGCKDQLLINKMIVSTAKRMKRNLAMAWIDYKKAFDSVPHSWILASMKMYGVPARITGFMECSMKEWKTELMLCHQLGCIKTNRISIKRGIFQGDSLSPLLFCLALVPLSNMLNKLKVGYETEPKEQISHLLYMDDLKIFTKTETQLNKALTTVKTFTDDICMEFGLDKCAVAIMKRGKQIKSRNMPFDDHNSIQSLNEEEAYKYLGIDENGDIKHPEMKEKIAREYYRRVRLILKSELNSKNKLSAINALAIPVLTYSFGIIDWRKSEIDKMDRKTRKLLTMHGLHHPKGDVSRLYIKRRSGGRGLIQLMSAYSCSMVNLSDYIEQGKDRLCSLVRKHEAGKAKYSLLKEAKTIKNKYLSLPTVQTSVKEMLKDNMEKERINELREKPMHGQFFCNLEKNWVDKEASCAWLRSAGLKGETESLIMAAQDQTLNTRYHQRMILKQKIDGNCRICGKAQETISHITSGCTVLAATEYLHRHNKVASYIHWIVCRELGWEVPKKWYEHTPQSVTNIKDYTILWDYAIITDRKILANRPDIVIHDRRSKSCLLIDVSVPDDKNIALKEAEKISKYKDLEIEINRMWSVKSKVVPVIVGALGTLRKDFTKYVELIPGRPKTSEIQKISLLGTAHILRKVLG

SEQ ID NO: 4585 - protein, 941 aa, Poecilobdella manillensis
MISGRQLNISEINDLIYCSASVIAGVQKPRDGPVGRKEPAWKVRINNKVEQYRKDISIISEIKKGVATKRVHNKAKHLFKDESKSLEEKEQDIKMKLQATAQRLKRYCKRNDGYHQNKLFQEDAKKFYRHLCKRNEAISDPPSVEKIEEFWRGILENEIVHNTEAAWVREEEIAFRNVVTEEWKEFKISEIQEVIKKSSNWKSPGPDNIQNFWIKRFTSLHSILTIAFNDLINNPENIPSWLTSGITFLLSKGANQHNSKNYRPITCLPTLYKLLTSAISNRLYTHLDKNNILPIEQKGCQRGSRGCKDQLLINKMIVSTAKRMKRNLAVAWIDYKKAFDSVPHSWILASMKMYGVPARITGFMECSMKEWKTELMLCHQLGCIKTNRISIKRGIFQGDSLSPLLFCLALVPLSNMLNKLKLGYEIEPKEQISHLLYMDDLKIFTKTETQLNKALTTVKTFTDDICMEFGLDKCAVAIMKRGKQIKSRNMPFDDHNSIQSLNEEEAYKYLGIDENGDIKHPEMKEKIAREYYRRVRLILKSELNSKNKLSAINALAIPVLTYSFGIIDWRKSEIDKMDRKTRKLLTMHGLHHPKGDVSRLYIKRRNGGRGLIQLMSAYSCSMVNLSDYIEQGKDRLCSLVKKHEAGKAKYSLLKEAKTIKNKYLSLPTVQTSVKEMLKDNMEKERINELREKPMHGQFFCNLEKNWVDKEASCAWLRSAGLKGETESLIMAAQDQTLNTRYHQRMILKQKIDGNCRICGKAQETISHITSGCTVLAATEYLHRHNKVASYIHWVVCRELGWEVPKKWYEHTPQSVTNIKDYTILWDYAIITDRKILANRPDIVIHDRRSKSCLLIDVSVPDDKNIALKEAEKISKYKDLEIEINRMWNVKSKVVPVIVGALGTLRKDFTKYVELIPGRPKTSEIQKISLLGTAHILRKVLG

SEQ ID NO: 4586 - protein, 1183 aa, Poecilobdella manillensis
MHFNKYNSNSLYLQKLNAAILADQNKRRAEIRSVVSLSSSNSHQTETQSQNGLSEDYRSTVKVNNSKLANKKQQWTKEQYAELMWCFYYAQANKNEGGVVKGTYTTWRSRNPEIHQNINKDTLANTRRWIINTKKFTDKELQGIKNRACQNAERHLSETQTEIVIESISEGKFQSPQKAIDSLTIQYPQDPATNITDLEQQIKSRLLENKHLDFNNRPKLNKVRICKDTLEKIKAANEILSKMISGRQLNISEINDLIYCSASVIAGVQKPRDGPVGRKEPAWKVRISNKVEQYRKDLSIISEIKKGVATKRVHNKAKHLFKDESKSLEEKEQDIKMKLQATAQRLKRYCKRNDGYHQNKLFQEDAKKFYRHLCKRNEAISDPPSVEKIEEFWRGILENEIVHNTEAAWVRDEEIAFRNVVTEEWKEFKISEIQEVIKKSSNWKSPGPDNIQNFWIKRFTSLHSILTIAFNDLINNPENIPSWLTSGITFLLSKGANQHNPKNYRPITCLPTLYKLLTSAISNRLYTHLDKNNILPIEQKGCQRGSRGCKDQLLINKMIVSTAKRMKRNLAVAWIDYKKAFDSVPHSWILASMKMYGVPARITGFMECSMKEWKTELMLCHQLGCIKTNRISIKRGIFQGDSLSPLLFCLALVPLSNMLNKLKLGYEIEPKEQISHLLYMDDLKIFTKTETQLNKALTTVKTFTDDICMEFGLDKCAVAIMKRGKQIKSRNMPFDDHNSIQSLNEEEAYKYLGIDENGDIKHPEMKEKIAREYYRRVRLILKSELNSKNKLSAINAVAIPVLTYSFGIIDWRKSEIDKMDRKTRKLLTMHGLHHPKGDVSRLYIKRRNGGRGLIQLMSAYSCSMVNLSDYIEQGKDRLCSLVKKHEAGKAKYSLLKEAKTIKNKYLSLPTVQTSVKEMLKDNMEKERINELREKPMHGQFFCNLEKNWVDKEASCAWLRSAGLKGETESLIMAAQDQTLNTRYHQRMILKQKIDGNCRICGKAQETISHITSGCTVLAATEYLHRHNKVASYIHWVVCRELGWEVPKKWYEHTPQSVTNIKDYTILWDYAIITDRKILANRPDIVIHDRRSKSCLLIDVSVPDDKNIALKEAEKISKYKDLEIEINRMWKVKSKVVPVIVGALGTLRKDFTKYVELIPGRPKTSEIQKISLLGTAHILRKVLG

SEQ ID NO: 4587 - protein, 1183 aa, Poecilobdella manillensis
MHFNKYNSNSLYLQKLNAAILADQNKRRAEIRSVVSLSSSNSHQTETQSQNGLSEDYRSTVKVNNSKLANKKQQWTKEQYAELMWCFYYAQANKNEGGVVKGTYTTWRSRNPEIHQNINKDTLANTRRWIINTKKFSDMELQGIKNRACQNAERHLSETQTEIVIESISEGKFQSPQKAIDSLTIQYPQDPATNITDLEQQIKSRLLENKHLDFNNRPKLNKVRICKDTLEKIKAANEILSKMISGRQLNISEINDLIYCSASVIAGVQKPRDGPVGRKEPAWKVRISNKVEQYRKDLSIISEIKKGVATKRVHNKAKHLFKDESKSLEEKEQDIKMKLQATAQRLKRYCKRNDGYHQNKLFQEDAKKFYRHLCKRNEAISDPPSAEKIEEFWRGILENEIVHNTEAAWVRDEEIAFRNVVTEEWKEFTISEIQEVIKKSSNWKSPGPDNIQNFWIKRFTSLHSILTIAFNDLINNPENIPSWLTSGVTFLLSKGANQNNPKNYRPITCLPTLYKLLTSAISNRLYTHLDKNNILPIEQKGCQRGSRGCKDQLLINKMIVSTAKRMKRNLAMAWIDYKKAFDSVPHSWILASMKMYGVPARITGFMECSMKEWKTELMLCHQLGCIKTNKISIKRGIFQGDSLSPLLFCLALVPLSNMLNKLKLGYEIEPKEQISHLLYMDDLKMFTKTETQLNKALTTVKTFTDDICMEFGLDKCAVAIMKRGKQIKSRNMPFDDHNSIQSLNEEEAYKYLGIDENGDIKHPEMKEKIAREYYRRVRLILKSELNSKNKLSAINALAIPVLTYSFGIIDWRKSEIDKMDRKTRKLLTMHGLHHPKGDVSRLYIKRRNGGRGLIQLMSAYRCSMVNLSDYIEQGKDRLCSLVKKHEAGKAKYSLLKEAKTIKNKYLSLPTVQTSVKEMLKDNMEKERINELREKPMHGQFFCNLEKNWVDKEASCAWLRSAGLKGETESLIMAAQDQTLNTRYHQRMILKQQIDGNCRICGKAQETISHITSGCTVLAATEYLHRHNKVARYIHWIVCRELGWEVPKKWYEHTPQSVTNIKDCTILWDYAIITDRKILANRPDIVIHDRRSKSCMLIDVSVPDDKNIALKEAEKISKYKDLEIEINRMWKVKSKVVPVIVGALGTLRKDFTKYVELIPGRPKTSEIQKISLLGTAHILRKVLG

SEQ ID NO: 4588 - protein, 1183 aa, Poecilobdella manillensis
MHFNKYNSNSLYLQKLNAAILADQNKRRAEIRSVVSLSSSNSHQTETQSQNGLSEDYRSTVKVNNSKLANKKQQWTKEQYAELMWCFYYAQANKNEGGVVKGTYTTWRSRNPEIHQNINKDTLANTRRWIINTKKFSDMELQGIKNRACQNAERHLSETQTEIVIESISEGKFHSPQKAIDSLTIQYPQDPATNIADLEQQIKSRLLENKHLDFNNRPKLNKVRICKDTLEKIKAANEILSKMISGRQLNISEINDLIYCSASVIAGVQKPRDGPVGRKEPAWKVRISNKVEQYRKDLSIISEIKKGVATKRVHSKAKHLFKDESKSLEEKEQDIKMKLQATAQRLKRYCKRNDGYHQNKLFQEDAKKFYRHLCKRNEAISDPPSAEKIEEFWRGILENEIVHNTEAAWVRDEEIAFRNVVTEEWKEFTISEIQEVIKKSSNWKSPGPDNIQNFWIKRFTSLHSILTIAFNDLINNPENIPSWLTSGITFLLSKGANQNNPKNYRPITCLPTLYKLLTSAISNRLYTHLDKNNILPIEQKGCQRGSRGCKDQLLINKMIVSTAKRMKRNLAMAWIDYKKAFDSVPHSWILASMKMYGVPDRITGFMECSMKEWKTELMLCHQLGCIKTNRISIKRGIFQGDSLSPLLFCLALIPLSNMLNKLKVGYEIEPKEQISHLLYMDDLKIFTKTETQLNKALTTVKTFTDDICMEFGLDKCAVAIMKRGKQIKSRNMPFDDHNSIQSLNEEEAYKYLGIDENGDIKHPEMKEKIAREYYRRVRLILKSELNSKNKLSAINALAIPVLTYSFGIIDWRKSEIDKMDRKTRKLLTMHGLHHPKGDVSRLYIKRRNGGRGLIQLMSAYSCSMVNLSDYIEQGKDRLCSLVKKHEAGKAKHSLLKEAKIIKNKYLPWPTVQTSVKEMLKDNMEKERINELREKPMHGQFFCNLEKNWVDKEASCAWLRSAGLKGETESLIMAAQDQTLNTRYHQRMILKQQIDGNCRICGKAQETIRHITSGCTVLAATEYLHRHNKVASYIHWIVCRELGWEVPKKWYEHTPQSVTNIKDYTILWDYTIITDRKILANRPDIVIHDRRSKSCMLIDVSVPDDKNIALKEAEKISKYKDLEIEINRMWKVKSKVVPVIVGALGTLRKDFTKYVELIPGRPKTSEIQKISLLGTAHILRKVLG

SEQ ID NO: 4589 - protein, 1183 aa, Poecilobdella manillensis
MHFNKYNSNSLYLQKLNAAILADQNKRRAEIRSVVSLSSSNSHQTETQSQNGLSEDYRSTVKVNNSKLANKKQQWTKEQYAELMWCFYYAQANKNEGGVVKGTYTTWRSRNPEIHQNINKDTLANTRRWIINTKKFNDKELQGIKNRACQNAERHVSETQTEIVIESISEGKFQSPQKAIDSLTIQYPQDPATNITELEQQIKSRLLENKHLDFNNRPKLNKVRICKDTLEKVKAANEILSKMISGRQLNISEINDLIYCSASVIAGVQKPRDGPVGRKEPAWKVRISNKVEQYRKDLSIISEIKKGVATKRVHNKAKHLFKDESKSLEEKEQDIKMKLQATAQRLKRYCKRNDGYHQNKLFQEDAKKFYRHLCKRNEAISDPPSAEKIEEFWRGILENEIVHNTEAAWVRDEEIAFRNVVTEEWKEFTISEIQEVIKKSSNWKSPGPDNIQNFWIKRFTSLHSILTIAFNDLINNPENIPSWLTSGITFLLSKGANQNNPINYRPITCLPTLYKLLTSAISNRLYTHLDKNNILPIEQKGCQRGSRGCKDQLLINKMIVSTAKRMKRNLAVAWIDYKKAFDSVPHSWILASMKMYGVPARITGFMECSMKEWKTELMLCHQLGCIKTNRISIKRGIFQGDSLSPLLFCLALVPLSNMLNKLKVGYEIEPKEQISHLLYMDDLKIFTKTETQLNKALTTVKTFTDDICMEFGLDKCAVAIMKRGKQIKSRNMPFDDHNSIQSLNEEEAYKYLGIDENGDIKHPEMKEKIAREYYRRVRLILKSELNSKNKLSAINALAIPVLTYSFGIIDWRKSEIDKMVRKTRKLLTMHGLHHPKGDVSRLYIKRRNGGRGLIQLMSAYSCSMVNLSDYIEQGKDRLCSLVKKHEAGKAKYSLLKEAKTIKNKYLSLPTVQTSVKEMLKDNMEKERINELREKPMHGQFFCNLEKNWVDKEASCAWLRSAGLKGETESLIMAAQDQTLNTRYHQRMILKQKIDGNCRICGKAQETISHITSGCTVLAATEYLHRHNKVASYIHWVVCRELGWEVPKKWYEHTPQSVTNIKDYTILWDYAIITDRKILANRPDIVIHDRRSKSCLLIDVSVPDDKNIALKEAEKISKYKDLEIEINRMWKVKSKVVPVIVGALGTLRKDFTKYVELIPGRPKTSEIQKISLLGTAHILRKVLG

SEQ ID NO: 4590 - protein, 1183 aa, Poecilobdella manillensis
MHFNKYNSNSLYLQKLNAAILADQNKRRAEIRSVVSLSSSNSHQTETQSQNGLSEDYKSTVKVNNSKLANKKQQWTKEQYAELMWCFYYAQANKNEGGVVKGTYTTWRSRNPEIHQNINKDTLANTRRWIINTKKFTDKELQGIKNRACQNAERHLSETQTEIVIESISEGKFQSPQKAIDSLTIQYPQDPATNITELEQQIKSRLLENKHLDFNNRPKLNKVRICKDTLEKIKAANEILSKMISGRQLNISEINDLIYCSASVIAGVQKPRDGPVGRKEPAWKVRINNKVEQYRKDLSIISEIKKGVATKRVHNKAKHLFKDESKSLEEKEQDIKMKLQATAQRLKRYCKRNDGYHQNKLFQEDAKKFYRHLCKRNEAISDPPSVEKIEEFWRGILENEIVHNTEAAWVRDEEIAFRNVVTEEWKEFKISEIQEVIKKSSNWKSPGPDNIQNFWIKRFTSLHSILTIAFNDLINNPENIPSWLTSGITFLLSKGANQHNPKNYRPITCLPTLYKLLTSAISNRLYTHLDKNNILPIEQKGCQRGSRGCKDQLLINKMIVSTAKRMKRNLAVAWIDYKKAFDSVPHSWILASMKMYGVPARITGFMECSMKEWKTELMLCHQLGCIKTNRISIKRGIFQGDSLSPLLFCLALVPLSNMLNKLKLGYEIEPKEQISHLLYMDDLKIFTKTETQLNKALTTVKTFTDDICMEFGLDKCAVAIMKRGKQIKSRNMPFDDHNSIQSLNEEEAYKYLGIDENGDIKHPEMKEKIAREYYRRVRLILKSELNSKNKLSAINALAIPVLTYSFGIIDWRKSEIDKMDRKTRKLLTMHGLHHPKGDVSRLYIKRRNGGRGLIQLMSAYSCSMVNLSDYIEQGKDRLCSLVKKHEAGKAKYSLLKEAKTIKNKYLSLPTVQTSVKEMLKDNMEKERINELREKPMHGQFFCNLEKNWVDKEASCAWLRSAGLKGETESLIMAAQDQTLNTRYHQRMILKQKIDGNCRICGKAQETISHITSGCTVLAATEYLHRHNKVASYIHWVVCCELGWEVPKKWYEHTPQSVTNIKDYTILWDYAIITDRKILANRPDIVIHDRRSKSCLLIDVSVPDDKNIALKEAEKISKYKDLEIEINRMWKVKSKVVPVIVGALGTLRKDFTKYVELIPGRPKTSEIQKISLLGTAHILRKVLG

SEQ ID NO: 4591 - protein, 1183 aa, Poecilobdella manillensis
MHFNKYNSNSLYLQKLNAAILADQNKRRAEIRSVVSLSSSNSHQTETQSQNGLSEDYGSTVKVNNSKLANKKQQWTKEQYAELMWCFYYAQANKNEGGVVKGTYTTWRSRNPEIHQNINKDTLANTRRWIINTKKFTDKELQGIKNRAYQNAERHLSETQTEIVIESISEGKFQSPQKAIDSLTIQYPQDPATNITELEQQIKSRLLENKHLDFNNRPKLNKVRICKDTLEKIKAANEILSKMISGRQLNISEINDLIYCSASVIAGVQKPRDGPVGRKEPAWKVRISNKVEQYRKDLSIISEIKKGVATKRVHNKAKHLFKDESKSLEEKEQDIKMKLQATAQRLKRYCKRNDGYHQNKLFQEDAKKFYRHLCKRNEAISDPPSVEKIEEFWRGILENEIVHNTEAAWVRDEEIAFRNVVTEEWKEFKISEIQEVIKKSSNWKSPGPDNIQNFWIKRFTSLHSILTIAFNDLINNPENIPSWLTSGITFLLSKGANQNNPKNYRPITCLPTLYKLLTSAISNRLYTHLDKNNILPIEQKGCQRGSRGCKDQLLINKMIVSTAKRMKRNLAVAWIDYKKAFDSVPHSWILASMKMYGVPARITGFMECSMKEWKTELMLCHQLGCIKTNRISIKRGIFQGDSLSPLLFCLALVPLSNMLNKLKLGYEIEPKEQISHLLYMDDLKIFTKTETQLNKALTTVKTFTDDICMEFGLDKCAVAIMKRGKQIKSRNMPFDDHNSIQSLNEEEAYKYLGIDENGDIKHPEMKEKIAREYYRRVRLILKSELNSKNKLSAINALAIPVLTYSFGIIDWRKSEIDKMDRKTRKLLTMHGLHHPKGDVSRLYIKRRNGGRGLIQLMSAYSCSMVNLSDYIEQGKDRLCSLVKKHEAGKAKYSLLKEAKTIKNKYLSLPTVQTSVKEMLKDNMEKERINELREKPMHGQFFCNLEKNWVDKEASCAWLRSAGLKGETESLIMAAQDQTLNTRYHQRMILKQKIDGNCRICGKAQETISHITSGCTVLAATEYLHRHNKVASYIHWVVCRELGWEVPKKWYEHTPQSVTNIKDYTILWDYAIITDRKILANRPDIVIHDRRSKSCLLIDVSVPDDKNIALKEAEKISKYKDLEIEINRMWKVKSKVVPVIVGALGTLRKDFTKYVELIPGRPKTSEIQKISLLGTAHILRKVLG

SEQ ID NO: 4592 - protein, 1045 aa, Poecilobdella manillensis
MELQGIKNRACQNAERHLSETQTEIVIESISEGKFQSPQKAIDSLTIQYPQDPATNITDLEQQIKSRLLENKHLDFNNRPKLNKVRICKDTLEKIKAANEILSKMISGRQLNISEINDLIYCSASVIAGVQKPRDGPVGRKEPAWKVRISNKVEQYRKDLSIISEIKKGVATKRVHNKAKHLFKDESKSLEEKEQDIKMKLQATAQRLKRYCKRNDGYHQNKLFQEDAKKFYRHLCKRNEAISDPPSAEKIEEFWRGILENEIVHNTEAAWVRDEEIAFRNVVTEEWKEFTISEIQEVIKKSSNWKSPGPDNIQNFWIKRFTSLHSILTIAFNDLINNPENIPSWLTSGVTFLLSKGANQNNPKNYRPITCLPTLYKLLTSAISNRLYTHLDKNNILPIEQKGCQRGSRGCKDQLLINKMIVSTAKRMKRNLAMAWIDYKKAFDSVPHSWILASMKMYGVPARITGFMECSMKEWKTELMLCHQLGCIKTNKISIKRGIFQGDSLSPLLFCLALVPLSNMLNKLKLGYEIEPKEQISHLLYMDDLKMFTKTETQLNKALTTVKTFTDDICMEFGLDKCAVAIMKRGKQIKSRNMPFDDHNSIQSLNEEEAYKYLGIDENGDIKHPEMKEKIAREYYRRVRLILKSELNSKNKLSAINALAIPVLTYSFGIIDWRKSEIDKMDRKTRKLLTMHGLHHPKGDVSRLYIKRRNGGRGLIQLMSAYRCSMVNLSDYIEQGKDRLCSLVKKHEAGKAKYSLLKEAKTIKNKYLSLPTVQTSVKEMLKDNMEKERINELREKPMHGQFFCNLEKNWVDKEASCAWLRSAGLKGETESLIMAAQDQTLNTRYHQRMILKQQIDGNCRICGKAQETISHITSGCTVLAATEYLHRHNKVARYIHWIVCRELGWEVPKKWYEHTPQSVTNIKDCTILWDYAIITDRKILANRPDIVIHDRRSKSCMLIDVSVPDDKNIALKEAEKISKYKDLEIEINRMWKVKSKVVPVIVGALGTLRKDFTKYVELIPGRPKTSEIQKISLLGTAHILRKVLG

SEQ ID NO: 4593 - protein, 1183 aa, Poecilobdella manillensis
MHFNKYNSNSLYLQKLNAAILADQNKRRAEIRSVVSLSSSNSHQTETQSQNGLSEDYKSTVKVNNSKLANKKQQWTKEQYAELMWCFYYAQANKNEGGVVKGTYTTWRSRNPEIHQNINKDTLANTRRWIINTKKFNDKELQGIKNRACQNAERHLSETQTEIVVESISEGKFQSPQKAIDSLTIQYPQDPATNITELEQQIKSRLLENKHLDFNNRPKLNKVRICKDTLEKIKAANEILSKMISGRQLNISEINDLIYCSASVIAGVQKPRDGPVGRKEPAWKVRISNKVEQYRKDLSIISEIKKGVATKRVHNKAKHLLKDESKSLEENEQDIKMKLQATAQRLKRYCKRNDGYHQNKLFQEDAKKFYRHLCKRNEAISDPPSAEKIEEFWRGILENEIVHNTEAAWVRDEEIAFRNVVTEEWKEFTISEIQEVIKKSSNWKSPGPDNIQNFWIKRFTSLHSILTIAFNDLINNPENIPSWLTSGITFLLSKGANQHNPKNYRPITCLPTLYKLLTSAISNRLYTHLDKKNILPIEQKGCQRGSRGCKDQLLINKMIVSTAKRMKRNLAVAWIDYKKAFDSVPHSWILASMKMYGVPARITGFMECSMKEWKTELMLCHQLGCIKTNRISIKRGIFQGDSLSPLLFCLALVPLSNMLNKLKLGYEIEPKEQISHLLYMDDLKIFTKTETQLNKALTTVKTFTDDICMEFGLDKCAVAIMKRGKQIKSRNMPFDDHNSIQSLNEEEAYKYLGIDENGDIKHPEMKEKIAREYYRRVRLILKSELNSKNKLSAINALAIPVLTYSFGIIDWRKSEIDKMDRKTRKLLTMHRLHHPKGDVSRLYIKRRNGGRGLIQLMSAYSCSMVNLSDYIEQGKDRLCSLVKKHEAGKAKYSLLKEAKTIKNKYLSLPTVQTSVKEMLKDNMEKERINELREKPMHGQFFCNLEKNWVDKEASCAWLRSAGLKGETESLIMAAQDQTLNTRYHQRMILKQKIDGNCRICGKAQETISHITSGCTVLAATEYLHRHNKVASYIHWVVCRELGWEVPKKWYEHTPQSVTNIKDYIILWDYAIITDRKILANRPDIVIHDRRSKSCLLIDVSVPDDKNIALKEAEKISKYKDLEIEINRMWKVKSKVVPVIVGALGTLRKDFTKYVELIPGRPKTSEIQKISLLGTAHILRKVLG

SEQ ID NO: 4594 - protein, 847 aa, Poecilobdella manillensis
MKLQATAQRLKRYCKRNDGYHQNKLFQEDAKKFYRHLCKRNEAISDPPSVEKIEEFWRGILENEIVHNTEAAWVRDEEIAFRNVVTEEWKEFKISEIQEVIKKSSNWKSPGPDNIQNFWIKRFTSLHSILTIAFNDLINNPENIPSWLTSGITFLLSKGANQHNPKNYRPITCLPTLYKLLTSAISNRLYTHLDKNNILPIEQKGCQRGSRGCKDQLLINKMIVSTAKRMKRNLAVAWIDYKKAFDSVPHSWILASMKMYGVPARITGFMECSMKEWKTELMLCHQLGCIKTNRISIKRGIFQGDSLSPLLFCLALAPLSNMLNKLKLGYEIEPKEQISHLLYMDDLKIFTKTETQLNKALTTVKTFTDDICMEFGLDKCAVAIMKRGKQIKSRNMPFDDHNSIQSLNEEEAYKYLGIDENGDIKHPEMKEKIAREYYRRVRLILKSELNSKNKLSAINALAIPVLTYSFGIIDWRKSEIDKMDRKTRKLLTMHGLHHPKGDVSRLYIKRRNGGRGLIQLMSAYSCSMVNLSDYIEQGKDRLCSLVKKHEAGKAKYSLLKEAKTIKNKYLSLPTVQTSVKEMLKDNMEKERINELREKPMHGQFFCNLEKNWVDKEASCAWLRSAGLKGETESLIMAAQDQTLNTRYHQRMILKQKIDGNCRICGKAQETISHITSGCTVLAATEYLHRHNKVASYIHWVVCRELGWEVPKKWYEHTPQSVTNIKDYTILWDYAIITDRKILANRPDIVIHDRRSKSCLLIDVSVPDDKNIALKEAEKISKYKDLEIEINRMWKVKSKVVPVIVGALGTLRKDFTKYVELIPGRPKTSEIQKISLLGTAHILRKVLG

SEQ ID NO: 4595 - protein, 1183 aa, Poecilobdella manillensis
MHFNKYNSNSLYLQKLNAAILADQNKRRAEIRSVVSLSSSNSHQTETQSQNGLSEDYKSTVKVNNSKLANKKQQWTKEQYAELMWCFYYAQANKNEGGVVKGTYTTWRSRNPEIHQNINKDTLANTRRWIINTKKFNDKELQGIKNRACQNAERHLSETQTEIVVESISEGKFQSPQKAIDSLTIQYPQDPATNITELEQQIKSRLLENKHLDFNNRPKLNKVRICKDTLEKIKAANEILSKMISGRQLNISEINDLIYCSASVIAGVQKPRDGPVGRKEPAWKVRISNKVEQYRKDLSIISEIKKGVATKRVHNKAKHLFKDESKSLEEKEQDIKMKLQATAQRLKRYCKRNDGYHQNKLFQEDAKKFYRHLCKRNEAISDPPSVEKIEEFWRGILENEIVHNTEAAWVRDEEIAFRNVVTEEWKEFKISEIQEVIKKSSNWKSPGPDNIQNFWIKRFTSLHSILTIAFNDLINNPENIPSWLTSGITFLLSKGANQHNPKNYRPITCLPTLYKLLTSAISNRLYTHLDKNNILPIEQKGCQRGSRGCKDQLLINKMIVSTAKRMKRNLAVAWIDYKKAFDSVPHSWILASMKMYGVPARITGFVECSMKEWKTELMLCHQLGCIKTNRISIKRGIFQGDSLSPLLFCLALVPLSNMLNKLKLGYEIEPKEQISHLLYMDDLKIFTKTETQLNKALTTVKTFTDDICMEFGLDKCAVAIMKRGKQIKSRNMSFDDHNSIQSLNEEEAYKYLGIDENGDIKHPEMKEKIAREYYRRVRLILKSELNSKNKLSAINALAIPVLTYSFGIIDWRKSEIDKMDRKTRKLLTMHGLHHPKGDVSRLYIKRRNGGRGLIQLMSAYSCSMVNLSDYIEQGKDRLCSLVKKHEAGKAKYSLLKEAKTIKNKYLSLPTVQTSVKEMLKDNMEKERINELREKPMHGQFFCNLEKNWVDKEASCAWLRSAGLKGETESLIMAAQDQTLNTRYHQRMILKQKIDGNCRICGKAQETISHITSGCTVLAATEYLHRHNKVASYIHWVVCRELGWEVPKKWYEHTPQSVTNIKDYTILWDYAIITDRKILANRPDIVIHDRRSKNCLLIDVSVPDDKNIALKEAEKISKYKDLEIEINRMWKVKSKVVPVIVGALGTLRKDFTKYVELIPGRPKTSEIQKISLLGTAHILRKALG

SEQ ID NO: 4596 - protein, 1183 aa, Poecilobdella manillensis
MHFNKYNSNSLYLQKLNAAILADQNKRRAEIRSVVSLSSSNSHQTETQSQNGLSEDYRSTVKVNNSKLANKKQQWTKEQYAELMWCFYYAQANKNEGGVVKGTYTTWRSRNPEIHQNINKDTLANTRRWIINTKKFSDVELQGIKNRACQNAERHLSETQTEIVIESISEGKFQSPQKAIDSLTIQYPQDPATNITDLEQQIKSRLLENKHLDFNNRPKLNKVRICKDTLEKIKAANEILSKMICGRQLNINEINDLIYCSASVIAGVQKPRDGPVGRKEPAWKVRISNKVEQYRKDLSIISEIKKGVATKRVHNKAKHLFKDESKSLEEKEQDIKMKLQATAQRLKRYCKRNDGYHQNKLFQEDAKKFYRHLCKRNEAISDPPSAEKIEEFWRGILENEIVHNTEAAWVRDEEIAFRNVVTEEWKEFTISEIQEVIKKSSNWKSPGPDNIQNFWIKRFTSLHSILTIAFNDLINNPENIPSWLTSGITFLLSKGANQNNPKNYRPITCLPTLYKLLTSAISNRLYTHLDKNNILPIEQKGCQRGSRGCKDQLLINKMIVSTAKRMKRNLAMAWIDYKKAFDSVPHSWILASMKMYGVPARITGFMECSMKEWKTELMLCHQLGCIKTNRISIKRGIFQGDSLSPLLFCLALVPLSNMLNKLKVGYEIEPKEQISHLLYMDDLKIFTKTETQLNKALTTVKTFTDDICMEFGLDKCAVAIMKRGKQIKSRNMPFDDHNSIQSLNEEEAYKYLGIDENGDIKHPEMKEKIAREYYRRVRLILKSELNSKNKLSAINALAIPVLTYSFGIIDWRKSEIDKMDRKTRKLLTMHGLHHPKGDVSRLYIKRRNGGRGLIQLMSAYRCSMVNLSDYIEQGKDRLCSLVKKHEAGKAKYSLLKEAKTIKNKYLSLPTVQTSVKEMLKDNMEKERINELREKPMHGQFFCNLEKNWVDKEASCAWLRSAGLKGETESLIMAAQDQTLNTRYHQRMILKQQIDGNCRICGKAQETISHITSGCTVLAATEYLHRHNKVASYIHWIVCRELGWEVPKKWYEHTPQSVTNIKDCTILWDYAIITDRKILANRPDIVIHDRRSKSCMLIDVSVPDDKNIALKEAEKISKYKDLEIEINRMWKVKSKVVPVIVGALGTLRKDFTKYVELIPGRPKTSEIQKISLLGTAHILRKVLG

SEQ ID NO: 4597 - protein, 941 aa, Poecilobdella manillensis
MISGRQLNISEINYLIYCSASVIVGVQKPRDGPVGRKEPAWKVRISNKVEHYRKDLSIISEIKKGVATKRVHNKAKHLFKDESKSLEEKEQDIKMKLQATAQRLKRYCKRNDGYHQNKLFQEDAKKFYRHLCKRNEAISDPPSAEKIEEFWRGILENEIVHNTEAAWVRDEEIAFRNVVTEEWKEFTISEIQEVIKKSSNWKSPGPDNIQNFWIKRFTSLHSILTIAFNDLINNPENIPSWLTSGITFLLSKGANQHNPKNYRPITCLPTLYKLLTSAISNRLYTHLDKNNILPIEQKGCQRGSRGCKNQLLINKMIVSTAKRMKRNLAVAWIDYKKAFDSVPHSWILASMKMYGVPARITGFMECSMKEWKTELMLCHQLGCIKTNRISIKRGIFQGDSLSPLLFCLALVPLSNMLNKLKLGYEIEPKEQISHLLYMDDLKIFTKTETQLNKALTTVKTFTDDICMEFGLDKCAVAIMKRGKQIKSRNMPFDDHNSIQSLNEEEAYKYLGIDENGDIKHPEMKEKIAREYYRRVRLILKSELNSKNKLSAINALAIPVLTYSFGIIDWRKSEIDKMDRKTRKLLTMHGLHHPKGDVSRLYIKRRNGGRGLIQLMSAYSCSMVNLSDYIEQGKDRLCSLVKKHEAGKAKYSLLKEAKTIKNKYLSLPTVQTSVKEMLKDNMEKERINELREKPMHGQFFCNLEKNWVDKEASCAWLRSAGLKGETESLIMAAQDQTLNTRYHQRMILKQKIDGNCRICGKAQETISHITSGCTVLAATEYLHRHNKVASYIHWVVCRELGWEVPKKWYEHTPQSVTNMKDYTILWDYAIITDRKILANRPDIVIHDRRSKSCLLIDVSVPDDKNIALKEAEKISKYKDLEIEINRMWKVKSKVVPVIVGALGTLRKDFTKYVELIPGRPKTSEIQKISLLGTAHILRKVLG

SEQ ID NO: 4598 - protein, 1183 aa, Poecilobdella manillensis
MHFNKYNSNSFYLQKLNAAILADQNKRRAEIRSVVSLSSSNSQQTETQSQNGLSEDYRSTVKVNNSKLANKKQHWTKEQYAELMWCFYYAQANKNEGGVVKGTYTTWRSRNPEIHQNINKDTLANTRRWIINTKKFSDMELLDIKNRACQNVERPLSETQNEIVIESMREGKSQSPQKPIDSLTIQYPQDPATNITELEQQIKSRLLENKHLDFNNRQKLNKVRICKDTLEKIKAANEILSKMISGRQLNISEINDLIYCSASVIAGVQKPRDGPVGRKEPAWKVRISNKVEQCRKDLSIISEIKKGVATKRVHNKAKHLFKDESKSLEEKEQDIKMKLQATAQRLKRYCKRNDGYHQNKLFQEDAKKFYRHLCKRNEAISDPPSAEKIEEFWRGILENEIVHNTEAAWVRDEEIAFRNVVTEEWKEFTISEIQEVIKKSSNWKSPGPDNIQNFWIKRFTYLHSILTIAFNDLINNPENIPSWLTSGITFLLSKGANQNNPKNYRPITCLPTLYKLLTSAISNRLYTHLDKNNILPIEQKGCQRGSRGCKDQLLINKMIVSTAKRMKRNLAMAWIDYKKAFDSVPHSWILASMKMYGVPARITGFMECSMKEWKTELMLCHQLGCIKTNRISIKRGIFQGDSLSPLLFCLALVPLSYMLNKLKVGYEIEPKEQISHLLYMDDLKIFTKTETQLNKALTTVKTFTDDICMEFGLDKCAVAIMKRGKQIKSRNMPFDDHNSIQSLNEEEAYKYLGIDENGDIKHPEMKEKIAGEYYRRVRLILKSELNSKNKLSAINALAIPVLTYSFGIIDWRKSEIDRMDRKTRKLLTMHGLHHPKGDVTQLYIKRRNGGRGLIQLMSAYSCSMVNLSDYIEQGKDRLCSLVKKHEAGKAKYSLLKEAKTIKNKYLSLPTGQTSAKEMLKDNMEKERINELREKPMHGQFFCNLEKNWVDKEASCAWLRSAGLKGETESLIMAAQDQTLNTRYHQRMILKQQIDGNCRICGKAQETISHITSGCTVLAATEYLHRHNKVASYIHWIVCRELGWEVPKKWYEHTPQSVTNIKDCTILWDYAIITDRKILANRPDIVIHDRRSKSCMLIDVSVPDDKNIALKEAEKISKYKDLEIEINRMWSVKSKVVPVIVGALGTLRKDFTKYVELIPGRPKTSEIQKISLLGTAHILRKVLG

SEQ ID NO: 4599 - protein, 941 aa, Poecilobdella manillensis
MIGGRQLNISEINDLIYCSASVIAGVQKPRDGPVGRKEPAWKVRISNKVEQYRKDLSIISEIKKGVATKRVHNKAKHLFKDESKSLEEKEQDIKMKLQATAQRLKRYCKRNDGYHQNKLFQEDAKKFYRHLCKRNETISDPPSAEKIEEFWRGILENEIVHNTEAAWVRDEEIAFRNVVTEEWKEFKISEIQEVIKKSSNWKSPGPDNIQNFWIKRFTSLHSILTIAFNDLINNPENIPSWLTSGVTFLLSKGANQNNPKNYRPITCLPTLYKLLTSAISNRLYTHLDKNNILPIEQKGCQRGSRGCKDQLLINKMIVSTAKRMKRNLAMAWIDYKKAFDSVPHSWILASMKMYGVPARITGFMECSMKEWKTELMLCHQLGCIKTNRISIKRGIFQGDSLSPLLFCLALVPLSNMLNKLKVGYEIEPKEQISHLLYMDDLKIFTKTETQLNKALTTVKTFTDDICMEFGLDKCAVAIMKRGKQIKSRNMPFDDHNSIQSLNEEEAYKYLGIDENGDIKHPEMKEKIAREYYRRVRLILKSELNSKNKLSAINALAIPVLTYSFGIIDWRKSEIDKMDRKTRKLLTMHGLHHPKGDVSRLYIKRRNGGRGLIQLMSAYRCSMVNLSDYIEQGKDRLCSLVKKHEAGKAKYSLLKEAKTIKNKYLSLPTVQTSVKEMLKDNMEKERINELREKPMHGQFFCNLEKNWVDKEASCAWLRSAGLKGETESLIMAAQDQTLNTRYHQRMILKQQIDGNCRICGKAQETISHITSGCTVLAATEYLHRHNKVASYIHWIVCRELGWEVPKKWYEHTPQSVTNIKDCTILWDYAIITDRKILANRPDIVIHDRRSKSCMLIDVSVPDDKNIALKEAEKISKYKDLEIEINRMWKVKSKVVPVIVGALGTLRKDFTKYVELIPGRPKTSEIQKISLLGTAHILRKVLG

SEQ ID NO: 4600 - protein, 941 aa, Poecilobdella manillensis
MISGRQLNISEINDLIYCSASVIAGVQKPRDGPVGRKEPAWKVRISNKVEQYRKDLSIISEIKKGVATKRVHNKAKHLFKDESKSLEEKEQDIKMKLQATAQRLKRYCKRNDGYHQNKLFQEDAKKFYRHLCKRNEAISDPPSVEKIEEFWRGILENEIVHNTEAAWVRDEEIAFRNVVTEEWKEFKISEIQEVIKKSSNWKSPGPDNIQNFWIKRFTSLHSILTIAFNDLINNPENIPSWLTSGITFLLSKGANQHNPKNYRPITCLPTLYKLLTSAISNRLYTHLDKNNILPIEQKGCQRGSRGCKDQLLINKMIVSTAKRMKRNLAVAWIDYKKAFDSVPHSWILASMKMYGVPARITGFMECSMKEWKTELMLCHQLGCIKTNRISIKRGIFQGDSLSPLLFCLALVPLSNMLNKLKLGYEIEPKEQISHLLYMDDLKIFTKTETQLNKALTTVKTFTDDICMEFGLDKCAVAIMKRGKQIKSRNMPFDDHNSIQSLNEEEAYKYLGIDENGDIKHPEMKEKIAREYYRRVRLILKSELNSKNKLSAINALAIPVLTYSFGIIDWRKSEIDKMDRKTRKLLTMHGLHHPKGDVSRLYIKRRNGGRGLIQLMSAYSCSMVNLSDYIEQGKDRLCSLVKKHEAGKAKYSLLKEAKTIKNKYLSLPTVQTSVKEMLKDNMEKERINELREKPMHGQFFCNLEKNWVDKEASCAWLRSAGLKGETESLIMAAQDQTLNTRYHQRMILKQKIDGNCRICGKAQETISHITSGCTVLAATEYLHRHNKVASYIHWVVCRELGWEVPKKWYEHTPQSVTNIKDYTILWDYAIITDRKILANRPDIVIHDRRSKSCLLIDVSVPDDKNIALKEAEKISKYKDLEIEINRMWKVKSKVVPVIVGALGTLRKDFTKYVELIPGRPKTSEIQKISLLGTAHILRKVLG

SEQ ID NO: 4601 - protein, 1183 aa, Poecilobdella manillensis
MHFNKYNSNSLYLQKLNAAILADQNKRRAEIRSVVSLSSSNSHQTETQSQNGLSEDYRSTVKVNNSKLANKKQQWTKEQYAELMWCFYYAQANKNEGGVVKGTYTTWRSRNPEIHQNINKDTLANTRRWIINTKKFNDMELQDIKNRACQNAERHLSETQTKIVIESISEGKFQSPQKAIDSLTIQYPQDPATNITDLEQQIKSRLLENKHLDFNNRPKLNKVRICKDTLEKIKAANEILSKMIGVRQLNISEINDLIYCSASVIAGVQKPRDGPVGRKEPAWKVRISNKVEQYRKDLSIISEIKKGVATKRVHNKAKHLFKDESKSLEEKEQDIKMKLQATAQRLKRYCKRNDGYHQNKLFQEDAKKFYRHLCKRNEAISDPPSAEKIEEFWRGILENEIVHNTEAAWVRDEEIAFRNVVTEEWKEFTISEIQEVIKKSSNWKSPGPDNIQNFWIKRFTSLHSILTIAFNDLINNPENIPSWLTSGVTFLLSKGANQNNPKNYRPITCLPTLYKLLTSAISNRLYTHLDKNNILPIEQKGCQRGSRGCKDQLLINKMIVSTAKRMKRNLAMAWIDYKKAFDSVPHSWILASMKMYGVPARITGFMECSMKEWKTELMLCHQLGCIKTNRISIKRGIFQGDSLSPLLFCLALAPLSNMLNKLKAGYEIEPKEQISHLLYMDDLKIFTKTETQLNKALTTVKTFTDDICMEFGLDKCAVAIMKRGKQIKSRNMPFDDHNSIQSLNEEEAYKYLGIDENGDIKHPEMKEKIAREYYRRVRLILKSELNSKNKLSAINALAIPVLTYSFGIIDWRKSEIDKMDRKTRKLLTMHGLHHPKGDVSRLYIKRRNGGRGLIQLMSAYRCSMVNLSDYIEQGKDRLCSLVKKHEAGKAKYSLLKEAKTIKNKYLSLPTVQTSVKEMLKDNMEKERINELREKPMHGQFFCNLEKNWVDKEASCAWLRSAGLKGETESLIMAAQDQTLNTRYHQRMILKQQIDGNCRICGKAQETISHITSGCTVLAATEYLHRHNKVASYIHWIVCRELGWEVPKKWYEHTPQSVTNIKDCTILWDYAIITDRKILANRPDIVIHDRRSKFCMLIDVSVPDDKNIALKEAEKISKYKDLEIEINRMWKVKSKVVPVIVGALGTLRKDFTKYVELIPGRPKTSEIQKISLLGTAHILRKVLG

SEQ ID NO: 4602 - protein, 1183 aa, Poecilobdella manillensis
MHFNKYNSNSLYLQKLNAAILADQNKRRAEIRSVVSLSSSNSHQTETQSQNGLSEDYRSTVKVNNSKLANKKQQWTKEQYAELMWCFYYAQANKNEGGVVKGTYTTWRSRNPEIHQNINKDTLANTRRWIINTKKFNDMELQDIKNRACQNAERHLSETQTKIVIESISEGKFQSPQKAIDSLTIQYPQDPATNITDLEQQIKSRLLENKHLDFNNRPKLNKVRICKDTLDKIKAANEILSKMIGVRQLNISEINDLIYCSASVIAGVQKPRDGPVGRKEPAWKVRISNKVEQYRKDLSIISEIKKGVATKRVHNKAKHLFKDESKSLEEKEQDIKMKLQVTAQRLKRYCKRNDGYHQNKLFQEDAKKFYRHLCKRNEAISDPPSAEKIEEFRRGILENEIVHNTEAAWVRDEEIAFRNVVTEEWKEFTISEIQEVIKKSSNWKSPGPDNIQNFWIKRFTSLHSILTIAFNDLINNPENIPSWLTSGVTFLLSKGANQNNPKNYRPITCLPTLYKLLTSAISNRLYTHLDKNNILPIEQKGCQRGSRGCKDQLLINKMIVSTAKRMKRNLAMAWIDYKKAFDSVPHSWILASMKMYGVPARITGFMECSMKEWKTELMLCHQLGCIKTNRISIKRGIFQGDSLSPLLFCLALAPLSNMLNKLKAGYEIEPKEQISHLLYMDDLKIFTKTETQLNKALTTVKTFTDDICMEFGLDKCAVAIMKRGKQIKSRNMPFDDHNSIQSLNEEEAYKYLGIDENGDIKHPEMKEKIAKEYYRRVHLILKSELNSKNKLSAINALAIPVLTYSFGIIDWRKSEIDKMDRKTRKLLTMHGLHHPKGDVSRLYIKRRNGGRGLIQLMSAYRCSMVNLSDYIEQGKDRLCSLVKKHEAGKAKYSLLKEAKTIKNKYLSLPTVQTSVKEMLKDNMEKERINELREKPMHGQFFCNLEKNWVDKEASCAWLRSAGLKGETESLIMAAQDQTLNTRYHQRMILKQQIDGNCRICGKAQETISHITSGCTVLAATEYLHRHNKVASYIHWIVCRELGWEVPKKWYEHTPQSVTNIKDCTILWDYAIITDRKILANRPDIVIHDRRSKSCMLIDVSVPDDKNIALKEAEKISKYKDLEIEINRMWKVKSKVVPVIVGALGTLRKDFTKYVELIPGRPKTSEIQKISLLGTAHILRKVLG

SEQ ID NO: 4603 - protein, 1183 aa, Poecilobdella manillensis
MHFNKYNSNSLYLQKLNAAILADQNKRRAEIRSVVSLSSSNSHQTETQSQNGLSEDYKSTGKVNNSKLANKKQQWTKEQYAELMWCFYYAQANKNEGGVVKGTYTTWRSRNPEIHQNINKDTLANTRRWIINTKKFTDKELQGIKNRACQNAERHLSETQTEIVIESISEGKFQSPQKAIDSLTIQYPQDPATNITELEQQIKSRLLENKHLDFNNRPKLNKVRICKDTLEKIKAANEILSKMISGRQLNISEINDLIYCSASVIAGVQKPRDGPVGRKEPAWKVRISNKVEQYRKDLSIISEIKKGVATKRVHNKAKHLFKDESKSLEEKEQDIKMKLQATAQRLKRYCKRNDGYHQNKLFQEDAKKFYRHLCKRKEAISDPPSVEKIEEFWRGILENEIVHNTEAAWVRDEEIAFRNVVTEEWKEFKISEIQEVIKKSSNWKSPGPDNIQNFWIKRFTSLHSILTIAFNDLINNPENIPSWLTSGITFLLSKGANQHNPKNYRPITCLPTLYKLLTSAISNRLYTHLDKNNILSIEQKGCQRGSRGCKDQLLINKMIVSTAKRMKRNLAVAWIDYKKAFDSVPHSWILASMKMYGVPARITGFMECSMKEWKTELMLCHQLGCIKTNRISIKRGIFQGDSLSPLLFCLALVPLSNMLNKLKLGYEIEPKEQISHLLYMDDLKIFTKTETQLNKALTTVKTFTDDICMEFGLDKCAVAIMKRGKQIKSRNMPFDDHNSIQSLNEEEAYKYLGIDENGDIKHPEMKEKIAREYYRRVRLILKSELNSKNKLSAINALAIPVLTYSFGIIDWRKSEIDKMDRKTRKLLTMHGLHHPKGDVSRLYIKRRNGGRGLIQLMSAYSCSMVNLSDYIEQGKDRLCSLVKKHEAGKAKYSLLKEAKTIKNKYLSLPTVQTSVKEMLKDNMEKERINELREKPMHGQFFCNLEKNWVDKEASCAWLRSAGLKGETESLIMAAQDQTLNTRYHQRMILKQKIDGNCRICGKAQETISHITSGCTVLAATEYLHRHNKVASYIHWVVCRELGWEVPKKWYEHTPQSVTNIKDYTILWDYAIITDRKILANRPDIVIHDRRSKSCLLIDVSVPDDKNIALKEAEKISKYKDLEIEINRMWKVKSKVVPVIVGALGTLRKDFTKYVELIPGRPKTSEIQKISLLGTAHILRKVLG

SEQ ID NO: 4604 - protein, 1183 aa, Poecilobdella manillensis
MHFNKYNSNSFYLQKLNAAILADQNKRRAEIRSVVSLSSSNSQQTETQSQNGLSEDYRSTVKVNNSKLANKKQQWTKEQYAELMWCFYYAQANKNEGGVVKGTYTTWRSRNPEIHQNINKDTLANTRRWIINTKKFSDMELLDIKNRACQNVERPLSETQNEIVIESMREGKSQSPQKPIDSLTIQYPQDPATNITELEQQIKSRLLENKHLDFNNRQKLNKVRICKDTLEKIKAANEILSKMISGRQLNISEINDLIYCSASVIAGVQKPRDGPVGRKEPAWKVRISNKVEQCRKDLSIISEIKKGVATKRVHNKAKHLFKDESKSLEEKEQDIKMKLQATAQRLKRYCKRNDGYHQNKLFQEDAKKFYRHLCKRNEAISDPPSAEKIEEFWRGILENEIVHNTEAAWVRDEEIAFRNVVTEEWKEFTISEIQEVIKKSSNWKSPGPDNIQNFWIKRFTSLHSILTIAFNDLINNPENIPSWLTSGITFLLSKGANQNNPKNYRPITCLPTLYKLLTSAISNRLYTHLDKNNILPIEQKGCQRGSRGCKDQLLINKMIVSTAKRMKRNLAMAWIDYKKAFDSVPHSWILASMKMYGVPARITGFMECSMKEWKTELMLCHQLGCIKTNRISIKRGIFQGDSLSPLLFCLALVPLSYMLNKLKVGYEIEPKEQISHLLYMDDLKIFTKTETQLNKALTTVKTFTDDICMEFGLDKCAVAIMKRGKQIKSRNMPFDDHNSIQSLNEEEAYKYLGIDENGDIKHPEMKEKIAREYYRRVRLILKSELNSKNKLSAINALAIPVLTYSFGIIDWRKSEIDRMDRKTRKLLTMHGLHHPKGDVTRLYIKRRNGGRGLIQLMSAYSCSMVNLSDYIEQGKDRLCSLVKKHEAGKAKYSLLKEAKTIKNKYLSLPTGQTSAKEMLKDNMEKERINELREKPMHGQFFCNLEKNWVDKEASCAWLRSAGLKGETESLIMAAQDQTLNTRYHQRMILKQQIDGNCRICGKAQETISHITSGCTVLAATEYLHRHNKVASYIHWIVCRELGWEVPKKWYEHTPQSVTNIKDCTILWDYAIITDRKILANRPDIVIHDRRSKSCMLIDVSVPDDKNIALKEAEKISKYKDLEIEINRMWSVKSKVVPVIVGALGTLRKDFTKYVELIPGRPKTSEIQKISLLGTAHILRKVLG

SEQ ID NO: 4605 - protein, 941 aa, Poecilobdella manillensis
MISGRQLNISEINDLIYCSASVIAGVQKPRDGPVGRKEPAWKVRINNKVEQYRKDLSIISEIKKGVATKRVHNKAKHLFKDESKSLEEKEQDIKMKLQATAQRLKRYCKRNDGYHQNKLFQEDAKKFYRHLCKRNEAISDPPSVEKIEEFWRGILENEIVHNTEAAWVRDEEIAFRNVVTEEWKEFKISEIQEVIKKSSNWKSPGPDNIQNFWIKRFTSLHSILTIAFNDLINNPENIPSWLTSGITFLLSKGANQHNPKNYRPITCLPTLYKLLTSAISNRLYTHLDKNNILPIEQKGCQRGSRGCKDQLLINKMIVSTAKRMKRNLAVAWIDYKKAFDSVPHSWILASMKMYGVPARITGFMECSMKEWKTELMLCHQLGCIKTNRISIKRGIFQGDSLSPLLFCLALVPLSNMLNKLKLGYEIEPKEQISHLLYMDDLKIFTKTETQLNKALTTVKTFTDDICMEFGLDKCAVAIMKRGKQIKSRNMPFDDHNSIQSLNEEEAYKYLGIDENGDIKHPEMKEKIAREYYRRVRLILKSELNSKNKLSAINALAIPVLTYSFGIIDWRKSEIDKMDRKTRKLLTMHGLHHPKGDVSRLYIKRRNGGRGLIQLMSAYSCSMVNLSDYIEQGKDRLCSLVKKHEAGKAKYSLLKEAKTIKNKYLSLPTVQTSVKEMLKDNMEKERINELREKPMHGQFFCNLEKNWVDKEASCAWLRSAGLKGETESLIMAAQDQTLNTRYHQCMILKQKIDGNCRICGKAQETISHITSGCTVLAATEYLHRHNKVASYIHWVVCRELGWEVPKKWYEHTPQSVTNIKDYTILWDYAIITDRKILANRPDIVIHDRRSKSCMLIDVSVPDDKNIALKEAEKISKYKDLEIEINRMWKVKSKVVPVIVGALGTLRKDFTKYVELIPGRPKTSEIQKISLLGTAHILRKVLG

SEQ ID NO: 4606 - protein, 1183 aa, Poecilobdella manillensis
MHFNKYNSNSLYLQKLNAAILADQNKRRAEIRSVVSLSSSNSHQTETQSQNGLSEDYRSTVKVNNSKLANKKQQWTKEQYAELMWCFYYAQANKNEGGVVKGTYTTWRSRNPEIHQNINKDTLANTRRWIINTKKFSDMELQGIKNRACQNAERHLSETQTEIVIESISEGKFQSPQKAIDSLTIQYPQDPATNITDLEQQIKSRLLENKHLDFNNRPKLNKVRICKDTLEKIKAANEILSKMISGRQLNISEINDLIYCSASVIAGVQKPRDGSVGRKEPAWKVRISNKVEQYRKDLSIISEIKKGVATKRVHNKAKHLFKDESKSLEEKEQDIKMKLQATAQRLKRYCKRNDGYHQNKLFQEDAKKFYRHLCKRNEAISDPPSAEKIEEFWRGILENEIVHNTEAAWVRDEEIAFRNVVTEEWKEFTISEIQEVIKKSSNWKSPGPDNIQNFWIKRFTSLHSILTIAFNDLINNPENIPSWLTSGITFLLSKGANQNNPKNYRPITCLPTLYKLLTSAISNRLYTHLDKNNILPIEQKGCQRGSRGCKDQLLINKMIVSTAKRMKRNLAMAWIDYKKAFDSVPHSWILASMKMYGVPARITGFMECSMKEWKTELMLCHQLGCIKTNRISIKRGIFQGDSLSPLLFCLALVPLSNMLNKLKVGYEIEPKEQISHLLYMDDLKIFTKTETQLNKALTTVKTFTDDICMEFGLDKCAVAIMKRGKQIKSRNMPFDDHNSIQSLNEEEAYKYLGIDENGDIKHPEMKEKIAREYYRRVRLILKSELNSKNKLSAINALAIPVLTYSFGIIDWRKSEIDKMDRKTRKLLTMHGLHHPKGDVSRLYIKRRNGGRGLIQLMSAYRCSMVNLSDYIEQGKDRLCSLVKKHETGKAKYSLLKEAKTIKNKYLSLPTVQTSVKEMLKDNMEKERINELREKPMHGQFFCNLEKNWVDKEASCAWLRSAGLKGETESLIMAAQDQTLNTRYHQRMILKQQIDGNCRICGKAQETISHITSGCTVLAATEYLHRHNKVASYIHWIVCRELGWEVPKKWYEHTPQSVTNIKDCTILWDYAIITDRKILANRPDIVIHDRRSKSCMLIDVSVPDDKNIALKEAEKISKYKDLEIEINRMWKVKSKVVPVIVGALGTLRKDFTKYVELIPGRPKTSEIQKISLLGTAHILRKVLG

SEQ ID NO: 4607 - protein, 1100 aa, Poecilobdella manillensis
MWCFYYAQANKNEGGVVKGTYTTWRSRNPEIHQNINKDTLADTRRWIINTKKFSDMELQGIKNRAYQNAERHLSETQTEIVIESISEGKFQSPQKAIDSLTIQYPQDPATNITDLEQQIKSRLLENKHLDFNNRPKLNKVRICKDTLEKIKAANEILSKMISGRQLNISEINDLIYCSASVIAGVQKPRDGPVGRKEPAWKVRISNKVEQYRKDLSIISEIKKGVATKRVHNKAKHLFKYESKSLEEKEQDIKMKLQATAQRLKRYCKRNDGYHQNKLFQGDAKKFYRHLSKRNEAISDPPSAEKIEEFWRGILENEIVHNTEAAWVRDEEIAFRNVVTEEWKEFTISEIQEVIKKSSNWKSPGPDNIQNFWIKRFTSLHSILTIAFNDLINNPENIPSWLTSGITFLLSKGANQNNPKNYRPITCLPTLYKLLTSAISNRLYTHLDKNNILPIEQKGCQRGSRGCKDQLLINKMIVSTAKRMKRNLAMAWIDYKKAFDSVPHSWILASMKMYGVPARITGFMECSMKEWKTELMLCHQLGCIKTNRISIKRGIFQGDSLSPLLFCLALVPLSNMLNKLKVAYEIEPKEQISHLLYMDDLKIFTKTETQLNKALTTVKTFTDDICMEFGLDKCAVAIMKRGKQIKSRNMPFDDHNSIQSLNEEEAYKYLGIDENGDIKHPEMKEKIAREYYRRVRLILKSELNSKNKLSAINALAIPVLIYSFGIIDWRKSEIDKMDRKTRKLLTMHGLHHPKGDVSRLYIKRRNGGRGLIQLMSAYSCSMVNLSDYIEQGKDRLCSLVKKHEAGKAKYSLLKEAKTIKNKYLSLPTVQTSVKEMLKDNMEKERINELREKPMHGQFFCNLEKNWVDKEASCAWLRSAGLKGETESLIMAAQDQTLNTRYHQRMILKQQIDGNCRICGKAQKTISHITSGCTVLAATDYLHRHNKVASYIHWIVCRELGWEVPKKWYEHTPQSVTNIKDYTILWDYAIITDRKILANRPDIVIHDRRSKSCMLIDVSVPDDKNIALKEAEKISKYKDLEIEINRMWKVKSKVVPVIVGALGTLRKDFTKYVELIPGRPKTSEIQKISLLGTAHILRKVLG

SEQ ID NO: 4608 - protein, 1183 aa, Poecilobdella manillensis
MHFNKYNSNSLYLQKLNAAILADQNIRRAEIRSVVSLSSSNSHQTETQSQNGLSEDYRSTVKVNNSKLANKKQQWTKEQYAELMWCFYYAQANKNEGGVVKGTYTTWRSRNPEIHQNINKDTLANTRRWIINTKKFNDKELQGIKNRACQNAERHLSETQTEIVIESISEGKFQSPQKAIDSLTIQYPQDPATNITDLEQQIKSRLLENKHLDFNNRPKLNKVRICKDTLEKIKAANEILSKMISGRQLNISEINDLIYCSASVIAGVQKPRDGPVGRKEPAWKVRISNKVEQYRKDLSIISEIKKGVATKRVHNKAKHLFKDESKSLEEKEQDIKMKLQATAQRLKRYCKRNDGYHQNKLFQEDAKKFYRHLCKRKEAISDPPSAEKIEEFWRGILENEIVHNTEAAWVRDEEIAFRNVVTEEWKEFTISEIQEVIKKSSNWKSPGPDNIQNFWIKRFTSLHSILTIAFNDLINNPENIPSWLTSGITFLLSKGANQNNPKNYRPITCLPTLYKLLTSAISNRLYTHLDKNNILPIEQKGCQRGSRGCKDQLLINKMIVSTAKRMKRNLAVAWIDYKKAFDSVPHSWILASMKMYGVPARITGFMECSMKEWKTELMLCHQLGCIKTNRISIKRGIFQGDSLSPLLFCLALVPLSNMLNKLKVRYEIEPKEQISHLLYMDDLKIFTKTETQLNKVLTTVKTFTDDICMEFGLDKCAVAIMKRGKQIKSRNMPFDDHDSIQSLNEEEAYKYLGIDENGDIKHPEMKEKIAREYYRRVRLILKLELNSKNKLSAINALAIPVLTYSFGIIDWRKSEIDKMDRKTRKLLTMHGLHHPKRDVSRLYIKRRNGGRGLIQLMSAYSCSMVNLSDYIEQGKDRLCSLVKKHEAGKAKYSLLKEAKTIKNKYLSLPTVQTSVKEMLKDNMEKGRINELREKPMHGQFFCNLEKNWVDKEASCAWLRSAGLKGETESLIMAAQDQTLNTRYHQRMILKQQIDGNCRICGKAQETISHITSGCTVLAATEYLHRHNKVASYIHWIVCRELGWEVPKKWYEHTPKSVTNIKDYTILWDYAIITDRKILANRPDIVIHDRRSKSCMLIDVSVPDDKNIALKEAEKISKYKDLEIEINRMWKVKSKVVPVIVGALGTLRKDFTKYVELIPGRPKTSEIQKISLLGTAHILRKVLG

SEQ ID NO: 4609 - protein, 1183 aa, Poecilobdella manillensis
MHFNKYNSNSLYLQKLNAAILADQNKRRAEIRSVVSLSSSNSHQTETQSQNGLSEDYRSTVKVNNSKLANKKQQWTKEQYAELMWCFYYAQANKNEGGVVKGTYTTWRSRNPEIHQNINKDTLANTRRWIINTKKFNDMELQDIKNRACQNAERHLSETQTKIVIESISEGKFQSPQKAIDSLTIQYPQDPATNITDLEQQIKSRLLENKHLDFNNRPKLNKVRICKDTLEKIKAANEILSKMIGVRQLNISEINDLIYCSASVIAGVQKPRDGPVGRKEPAWKVRISNKVEQYRKDLSIISEIKKGVATKRVHNKAKHLFKDESKSLEEKEQDIKMKLQATAQRLKRYCKRNDGYHQNKLFQEDAKKFYRHLCKRNETISDPPSAEKIEEFWRGILENEIVHNTEAAWVRDEEIAFRNVVTEEWKEFTISEIQEVIKKSSNWKSPGPDNIQNFWIKRFTSLHSILTIAFNDLINNPENIPSWLTSGVTFLLSKGANQNNPKNYRPITCLPTLYKLLTSAISNRLYTHLDKNNILPIEQKGCQRGSRGCKDQLLINKMIVSTAKRMKRNLAMAWIDYKKAFDSVPHSWILASMKMYGVPARITGFMECSMKEWKTELMLCHQLGCIKTNRISIKRGIFQGDSLSPLLFCLALAPLSNMLNKLKAGYEIEPKEQISHLLYMDDLKIFTKTETQLNKALTTVKTFTDDICMEFGLDKCAVAIMKRSKQIKSRNMPFDDHNSIQSLNEEEAYKYLGIDENGDIKHPEMKEKIAKEYYRRVRLILKSELNSKNKLSAINALAIPVLTYSFGIIDWRKSEIDKMDRKTRKLLTMHGLHHPKGDVSRLYIKRRNGGRGLIQLMSAYRCSMVNLSDYIEQGKDRLCSLVKKHEAGKAKYSLLKEAKTIKNKYLSLPTVQTSVKEMLKDNMEKERINELREKPMHGQFFCNLEKNWVDKEASCAWLRSAGLKGETESLIMAAQDQTLNTRYHQRMILKQQIDGNCRICGKAQETISHITSGCTVLAATEYLHRHNKVASYIHWIVCRELGWEVPKKWYEHTPQSVTNIKDCTILWDYAIITDRKILANRPDIVIHDRRSKSCMLIDVSVPDDKNIALKEAEKISKYKDLEIEINRMWKVKSKVVPVIVGALGTLRKDFTKYVELIPGRPKTSEIQKISLLGTAHILRKVLG

SEQ ID NO: 4610 - protein, 941 aa, Poecilobdella manillensis
MISGRQLNISEINDLIYCSASVIAGVQKPRDGPVGRKEPAWKVRISNKVEQYRKDLSIISEIKKGVATKRVHNKAKHLFKDESKSLEEKEQDIKMKLQATAQRLKRYCKRNDGYHQNKLFQEDAKKFYRHLCKRNEAISDPPSVEKIEEFWRGILENEIVHNTEAAWVRDEEIAFRNVVTEEWKEFKISEIQEVIKKSSNWKSPGPDNIQNFWIKRFTSLHSILTIAFNDLINNPENIPSWLTSGITFLLSKGANQHNPKNYRPITCLPTLYKLLTSAISNRLYTHLDKNNILPIEQKGCQRGSRGCKDQLLINKMIVSTAKRMKRNLAVAWIDYKKAFDSVPHSWILASMKMYGVPARITGFMECSMKEWKTELMLCHQLGCIKTNRISIKRGIFQGDSLSPLLFCLALVPLSNMLNKLKLGYEIEPKEQISHLLYMDDLKIFTKTETQLNKALTTVKTFTDDICMEFGLDKCAVAIMKRGKQIKSRNMPFDDHNSIQSLNEEEAYKYLGIDENGDIKHPEMKEKIAREYYRRVRLILKSELNSKNKLSAINAVAIPVLTYSFGIIDWRKSEIDKMDRKTRKLLTMHGLHHPKGDVSRLYIKRRNGGRGLIQLMSAYSCSMVNLSDYIEQGKDRLCSLVKKHEAGKAKYSLLKEAKTIKNKYLSLPTVQTSVKEMLKDNMEKERINELREKPMHGQFFCNLEKNWVDKEASCAWLRSAGLKGETESLIMAAQDQTLNTRYHQRMILKQKIDGNCRICGKAQETISHITSGCTVLAATEYLHRHNKVASYIHWVVCRELGWEVPKKWYEHTPQSVTNIKDYTILWDYAIITDRKILANRPDIVIHDRRSKSCLLIDVSVPDDKNIALKEAEKISKYKDLEIEINRMWKVKSKVVPVIVGALGTLRKDFTKYVELIPGRPKTSEIQKISLLGTAHILRKVLG

SEQ ID NO: 4611 - protein, 1183 aa, Poecilobdella manillensis
MHFNKYNSNSLYLQKLNAAILADQNKRRAEIRSVVSLSSSNSHQTETQSQNGLSEDYKSTVKVNNSKLANKKQQWTKEQYAELMWCFYYAQANKNEGGVVKGTYTTWRSRNPEIHQNINKDTLANTRRWIINTKKFNDKELQGIKNRACQNAERHLSETQTEIVVESISEGKFQSPQKAIDSLTIQYPQDPATNITELEQQIKSRLLENKHLDFNNRPKLNKVRICKDTLEKIKAANEILSKMISGRQLNISEINDLIYCSASVIAGVQKPRDGPVGRKEPAWKVRISNKVEQYRKDLSIISEIKKGVATKRVHNKAKHLFKDESKSLEEKEQDIKMKLQATAQRLKRYCKRNDGYHQNKLFQEDAKKFYRHLCKRNEAISDPPSVEKIEEFWRGILENEIVHNTEAAWVRDEEIAFRNVVTEEWKEFKISEIQEVIKKSSNWKSPGPDNIQNFWIKRFTSLHSILTIAFNDLINNPENIPSWLTSGITFLLSKGANQHNPKNYRPITCLPTLYKLLTSAISNRLYTHLDKNNILPIEQKGCQRGSRGCKDQLLINKMIVSTAKRMKRNLAVAWIDYKKAFDSVPHSWILASMKMYGVPARITGFMECSMKEWKTELMLCHQLGCIKTNRISIKRGIFQGDSLSPLLFCLALVPLSNMLNKLKLGYEIEPREQISHLLYMDDLKIFTKSETQLNKALTTVKTFTDDICMEFGLDKCAVAIMKRGKQIKSRNMPFDDHNSIQSLNEEEAYKYLGIDENGDIKHPEMKEKIAREYYHRVRLILKSELNSKNKLSAINALAIPVLTYSFGIIDWRKSEIDKMDRKTRKLLTMHGLHHPKGDVSRLYIKRRNGGRGLIQLMSAYSCSMVNLSDYIEQGKDRLCSLVKKHEAGKAKYSLLKEAKTIKNKYLSLPTVQTSVKEMLKDNMEKERINELREKPMHGQFFCNLEKNWVDKEASCAWLRSAGLKGETESLIMAAQDQTLNTRYHQRMILKQKIDGNCRICGKDQETISHITSGCTVLAATEYLHRHNKVASYIHWVVCRELGWEVPKKWYEHTPQSVTNIKDYTILWDYAIITDRKILANRPDIVIHDRRSKSCLLIDVSVPDDKNIALKEAEKISKYKDLEIEINRMWKVKSKVVPVIVGALGTLRKDFTKYVELIPGRPKTSEIQKISLLGTAHILRKVLG

SEQ ID NO: 4612 - protein, 1183 aa, Poecilobdella manillensis
MHFNKYNSNSLYLQKLNAAILADQNKRRAEIRSVVSLSSSNSHQTETQSQNGLSEDYRSTVKVNNSKLANKKQQWTKEQYAELMWCFYYAQANKNEGGVVKGTYTTWRSRNPEIHQNINKDTLANTRRWIINTKKFSDMELQGIKNRACQNAERHLSETQTEIVIESISEGKFQSPQKAIDSLTIQYPQDPATNITDLEQQIKSRLLENKHLDFNNRPKLNKVRICKDTLEKIKAANEILSKMISGRQLNISEINDLIYCSASVIAGVQKPRDGPVGRKEPAWKVRISNKVEQYRKDLSIISEIKKGVATKRVHNKAKHLFKDESKSLEEKEQDIKMKLQATAQRLKRYCKRNDGYHQNKLFQEDAKKFYRHLCKRNEAISDPPSAEKIEEFWRGILENEIVHNTEAAWVRDEEIAFRNVVTEEWKEFTISEIQEVIKKSSNWKSPGPDNIQNFWIKRFTSLHSILTIAFNDLINNPENIPSWLTSGVTFLLSKGANQNNPKNYRPITCLPTLYKLLTSAISNRLYTHLDKNNILPIEQKGCQRGSRGCKDQLLINKMIVSTAKRMKRNLAMAWIDYKKAFDSVPHSWILASMKMYGVPARITGFMECSMKEWKTELMLCHQLGCIKTNKISIKRGIFQGDSLSPLLFCLALVPLSNMLNKLKLGYEIEPKEQISHLLYMDDLKIFTKTETQLNKALTTVKTFTDDICMEFGLDKCAVAIMKRGKQIKSRNMPFDDHNSIQSLNEEEAYKYLGIDENGDIKHPEMKEKIAREYYRRVRLILKSELNSKNKLSAINALAIPVLTYSFGIIDWRKSEIDKMDRKTRKLLTMHGLHHPKGDVSRLYIKRRNGGRGLIQLMSAYRCSMVNLSDYIEQGKDRLCSLVKKHEAGKAKYSLLKEAKTIKNKYLSLPTVQTSVKEMLKDNMEKERINELREKPMHGQFFCNLEKNWVDKEASCAWLRSAGLKGETESLIMAAQDQTLNTRYHQRMILKQQIDGNCRICGKAQETISHITSGCTVLAATEYLHRHNKVASYIHWIVCRELGWEVPKKWYEHTPQSVTNIKDCTILWDYAIITDRKILANRPDIVIHDRRSKSCMLIDVSVPDDKNIALKEAEKISKYKDLEIEINRMWKVKSKVVPVIVGALGTLRKDFTKYVELIPGRPKTSEIQKISLLGTAHILRKVLG

SEQ ID NO: 4613 - protein, 941 aa, Poecilobdella manillensis
MISGRQLNISEINDLIYCSASVIAGVQKPRDGPVGRKEPAWKVRISNKVEQYRKDLSIISEIKKGVATKRVHNKAKHLFKDESKSLEEKEQDIKMKLQATAQRLKRYCKRNDGYHQNKLFQEDAKKFYRHLCKRNEAISDPPSAEKIEEFWRGILENEIVHNTEAAWVRDEEIAFRNVVTEEWKEFTISEIQEVIKKSSNWKSPGPDNIQNFWIKRFTSLHSILTIAFNDLINNPENIPSWLTSGVTFLLSKGANQNNPKNYRPITCLPTLYKLLTSAISNRLYTHLDKNNILPIEQKGCQRGSRGCKDQLLINKMIVSTAKRMKRNLAMAWIDYKKAFDSVPHSWILASMKMYGVPARITGFMECSMKEWKTELMLCHQLGCIKTNKISIKRGIFQGDSLSPLLFCLALVPLSNMLNKLKLGYEIEPKEQISHLLYMDDLKIFTKTETQLNKALTTVKTFTDDICMEFGLDKCAVAIMKRGKQIKSRNMPFDDHNSIQSLNEEEAYKYLGIDENGDIKHPEMKEKIAREYYRRVRLILKSELNSKNKLSAINALAIPVLTYSFGIIDWRKSEIDKMDRKTRKLLTMHGLHHPKGDVSRLYIKRRNGGRGLIQLMSAYRCSMVNLSDYIEQGKDRLCSLVKKHEAGKAKYSLLKEAKTIKNKYLSLPTVQTSVKEMLKDNMEKERINELREKPMHGQFFCNLEKNWVDKEASCAWLRSAGLKGETESLIMAAQDQTLNTRYHQRMILKQQIDGNCRICGKAQETISHITSGCTVLAATEYLHRHNKVARYIHWIVCRELGWEVPKKWYEHTPQSVTNIKDCTILWDYAIITDRKILANRPDIVIHDRRSKSCMLIDVSVPDDKNIALKEAEKISKYKDLEIEINRMWKVKSKVVPVIVGALGTLRKDFTKYVELIPGRPKTSEIQKISLLGTAHILRKVLG

SEQ ID NO: 4614 - protein, 1183 aa, Poecilobdella manillensis
MHFNKYNSNSLYLQKLNAAILADQNKRRAEIRSVVSLSSSNSHQTETQSQNGLSEDYRSTVKVNNSKLANKKQQWTKEQYAELMWCFYYAQANKNEGGVVKGTYTTWRSRNPEIHQNINKDTLANTRRWIINTKKFNDKELQGIKNRACQNAERHLSETQTEIVIESISEGKFQSPQKAIDSLTIQYHQDPATNITELEQQIKSRLLENKHLDFNNRPKLNKVRICKDTLEKIKAANEILSKMISGRQLNISEINDLIYCSASVIAGVQKPRDGPVGRKEPAWKVRISNKVEQYRKDLSIISEIKKGVATKRVHNKAKHLFKDESKSLEEKEQGIKMKLQATAQRLKRYCKRNDGYHQNKLFQEDAKKFYRHLCKRNEAIKDPPSAEKIEEFWRGILENEIVHNTEAAWVRDEEIAFRNVVTEEWKEFTISEIQEVIKKSSNWKSPGPDNIQNFWIKRFTSLHSILTIAFNDLINNPENIPSWLTSGITFLLSKGANQHNPKNYRPITCLPTLYKLLTSAISNRLYTHLDKNNILPIEQKGCQRGSRGCKDQLLINKMIVSTAKRMKRNLAVAWIDYKKAFDSVPHSWILASMKMYGVPARITGFMECSMKEWKTELMLCHQLGCIKTNRISIKRGIFQGDSLSPLLFCLALVPLSNMLNKLKLGYEIEPKEQISHLLYMDDLKIFTKTETQLNKALTTVKTFTDDICMEFGLDKCAVAIMKRGKQIKSRNMPFDDHNSIQSLNEEEAYKYLGIDENGDIKHPEMKEKIAREYYRRVRLILKSELNSKNKLSAINALAIPVLTYSFGIIDWRKSEIDKMDRKTRKLLTMHGLHHPKGDVSRLYIKRRNGGRGLIQLMSAYSCSMVNLSDYIEQGKDRLCSLVKKHEAGKAKYSLLKEAKTIKNKYLSLPIVQTSVEEMLKDNMEKERINELREKPMHGQFFCNLEKNWVDKEASCAWFRSAGLKGETESLIMAAQDQTLNTRYHQRMILKQKIDGNCRICGKAQETISHITSGCTVLAATEYLHRHNKVASYIHWVVCRELGWEVPKKWYEHTPQSVTNIKDYTILWDYAIITDRKILANRPDIVIHDRRSKSCLLIDVSVPDDKNIALKEAEKISKYKDLEIEINRMWKVKSKVVPVIVGALGTLRKDFTKYVELIPGRPKTSEIQKISLLGTAHILRKVLG

SEQ ID NO: 4615 - protein, 1183 aa, Poecilobdella manillensis
MHFNKYNSNSLYLQKLNAAILADQNKRRAEIRSVVSLSSSNSHQTETQSQNGLSEDYRSTVKVNNSKLANKKQQWTKEQYAELMWCFYYAQANKNEGGVVKGTYTTWRSRNPEIHQNINKDTLANTRRWIINTKKFSDMELQGIKNRACQNAERHLSETQTEIVIESISEGKFQSPQKAIDSLTIQYPQDPATNITDLEQQIKSRLLENKHLDFNNRPKLNKVRICKDTLEKIKAANEILSKMISGRQLNISEINDLIYCSASVIAGVQKPRDGPVGRKEPAWKIRISNKVEQYRKDLSIISEIKKGVATKRVHNKAKHLFKDESKSLEEKEQDIKMKLQATAQRLKRYCKRNDGYHQNKLFQEDAKKFYRHLCKRNEAISDPPSAEKIEEFWRGILENEIVHNTEAAWVRDEEIAFRNVVTEEWKEFTISEIQEVIKKSSNWKSPGPDNIQNFWIKRFTSLHSILTIAFNDLINNPENIPSWLTSGITFLLSKGANQNNPKNYRPITCLPTLYKLLTSAISNRLYTHLDKNNILPIEQKGCQRGSRGCKDQLLINKMIVSTAKRMKRNLAMAWIDYKKAFDSVPHSWILASMKMYGVPARITGFMECSMKEWKTELMLCHQLGCIKTNRISIKRGIFQGDSLSPLLFCLALVPLSNMLNKLKVGYEIEPKEQISHLLYMDDLKLFTKTETQLNKALTTVKTFTDDICMEFGLDKCAVAIMKRGKQIKSRNMPFDDHNSIQSLNEEEAYKYLGIDENGDIKHPEMKEKIAREYYRRVRLILKSELNSKNKLSAINALAIPVLTYSFGIIDWRKSEIDKMDRKTRKLLTMHGLHHPKGDVSRLYIKRRNGGRGLIQLMSAYRCSMVNLSDYIEQGKDRLCSLVKKHESGKAKYSLLKEAKTIKNKYLSLPTVQTSVKEMLKDNMEKERINELREKPMHGQFFCNLEKNWVDKEASCAWLRSAGLKGETESLIMAAQDQTLNTRYHQRMILKQQIDGNCRICGKAQETISHITSGCTVLAATEYLHRHNKVASYIHWIVCRELGWEVPKKWYEHTPQSVTNIKDCTILWDYAIITDRKILANRPDIVIHDRRSKSCMLIDVSVPDDKNIALKEAEKISKYKDLEIEINRMWKVKSKVVPVIVGALGTLRKDFTKYVELIPGRPKTSEIQKISLLGTAHILRKVLG

SEQ ID NO: 4616 - protein, 1100 aa, Poecilobdella manillensis
MWCFYYAQANKNEGGVVKGTYTTWRSRNPEIHQNINKDTLANTRRWIINTKKFTDKELQGIKNRACQNAERHLSETQTEIVIESISEGKFQSPQKAIDSLTIQYPQDPATNITELEQQIKSRLLENKHLDFNNRPKLNKVRICKDTLEKIKAANEILSKMISGRQLNISEINDLIYCSASVIAGVQKPRDGPVGRKEPAWKVRISNKVEQYRKDLSIISEIKKGVATKRVHNKAKHLFKDESKSLEEKEQDIKMKLQATAQRLKRYCKRNDGYHQNKLFQEDAKKFYRHLCKRNEAISDPPSVEKIEEFWRGILENEIVHNTEAAWVRDEEIAFRNVVTEEWKEFKISEIQEVIKKSSNWKSPGPDNIQNFWIKRFTSLHSILTIAFNDLINNPENIPSWLTSGITFLLSKGANQHNPKNYRPITCLPTLYKLLTSAISNRLYTHLDKNNILPIEQKGCQRGSRGCKDQLLINKMIVSTAKRMKRNLAVAWIDYKKAFDSVPHSWILASMKMYGVPARITGFMECSMKEWKTELMLCHQLGCIKTNRISIKRGIFQGDSLSPLLFCLALVPLSNMLNKLKLGYEIEPKEQISHLLYMDDLKIFTKTETQLNKALTTVKTFTDDICMEFGLDKCAVAIMKRGKQIKSRNMPFDDHNSIQSLNEEEAYKYLGIDENGDIKHPEMKEKIAREYYRRVRLILKSELNSKNKLSAINALAIPVLTYSFGIIDWRKSEIDKMDRKTRKLLTMHGLHHPKGDVSRLYIKRRNGGRGLIQLMSAYSCSMVNLSDYIEQGKDRLCSLVKKHEAGKAKYSLLKEAKTIKNKYLSLPTVQTSVKEMLKDNMEKERINELREKPMHGQFFCNLEKNWVDKEASCAWLRSAGLKGETESLIMAAQDQTLNTRYHQRMILKQKIDGNCRICGKAQETISHITSGCTVLAATEYLHRHNKVASYIHWVVCRELGWEVPKKWYEHTPQSVTNIKDYTILWDYAIITDRKILANRPDIVIHDRRSKSCMLIDVSVPDDKNIALKEAEKISKYKDLEIEINRMWKVKSKVVPVIVGALGTLRKDFTKYVELIPGRPKTSEIQKISLLGTAHILRKVLG

SEQ ID NO: 4617 - protein, 1183 aa, Poecilobdella manillensis
MHFNKYNSNSLYLQKLNAAILADQNKRRAEIRSVVSLSSSNSHQTETQSQNGLSEDYRSTVKVNNSKLANKKQQWTKEQYAELMWCFYYAQANKNEGGVVKGTYTTWRSRNPEIHQNINKDTLANTRRWIINTKKFSDMELQGIKNRACQNAERHLSETQTEIVIESISEGKFQSPQKAIDSLTIQYPQDPATNITDLEQQIKSRLLENKHLDFNNRPKLNKVRICKDTLEKIKAANEILSKMISGRQLNISEINDLIYCSASVIAGVQKPRDGPVGRKEPAWKVRISNKVEQYRKDLSIISEIKKGVATKRVHNKAKHLFKDESKSLEEKEQDIKMKLQATAQRLKRYCKRNDGYHQNKLFQEDAKKFYRHLCKRNEAISDPPSAEKIEEFWRGILENEIVHNTEAAWVRDEEIAFRNVVTEEWKEFTISEIQEVIKKSSNWKSPGPDNIQNFWIKRFTSLHSILTIAFNDLINNPENIPSWLTSGITFLLSKGANQNNPKNYRPITCLPTLYKLLTSAISNRLYTHLDKNNILPIEQKGCQRGSRGCKDQLLINKMIVSTAKRMKRNLAMAWIDYKKAFDSVPHSWILASMKMYGVPARITGFMECSMKEWKTELMLCHQLGCIKTNKISIKRGIFQGDSLSPLLFCLALVPLSNMLNKLKLGYEIEPKEQISHLLYMDDLKIFTKTETQLNKALTTVKTFTDDICMEFGLDKCAVAIMKRGKQIKSRNMPFDDHNSIQSLNEEEAYKYLGIDENGDIKHPEMKEKIAREYYRRVRLILKSELNSKNKLSAINALAIPVLTYSFGIIDWRKSEIDKMDRKTRKLLTMHGLHHPKGDVSRLYIKRRNGGRGLIQLMSAYGCSMVNLSDYIEQGKDRLCSLVKKHEAGKAKYSLLKEAKTIKNKYLSLPTVQTSVKEMLKDNMEKERINELREKPMHGQFFCNLEKNWVDKEASCAWLRSAGLKGETESLIMAAQDQTLNTRYHQRMILKQQIDGNCRICGKAQETISHITSGCTVLAATEYLHRHNKVASYIHWIVCRELGWEVPKKWYEHTPQSVTNIKDCTILWDYAIITDRKILANRPDIVIHDRRSKSCMLIDVSVPDDKNIALKEAEKISKYKDLEIEINRMWKVKSKVVPVIVGALGTLRKDFTKYVELIPGRPKTSEIQKISLLGSAHILRKVLG

SEQ ID NO: 4618 - protein, 1100 aa, Poecilobdella manillensis
MWCFYYAQANKNEGGVVKGTYTTWRSRNPEIHQNINKDTLANTRRWIINTKKFNDKELQGIKNRACQKAERHLSETQTEIVIESISEGKFQSPQKAIDSLTIQYPQDPATNITELEQQIKSRLLENKHLDFNNRPKLNKVRICKDTLEKIKATNEILSKMISGRQLNISEINDLIYCSASVIAGVQKPRDGPVGRKEPAWKVRISNKVEQYRKDLSIISEIKKGVATKRVHNKAKHLFKDESKSLEEKEQDIKMKLQATAQRLKRYCKRNDGYHQNKLFQEDAKKFYRHLCKRNESISDPPSAEKIEEFWRGILENEIVHNTEAAWVRDEEIAFRNVVTEEWKEFTISEIQEVIKKSSNWKSPGPDNIQNFWIKRFTSLHSILTIAFNDLINNPENIPSWLTSGITFLLSKGANQHNPKNYRPITCFPTLYKLLTSAISNRLYTHLDKNNILPIEQKGCQRGSRGCKDQLLINKMIVSTAKRMKRNLAVAWIDYKKAFDSVPHSWILASMKMYGVPARITGFMECSMKEWKTELMLCHQLGCIKTNRISIKRGIFQGDSLSPLLFCLALVPLSNMLNKLKLGYEIEPKEQISHLLYMDDLKIFTKTETQLNKALTTVKTFTDDICMEFGLDKCAVAIMKRGKQIKSRNMPFDDHNSIQSLNEEEAYKYLGIDENGDIKHPEMKEKIAREYYRRVRLILKSELNSKNKLSAINALAIPVLTYSFGIIDWRKSEIDKMDRKTRKLLTMHGLHHPKGDVSRLYIKRRNGGRGLIQLMSAYSCSMVNLSDYIEQGKDRLCSLVKKHEAGKAKYSLLKEAKTIKNKYLSLPTVQTSVKEMLKDNMEKERINELREKPMHGQFFCNLEKNWVDKEASCAWLRSAGLKGETESLIMAAQDQTLNTRYHQRMILKQKIDGNCRICGKAQETISHITSGCTVLAATEYLHRHNKVASYIHWVVCRELGWEVPKKWYEHTPQSVTNIKDYTILWDYAIITDRKILANRPDIVIHDKRSKSCLLIDVSVPDDKNIALKEAEKISKYKDLEIEINRMWKVKSKVVPVIVGALGTLRKDFTKYVELIPGRPKTSEIQKISLLGTAHILRKVLG

SEQ ID NO: 4619 - protein, 1183 aa, Poecilobdella manillensis
MHFNKYNSNSLYLQKLNAAILADQNKRRAEIRSVVSLSSSNSHQTETQSQNGLSEDYRSTVKVNNSKLANKKQQWTKEQYAELMWCFYYAQANKNEGGVVKGTYTTWRSRNPEIHQNINKDTLANTRRWIINTKKFNDMELQDIKNRACQNAERHLSETQTKIVIKSISEGKFQSPQKAIDSLTIQYPQDPATNITDLEQQIKSRLLENKHLDFNNRPKLNKVRICKDTLEKIKAANEILSKMIGGRQLNISEINDLIYCSASVIAGVQKPRDGPVGRKEPAWKVRISNKVEQYRKDLSIISEIKKGVATKRVHNKAKHLFKDESKSLEEKEQDIKMKLQATAQRLKRYCKRNDGYHQNKLFQEDAKKFYRHLCKRNEAISDPPSAEKIEEFWRGILENEIVHNTEAAWVRDEEIAFRNVVTEEWKEFTISEIQEVIKKSSNWKSPGPDNIQNFWIKRFTSLHSILTIAFNDLINNPENIPSWLTSGVTFLLSKGANQNNPKNYRPITCLPTLYKLLTSAISNRLYTHLDKNNILPIEQKGCQRGSRGCKDQLLINKMIVSTAKRMKRNLAMAWIDYKKAFDSVPHSWILASMKMYGVPARITGFMECSMKEWKTELMLCHQLGCIKTNRISIKRGIFQGDSLSPLLFCLALVPLSNMLNKLKVGYEIEPKEQISHLLYMDDLKIFTKTETQLNKALTTVKTFTDDICMEFGLDKCAVAIMKRGKQIKSRNMPFDDHNSIQSLNEEEAYKYLGIDENGDIKHPEMKEKIAREYYRRVRLILKSELNSKNKLSAINALAIPVLTYSFGIIDWRKSEIDKMDRKTRKLLTMHGLHHPKGDVSRLYIKRRNGGRGLIQLMSAYRCSMVNLSDYIEQGKDRLCSLVKKHEAGKAKYSLLKEAKTIKNKYLFLPTVQTSVKEMLKDNMEKERINELREKPMHGQFFCNLEKNWVDKEASCAWLRSAGLKGETESLIMAAQDQTLNTRYHQRMILKQQIDGNCRICGKAQETISHITSGCTVLAATEYLHRHNKVASYIHWIVCRELGWEVPKKWYEHTPQSVTNIKDCTILWDYAIITDRKILANRPDIVIHDRRSKSCMLIDVSVPDDKNIALKEAEKISKYKDLEIEINRMWKVKSKVVPVIVGALGTLRKDFTKYVELIPGRPKTSEIQKISLLGTAHILRKVLG

SEQ ID NO: 4620 - protein, 1183 aa, Poecilobdella manillensis
MHFNKYNSNSLYLQKLNAAILADQNKRRAEIRSVVSLSSSNSHQTETQSQNGLSEDYKSTVKVNNSKLANKKQQWTKEQYAELMWCFYYAQANKNEGGVVKGTYTTWRSRNPEIHQNINKDTLANTRRWIINTKKFTDKELQGIKNRACQNAERHLSETQTEIVIESISEGKFQSPQKAIDSLTIQYPQDPATNITELEQQIKSRLLENKHLDFNNRPKLNKVRICKDTLEKIKAANEILSKMISGRQLNISEINDLIYCSASVIAGVQKPRDGPVGRKEPAWKVRINNKVEQYRKDLSIISEIKKGVATKRVHNKAKHLFKDESKSLEEKEQDIKMKLQATAQRLKRYCKRNDGYHQNKLFQEDAKKFYRHLCKRNEAISDPPSVEKIEEFWRGILENEIVHNTEAAWVRDEEIAFRNVVTEEWKEFTISEIQEVIKKSSNWKSPGPDNIQNFWIKRFTSLHSILTIAFNDLINNPENIPSWLTSGITFLLSKGANQHNPKNYRPITCLPTLYKLLTSAISNRLYTHLDKNNILPIEQKGCQRGSRGCKDQLLINKMIVSTAKRMKRNLAVAWIDYKKAFDSVPHSWILASMKMYGVPARITGFMECSMKEWKTELMLCHQLGCIKTNRISIKRGIFQGDSLSPLLFCLALVPLSNMLNKLKLGYEIEPKEQISHLLYMDDLKIFTKTETQLNKALTTVKTFTDDICMEFGLDKCAVAIMKRGKQIKSRNMPFDDHNSIQSLNEEEAYKYLGIDENGDIKHPEMKEKIAREYYRRVRLILKSELNSKNKLSAINALAIPVLTYSFGIIDWRKSEIDKMDRKTRKLLTMHGLHHPKGDVSRLYIKRRNGGRGLIQLMSAYSCSMVNLSDYIEQGKDRLCSLVKKHEAGKAKYSLLKEAKTIKNKYLSLPTVQTSVKEMLKDNMEKERINELREKPMHGQFFCNLEKNWVDKEASCAWLRSAGLKGETESLIMAAQDQTLNTRYHQRMILKQKIDGNCRICGKAQETISHITSGCTVLAATEYLHRHNKVASYIHWVVCRELGWEVPKKWYEHTPQSVTNIKDYTILWDYAIITDRKILANRPDIVIHDRRSKSCLLIDVSVPDDKNIALKEAEKISKYKDLEIEINRMWKVKSKVVPVIVGALGTLRKDFTKYVELIPGRPKTSEIQKISLLGTAHILRKVLG

SEQ ID NO: 4621 - protein, 1045 aa, Poecilobdella manillensis
MELQGIKNRACQNAERHLSETQTEIVIESISEGKFQSPQKAIDSLTIQYPQDPATNITDLEQQIKSRLLENKHLDFNNRPKLNKVRICKDTLEKIKAANEILSKMISGRQLNISEINDLIYCSASVIAGVQKPRDGPVGRKEPAWKVRISNKVEQYRKDLSIISEIKKGVATKRVHNKAKHLFKDESKSLEEKEQDIKMKLQATAQRLKRYCKRNDGYHQNKLFQEDAKKFYRHLCKRNEAISDPPSAEKIEEFWRGILENEIVHNTEAAWVRDEEIAFRNVVTEEWKEFTISEIQEVIKKSSNWKSPGPDNIQNFWIKRFTSLHSILTIAFNDLINNPENIPSWLTSGITFLLSKGANQNNPKNYRPITCLPTLYKLLTSAISNRLYTHLDKNNILPIEQKGCQRGSRGCKDQLLINKMIVSTAKRMKRNLAMAWIDYKKAFDSVPHSWILASMKMYGVPARITGFMECSMKEWKTELMLCHQLGCIKTNRISIKRGIFQGDSLSPLLFCLALVPLSNMLNKLKVGYEIEPKEQISHLLYMDDLKIFTKTETQLNKALTTVKTFTDDICMEFGLDKCAVAIMKRGKQIKSRNMPFDDHNSIQSLNEEEAYKYLGIDENGDIKHPEMKEKIAREYYRRVRLILKSELNSKNKLSAINALAIPVLTYSFGIIDWRKSEIDKMDRKTRKLLTMHGLHHPKGDVSRLYIKRRNGGRGLIQLMSAYRCSMVNLSDYIEQGKDRLCSLVKKHEAGKAKYSLLKEAKTIKNKYLSLPTVQTSVKEMLKDNMEKERINELREKPMHGQFFCNLEKNWVDKEASCAWLRSAGLKGETESLIMAAQDQTLNTRYHQHVILKQQIDGNCRICGKAQETISHITSGCTMLAATEYLHRHNKVASYIHWIVCRELGWEVPKKWYEHTPQSVTNIKDCTILWDYAIITDRKILANRPDIVIHDRRSKSCMLIDVSVPDDKNIALKEAEKISKYKDLEIEINRMWKVKSKVVPVIVGALGTLRKDFTKYVELIPGRPKTSEIQKISLLGTAHILRKVLG

SEQ ID NO: 4622 - protein, 1183 aa, Poecilobdella manillensis
MHFNKYNSNSLYLQKLNAAILADQNKRRAEIRSVVSLSSSNSHQTETQSQNGLSEDYKSTVKVNNSKLANKKQQWTKEQYAELMWCFYYAQANKNEGGVVKGTYTTWRSRNPEIHQNINKDTLANTRRWIINTKKFTDKELQGIKNRACQNAERHLSETQTEIVIESISEGKFQSPQKAIDSLTIQYPQDPATNITELEQQIKSRLLENKHLDFNNRPKLNKVRICKDTLEKIKAANEILSKMISGRQLNISEINDLIYCSASVIAGVQKPRDGPVGRKEPAWKVRISNKVEQYRKDLSIISEIKKGVATKRVHNKAKHLFKDESKSLEEKEQDIKMKLQATAQRLKRYCKRNDGYHQNKLFQEDAKKFYRHLCKRNEAISDPPSVEKIEEFWRGILENEIVHNTEAAWVRDEEIAFRNVVTEEWKEFKISEIQEVIKKSSNWKSPGPDNIQNFWIKRFTSLHSILTIAFNDLINNPENIPSWLTSGITFLLSKGANQHNPKNYRPITCLPTLYKLLTSAISNRLYTHLDKNNILPIEQKGCQRGSRGCKDQLLINKMIVSTAKRMKRNLAVAWIDYKKACDSVPHSWILASMKMYGVPARITGFMECSMKEWKTELMLCHQLGCIKTNRISIKRGIFQGDSLSPLLFCLALVPLSNMLNKLKLGYEIEPKEQISHLLYMDDLKIFTKTETQLNKALTTVKTFTDDICMEFGLDKCAVAIMKRGKQIKSRNMPFDDHNSIQSFNEEEAYKYLGIDENGDIKHPEMKEKIAREYYRRVRLILKSELNSKNKLSAINALAIPVLTYSFGIIDWRKSEIDKMDRKTRKLLTMHGLHHPKGDVSRLYIKRRNGGRGLIQLMSAYSCSMVNLSDYIEQGKDRLCSLVKKHEAGKAKYSLLKEAKTIKNKYLFLPTVQTSVKEMLKDNMEKERINELREKPMHGQFFCNLEKNWVDKEASCAWLRSAGLKGETESLIMAAQDQTLNTRYHQRMILKQKIDGNCRICGKAQETISHITSGCTVLAATEYLHRHNKVASYIHWVVCRELGWEVPKKWYEHTPQSVTNIKDYTILWDYAIITDRKILANRPDIVIHDRRSKSCLLIDVSVPDDKNIALKEAEKISKYKDLEIEINRMWKVKSKVVPVIVGALGTLRKDFTKYVELIPERPKTSEIQKISLLGTAHILRKVLG

SEQ ID NO: 4623 - protein, 1100 aa, Poecilobdella manillensis
MWCFYYAQANKNEGGVVKGTYTTWRSRNPEIHQNINKDTLANTRRWIINTKKFSDMELQGIKNRACQNAERHLSETQTEIVIESISEGKFQSPQKAIDSLTIQYPQDPATNITDLEQQIKSRLLENKHLDFNNRPKLNKVRICKDTLEKIKAANEILSKMISGRQLNISEINDLIYCSASVIAGVQKPRDGPVGRKEPAWKIRISNKVKQYRKDLSIISEIKKGVATKRVHNKAKHLFKDESKSLEEKEQDIKMKLQATAQRLKRYCKRNDGYHQNKLFQEDAKKFYRHLCKRNEAISDPPSAEKIEEFWRGILENEIVHNTEAAWVRDEEIAFRNVVTEEWKEFTISEIQEVIKKSSNWKSPGPDNIQNFWIKRFTSLHSILTIAFNDLINNPENIPSWLTSGITFLLSKGANQNNPKNYRPITCLPTLYKLLTSAISNRLYTHLDKNNILPIEQKGCQRGSRGCKDQLLINKMIVSTAKRMKRNLAMAWIDYKKAFDSVPHSWILASMKMYGVPARITGFMECSMKEWKTELMLCHQLGCIKTNRISIKRGIFQGDSLSPLLFCLALVPLSNMLNKLKVGYEIEPKEQISHLLYMDDLKIFTKTETQLNKALTTVKTFTDDICMEFGLDKCAVAIMKRGKQIKSRNMPFDDHNSIQSLNEEEAYKYLGIDENGDIKHPEMKEKIAREYYRRVRLILKSELNSKNKLSAINALEIPVLTYSFGIIDWRKSEIDKMDRKTRKLLTMHGLHHPKGDVSRLYIKRRNGGRGLIQLMSAYRCSMVNLSDYIEQGKDRLCSLVKKHEAGKAKYSLLKEAKTIKNKYLSLPTVQTSVKEMLKDNMEKERINELREKPMHGQFFCNLEKNWVDKEASCAWLRSAGLKGETESLIMAAQDQTLNTRYHQRMILKQQIDGNCRICGKAQETISHITSGCTVLAATEYLHRHNKVASYIHWIVCRELGWEVPKKWYEHTPQSVTNIKDCTILWDYAIITDRKILANRPDIVIHDRRSKSCMLIDVSVPDDKNIALKEAEKISKYKDLEIEINRMWKVKSKVVPVIVGALGTLRKDFTKNVELIPGRPKTSEIQKISLLGTAHILRKVLG

SEQ ID NO: 4624 - protein, 1183 aa, Poecilobdella manillensis
MHFNKYNSNSLYLQKLNAAILADQNKRRAEIRSVVSLSSSNSHQTETQSQNGLSEDYKSTVKVNNSKLANKKQQWTKEQYAELMWCFYYAQANKNEGGVVKGTYTTWRSRNPEIHQNINKDTLANTRRWIINTKKFTDKELQSIKNRACQNAERHLSETQTEIVIESISEGKFQSPQKAIDSLTIQYPQDPATNITELEQQIKSRLLENKHLDFNNRPKLNKVRICKDTLEKIKAANEILSKMISGRQLNISEINDLIYCSASVIAGVQKPRDGPVGRKEPAWKVRINNKVEQYRKDLSIISEIKKGVATKRVHNKAKHLFKDESKSLEEKEQDIKMKLQATAQRLKRYCKRNDGYHQNKLFQEDAKKFYRHLCKRNEAISDPPSVEKIEEFWRGILENEIVHNTEAAWVRDEEIAFRNVVTEEWKEFKISEIQEVIKKSSNWKSPGPDNLQNFWIKRFTSLHSILTIAFNDLINNPENIPSWLTSGITFLLSKGANQHNPKNYRPITCLPTLYKLLTSAISNRLYTHLDKNNILPIEQKGCQRGSRGCKDQLLINKMIVSTAKRMKRNLAVAWIDYKKAFDSVPHSWILASMKMYGVPARITGFMECSMKEWKTELMLCHQLGCIKTNRISIKRGIFQGDSLSPLLFCLALVPLSNMLNKLKLGYEIEPKEQISHLLYMDDLKIFTKTETQLNKALTTVKTFTDDICMEFGLDKCAVAIMKRGKQIKSRNMPFDDHNSIQSLNKEEAYKYLGIDENGDIKHPEMKEKIAREYYRRVRLILKSELNSKNKLSAINALAIPVLTYSFGIIDWRKSEIDKMDRKTRKLLTMHGLHHPKGDVSRLYIKRRNGGRGLIQLMSAYSCSMVNLSDYIEQGKDRLCSLVKKHEAGKAKYSLLKEAKTIKNKYLSLPTVQTSVKEMLQDNMEKERINELRVKPMHGQFFCNLEKNWVDKEASCAWLRSAGLKGETESLIMAAQDQTLNTRYHQRMILKQKIDGNCRICGKAQETISHITSGCTVLAATEYLHRHNKVASYIHWVVCRELGWEVPKKWYEHTPQSVTNIKDYTILWDYAIITDRKILANRPDIVIHDRRSKSCLLIDVSVPDDKNIALKEAEKISKYKDLEIEINRMWKVKSKVVPVIVGALGTLRKDFTKYVELIPGRPKTSEIQKISLLGTAHILRKVLG

SEQ ID NO: 4625 - protein, 1045 aa, Poecilobdella manillensis
MELQDIKNRACQNVERPLSETQNEIVIESMREGKSQSPQKPIDSLTIQYPQDPATNITELEQQIKSRLLENKHLDFNNRPKLNKVRICKDTLEKIKASNEILSKMISGRQLNISEINDLIYCSASVIAGVQKPRDGPVGRKEPAWKVRISNKVEQCRKDLSIISEIKKGVATKRVHNKAKHLFKDESKSLEEKEQDIKMKLQATAQRLKRYCKRNDGYHQNKLFQEDAKKFYRHLCKRNEAISDPPSAEKIKEFWRGILENEIVHNTEAAWVRDEEIAFRNVVTEEWKEFTISEIQEVIKKSSNWKSPGPDNIQNFWIKRFTSLHSILTIAFNDLINNPENIPSCLTSGITFLLSKGANQNNPKNYRPITCLPTLYKLLTSAISKRLYTHLDKNNILPIEQKGCQRGSRGCKDQLLINKMIVSTAKRMKRNLAMAWIDYKKAFDSVPHSWILASMKMYGVPARITGFMECSMKEWKTELMLCHQLGCIKTNRISIKRGIFQGDSLSPLLFCLALVPLSNMLNKLKVGYEIEPKEQISHLLYMDDLKIFTKTETQLNKALTTVKTFTDDICMEFGLDKCAAAIMKRGKQIKSRNMPFDDHNSIQSLNEEEAYKYLGIDENGDIKHPEMKEKIAREYYRRVRLILKSELNSKNKLSAINALAIPVLTYSFGIIDWRKSEIDRMDRKTRKLLTMHGLHHPKGDVTRLYIKRRNGGRGLIQLMSAYSCSMVNLSDYIEQGKDRLCSLVKKHEAGKAKYSLLKEAKTIKNKYLSLPTGQTSANEMLKDNMEKERINELREKPMHGQFFCNLEKNWVDKEASCAWLRSAGLKGETESLIMAAQDQTLNTRYHQRMILKQQIDGNCRICGKAQETISHITSGCTVLAATEYLHRHNKVASYIHWIVCRELGWEVPKKWYEHTPQSVTNIKDCTILWDYAIITDRKILANRPDIVIHDRRSKSCMLIDVSVPDDKNIALKEAEKISKYKDLEIEINRMWSVKSKVVPVIVGALGTLRKDFTKYVELIPGRPKTSEIQKISLLGTAHILRKVLG

SEQ ID NO: 4626 - protein, 1183 aa, Poecilobdella manillensis
MHFNKYNSNSLYLQKLNAAILADQNKRRAEIRSVVSLSSSNSHQTETQSQNGLSEDYRSTVKVNNSKLANKKQQWTKEQYAELMWCFYYAQANKNEGGVVKGTYTTWRSRNPEIHQNINKDTLANTRRWIINTKKFSDMELQGIKNRACQNAERHLSETQTEIVIESISEGKFQSPQKAIDSLTIQYPQDPATNITDLEQQIKSRLLENKHLDFNNRPKLNKVRICKDTLEKIKAANEILSKMISGRQLNISEINDLIYCSASVIAGVQKPRDGPVGRNEPAWKVRISNKVEQYRKDLSIISEIKKGVATKRVHNKAKHLFKDESKSLEEKDQDIKMKLQATAQRLKRYCKRNDGYHQNKLFQEDAKKFYRHLCKRNEAISDPPSAEKIEEFWRGILENEIVHNTEAAWVRDEEIEFRNVVTEEWKEFTISEIQEVIKKSSNWKSPGPDNIQNFWIKRFTSLHSILTIAFNDLINNPENIPSWLTSGVTFLLSKGANQNNPKNYRPITCLPTLYKLLTSAISNRLYTHLDKNNILPIEQKGCQRGSRGCKDQLLINKMIVSTAKRMKRNLAMAWIDYKKAFDSVPHSWILASMKMYGVPARITGFMECSMKEWKTELMLCHQLGCIKTNRISIKRGIFQGDSLSPLLFCLALVPLSNMLNKLKVGYEIEPKEQISHLLYMDDLKIFTKTETQLNKALTTVKTFTDDICMEFGLDKCAVAIMKRGKQIKSRNMPFDDHNSIQSLNEEEAYKYLGIDENGDIKHPEMKEKIAREYYRRVRLILKSELNSKNKLSAINALAIPVLTYSFGIIDWRKSEIDKMDRKTRKLLTMHGLHHPKGDVSRLYIKRRNGGRGLIQLMSAYRCSMVNLSDYIEQGKDRLCSLVKKHEAGKAKYSLLKEAKTIKNKYLSLPTVKTSVKEMLKDNMEKERINELREKPMHGQFFCNLEKNWVDKEASCAWLRSAGLKGETESLIMAAQDQTLNTRYHQRMILKQQIDGNCRICGKAQETISHITSGCTVLAATEYLHRHNKVASYIHWIVCRELGWEVPKKWYEHTPQSVTNIKDCTILWDYAIITDRKILANRPDIVIHDRRSKSCMLIDVSVPDDKNIALKEAEKISKYKDLEIEINRMWKVKSKVVPVIVGALGTLRKDFTKYVELIPGRPKTSEIQKISLLGTAHILRKVLG

SEQ ID NO: 4627 - protein, 941 aa, Poecilobdella manillensis
MISGRQLNISEINDLIYCSASVIAGVQKPRDGPVGRKEPAWKVRISNKVEQYRKDLSIISEIKKGVATKRVHNKAKHLFKDESKSLEEKEQDIKMKLQATAQRLKRYCKRNDGYHQNKLFQEDAKKFYRHLCKRNETISDPPSAEKIEEFWRGILENEIVHNTEAAWVRDEEIAFRNVVTEEWKEFTISEIQEVIKKSSNWKSPGPDNIQNFWIKRFTSLHSILTIAFNDLINNPENIPSWLTSGVTFLLSKGANQNNPKNYRPITCLPTLYKLLTSAISNRLYTHLDKNNILPIEQKGCQRGSRGCKDQLLINKMIVSTAKRMKRNLAMAWIDYKKAFDSVPHSWILASMKMYGVPARITGFMECSMKEWKTELMLCHQLGCIKTNRISIKRGIFQGDSLSPLLFCLALVPLSNMLNKLKVGYEIEPKEQISHLLYMDDLKIFTKTETQLNKALTTVKTFTDDICMEFGLDKCAVAIMKRGKQIKSRNMPFDDHNSIQSLNEEEAYKYLGIDENGDIKHPEMKEKIAREYYRRVRLILKSELNSKNKLSAINALAIPVLTYSFGIIDWRKSEIDKMDRKTRKLLTMHGLHHPKGDVSRLYIKRRNGGRGLIQLMSAYRCSMVNLSDYIEQGKDRLCSLVKKHEAGKAKYSLLKEAKTIKNKYLSLPTVQTSVKEMLKDNMEKERINELREKPMHGQFFCNLEKNWVDKEASCAWLRSAGLKGETESLIMAAQDQTLNTRYHQRMILKQQIDGNCRICGKAQETISHITSGCTVLAATEYLHRHNKVASYIHWIVCRELGWEVPKKWYEHTPQSVTNIKDCTILWDYAIIMDRKILANRPDIVIHDRRSKSCMLIDVSVPDDKNIALKEAEKISKYKDLEIEINRMWKVKSKVVPVIVGALGTLRKDFTKYVELIPGRPKTSEIQKISLLGTAHILRKVLG

SEQ ID NO: 4628 - protein, 1183 aa, Poecilobdella manillensis
MHFNKYNSNSLYLQKLNVAILADQNKRRAEIRSVVSLSSSNSHQTETQSQNGLSEDYKSTVKVNNSKLANKKQQWTKEQYAELMWCFYYAQANKNEGGVVKGTYTTWRSRNPEIHQNINKDTLANTRRWIINTKKFTDKELQGIKNRTCQNAERHLSETQTEIVIESISEGKFQSPQKAIDSLTIQYPQDPATNITELEQQIKSRLLENKHLDFNNRPKLNKVRICKDTLEKIKAANEILSKMISGRQLNISEINDLIYCSASVIAGVQKPRDGPVGRKEPAWKVRISNKVEQYRKDLSIISEIKKGVATKRVHNKAKHLFKDESKSLEEKEQDIKMKLQATAQRLKRYCKRNDGYHQNKLFQEDAKKFYRHLCKRNEAISDPPSVEKIEEFWGGILENEIVHNTEAAWVRDEEIAFRNVVTEEWKEFKISEIQEVIKKSSNWKSPGPDNIQNFWIKRFTSLHSILTIAFNDLINNPENIPSWLTSGITFLLSKGANQHNPKNYRPITCLPTLYKLLTSAISNRLYTHLDKNNILPIEQKGCQRGSRGCKDQLLINKMIVSTAKRMKRNLAVAWIDYKKAFDSVPHSWILASMKMYGVPARITGFMECSMKEWKTELMLCHQLGCIKTNRISIKRGIFQGDSLSPLLFCLALVPLSNMLNKLKVGYEIEPKEQISHLLYMDDLKIFTKTETQLNKALTTVKTFTDDICMEFGLDKCAVAIMKRGKQIKSRNMPFDDHNSIQSLNEEEAYKYLGIDENGDIKHPEMKEKIAREYYRRVRLILKSELNSKNKLSAINALAIPVLTYSFGIIDWRKSEIDKMDRKTRKLLTMHGLHHPKGDVSRLYIKRRNGGRGLIQLMSAYSCSMVNLSDYIEQGKDRLCSLVKKHEAGKAKYSLLKEAKTIKNKYLSLPTVQTSVKEMLKDNMEKERINELREKPMHGQFFCNLEKNWVDKEASCAWLRSAGLKGETESLIMAAQDQTLNTRYHQRMILKQKIDGNCRICGKAQETISHITSGCTVLAATEYLRRHNKVASYIHWVVCRELGWEVPKKWYEHTPQSVTNIKDYTILWDYAIITDRKILANRPDIVIHDRRSKSCMLIDVSVPDDKNIALKEAEKISKYKDLEIEINRMWKVKSKVVPVIVGALGTLRKDFTKYVELIPGRPKTSEIQKISLLGTAHILRKVLG

SEQ ID NO: 4629 - protein, 1183 aa, Poecilobdella manillensis
MHFNKYNSNSLYLQKLNAAILADQNKRRAEIRSVVSLSSSNSHQTETQSQNGLSEDYKSTVKVNNSKLANKKQQWTKEQYAELMWCFYYAQANKNEGGVVKGTYTTWRSRNPEIHQNINKDTLANTRRWIINTKKFNDKELQGIKNRACQNAERHLSETQTEIVIESISEGKFQSPQKAIDSLTIQYPQDPATNIAELEQQIKSRLLENKHLDFNNRPKLNKVRICKDTLEKIKAANEILSKMISGRQLNISEINDLIYCSASVIAGVQKPRDGPVGRKEPAWKVRISNKVEQYRKDLSIISEIKKGVATKRVHNKAKHLFKDESKSLEEKEQDIKMKLQAAAQRLKRYCKRNDGYHQNKLFQEDAKRFYRHLCKRNEAISDPPSVEKIEEFWRGILEDEIVHNTEAAWVRDEEIAFRNVVTEEWKEFKISEIQEVIKKSSNWKSPGPDNIQNFWIKRFTSLHSILTIAFNDLINNPENIPSWLTSGITFLLSKGANQHNPKNYRPITCLPTLYKLLTSAISNRLYTHLDKNNILPIEQKGCQRGSRGCKDQLLINKMIVSTAKRMKRNLAVAWIDYKKAFDSVPHSWILASMKMYGVPARITGFMECSMKEWKTELMLCHQLGCIKTNRISIKRGIFQGDSLSPLLFCLALVPLSNMLNKLKLGYEIEPKEQISHLLYMDDLKIFTKTETQLNKALTTVKTFTDDICMEFGLDKCAVAIMKRGKQIKSRNMPFDDHNSIQNLNEEEAYKYLGIDENGDIKHPEMKEKIAREYYRRVRLILKSELNSKNKLSAINALAIPVLTYSFGIIDWRKSEIDKMDRKTRKLLTMHGLHHPKGDVSRLYIKRRNGGRGLIQLMSAYSCSMVNLSDYIEQGKDRLCSLVKKHEAGKAKYSLLKEAKTIKNKYLSLPTVQTSVKEMLKDNMKKERINELREKPMHGQFFCNLEKNWVDKEASCAWLRSAGLKGETESLIMAAQDQTLNTRYHQRMILKQKIDGNCRICGKAQETISHITSGCIVLAATEYLHRHNKVASYIHWVVCRELGWEVPKKWYEHTPQSVTNIKDYTILWDYAIITDRKILANRPDIVIHDRRSKSCLLIDVSVPDDKNIALKEAEKISKYKDLEIEINRMWKVKSKVVPVIVGALGTLRKDFTKYVELIPGRPKTSEIQKISLLGTAHILRKVLG

SEQ ID NO: 4630 - protein, 1181 aa, Poecilobdella manillensis
MHFNKYNSNSLYLQKLNAAILADQNKRRAEIRSVVSLSSSNSHQTETQSQNGLSEDYRSTVKVNNSKLANKKQQWTKEQYAELMWCFYYAQANKNEGGVVKGTYTTWRSRNPEIHQNINKDTLANTRRWIINTKNDMELQDIKNRACQNAERHLSETQTKIVIESISEGKFQSPQKAIDSLTIQYPQDPATNITDLEQQIKSRLLENKHLDFNNRPKLNKVRICKDTLEKIKAANEILSKMIGGRQLNISEINDLIYCSASVIAGVQKPRDGPVGRKEPAWKVRISNKVEQYRKDLSIISEIKKGVATKRVHNKAKHLFKDESKSLEEKEQDIKMKLQATAQRLKRYCKRNDGYHQNKLFQEDAKKFYRHLCKRNEAISDPPSAEKIEEFWRGILENEIVHNTEAAWVRDEEIAFRNVVTEEWKEFTISEIQEVIKKSSNWKSPGPDNIQNFWIKRFTSLHSILTIAFNDLINNPENIPSWLTSGVTFLLSKGANQNNPENYRPITCLPTLYKLLTSAISNRLYTHLDKNNILPIEQKGCQRGSRGCKDQLLINKMIVSTAKRMKRNLAMAWIDYKKAFDSVPHSWILASMKMYGVPARITGFMECSMKEWKTELMLCHQLGCIKTNRISIKRGIFQGDSLSPLLFCLALVPLSNMLNKLKVGYEIEPKEQISHLLYMDDLKIFTKTETQLNKALTTVKTFTDDICMEFGLDKCAVAIMKRGKQIKSRNMPFDDHNSIQSLNEEEAYKYLGIDENGDIKHPEMKEKIAREYYRRVRLILKSELNSKNKLSAINALAIPVLTYSFGIIDWRKSEIDKMDRKTRKLLTMHGLHHPKGDVSRLYIKRRNGGRGLIQLMSAYRCSMVNLSDYIEQGKDRLCSLVKKHEAGKAKYSLLKEAKTIKNKYLSLPTVQTSVKEMLKDNMEKERINELREKPMHGQFFCNLEKNWVDKEASCAWLRSAGLKGETESLIMAAQDQTLNTRYHQRMILKQQIDGNCRICGKAQETISHITSGCTVLAATEYLHRHNKVASYIHWIVCRELGWEVPKKWYEHTPQSVTNIKDCTILWDYAIITDRKILANRPDIVIHDRRSKSCMLIDVLVPDDKNIALKEAEKISKYKDLEIEINRMWKVKSKVVPVIVGALGTLRKDFTKYVELIPGRPKTSEIQKISLLGTAHILRKVLG

SEQ ID NO: 4631 - protein, 1183 aa, Poecilobdella manillensis
MHFNKYNSNSLYLQKLNAAILADQNKRRAEIRSVVSLSSSNSHQTETQSQNGLSEDYRSTVKVNNSKLANKKQQWTKEQYVELMWCFYYAQANKNEGGVVKGTYTTWRSRNPEIHQNINKDTLANTRRWIINTKKFNDKELQGIKNRACQNAERHLSETQTEIVIESISEGKFQSPQKAIDSLTIQYPQDPATNITELEQQIKSRLLENKHLDFNNRPKLNKVRICKDTLEKIKAANEILSKMISGRQLNISEINDLIYCSASVIAGVQKPRDGPVGRKESAWKVRISNKVEQYRKDLSIISEIKKGVATKRVHNKAKHLFKDESKSLEEKEQDIKMKLQATAQRLKRYCKRNDGYHQNKLFQEDAKKFYRHLCKRNEAISDPPSAEKIEEFWRGILENEIVHNTEAAWVRDEEIAFRNVVTEEWKEFTISEIQEVIKKSSNWKSPGPDNIQNFWIKRFTSLHSILTIAFNDLINNPENIPSWLTSGITFLLSKGANQHNPKNYRPITCLPTLYKLLTSAISNRLYTHLDKNNILPIEQKGCQRGSRGCKDQLLINKMIVSTAKRMKRNLAVAWIDYKKAFDSVPHSWILASMKMYGVPARITGFMECSMKEWKTELMLCHQLGCIKTNRISIKRGIFQGDSLSPLLFCLALVPLSNMLNKLKLGYEIEPKEQISHLLYMDDLKIFTKTETQLNKALTTVKTFTDDICMEFGLDKCAVAIMKRGKQIKSRNMPFDDHNSIQSLNEEEAYKYLGIDENGDIKHPEMKEKIAREYYRRVRLILKSELNSKNKLSAINALAIPVLTYSFGIIDWRKSEIDKMDRKTRKLLTMHGLHHPKGDVSRLYIKRRNGGRGLIQLMSAYSCSMVNLSDYIEQGKDRLCSLVKKHEAGKAKYSLLKEAKTIKNKYLSLPTVQTSVKEMLKDNMEKERINELREKPMHGQFFCNLEKNWVDKEASCAWLRSAGLKGETESLIMAAQDQTLNTRYHQRMILKQKIDGNCRICGKAQETISHITSGCTVLAATEYLHRHNKVASYIHWVVCRELGWEVPKKWYEHTPQSVTNIKDYTILWDYAIITDRKILANRPDIVIHDRRSKSCLLIDVSVPDDKNIALKEAEKISKYKDLEIEINRMWKVKSKVVPVIVGALGTLRKDFTKYVELIPGRPKTSEIQKISLLGTAHILRKVLG

SEQ ID NO: 4632 - protein, 1183 aa, Poecilobdella manillensis
MHFNKYNSNSLYLQKLNAAILADQNKRRAEIRSVVSLSSSNSHQTETQSQNGLSEDYKSTVKVNNSKLANKKQQWTKEQYAELMWCFYYAQANKNEGGVVKGTYTTWRSRNPEIHQNINKDTLANTRRWIINTKKFTDKELQGIKNRACQNAERHLSETQTEIVIESISEGKFQSPQKAIDSLTIQYPQDPATNITELEQQIKSRLLENKHLDFNNRPKLNKVRICKDTLEKIKAANEILSKMISGRQLNISEINDLIYCSASVIAGVQKPRDGPVGRKEPAWKVRISNKVEQYRKDLSIISEIKKGVATKRVHNKAKHLFKDKSKSLEEKEQDIKMKLQATAQRLKRYCKRNDGYHQNKLFQEDAKKFYRHLCKRNEAISDPPSVEKIEEFWRGILENEIVHNTEAAWVRDEEIAFRNVVTEEWKEFKISEIQEVIKKSSNWKSPGPDNIQNFWIKRFTSLHSILTIAFNDLINNPENIPSWLTSGITFLLSKGANQHNPKNYRPITCLPTLYKLLTSAISNRLYTHLDKNNILPIEQKGCQRGSRGCKDQLLINKMIVSTAKRMKRNLAVAWIDYKKAFDSVPHSWILTSMKMYGVPARITSFMECSMKEWKTELMLCHQLGCIKTNRISIKRGIFQGDSLSPLLFCLALVPLSNMLNKLKLGYEIEPKEQISHLLYMDDLKIFTKTETQLNKALTTVKTFTDDICMEFGLDKCAVAIMKRGKQIRSRNMPFDDHNSIQSLNEEEAYKYLGIDENGDIKHPEMKEKIAREYYRRVRLILKSELNSKNKLSAINALAIPVLTYSFGIIDWRKSEIDKMDRKTRKLLTMHGLHHPKGDVSRLYIKRRNGGRGLIQLMSAYSCSMVNLSDYIEQGKDRLCSLVKKHEAGKAKYSLLKEAKTIKNKYLSLPTVQTSVKEMLKDNMEKERINELREKPMHGQFFCNLEKNWVDKEASCAWLRSAGLKGETESLIMAAQDQTLNTRYHQRMILKQKIDGNCRICGKAQETISHITSGCTVLAATEYLHRHNKVASYIHWVVCRELGWEVPKKWYEHTPQSVTNIKDYTILWDYAIITDRKILANRPDIVIHDRRSKSCLLIDVSVPDDKNIALKEAEKISKYKDLEIEINRMWKVKSKVVPVIVGALGTLRKDFTKYVELIPGRPKTSEIQKISLLGTAHILRKVLG

SEQ ID NO: 4633 - protein, 1183 aa, Poecilobdella manillensis
MHFNKYNSNSLYLQKLNAAILADQNKRRAEIRSVVSLSSSNSHQTETQSQNGLSEDYKSTVKVNNSKLANKKQQWTKEQYAELMWCFYYAQANKNEGGVVKGTYTTWRSRNPEIHQNINKDTLANTRRWIINTKKFTDKELQGIKNRACQNAERHLSETQTEIVIESISEGKFQSPQKAIDSLTIQYPQDPATNITELEQQIKSRLLENKHLDFNNRPKLNKVRICKDTLEKIKAANEILSKMISGRQLNISEINDLIYCSASVIAGVQKPRDGPVGRKEPAWKVRISNKVEQYRKDLSIISEIKKGVATKRVHNKAKHLFKDESKSLEEKEQDIKMKLQATAQRLKRYCKRNDGYHQNKLFQEDAKKFYRHLCKRNEAISDPPSAKKIEEFWRGILENEIVHNTEAAWVRAEEIAFRNVVTEEWKEFTISEIQEVIKKSSNWKSPGPDNIQNFWIKRFTSLHSILTIAFNDLINNPENIPSWLTSGITFLLSKGANQNNPKNYRPITCLPTLYKLLTSAISNRLYTHLDKNNILPIEQIGCQRGSRGCKDQLLINKMIVSTAKRMKRNLAMAWIDYKKAFDSVPHSWILASMKMYGVPARITGFMECSMKEWKTELMLCHQLGCIKTNRISIKRGIFQGDSLSPLLFCLALVPLSNMLNKLKVGYEIEPKEQISHLLYMDDLKIFTKTETQLNKALTTVKTFTDDICMEFGLDKCAVAIMKRGKQIKSRNMPFDDHNSIQSLNEEEAYKYLGIDENGDIKHPEMKEKIAREYYRRVRLILKSELNSKNKLSAINALAIPVLTYSFGIIDWRKSEIDKMDRKTRKLLTMHGLHHPKGDVSRLYIKRRNGGRGLIQLMSAYSCSMVNLSDYIEQGKDRLRSLVKKHEAGKAQYSLLKEAKTIKNKYLSLPTVQTSVKEMLKDNMEKERINELREKPMHGQFFCNLEKNWVDKEASCAWLRSAGLKGETESLIMAAQDQTLNTRYHQRMILKQQIDGNCRICGKAQETISHITSGCTMLAATEYLHRHNKVASYIHWIVCRELGWEVPKKWYEHTPQSVTNIKDYTILWDYAIITDRKILANRPDIVIHDRRSKSCMLIDVSVLDDKNIALKEAEKISKYKDLEIEINRMWKVKSKVVPVIVGALGTLRKDFTKYVELIPGRPKTSEIQKISLLGTAHILRKVLG

SEQ ID NO: 4634 - protein, 944 aa, Poecilobdella manillensis
MIEACHHFLIIIIIIIIIIIIIIIIIIIIKKPRDGPVGRKEPAWKVRISNKVEQYRKDLSIISEIKKGVATKRVHNKAKHLFKDESKSLEEKEQDIKMKLQATAQRLKRYCKRNDGYHQNKLFQEDAKKFYRHLCKRNETISDPPSAEKIEEFWRGILENEIVHNTEAAWVRDEEIAFRNVVTEEWKEFTISEIQEVIKKSSNWKSPGPDNIQNFWIKRFTSLHSILTIAFNDLINNPENIPSWLTSGITFLLSKGTNQNNPKNYRPITCLPTLYKLLTSAISNRLYTHLDKNNILPIEQTGCQRGSRGCKDQLLINKMIVSTAKRMKRNLAMAWIDYKKAFDSVPHSWILASMKMYGVPAGITGFMECSMKEWKTELMLCHQLGCIKTNRISIKRGIFQGDSLSPLLFCLALVPLSNMLNKLKLGYEIEPKEQISHLLYMDDLKIFTKTETQLNKALTTVKTFTDDICMEFGLDKCAVAIMKRGKQIKSRNMPFDDHNSIQSLNEEEAYKYLGIDENGDIKHPEMKEKIAREYYRRVRLIFKSELNSKNKLSAINALAIPVLTYSFGIIDWRKSEIDKMDRKTRKLLTMHGLHHPKGDVSRLYIKRRNGGQGLIQLMSAYSCSMVNLSDYIEQGKDRLCSLVKKHEAGKAKYSLLKEAKTIKNKYLSLPTVQTSVKEMLKDNMEKERINELREKPMHGQFFRNLEKNWVDKEASCAWLRSAGLKGETESLIIAAQDQTLNTRYHQHMILKQQIDGNCRICGKAQETISHITSGCTVLAATEYLHRHNKVASYIHWIVCRELGWEVPKKWYEHTPQSVTNIKDYTILWDYAIITDRKILANRPDIVIHDRRSKSCMLIDVSVPDDKNIALKEAEKISKYKDLEIEINRMWKVKSKVVPVIVGALGTLRKDFTKYVELIPGRPKTSEIQKISLLGTAHILRKVIG

SEQ ID NO: 4635 - protein, 1100 aa, Poecilobdella manillensis
MWCFYYAQANKNEGGVVKGTYTTWRSRNPEIHQNINKDTLANTRRWIINTKKFNDKELQGIKNRACQNAERHLSETQTEIVVESISEGKFQSPQKAIDSLTIQYPQDPATNITELEQQIKSRLLENKHLDFNNRPKLNKVRICKDTLEKIKAANEILSKMISGRQLNISEINDLIYCSASVIAGVQKPRDGPVGRKEPAWKVRISNKVEQYRKDLSIISEMKKGVATKRVHNKAKHLFKDESKSLEEKEQDIKMKLQATAQRLKRYCKRNDGYHQNKLFQEDAKKFYRHLCKRNEAISDPPSVEKIEEFWRGILENEIVHNTEAAWVRDEEIAFRNVVTEEWKEFKISEIQEVIKKSSNWKSPGPDNIQNFWIKRFTSLHSILTIAFNDLINNPENIPSWLTSGITFLLSKGANQHNPKNYRPITCLPTLYKLLTSAISNRLYTHLDKNNILPIEQKGCQRGSRGCKDQLLINKMIVSTAKRMKRNLAVAWIDYKKAFDSVPHSWILASMKMYGVPARITGFMECSMKEWKTELMLCHQLGCIKTNRISIKRGIFQGDSLSPLLFCLALVPLSNMLNKLKLGYEIEPKEQISHLLYMDDLKIFTKTETQLNKALTTVKTFTDDICMEFGLDKCAVAIMKRGKQIKSRNMSFDDHNSIQSLNEEEAYKYLGIDENGDIKHPEMKEKIAREYYRRVRLILKSELNSKNKLSAINALAIPVLTYSFGIIDWRKSEIDKMDRKTRKLLTMHGLHHPKGDVSRLYIKRRNGGRGLIQLMSAYSCSMINLSDYIEQGKDRLCSLVKKHEAGKAKYSLLKEAKTIKNKYLSLPTVQTSVKEMLKDNMEKERINELREKPMHGQFFCNLEKNWVDKEASCAWLRSAGLKGETESLIMAAQDQTLNTRYHQRMILKQKVDGNCRICGKAQETISHITSGCTVLAATEYLHRHNKVASYIHWVVCRELGWEVPKKWYEHTPQSVTNIKDYTILWDYAIITDRKILANRPDIVIHDRRSKTCLLIDVSVPDDKNIALKEAEKISKYKDLEIEINRMWKVKSKVVPVIVGALGTLRKDFTKYVELIPGRPKTSEIQKISLLGTAHILRKVLG

SEQ ID NO: 4636 - protein, 1183 aa, Poecilobdella manillensis
MHFNKYNSNSLYLQKLNAAILADQNKRRAEIRSVVSLSSSNSHQTETQSQNGLSEDYRSTVKVNNSKLANKKQQWTKEQYAELMWCFYYAQANKNEGGVVKGTYTTWRSRNPEIHQNINKDTLANTRRWIINTKKFNDMELQDIKNRACQNAERHLSETQTEIVIESISEGKFQSPQKAIDSLTIQYPQDPATNITELEQQIKSRLLENKHLDFNNRPKLNKVRICKDTLEKIKATNEILSKMISGRQLNISEINDLIYCSASVIAGVQKPRDGPVGRKEPAWKVRIINKVEQYRKDLSIISEIKKGVATKRVHNKAKHLFKDESKSLEEKEQDIKMKLQATAQRLKRYCKRNDGYHQNKLFQEDAKKFYRHLCKRNEAISDPPSAEKIEEFWRGILENEIVHNTEAAWVRDEEIAFRNVVTEEWKEFTISEIQEVIKKSSNWKSPGPDNIQNFWIKRFTSLHSILTIVFNDLINNPENIPSWLTSGITFLLSKGANQNNPKNYRPITCLPTLYKLLTSAISNRLYTHLDKNNILPIEQKGCQRGSRGCKDQLLINKMIVSTAKRMKRNLAMAWIDYKKAFDSVPHSWILASMKMYGVPARITGFMECSMKEWKTELMLCHQLGCIKTNRISIKRGIFQGDSLSPLLFCLALVPLSNMLNKLKLGYEIEPKEQISHLLYMDDLKIFTKTETQLNKALTTVKTFTDDICMEFGLDKCAVAIMKRGKQIKSRNMPFDDHNSIQSLNEEEAYKYLGIDENGDIKHPEMKEKIAREYYRRVRLILKSELNSKNKLSAINALAIPVLTYSFGIIDWRKSEIDKMDRKTRKLLTMHGLHHPKGDVSRLYIKRRNGGRGLIQLMSAYSCSMVNLSDYIEQGKDRLCSLVKKHEAGKAKYSLLKEAKTIKNKYLSLPTVQTSVKEMLKDNMEKERINELREKPMHGQFFCNLEKNWVDKEASCAWLRSAGLKGETESLIMAAQDQTLNTRYHQRMILKQQIDGNCRICGKAQETISHITSGCTVLAATEYLHRHNKVASYIHWIVCRELGWEVPKKWYEHTPQSVTNIKDYTILWDYAIITDRKILANRPDIVIHDRRSKSCMLIDVSVPDDKNIALKEAEKISKYKDLEIEINRMWKVKSKVVPVIVGALGTLRKDFTKYVELIPGRPKTSEIQKISLLGTAHILRKVLG

SEQ ID NO: 4637 - protein, 985 aa, Poecilobdella manillensis
MIIIMIMIMIIIHLDFNNRPKLNKVRICKDTLEKIKAANEILSKMISGRQLNISEINDLIYCSASVIAGVQKPRDDPVGRKEPAWKVRISNKVEQYRKDLSIISEIKKGVATKRVHNKAKHLFKDESKSLEEKEQDIKMKLQATAQRLKRYCKRNDGYHQNKLFQEDAKKFYRHLCKRNEAISDPPSAEKIEEFWRGILENEIVHNTEAAWVRDEEIAFRNVVTEEWKEFTISEIQEVIKKSSNWKSPGPDNIQNFWIKRFTSLHSILTIAFNDLINNPENIPSWLTSGITFLLSKGANQNNPKNYRPITCLPTLYKLLTSAISNRLYTHLDKNNILPIEQKGCQRGSRGCKDQLLINKMIVSTAKRMKRNLAMAWIDYKKAFDSVPHSWILASMKMYGVPARITGFMECSMNEWKTELMLCHQLGCIKTNRISIKRGIFQGDSLSPLLFCLALVPLSNMLNKLKVGYEIEPKEQISHLLYMDDLKIFTKTETQLNKALTTVKTFTDDICMEFGLDKCAVAIMKRGKQIKSRNMPFDDHNSIQSLNEEEAYKYLGIDENGDIKHPEMKEKIAREYYRRVRLILKSELNSKNKLSAINALAIPVLTYSFGIIDWRKSEIDKMDRKTRKLLTMHGLHHPKGDVSRLYIKRRNGGRGLIQLMSAYSCSMVNLSDYIEQGKDRLCSLVKKHEAGKAKYSLLKEAKTIKNKYLSLPTVQTSVKEMLKDNMEKERINELREKPMHGQFFCNLEKNWVDKEASCAWLRSAGLKGETESLIMAAQDQTLNTRYHQRMILKQKIDGNCRICGKAQETISHITSGCTVLAATEYLHRHNKVASYIHWVVCRELGWEVPKKWYEHTPQSVTNIKDYTILWDYAIITDRKILANRPDIVIHDRRSKSCLLIDVSVPDDKNIALKEAEKISKYKDLEIEINRMWKVKSKVVPVIVGALGTLRKDFTKYVELIPGRPKTSEIQKISLLGTAHILRKVLG

SEQ ID NO: 4638 - protein, 1183 aa, Poecilobdella manillensis
MHFNKYNSNSLYLQKLNAAILADQNKRRAEIRSVVSLSSSNSHQTETQSQNGLSEDYRSTVKVNNSKLANKKQQWTKEQYAELMWCFYYAQANKNEGGVVKGTYTTWRSRNPEIHQNINKDTLANTRRWIINTKKFNDMELQDIKNRACQNAERHLSETQTEIVIESISEGKFQSPQKAIDSLTIQYPQDPATNITELEQQIKSRLLENKHLDFNNRPKLNKVRICKDTLEKIKATNEILSKMISGRQLNISEINDLIYCSASVIAGVQKPRDGPVGRKEPAWKVRIINKVEQYRKDLSIISEIKKGVATKRVHNKAKHLFKDESKSLEEKEQDIKMKLQATAQRLKRYCKRNDGYHQNKLFQEDAKKFYRHLCKRNEAISDPPSAEKIEEFWRGILENEIVHNTEAAWVRDEEIAFRNVVTEEWKEFTISEIQEVIKKSSNWKSPGPDNIQNFWIKRFTSLHSILTIAFNDLINNPENIPSWLTSGITFLLSKGANQNNPKNYRPITCLPTLYKLLTSAISNRLYTHLDKNNILPIEQKGCQRGSRGCKDQLLINKMIVSTAKRMKRNLAMAWIDYKKAFDSVPHSWILASMKMYGVPARITGFMECSMKEWKTELMLCHQLGCIKTNRISIKRGIFQGDSLSPLLFCLALVPLSNMLNKLKLGYEIEPKEQISHLLYMDDLKIFTKTETQLNKALTTVKTFTDDICMEFGLDKCAVAIMKRGKQIKSRNMSFDDHNSIQSLNEEEAYKYLGIDENGDIKHPEMKEKIAREYYRRVRLILKSELNSKNKLSAINALAIPVLTYSFGIIDWRKSEIDKMDRKTRKLLTMHGLHHPKGDVSRLYIKRRNGGRGLIQLMSAYSCSMVNLSDYIEQGKDRLCSLVKKHEAGKAKYSLLKEAKTIKNKYLSLPTVQTSVKEMLKDNMEKERINELREKPMHGQFFCNLEKNWVDKEASCAWLRSAGLKGETESLIMAAQDQTLNTRYHQRMILKQKIDGNCRICGKAQETISHITSGCTVLAATEYLHRHNKVASYIHWVVCRELGWEVPKKWYEHMPQSVTNIKDYTILWDYAIITDRKILANRPDIVIHDRRSKSCMLIDVSVPDDKNIALKEAEKISKYKDLEIEINRMWKVKSKVVPVIVGALGTLRKDFTKYVELIPGRPKTSEIQKISLLGTAHILRKVLG

SEQ ID NO: 4639 - protein, 1111 aa, Osmia bicornis
MSSQVTPTSSNRGDSLPDRSSKITSGRAFTSRDSQINSQSISHMREISTSNLVLNPNIQQECTTVYSSSGPTSSITSLSIISPVPISSSSPSQSSSAVTTNQILSCQDCDKTFTSKIGLGVHRRSKHRQIVNEEINLQRRKYRWQDEDMRRIANIEALNLEYTKINELIHTTLKFTPARTIESIKSLRKRPAYRDILNQLVESNREQSPADSMGESSAQILDIEPPNTNNELPADLDQSSSTLDVERECLNWFKAALQYLSSSRCTEVAKENLVEAIKRSIVHDDPSDLLTSWFHCRFPPRQLTRRQNSDRNSTQRKLSKKQHRRLMYANIQTLWRRNQSKAVSKILDDDNDTSVHLPLEAQEKYWRPLFESESKGFYDDFIEPSQSEENNDLLLPITTDEVRNHRPDARSAHGPDLLKPSIWLNEVPDMVKAIIFNVVIRSGSVPAIWRNARTILIPKTEAVMDPSNYRPISISSVILRHLHKVLAARIMKKIKFDQRQRGFVEADGTAENVAVLSSIINDAWCCNKQLHIAFLDVRKAFDSVQHSSIKYVLWKRKIPQKLIDYISNLYSTAGLWIEVDGQRSNIIHPKLGIRQGDPLSSILFNLVMDENLGVIPPSVGYLIFNELINSSAFADDLAIIASTIEGLQQCLDVVTAELSRHGLIPAPSKCRCMSIIPSGRDKKSKLIVNSLFNIDGILLPQIGFEDTWTHLGVEFNYRGPIKRAVNIAEYLHKITKAPLKPQQRLHILRTYLFPRFIHLLVLGRTTYVSLRSADKQVRKSVRKWLSLPPDTPKGFFHAPIKNGGLGIPSFETKIPELAERRFKCFNTSTNTAVRAIAKSGWISDRLRWCHILNNKNIDWTKLLYHSVDGYELRESAKCQASTSWVHDPFVRMPAFEYVENIKTRIGALPSLMRTTRGTRRQNQQFVCRAGCGVPETAAHIVQECFRTHGGRVLRHDAIVKYICQILTLKEWNVTMEPRIMTNDGLRKPDILLNRGNTSYVVDVQIISGFRNLDDAHRKKKEYYEKNAGIIDYVSRTHRVRRNNIYFSSVTLTWKGIWAQPSATLLTSLGLNKNQMRSITTRAIHGSYLNFRRFSQMTSVRNRHLWPFRVRS

SEQ ID NO: 4640 - protein, 969 aa, Protaetia brevitarsis
MKRMHDLWCTRRPELAHLTPQNLRDQAAALRRRGFHFEADEINQLDAHPDAAESANPSRELSTEFRRNLGRAGEPRKKMIYHRQFLSNNTIGELNQLIEEHISIDPDLDQLEDVVYAAAATVTKVKQINTYQQKLLERIEKLSKKISEWRRVASQMQCVIQYISENRAFTKRVKQIVRKVKRQHHTLNKKILVAIKEEAVDRIRALNASRDKLKRAVRRIQQNALFQERPARFLHTNTQRIHTQTSRSTAVLDGMYDNEAAFNKENECISLFTAYCRKSAEEPADTSHEITVTDILNALRGKPNYSAPGPDAINTYWWKKFYVTHGYLATIFNKYLDSPDIIPDWLCKGRTILLYKRGDPKQPQNYRPITCLNAVYKILTGILHNKILEKIEPIWRSVYEQRGTKRGVAGVRENLLIDATICQDAAQYKRNIWVAWIDFRKAFDSTSHGLVLLLLEQMGVARNIRDIIETIMRKWCTVVTVGHGRSARRSIPIQIKKGIFQGDSLSPLLFCISLLPLSVALRNSAGYVAGRPNRRVHKITHLLYVDDLKLYAKNENELNEMLSKVHRFAVDVGMALNTEKCAKFHLRRGRGAEGGGDAGLVDGSIISYLKEGESYTYLGIQQRQMHEVKEVKKALAHKYKKALQAIWSSELTAKNKVTATNTLAIPMVAHSFGTIKWNVDEILQLDRDTRNIITANRSHHPRASVQRLYITRIDGGRGLVNVEHLYARLTTVAAAKIFQTEDPLLNIVKDHERGGQGAFLYNTARKVCEELHLSTAFLTDEGTRIGGLRPTPHQLSKSIQKEFTQSLNEIHMEKPLHGTYFRHVVEHQLSRPLTFAFLGSSSLRSETEGYIIAIQDGVFHTLAYIKHVLKQNLVSSTCRACGDAEETVMHLLSACSTYAPNLYISRHDMAIKTLYYHLRHAYQIDDKELPPYYENTPPSVVENGKCKILWNFSPSTPPFNPGNKPDMWY

SEQ ID NO: 4641 - protein, 1000 aa, Montipora capitata
MINCILYAVVVVFLFYKKWKKPAGTKGQKERKTQSQKLKDAYISKATELRRKISIAKAELKRIKANKKISKKGKKNRAMLESECGKVSAVTLVTYMEKKKSDLRKLKRSHYRKQKQEEYKVLNGLFQADPGSVYSSFNEMIKEEKDNTRPKYKNPQCTTEGSERQLFENIDEASSYWKSLWEQSSTNISTTRASWLNDVKRGFDKLLSAPPADSFQLSTEASTKVIKQKRNWSAPGPDRLTNLWWKKATCLYQGIATCFAAIGNREENYPHWFTGGKTTLIPKPSEFISENQRPITCLNTLYRWFTSCLLKPINQHLDRHRLMETEQRGAKSKCSGTTDNLLIDRMVCQDSHNAHKNLSMAWIDVRKAFDSVSHEWLQEIMSLHKFAGWICRTVERLCRSWNTRIVAHTKKGHETSQIIHFNKGLPQGDSLCPRLFTICINPIAWNLKATDGYKLSKPIEGKITHLLYADDMKVFGASQGKLDRVLKITKTAMEDIGLIWNEKKCSIAHIKKGVLDSTNHNDRQSITNLKDGENYRFLGILENTQQEDSKVLEKTSETYQQRLSVIWSSPLSDFHKVTANNQYALPAFSCPMWTQTWQINALKQIDRESRKIIKDNGGSHPATSTDLYYLPRKMGGRGLKSVQTQYKMTKVKTAIKLYTNRDSTMELVRQFDEKCERNGRRSIVKDAKKYAEEMGLELILSPGAVVTTTEANKDISSEKVGKVMQNSMNAKRMDTIKDQKWQGELIQTRRIDTDLVDCFTCLYRWQLAPTNTIAGLFELYQQLVPTKLYNQNKTRTDTTSDARCRMCHECPESIAHVIAGCSALAQTKYVARHNGALKILSFELLDDLDLIESVPPWYSTTTPKPEFHNTKASAFCDVPVFAGSTEVRANRIDVRIVEKETETVKIIEMSCPWIENRKQKNQEKTTKYAPLRWELKQQHRGYTIKQYNIIIDVLGGYSSETRENVTLLLGKTKADKTLLNMQKAVISSTLNITRSFKVLS

SEQ ID NO: 4642 - protein, 1049 aa, Alatina alata
MKTITFLWIFLLFVVCNFCGRDFVSLGRHQWRCRAKHEDQANLHTSQTIEDTRHLINEGAVPSNSSTITCSCGKVCKNLRGLKAHQRSCRHVHGLNEELILPIQEQVTIEELDVIIHDHPNYKSGVKLPRSPADWDLFDSFVRSQLPIHEVSTGDLNDVITSFNAKIYDFLASNFGTLQTSSAELASKFDHLSKSQLRKELFRLKKASPIDIPSVKYVARLLRKRLSNGSSPNNTDCLDHDNEIKHNFWNYAKRFVADSTASPNPSFTSAQCLEHFKKVFSRHIPALIYKIPSWIPSLPHPCFDFNSETPSYEEITRSVRSMKTSGSPCPLDQVSVILFKRSSYLRSYITAVIAEIWKTRTVPEIWKRAVTVLIYKKGSTDLPENFRPITLESIPLKILTSVIRNRLYSYFKNNNFIETTVQKGFIKGITGTFEHTAHLAHVIQKAKLKQRSAFITLLDLKNAFGEVDHNLIPVVLKYHHVPDHIISLIGNLYSNFHTSLTTNLFRTDFIHVGRGVLQGDCLSPLIFNLLMNTFIQYIKSDKFSQLGYQWSHSFNPRHWYQFADDAAVLTGQEYENQLLLNAFTAWCSWSRMSVRVDKCQSFGMIKSGTQSKQVLPKLFINSKLIPPVQLGSSFRYLGRYFNFEMNNFEHKTILVETVNKILNNINSLPLHPKNKFLLYHKYLLPKISWHLTICDINITWIKSTLDLTCHNFFRRWLEMPPSASLDCIMLSKTKFGLNVIDISTKYTQCQSIIRNKLKKSTEPDIKSIYNLTKDKFIQYDHFQSSKAVVKEIQAIKETRVTACLTSQGFIVKALTAHYFREHLTCWQKALSHLPKNIYNFTCRYLNNTLPTLKNLHLWKKSDSNLCFDCLNPQTLQHVVSGCLSHLKQGRFNWRHDSILKIISDFISSSNPALEIFADIAGYQSPCVITGPDLRPDLLIKSGNSLHVLELTVGFETNLSNNFNRKNLKYQHLCEDLMTKFENIDYVNLSMSAIGGIAKESKPFLKMLKDLDVKNSNFLVFKIISSAIRSTYFIFCKRNCDWPNPELLAW

SEQ ID NO: 4643 - protein, 886 aa, Alatina alata
MGVYSPHHLLLFGTLQSSSTELASKFDHLSKSQLRKELFRLKKASPVHIPSVKYVARLLRKRLSNGSSPNNSDCLDHDNEIKHNFWNYVKRFVADSTASPNPTFTSAQCLEHFKKVFSRHIPALIYKIPSWIPSLSHPSFDFNSETPSYQEITRSVRLMKTSGSPCPLDQVSVILFKRSSYLRSYITAVIAEIWKTRTVPEIWKRAVTVLIYKKGSTDLPENFRPITLESIPLKILTSVVRNRLYYYFKNNNFIETTVQKGFMKGITGTFEHTAHLAHVIKKAKLKQRSAFITLLDLKNAFGEVDHNLIPVVLKYHHVPDHIISLIGNLYSNFHTSLTTNLFRTDFIHVGRGVLQGDCLSPLIFNLVMNTFIQYIKADKFSQLGYQWSHSINPRHWYQFADDAAVLTGQEYENQILLNAFTAWCSWSRMTVRVDKCQSFGMTKSGTSSKQVLPKLFINSKLIPPVQLGSSFRYLGRYFNFDMNDFEHKMILVDTVNKILNNINSLPLHPKNKFLLYHKYLLPKISWHLTICDINITWIKSTLDLTCHNFFRRWLEMPPSASLDCIMLSKAKFGLNVMDISTKYTQCQSIIRNKLKKSTEPDIKLIYNLTKDKFIQYDHFQSSRAVVKAIQTIKETRVTTCLTSQGFIVKALTAHYFRDHSICWQKALSHLPKNIYNFTCRYLNNTLPNLTNLHLWKKSDNNLCFDCLNPQTLQHVVSGCLSHLKQGRYNWRHDSILKIISDFISSSNPTFEVFADIPGYQSPCIITGPDLRPDLLIKSQNSLHVLELTVGFETNLTNNYTRKKIKYQHLCEDLKIRFNKVDYINLSMSAIGGMAEDSKSFLTMLQDLNVKNSDFLLFKMLSCAIRSTYFIFCKRNCDWPNPELLAW

SEQ ID NO: 4644 - protein, 728 aa, Alatina alata
MKTSGSPCPLDQISIILFKRSNYLRSYITAVIGEVWKTRTVPEIWKRAVTVLIYKKGSADLPENFRPIRLESIPLKILTSVIRNRLYNFLKRNSLIETTIQKGFIKGITGTFEHTAHLALVIQKAKLKQRSAFITLLDLKNAFGEVDHNLIPVILKYHHVPDDITSLINNLYFNFHTSLTTELFRTEFIHVGRGVLQGDCLSPLIFNLVINTFIQYIKSDKFNQLGYKWTYNFNPRHWYQFADDAAVLTGQEYENQILLNAFSAWCTWCRMTIRVDKCQSFGMIKSNTSSKQVLPKLFINSKLIPPVPLGSSFRYLGRYFNFHMDNIERKNILLKSVNNITSKINSLPLHPRNKFFLYHRYLLPKISWHLTIYDINITWIKQNLDSICHNYFRLWLEIPPSGTLDVIMLSKAKCGLNVLDISTKFIQCQSIIRNKLIKSDEPDIKEIYNLTKDKFMQYDYFKNSKAVVKEIQSAKESRVTSVLTSQGFIIKALTEQYFKEHLLSWQKAVNRLPNNIYSFTCRYLNNTLPTLKNLHLWKKSDSNLCFDCLNPQTLQHVVSGCHSHLNQGRYNWRHDSVLKIITNFLSTSNTEIEIFADLNGCQSPCIITGPDLRPDVIIKTQNKLYILELTVGFESNLQTNFDRKNSKYEALCKELESRYDIVNYVNLSMSTIGGMAKQSKSFLLMLNELKIPNVDYCIFEIISCIIRSTYFIFCKRNCTWPNPDLLVW

SEQ ID NO: 4645 - protein, 1221 aa, Alatina alata
MSTANGALTNLLMMSQINRKSYRIARLAGQQGARPSAGNQAEVEKCTTGTKSAHPQASEGNQTEETPQCGPLEGTTTHQKEKRKKWTRDDYKQVMKAFHKAKLYPSGESNTRQTYKIWREQNPSNRPNIDENKLANVRRDIMKNKRLSDTEMDEIKREVESELRNATDETTEENDTLNITNANTEEYEPVPDESSQDAENGPTVMQKEATENIDEKQNELKEEILRKWEETKHQQVSERDSLPKINKDKQTKAHLKRANMIIKNITNCQELNITEINQLAYATGAVITEKVRTKVRPNTRRKRKQPAWKEKIQKDIQKLRSDLSVLTEIEKDNNVRQNKKRKMIKKYKLKRPEDIAEVRETLKQQIAAKAQRIRRYEKRSKQFKHNKMFKEDQKKFYRELGKRQIEVDKPPPLVEIEEFWSKIWENEKHHNVVAEWITEQENMTKDQNEMEWDDISEDEVSMAMKKASNWKSPGVDKIPNFWYKNLDTLHKCIAHSYNSIIKEPEKCPEWLTQGLTYLLPKTNDIVNPKNYRPITCLPTMYKILTSIITERTYNFLENNTLLPPEQKGCKRGSYGCKDQLLINKMILEDCKIRKKNLSTAWIDYRKAFDSVPHSWIVKCMELYRVSPTLINFMKSSMCTWKTTLILNHTNGMIQSRPINIKSGIFQGDSLSPLLFCLALAPLSTLLNKTGYGYNVHGEKVNHLFYMDDLKTFAKDDNQQEGLLSTVKTFSDDIKMEFGLDKCAKATFLRGKLTTTSAINLVNDTTIQELQQEESYKYLGVCEGDGIQHAKMKERVRKEYYRRVRLVLNSELNASNRIEAINTLAIPVVTYSYNVINWQMKELQRMDAKTRKLLTMHRMHHPKSDVDRMYIPRKQGGRGLTQLEMTYKTTTIGLEHYLSNTKDPMLKLVAKHDKSKKLYSIHKESIKFWSQLEIEEVQQKEGDHVTVQAKKVKLNAKQKALVQLKDRWESKPMHGQFPTRLNKPDIDNEKSNNWLRSSGLKSETEGLIIAAQDQSLATKSFHHRIIRDNTNPQCRMCLEYEESIEHIIAGCPTLARSEYIQRHNKAAAYIHWHICKSYNIPSASKWYEHVPETVTENEEVTVLWDMQVHTDREIKANRPDIIVKNKKEKTCLLIDMTVPSDKNVSIKEVEKLSKYKDLEIEVTRMWEMKTTVVPVVIGALGAIKKGLDKHIKKLPGQTSIEELQKIVLLGTAHIIRKTLSIQ

SEQ ID NO: 4646 - protein, 1219 aa, Hycleus cichorii
MTRRLRPRVKKTQSAEFSEFQEASDNLHLPARSTTPEATEVKQPPQVHTGSPIKKIYNLRRAEKQNPGPSTAVISKSAGVEPEHRLNKYVCDQCGKQYTTASGLSKHKKNPCQKSTTCEYCNIAFSSYGSLRQHQKQVHSREYTSEAIDIFNHICDLCDSAFTTLAGLRQHHQKRHPNETFQPDRDMMRKLAEVELDSEGPYFYDKMVSATGLTRHQIRHLRERRSYQIVKANINRESSSSTTTSSGRSSPTLPVNLNIPDCDTDTVESVQLNVEISNHIPSSELDVVESVQQDIDLSINATSSEPVRLNEVESIVLDSRDHSNREHEGRQSISSETPDETISFDDAILMITNERTLQRFIARAAAVLKEIDLSTHLLCVAALTKSRHELVEIMNNWIVTNFPDKKKNHGTKREPKRKRYPGYGQQTTGRNQRSTNYKKAQDLFVKNRRMLADIVLSGRPFNEPNEFPSISDCENLYSQIFETTPHIDNEEYPFQHDSVDLDYPITPEEVDAAKLGWRCTAPGTDGISVSNILKFSNIHLAILYNIVLYCNCHPTQWSQLRTTLIPKSGNRANAANWRPITVSSALQRLLHRLLNTRLNSAIKINMNQRGFVSLDGTMANCLILDYFIRNRKLGGLPFSIVSLDLSKAFDMVSHQSLRRALVGHGVQGFLLNYITNTLNAETCIKIGDSFTRPIHIKRGVRQGDPLSPFLFNLVIDELLTKLDLRRNGGSITGDIKCSGMAFADDIVLLSDSVKDMKSNLEEVDQFFRKRGMKVNPEKCCTISTISTRGRSIPINRPMFTIGGRVIQTTLQINTFKYLGHEFGVQGVTKPCLPHLPGWLRNLSKCPLKPDQKLTLLKQHVISKLLYCLQSPKVTSSVLKSADRLIRSTVKGFLHLNVHTPDAAIHGRIRDGGIGVMELNSAIPRIFLNRLNNLLHVCDEDRVLRAVLTSEYAAQITQKFENRVGPIPGHQKWRDAIASSPLLKGQEAVTEDPSSRRWIDRKPPGWNGRDYVRAVHLRTANLATRAIPSNPPDQRRCRGGCNTDESIAHVLQTCPITHDIRIRRHNEVVKKIVQHSRQRGFELEIEPHVRHTDGTLFKPDLAIHLNSKDLLISDIQITWASNTTLRFVWDMKKRVYDNPKFKEAARKKWPGKQILFSPLIIDARGIWPKANLPTSQYLKITKFLKESCVNSVLKWSCSIHHVFTRAVWQSGPFRQIRRNY

SEQ ID NO: 4647 - protein, 1212 aa, unidentified
MVTTGRVLYGDGGSVAQTVGSSRMVTLPTTASNKESQPRGPERSGKRNGPIGPGRPATTKDRTKDQREGVVMRTCSCGWQRVTTYRGLRIHQGRMKCQERMQRTRTAAAGQTNEDRGRVANHRTQDLTSGAPAPGSDASPGETRPSTGVQHPTETPSSEIAAAMSPPEAEVRPIQQEKECDFVRKEKIKWPKANNKAAWEELDSDLSNVLEQGLKGDIERKLNSVGKLVYNFCSVKFGTLAVGKRQPSSNNSAGRREREIAQLVRRRRHLRKLWRKASPDEKVGLQVLWEEVRARLKSLRRAERLRKKRKRKEKQRAQFFKNPYKFAKALLEEKKGGSLNVSKEELEAHLEETYTDPERHKPLGPPGYIPRPAQPSVLMDISPPKWSEVTAAIQKARAAAAPGPNGVPYRVYKMCPKTLHVLWKLMRVAWRKQCVPLAWRRAGGVLIPKEKISSSIKQFRNISLLNVEGKLFFTVLAKRLTSYLISNKFIDTEIQKAGIPGFPGCTEHASTTWNQIQLAKSRKEDLHVVWLDLANAYGSIPHKVIQHALEFFWVPNEVTQIVHNYFSDFKLSISTKNYTTGWQKVEKGIAMGCSISPLLFIMGFEVLLLGAKQVVGGVKAPTGERMPPLRAFMDDVTSILRTAPCTKRLLQRLEELTEWAGMQFKPAKSRSLSLRKGVISNRTFSVNGQHIPTIQEEPVKSLGRLYTSNLSDRGRGQEVVDQACSSLKLIDKCELPGRLKVWCVQFLLFPRLKWPLKTYNISVSTVDLIDRKANSYFRRWIGVPKCLSTVALFGRNKLNLPLTSIAEGFKLEKVRLSLELEGSQDASVRAANSGVNTGRKWSVKDTIEKAVSRLKHKDLVGAVQVGRTGVGWGERTQRWRSANPRERRQLVSQEVRRMEEESRLVTAVGQSQQGAWLNWDGVTERSLTWSDLWNIQSARLSFLVRAVYDVLPTPRNLTRWYKNEESCQLCGAVQADLKHILSNCKFALQQGRYTWRHNKVLRQLAVRLEEARKEASRTVSSFKSIQFVKEGRKPKAAVTGANNLGSSLLCRGKWEMRADLDRQLHFPSNICETSLRPDIVLWSEDQKTVLIIELTIPWEENVQAAFERKKLKYDDLVQQCRQRGWQTRLYPVEVGVRGFVGTSFMRMCRDVNIRGKAQAQLTRQVAEEAEKSSFVLWLRRRDKAWKSFQRSGDSAGSGAGTPASLPHPPETS

SEQ ID NO: 4648 - protein, 829 aa, unidentified
MIKPLGSPGYVPRPAEPSDAMDVSPPKWKEVLAAVQKARAAAAPGPNGVPYRVYKFCPKTLRVLWKLMQVAWRKQCIPVAWRRAGGVLIPKEKVSTSISQFRNISLLNVEGKLFFTVLAKRLTKYLIANNYIDTEIQKAGIPGFPGCTEHASTIWRQIQIARSQKEDLHVVWLDLANAYGSIPHKVIRYALDFFWVPVEVKQMMENYFSDFRLCISTRDFTTNWQKLEKGIAMGCSISPLLFIMGFEILLIGAKQVVGGVRAPSGEKMPPLRAFMDDVTSILRTAPCTKRLLQRFEELTDWAGMKFKPAKSRSLSLKKGKISNRTFTVNDQNIPTLQEEPVKSLGRLYTSSLKDSERGPETLEQAVRGLKCIDDCELPGRLKVWCVQFMLFPRLKWPLKTYKISLSVVDQIDRKANAYFRRWLGVPRCLSTVALYGDNMLSLPLSSIAEEHKVEKIRLVLELEGSRDLSVRAVNKNICTGRKWKAQEVISQAVNRLHHKDLVGAVQVGRAGLGWGEKSHRWSNANPRERRQLVIQEVRRMEEEKRRVAAVGQRQQGAWLNWEGAVGRKLTWSDLWGMQNARLSFLLRSVYDVLPTPQNVSRWFKNEEACLLCGLERADLKHTLSNCKTALQQGRYTWRHNRALRQIAIILEKARKESAGMEASLQPIQFVRGGQKPKEAAPRNGNIGGGPLSRGKWELLVDLDKQLCFPGAICETSLRPDLVLWSADQKTVVIVELTVSWEENMQSAHERKKSKYEELSHECRQNGWKTYLYPVEVGVRGFVGISMMRLCRDLQIRGKVHSQFVRLLSEEVEKSSLTIWIRRKARSWKQ

SEQ ID NO: 4649 - protein, 1171 aa, unidentified
MVTPPITSSHYKESQPRGPARAGKRDGPIGSDLSATTSDRTKDQREGVVVRVCSCGWQRATTYRGLRIHQGKTKCQTQKQRNRSAVPAAGQTKEDRGRVDNHRTQDLINGAPEPGSKTPPEEVAPRSFEEQSAEVVEPGIAEVAAPEVAEGSVRQEKEEAVYEKKEKIKWPKANNKAVWEELDSDLSNVLEQSLKGDVERKLNQFGTLVYSFCSERFGTLVSQGRGPNVQASTGRREREIARLVQRRRQLRKLWRKASPDERVGLHALWEEVRSRLKSLRRAERLRRKRKRKETQRRQFYKHPYKFARSLLEEKKGGTLSVEKEDLEAHLRETYSDPERSKPLSSPGYVPRPPEPSIPMDISQPKWSELSAAVRRARAAAAPGPNGVPYRVYKMCPKTLHLLWKLMRVAWRKQCIPVSWRRAGGVLIPKEKVSTTINQFRNISLLNVEGKLFFTVLAKRLTSYLISNRLIDTEVQKAGIPGFPGCIEHANTIWSQIQSARKQKEDLHVVWLDLANAYGSLPHKVIQYALNFFHVPGEVKGMINNYFTDFKLSISTRNFTTEWQRLEKGIAMGCSISPLLFTMGFEILLIGAKQVVGGVRAPSGEKMPPLRAFMDDVTSILRTAPCTNRVLLRLEELTAWAGMQFKPSKSRSLSLRKGKLSGRTFSVNGQHIPTIQEESVKSLGRLYTSNLNDKGRGQEVLEQACNGLQQIDKSELPGRLKMWCVQFMLFPRLKWPLKMYNISVSTVDQIDRKANAYFRRWLGVPRCLSSVALYGKNKLNLPFSSIAEDFKLEKVRLVLELEGSQDPSVRAANQGLSTGKKWSASTSISQAISRQQHKDLVGSVQVGRAGFGWGKRDQRWKSANPRERRQLVIQEVKRMEEERRRVTAVGQSQQGAWLNWEGAVERRLTWSDLWSMQNARLSFLLRSVYDVLPSPYNLTRWYKNEESCQLCGQAQADLKHILSNCKIALQQGRYTWRHNKVLRLIAVMLEEVRKKAKGATARTQPIQFVREGQKPKSADSNNTNTGGGPLSRGKWEMAVDLDRQLRFPSTICVTQLRPDLVLWSEDQKSVLIIELTVPWEENIQEAYERKKLKYEELADQCKQQGWRSRVYPVEVGTRGFAGTSLLRLCRDLQIQGKLQSQFVRQVTEEAERSSFVLWIKRKDKCWKKAAQK

SEQ ID NO: 4650 - protein, 1049 aa, unidentified
MSPPEAEVRPIQQEKECDFVRKEKIKWPKANNKAAWEELDSDLSNVLEQGLKGDIERKLNSVGKLVYNFCSVKFGTLAVGKRQPSSNNSAGRREREIAQLVRRRRHLRKLWRKASPDEKVGLQVLWEEVRARLKSLRRAERLRKKRKRKEKQRAQFFKNPYKFAKALLEEKRGGSLNVSKEELEAHLEETYTDPERHKPLGPPGYIPRPAQPSVLMDISPPKWSEVTAAIQKARAAAAPGPNGVPYRVYKMCPKTLHVLWKLMRVAWRKQCVPLAWRRAGGVLIPKEKISSSIKQFRNISLLNVEGKLFFTVLAKRLTSYLISNKFIDTEIQKAGIPGFPGCTEHASTIWNQIQLAKSRKEDLHVVWLDLANAYGSIPHKVIQHALEFFWVPNEVTQIVHNYFSDFKLSISTKNYTTGWQKVEKGIAMGCSISPLLFIMGFEVLLLGAKQVVGGVKAPTGERMPPLRAFMDDVTSILRTAPCTKRLLQRLEELTEWAGMQFKPAKSRSLSLRKGVISNRTFSVNGQHIPTIQEEPVKSLGRLYTSNLSDRGRGQEVVDQACSSLKLIDKCELPGRLKVWCVQFLLFPRLRWPLKTYNISVSTVDLIDRKANSYFRRWIGVPKCLSTVALFGRNKLNLPLTSIAEGFKLEKVRLSLELEGSQDASVRAANSGVNTGRKWSVKDTIEKAVSRLKHKDLVGAVQVGRTGVGWGERTQRWRSANPRERRQLVSQEVRRMEEESRLVTAVGQSQQGAWLNWDGVTERSLTWNDLWNIQSARLSFLVRAVYDVLPTPRNLTRWYKNEESCQLCGAVQADLKHILSNCKFALQQGRYTWRHNKVLRQLAVRLEEARKEASRTVSSFKSIQFVKEGRKPKAAVTGANNLGSSLLCRGKWEMRADLDRQLHFPSNICETSLRPDIVLWSEDQKTVLIIELAIPWEENVQAAFERKKLKYDDLVQQCRQRGWQTRLYPVEVGVRGFVGTSFMRMCRDVNIRGKAQAQLTRQVAEEAEKSSFVLWLRRRDKAWKSFQRSGDSAGSGAGTPASLPHPPETS

SEQ ID NO: 4651 - protein, 813 aa, unidentified
MDISQPKWSELSAAVRRARAAAAPGPNGVPYRVYKMCPKTLYLLWKLMRVAWRKQCIPVSWRRAGGVLIPKEKVSTTINQFRNISLLNVEGKLFFTVLAKRLTSYLISNRLIDTEVQKAGIPGFPGCIEHANTIWSQIQSARKQKEDLHVVWLDLANAYGSLPHKVIQYALNFFHVPGEVKGMISNYFADFKLSISTRNFTTEWQRLEKGIAMGCSISPLLFTMGFEILLIGAKQVVGGVRAPSGEKMPPLRAFMDDVTSILRTAPCTNRVLLRLEELTAWAGMQFKPSKSRSLSLRKGKLSGRTFSVNGQHIPTIQEESVKSLGRLYTSNLNDKGRGQEVLEQACNGLQQIDKSELPGRLKMWCVQFMLFPRLKWPLKMYNISVSTVDQIDRKANAYFRRWLGVPRCLSSVALYGKNKLNLPFSSIAEDFKLEKVRLVLELEGSQDPSVRAANQGINTGKKWSASTSISQAISRQQHKDLVGSVQVGRAGFGWGKRDQRWKSANPSERRQLVIQEVKRMEEERRRVTAVGQSQQGAWLNWEGAVERRLTWSDLWSMQNARLSFLLRSVYDVLPSPYNLTRWYKNEESCQLCGQAQADLKHILSNCKIALQQGRYTWRHNKVLRLIAVMLEEVRKKAKGATARTQPIQFVREGQKPKSADSNNINTGGGPLSRGEWEMAVDLDRQLRFPSTICVTQLRPDLVLWSEDQKSVLIIELTVPWEENIQEAYERKKLKYEELADQCKQQGWRSRVYPVEVGTRGFAGTSLLRLCRDLQIQGKLQSQFVRQVTEEAERSSFVLWIKRKDKCWKKAAQK

SEQ ID NO: 4652 - protein, 1147 aa, unidentified
MVTQHLTTSRNKESQPRGPTRVGMRDGPVRSDLPVTTAERLTDQREGVVMRSCSCGWQRVTSYRGLRIHQGKMKCQSREQSNRSAAADKTQEDTGQVENHSTQDLNSNALDPGSNALPTEPGPSAGVRHPRQPARERQEESFSKKEKIKWPRANDKASWETLDSDLSNILEQGLKGDVERKLNSFGDLVYDFCSGRLGTLPSKERKPEGTRSKGRRQKEISKLILRRRHLRKLWRKAKPSEKDGLQALWEEVRARLKSLRRAERLRRKRKRKENQRKQFYKNPFRFARSLLEEKKGGSLSVGKEELEAHLKATYSDEDKIKPLGSPGYVPRPAEPSDAMDVSPPKWNEVLAAVQKARAAAAPGPNGVPYRVYKFCPKTLRVLWKLMQVAWRKQCIPVAWRRAGGVLIPKEKVSTSISQFRNISLLNVEGKLFFTVLAKRLTKYLIANNYIDTEIQKAGIPGFPGCTEHASTIWRQIQIARSQKEDLHVVWLDLANAYGSIPHKVIRYALDFFWVPVEVKQMMENYFSDFRLCISTRDFTTNWQKLEKGIAMGCSISPLLFIMGFEILLIGAKQVVGGVRAPSGEKMPPLRAFMDDVTSILRTAPCTKRLLQRFEELTDWAGMKFKPAKSRSLSLKKGKISNRTFTVNDQNIPTLQEEPVKSLGRLYTSSLKDSERGPETLEQAVRGLKCIDDCELPGRLKVWCVQFMLFPRLKWPLKTYKISLSVVDQIDRKANAYFRRWLGVPRCLSTVALYGDNMLSLPLSSIAEEHKVEKVRLVLELEGSRDLSVRAVNKNICTGRKWKAQEVISQAVNRLHHKDLVGAVQVGRAGLGWGEKSHRWSNANPRQRRQLVIQEVRRMEEEKRRVAAVGQRQQGAWLNWEGAVGRKLTWSDLWGMQNARLSFLLRSVYDVLPTPQNVSRWFKNEEACLLCGLERADLKHTLSNCKTALQQGRYTWRHNRALRQIAIILEKARKESAGMEASLQPIQFVRGGQKPKEAAPRNGNIGGGPLSRGKWELLVDLDKQLCFPGTICETSLRPDLVLWSADQKTVVIVELTVSWEENMQSAHERKKSKYEELSHECRQNGWKTYLYPVEVGVRGFVGNSMMRLCRDLQIRGKVHSQFVRLLSEEVEKSSLTIWIRRKARSWKQ

SEQ ID NO: 4653 - protein, 1147 aa, unidentified
MVTQHLTTSRNKESQPRGPTRVGMRDGPVRSDLPVTTAERLTDQREGVVMRSCSCGWQRVTSYRGLRIHQGKMKCQSREQSNRSAAADKTQEDTGQVENHSTQDLNSNALDPGSNALPTEPGPSAGVRHPRQPARERQEESFSKKEKIKWPRANDKASWETLDSDLSNILEQGLKGDVERKLNSFGDLVYDFCSGRLGTLPSKERKPEGTRSKGRRQKEISKLILRRRHLRKLWRKAKPSEKDGLQALWEEVRARLKSLRRAERLRRKRKRKENQRKQFYKNPFRFARSLLEEKKGGSLSVGKEELEAHLKATYSDEDKIKPLGSPGYVPRPAEPSDAMDVSPPKWNEVLAAVQKARAAAAPGPNGVPYRVYKFCPKTLRVLWKLMQVAWRKQCIPVAWRRAGGVLIPKEKVSTSISQFRNISLLNVEGKLFFTVLAKRLTKYLIANNYIDTEIQKAGIPGFPGCTEHASTIWRQIQIARSQKEDLHVVWLDLANAYGSIPHKVIRYALDFFWVPVEVKQMMENYFSDFRLCISTRDFTTNWQKLEKGIAMGCSISPLLFIMGFEILLIGAKQVVGGVRAPSGEKMPPLRAFMDDVTSILRTAPCTKRLLQRFEELTDWAGMKFKPAKSRSLSLKKGKISNRTFTVNDQNIPTLQEEPVKSLGRLYTSSLKDSERGPETLEQAVRGLKCIDDCELPGRLKVWCVQFMLFPRLKWPLKTYKIALSVVDQIDRKANAYFRRWLGVPRCLSTVALYGDNMLSLPLSSIAEEHKVEKVRLVLELEGSRDLSVRAVNKNICTGRKWKAQEVISQAVNRLHHKDLVGAVQVGRAGLGWGEKSHRWSNANPRQRRQLVIQEVRRMEEEKRRVAAVGQRQQGAWLNWEGAVGRKLTWSDLWGMQNARLSFLLRSVYDVLPTPQNVSRWFKNKEACLLCGLERADLKHTLSNCKTALQQGRYTWRHNRALRQIAIILEKARKESAGMEASLQPIQFVRGGQKPKEAAPRNGNIGGGPLSRGKWELLVDLDKQLCFPGTICETSLRPDLVLWSADQKTVVIVELTVSWEENMQSAHERKKSKYEELSHECRQNGWKTYLYPVEVGVRGFVGNSMMRLCRDLQIRGKVHSQFVRLLSEEVEKSSLTIWIRRKARSWKQ

SEQ ID NO: 4654 - protein, 1171 aa, unidentified
MVTPPITSSHFKESQPRGPARAGKRDGPIGSDLSATTSDRTKDQREGVVVRVCSCGWQRATTYRGLRIHQGKTKCQTQKQRNRSAVPAAGQTKEDRGRVDNHRTQDLTNGAPEPGSKTPPEEVAPRSIEEQSAEVVEPGIAEVATPEVAEGSVRQEKEEAVYEKKEKIKWPKANNKAVWEELDSDLSNVLEQSLKGDVERKLNHFGTLVYSFCSERFGTLVSQGRGPNVQASTGRREREIARLVQRRRQLRKLWRKASPDERVGLHALWEEVRSRLKSLRRAERLRRKRKRKETQRRQFYKHPYKFARSLLEEKKGGTLSVEKEDLEAHLRETYSDPERSKPLSSPGYVPRPPEPSVPMDISQPKWSELSAAVRRARAAAAPGPNGVPYRVYKMCPKTLYLLWKLMRVAWRKQCIPVSWRRAGGVLIPKEKVSTTINQFRNISLLNVEGKLFFTVLAKRLTSYLISNRLIDTEVQKAGIPGFPGCIEHANTIWSQIQSARKQKEDLHVVWLDLANAYGSLPHKVIQYALNFFHVPGEVKGMINNYFADFKLSISTRNFTTEWQRLEKGIAMGCSISPLLFTMGFEILLIGAKQVVGGVRAPSGEKMPPLRAFMDDVTSILRTAPCTNRVLLRLEELTAWAGMQFKPSKSRSLSLRKGKLSGRTFSVNGQHIPTIQEESVKSLGRLYTSNLNDKGRGQEVLEQACNGLQQIDKSELPGRLKMWCVQFMLFPRLKWPLKMYNISVSTVDQIDRKANAYFRRWLGVPRCLSSVALYGKNKLNLPFSSIAEDFKLEKVRLVLELEGSQDPSVRAANQGLSTGKKWSASTSISQAISRQQHKDLVGSVQVGRAGFGWGKRDQRWKSANPSERRQLVIQEVKRMEEERRRVTAVGQSQQGAWLNWEGAVERRLTWSDLWSMQNARLSFLLRSVYDVLPSPYNLTRWYKNEESCQLCGQAQADLKHILSNCKIALQQGRYTWRHNKVLRLIAVMLEEVRKKAKGATARTQPIQFVREGQKPKAADSNNINTGGGPLSRGKWEMAVDLDRQLRFPSTICVTQLRPDLVLWSEDQKSVLIIELTIPWEENIQEAYERKKLKYEELADQCKQQGWRSRVYPVEVGTRGFAGTSLLRLCKDLQIQGKLQSQFVRQVTEEAERSSFVLWIKRKDKCWKKAAQK

SEQ ID NO: 4655 - protein, 813 aa, unidentified
MDISQPKWSELSAAVRRARAAAAPGPNGVPYRVYKMCPKTLYLLWKLMRVAWRKQCIPVSWRRAGGVLIPKEKVSTTINQFRNISLLNVEGKLFFTVLAKRLTSYLISNRLIDTEVQKAGIPGFPGCIEHANTIWSQIQSARKQKEDLHVVWLDLANAYGSLPHKVIQYALNFFHVPGEVKGMINNYFADFKLSISTRNFTTEWQRLEKGIAMGCSISPLLFTMGFEILLIGAKQVVGGVRAPSGEKMPPLRAFMDDVTSILRTAPCTNRVLLRLEELTAWAGMQFKPSKSRSLSLRKGKLSGRTFSVNGQHIPTIQEESVKSLGRLYTSNLNDKGRGQEVLEQACNGLQQIDKSELPGRLKMWCVQFMLFPRLKWPLKMYNISVSTVDQIDRKANAYFRRWLGVPRCLSSVALYGKNKLNLPFSSIAEDFKLEKVRLVLELEGSQDPSVRAANQGLSTGKKWSASTSISQAISRQQHKDLVGSVQVGRAGFGWGKRDQRWKSANPSERRQLVIQEVKRMEEERRRVTAVGQSQQGAWLNWEGAVERRLTWSDLWSMQNARLSFLLRSVYDVLPSPYNLTRWYKNEESCQLCGQAQADLKHILSNCKIALQQGRYTWRHNKVLRLIAVMLEEVRKKAKGATARTQPIQFVREGQKPKAADSNNINTGGGPLSRGKWEMAVDLDRQLRFPSTICVTQLRPDLVLWSEDQKSVLIIELTIPWEENIQEAYERKKLKYEELADQCKQQGWRSRVYPVEVGTRGFAGTSLLRLCRDLQIQGKLQSQFVRQVTEEAERSSFVLWIKRKDKCWKKAAQK

SEQ ID NO: 4656 - protein, 1166 aa, Branchiostoma belcheri
MESQPRGPTRVGMQEGPVRSDSPVTTAERLMDQREGVVLRSCSCGWQRVTSYRGLRIHQGKTKCQSREQSRRSAAAGKTQEDRGQGENHSTQDLNSDALDPGSTALPEELEPSASDSQPRLTTRERKEESFTRKEKIKWPRANDKASWETLDSDLSNILEQGLKGDVEKKLNRFGELVYDFCSGRLGTIPSSERKPGGNSAMSRRQKEIAKLILRRRHLRKLWKKASASEKGGLQALWEEVRARLKTLRRAERFRRKRKRRENQRKQFYKNPYRFARSLLEEKKGGNLSVGKEELEAHLSATYSDQEKSKPLESPGYVPRPTEPSNPMDVSPPKWSEVLAAVQRARSAAAPGPNGVPYRVYKFCPKTLRVLWRLMQVAWRKQCVPVAWRRAGGVLIPKEKVSSTIEQFRNISLLNVEGKLFFTVLAKRLTKYLISNNFIDTEIQKAGIPGFPGCTEHANTIWSQIQIARRQKEDLHVVWLDLANAYGSIPHKVIRYALDFFWVPVEIRQMIENYFSDFRLCISTRDYVTKWQQLEKGIAMGCSISPLLFTMGFEILLLGAKQVVGGVRAPSGEKMPPLRAFMDDVTSILRTAPCTKRLLQRLEELSKWAGMKFKPAKSRSLSLRKGKISNKTFTVNDQIIPTLQEQPVKSLGRLYTSSLKDSDRGPETVEQAVRGLRSIDECELPGRLKVWCAQFMLFPRLKWSLKTYNISLSVVDQIDRKANTYIRRWLGVPRCLSTVALYGNNMLSLPLSSIAEEYKVEKVRLVLELEGSRDSSVRAVTKNICTGRKWKAKDVISQAVNRLHHKDLVGAVQVGRSGLGWGERLHRWSSANPSERRQLVTQEVRRMEEEKRRVVAVGQRQQGAWVNWEGAVGRKLTWNDLWGMQNFRLSFLLRAVYDVLPTPQNVTRWFKNEETCLLCGMERADLKHILSSCKIALQQGRYTWRHNRALRQIAITLENVRRESAGTETSWQPIQFVRGGQRPKEAAPRSNNVGGGPLSRGKWKLLADLDSQLRFPEDICVTSLRPDLVMWSADQKTVAIVKLTIPWEENIQSAHERKKLKYEELAQQCRQNGWRTHLYPVEVGVRGFVGTSLMRLCRDFQIRGKAQTQFVRSVAEEAEKSSFSLWIKRKTRSWKSRDDCVGGRAETSILSSRRPEAYQKQGTKRP

SEQ ID NO: 4657 - protein, 811 aa, Branchiostoma floridae
MDISQPKWSELSAAVRRARAAAAPGPNGVPYRVYKMCPKTLYLLWKLMRVAWRKHCIPVSWRRAGGVLIPKEKVSTTINQFRNISLLNVEGKLFFTVLAKRLTSYLISNRLIDTEVQKAGIPGFPGCIEHANTIWSQIQSARKQKEDLHVVWLDLANAYGSLPHKVIQYALNFFHVPGEVKGMINNYFADFKLSISTRNFTTEWQRLEKGIAMGCSISPLLFTMGFEILLIGAKQVVGGVRAPSGEKMPPLRAFMDDVTSILRTAPCTNRVLLRLEELTAWAGMQFKPSKSRSLSLRKGKLSGRTFSVNGQHIPTIQEESVKSLGRLYTSNLNDKGRGQEVLEQACNGLQQIDKSELPGRLKMWCVQFMLFPRLKWPLKMYNISVSTVDQIDRKANAYFRRWLGVPRCLSSVALYGKNKLNLPFSSIAEDFKLEKVRLVLELEGSQDSSVRAANQGLSTGKKWSASTSISQAISRQQHKDLVGSVQVGRAGFGWGKRDQRWKSANPSERRQLVIQEVKRMEEERRRVTAVGQSQQGAWLNWEGAVERRLTWSDLWSMQNARLSFLLRSVYDVLPSPYNLTRWYKNEESCQLCGQAQADLKHILSNCKIALQQGRYTWRHNKVLRLIAVMLEEVRKKAKGATARTQPIQFVREGQKPKSADSNNINTGGGPLSRGKWEMAVDLDRQLRFPSTICVTQLRPDLVLWSEDQKSVLIIELTVPWEENIQEAYERKKLKYEELADQCKQQGWRSRVYPVEVGTRGFAGTSLLRLCRDLQIQGKIQSQFVRQVTEEAERSSFVLWIKRKDKCWKKAA

SEQ ID NO: 4658 - protein, 1154 aa, Monomorium pharaonis
MMEQNNRLNVPGSRMARGLRVQSECSASAEDPDGVVSGSRRSTSDGALNTAEHGSHNRAEAEHGSQESYSCGHCPKEFRTKSGLGLHVARAHIEVANRAVNVERVKARWSVEEVRLMARAEATATLAGDVLFMNQHLQERIPDRSLEAIKGKRRQEAYREMVRGFCQEMRQRCTMGSAADIDEGDRTDEAMIGAESVPITAMETAINERSNDPSAHQPPPGQSSQRLRDHIQLLIEQSTAVRGFEADTLVGTARDALLSGAVDVHAIERWLGKIFPPAVQVRPPQRAKTRRPGPHPTVRENKKQKRKREFAVTQSLYKKNKKTCLAHILEGDSGRKRPSAVEFCDYWRPVMEATSVADGDMTALRNRFRVEDRMASASQSLPSGARGIHLEGLGEGAVADPVNAMDRTLLWDPITTAEIRRISVKTGTAPGLDQITPRMWNAVPFVLRALLFNLLLLAREVPMSIATTRTVFLEKGGMSAVPAPAEYRPLSIGSVVLRHFHKIIAKRLAALDIFDARQRGFRPVDGVCENVTVLSAVLGDARRQRRTLHLACVDLSKAFDTVSHAAIHTTLDELGLPREFREYVRAVYSGARTVLHMSGTKEVSAIKVGRGVRQGDPLSPLLFNLVVDRALGILSEDVGYRMGGRLVSALGYADDIVLLASTKAGLQENLTRLHEAFMRNGLSINAKKTGVLSMVASGRDKKVKVDTTPYFTVGGALIPQRSPVDVWAYLGCMYQGAREYANVPPLAHSIELLTRAPLKPQQRLRLLRDHLLPRYYHRWIVGSVSAKTLKGVDVTVRNATRRWLRFPHDVPAGYLHAPIQSGGLGMPLLKVLIPILKHSRLQRLCRSTLPAARAAAESTYVARQLVWCENQMRVRGNRVTTTAELREQCTAWLRESCDGNGLREVVSSKLSSHWVSGGADAIPGADYVHYHHIRANCVPSRARVSRGREGREVRCRAGCPEIETTAHCVQRCFRSHGGRILRHNDLCRQIGGFLQQKGWHVDAELAYSTSAGLRRPDLTIVKGDEAVVVDAQVVSCETALDVSHERKVVKYRSCEDLADRVAERTGVPRSNVRFTALTISWRGVWCSRSEEEMRGLGLTTGQLRPLTTRVLWGSWLNWKRFNAITSRYNEARGSVRSGAWRRNVELGASALAEV

SEQ ID NO: 4659 - protein, 1152 aa, Nylanderia fulva
MVSCGAKKDRGFLGGSRLSIRLPPYTQLIMERNLNENTVPGSRMARGLRASARLSERARGAEDPDGVAAGPSRTTIRTSQAEVDSLEEEMVSCEQCSARFRNMRGLGVHKVRAHPLQANSAINVDRVKARWSVEETRLMARAEAEGTLAGELFINQYLETRFPNRSLEAIKGKRQQEPYRVMVRDFCQEIQSRRAIVIDEGDRDGAVMTRADTIPAATEASTDDQSAHQPPPEQSSQRLRDKIQSLVEQSAAFRSYEADTLAGTARDALTAGRVDVLAIERWLGMIFPRPLQVRPPQRVSAKKHCPPVKRESREQRRKREYAIVQSLYKKNKKSCLSRILEGDSVRERPSAVEFFNCWRPIMEASSGADGDMTDLRESFGEAAQAASAGRGRTSGPRGIHLEGLGDGAATDPVPVADKTLLWDPITPAEVNRISVRTGTAPGLDQITPRMWNAVPAILRALLFNLLLLAETIPSSIATTRTVFLEKGGMSDRPGPTEYRPLSIRSVITRHFHKILAKRLAALDIFDKRQRGFRPVDGVCENVTVLSSVLWDARRRCRSLHVACVDLSKAFDTVAHAAIHTTLDELGLPREFREYVRAVYSNALTELQGVSAEEVSAIKIGRGVRQGDPLSPLLFNLVVDRALGILSEDVGYRLGGRLINALGYADDIVLLASTRDGLQENLTRLHDAFMRNGLEINARKTGVLSMVASGRDKKVKVDTTPYFTVGGAMIPQRSLVDVWTYLGCEYTGARELASDPPLAQAIEQLTRAPLKPQQRLRLLRDCLLPRYYHRWTVGTVSAKTLKGKNIIVRTAVRRWLRFPHDVPAGYLHAPIQSGGLGMPLLRTLIPILKHNRLQRLCRSTLPAACAAAETTYVARQLVWCENQMRVRGHRVTTTAELRQQCAAWLRESCDGSGLREVAASNLSSYWVSAGADAIPGADYVHYHHIRANCIPSRARCSRGRDGRDNRCRAGCPETETPAHCVQRCFRTHGGRILRHDDLCRQVGGYLQQKGWRVDAEQAYSTSAGRRRPDLTIAKGGEAVVVDAQVVSSETALEMSHERKVEKYRSCNDLAAAVAERTGVPRNNVRFTAITISWQGVWSSRSESELRGLGLTSAQLRTLTTRVLWGSWLNWKRFNAMTSRYNKRRRNVASSGGA

SEQ ID NO: 4660 - protein, 1152 aa, Nylanderia fulva
MVSCGAKKDRGFLGGSRLSIRLPPYTQLIMERNLNENTVPGSRMARGLRASARLSERARGAEDPDGVAAGPSRTTIRTSQAEVDSLEEEMVSCEQCSARFRNMRGLGVHKVRAHPLQANSAINVDRVKARWSVEETRLMARAEAEGTLAGELFINQYLETKFPNRSLKAIKGKRQQEPYRVMVRDFCQKIQSRRAIVIDEGDRDGAVMTRADTIPAATEASTDDQSAHQPPPEQSSQRLRDKIQSLVEQSAAFRSYEADTLAGTARDALTSKRVDVLAIERWLGMIFPRPLQVRPPQRLSAKKHCPPVKRESREQRRKWEYAIVQSLYKKNKKSCLSRILEGDSVRKRPSAVKFFNCWRLIMEASSGADGDMTDLRESFREAAQAASAGRGRTSGLRGIHLEGLGDGAATDPVPVADKTLLWDPITPAEVNRISVRTGTAPGLDQITPRMWNAVPAILRALLFNLLLLAETIPSSIATTRTVFLEKGGMSDRPGPTEYRPLSIRSVITRHFHKILAKRLAALDIFDKRQRGFRPVDGVCENVTVLSSVLWDARRRCRSLHVACIDLSKAFDTVAHAAIHTTLDELGLPREFREYVRAVYSNALTELQGVSAEEVSAIKIGRGVRQGDPLSPLLFNLVVDRALGILSEDVGYRLSGRLINALGYADDIVLLASTRDGLQENLTRLHDAFMRNGLEINARKTGVLSMVASGRDKKVKVDTTPYFTVGRAMIPQRSLVDVWTYLGCEYTGARELASDPPLAQAIEQLTRAPLKPQQRLRLLRDCLLPRYYHRWTVGTVSAKTLKGKNIIVRTAVRRWLRFPHDVPAGYLHAPIQSGGLGMPLLRTLIPILKHNRLQRLCRSTLPAACAAAETTYVARQLVWCENQMRVRGHRVTTTAELRQQCAAWLRESCDGSGLREVAASNLSSYWVSAGADAIPGADYVHYHHIRANCIPSRARCSRGRDGRDNRCRAGCPKTETPAHCVQRCFRTHGGRILRHDDLCRQVGGYLQQKGWRVDAEQAYSTSAGRRRPDLTIAKGGEAVVVDAQVVSSETALEMSHERKVEKYRSCNDLAAAVAERTGVPRNNVCFTAITISWQDVWSSRSESELRGLGLTSAQLRTLTTRVLWGSWLNWKRFNAMTSRYNERRRNVASSGGA

SEQ ID NO: 4661 - protein, 1123 aa, Nylanderia fulva
MNKAKNDSDVPGSRMARGLRASARLSERARGAEDPDGVAAGPSRITIRTSQAEVDSLEEEMVSCEHCSARFRNMRGLGVHKVRAHPLQANSAINVDRVKARWSVEETRLMARAEAEGTLAGEPFINQYLETRFPNRSLEAIKGKRRQEPYRVMVRDFCQEIQSRRAIVIDEGDRDGAVMTRADTIPAAIEASTDDQSAHQPPPEQSSQRLRDKIQSLVEQSAAFRSYEADTLAGTARDALTAGRVDVLAIERWLGMIFPRPLQVRPPQRVSAKKHCPPVKRESKEQKRKREYAIVQSLYRKNKKSCLSRILEGDSVRERPSAVEFLNCWRPIMEASSGADGDMTDLRESFGEAAQAASAGRGRTSGPRGIHLEGLGDGAATDPVPVADKTLLWDPVTPAEVNRISVRTGTAPGLDQITPRMWNAVPAILRALLFNLLLLAETIPSSIATTRTVFLEKGGMSDRPGPTEYRPLSIGSVIIRHFHKILAKRLAALDIFDRRQRGFRPVDGVCENVTVLSSVLWDARRRCRSLHVACVDLSKAFDTVAHAAIHTTLDELGLPREFREYVRAVYSNALTELQGVSAKEVSAIKIGRGVRQGDPLSPLLFNLVVDRALGILSEDVGYRLGGRLINALGYADDIVLLASTRDGLQENLTRLHDAFMRNGLEINARKTGVLSMVASGRDKKVKVDTTPYFTVGGAMIPQRSLVDVWTYLGCEYTGARELASDPPLAQAIEQLTRAPLKPQQRLRLLRDCLLPRYYHRWTVGTVSAKTLKGKDIIVRTAVRRWLRFPHDVPAGYLHAPIQSGGLGMPLLRTLIPILKHNRLQRLCRSTLPAACAAAETTYVARQLVWCENQMRVRGHRVTTTAELRQQCAAWLRESCDGSGLREVAASNLSSYWVSAGADAIPGADYVHYHHIRANCIPSRARCSRGRDGRDNRCRAGCPETETPAHCVQRCFRTHGGRILRHDDLCRQVGGYLQQKGWRVDAEQAYSTSAGRRRPDLTIAKGGEAVVVDAQVVSSETALEMSHERKVEKYRSCNDLAAAVAERTGVPRNNVRFTAITISWRGVWSSRSESELRELGLTSAQLRTLTTRVLWGSWLNWKRFNAMTSRYNEGRRNVASSGGA

SEQ ID NO: 4662 - protein, 1030 aa, Nylanderia fulva
MRGLGVHKVRAHPLQANSAIKVNRVKARWSVEETRLMARAEAEGTLAGVLFINQYLETRFPNRSLEAIKGKRQQEPYRVMVRDFCQEIQSRRAIVIDEGDRDGAVMTRADTIPAATEASTDDQSAHQPSPEQSSQRLRDKIQSLVEQSAAFRSYEADTLAGTARDALTAGRADVLAIKRWLGMIFPRPLQVRPPQRVSAKKHCPPVKRESREQRRKREYAIVQSFYKKNKKSCLSRILEGDSVRKRPSAVEFFNCWRPIMEASSGADGDMTDLRESFEEAAQAASAGRGRTSSLRGIHLQGLGDGAATDPVPVADKTLLWDSITPAEVNRISVRTGTAPGWTRLRRGCGTLFLRFFVRFCSICCSWQRRSPRQSPQPERWPQLLEKGGMSDRPGPTEYRPLSIRSVITRHFHKILAKRLAALDIFDKRQRGFRPVDGVCENVTVLSSVLWDTRRRCRSLHVACVDLSKAFDTVAHAAIHTTLDELGLPREFREYVRAVYSNALTELQGVSAEEVSAIMIGRGVRQGDPLSPLLFNLVVDRALGILSEDVGYRLGNRLINALGYADDIVLLVSTRDGLQENLTRLHDAFMRNGLEINARKTGVLSMVASGRDKKVKVDTTPYFTVGGAMIPQRSLVDVWTYLGCEYTGARELASDPPLAQAIEQLTRAPLKPQQRLRLLRDCLLPRYYHRWTVGTVSAKTLKGKNIIVRTAVRRWLRFPHDVPAGYLHAPIQSGGLGMPLLRTLIPILKHNRLQRLCRSTLPAACAAAETTYVARQLVWCENQMRVRGHRVTTTAELRQQCAAWLRESCDGSGLREVAASNLSSYWVSAGADAIPGADYVHYHHIRANCIPSRARCFRGRDGRDNRCRAGCPETETPAHCVQRCFRTHGVKILRHDDLCRQVGGYLQQKGWRVDAEQAYSTSAGRRRPDLTIAKGGEAVVVDAQVVSSKTALEMSHERKVEKYRSCNDLAAAVAERTGVPRNNVRFTAITISWQGVWSSRSESELRGLGLTSAQLRTLTTRVLWGSWLETF

SEQ ID NO: 4663 - protein, 868 aa, Nylanderia fulva
MIFPRPLQVRPPQRVSAKKHCPPVKRESKEQKRKREYAIVQSLYKKNKKSCLSRILEGDSVRERPSAVEFLNCWRPIMEASSGADGDMTDLRESFGEAAQAASAGRGRTSGPRGIHLEGLGDGAATDPVPVADKTLLWDPITPAEVNRISVRTGTAPGLDQITPRMWNAVPAILRALLFNLLLLAETIPSSIATTRTVFLEKGGMSDRPGPTEYRPLSIGSVIIRHFHKILAKRLAALDIFDRRQRGFRPVDGVCENVTVLSSVLWDARRRCRSLHVACVDLSKAFDTVAHAAIHTTLDELGLPREFREYVRAVYSNALTELQGVSAKEVSAIKIGRGVRQGDPLSPLLFNLVVDRALGILSEDVGYRLGGRLINALGYADDIVLLASTRDGLQENLTRLHDAFMRNGLEINARKTGVLSMVASGRDKKVKVDTTPYFTVGGAMIPQRSLVDVWTYLGCEYTGARELASDPPLAQAIEQLTRAPLKPQQRLRLLRDCLLPRYYHRWTVGTVSAKTLKGKDIIVRTAVRRWLRFPHDVPAGYLHAPIQSGGLGMPLLRTLIPILKHNRLQRLCRSTLPAACAAAETTYVARQLVWCENQMRVRGHRVTTTAELRQQCAAWLRESCDGSGLREVAASNLSSYWVSAGADAIPGADYVHYHHIRANCIPSRARCSRGRDGRDNRCRAGCPETETPAHCVQRCFRTHGGRILRHDDLCRQVGGYLQQKGWRVDAEQAYSTSAGRRRPDLTIAKGGEAVVVDAQVVSSETALEMSHERKVEKYRSCNDLAAAVAERTGVPRNNVRFTAITISWRGVWSSRSESELRELGLTSAQLRTLTTRVLWGSWLNWKRFNAMTSRYNEGRRNVASSGGA

SEQ ID NO: 4664 - protein, 1123 aa, Nylanderia fulva
MNKAKNDSDVPGSRMARGLRASARLSERARGAEDPDGVAAGPSRITIRTSQAEVDSLEEEIVSCEHCSARFRNMRGLGVHKVRAHPLQANSAINDDRVEARWSVEETRLMARAEAEGTLAGEPFINQYLETRFPNRSLEAIKGKRRQEPYRVMVRDFCQEIQSRRAIVIDEGDRDGAVMTRADTIPAAIEASTDDQSAHQPPPEQSSQRLRDKIQSLVEQSAAFRSYEADTLAGTARDALTAGRVDVLAIERWLGMIFPRPLQVRPPQRVSAKKHCPPVKRESKEQKRKREYAIVQSLYRKNKKSCLSRILEGDSVRERPSAVEFLNCWRPIMEASSGADGDMTDLRESFGEAAQAASAGRGRTSGPRGIHLEGLGDGAATDPVPVADKTLLWDPITPAEVNRISVRTGTAPGLDQITPRMWNAVPAILRALLFNLLLLAETIPSSIATTRTVFLEKGGMSDRPGPTEYRPLSIGSVIIRHFHKILAKRLAALDIFDRRQRGFRPVDGVCENVTVLSSVLWDARRRCRSLHVACVDLSKAFNTVAHAAIHTTLDKLGLPREFREYVRAVYSNALTELQGVSAKEVSAIKIGRGVRQGDPLSPLLFNLVVDRALGILSEDVGYRLGGRLINALGYADDIVLLASTRDGLQENLTRLHDAFMRNGLEINARKTGVLSMVASGRDKKVKVDTTPYFTVGGAMIPQRSLVDVWTYLGCEYTGARELASDPPLAQAIEQLTRAPLKPQQRLRLLRDCLLPRYYHRWTVGTVSAKTLKGKDIIVRTAVRRWLRFPHDVPAGYLHAPIQSGGLGMPLLRTLIPILKHNRLQRLCRSTLPAACAAAETTYVARQLVWCENQMRVRGHRVTTTAELRQQCAAWLRESCDGSGLREVAASNLSSYWVSAGADAIPGADYVHYHHIRVNCIPSRARCSRGRDGRDNRCRAGCPETETPAHCVQRCFRTHGGRILRHDDLCRQVGGYLQQKGWRVDAEQAYSTSAGRRRPDLTIAKGGEAVVVDAQVVSSETALEMSHERKVEKYRSCNDLAAAVAERTGVPRNNVRFTAITISWRGVWSSQSESELRELGLTSAQLRTLTTRVLWGSWLNWKRFNAMTSRYNEGRRNVASSGGA

SEQ ID NO: 4665 - protein, 1123 aa, Nylanderia fulva
MNKAKNDSDVPGSRMARGLRASARLSERARGAEDPDGVAAGPSRITIRTSQAEVDSLEEEMVSCEHCSARFRNMRGLGVHKVRAHPLQANSAINVDRVKARWSVEETRLMARAEAEGTLAGEPFINQYLETRFPNRSLEAIKGKRRQEPYRVMVRDFCQEIQSRRAIVIDEGDRDGAVMTRADTIPAAIEASTDDQSAHQPPPEQSSQRLRDKIQSLVEQSAAFRSYEADTLAGTARDALTAGRVDVLAIERWLGMIFPRPLQVRPPQRVSAKKHCPPVKRESKEQKRKREYAIVQSLYRKNKKSCLSRILEGDSVRERPSAVEFLNCWRPIMEASSGADGDMTDLRESFGEAAQAASAGRGRTSGPRGIHLEGLGDGAATDPVPVADKTLLWDPITPAEVNRISVRTGTAPGLDQITPRMWNAVPAILRALLFNLLLLAETIPSSIATTRTVFLEKGGMSDRPGPTEYRPLSIGSVIIRHFHKILAKRLAALDIFDRRQRGFRPVDGVCENVTVLSSVLWDARRRCRSLHVACVDLSKAFDTVAHAAIHTTLDELGLPREFREYVRAVYSNALTELQGVSAKEVSAIKIGRGVRQGDPLSPLLFNLVVDRALGILSEDVGYRLGGRLINALGYADDIVLLASTRDGLQENLTRLHDAFMRNGLEINARKTGVLSMVASGRDKKVKVDTTPYFTVGGAMIPQRSLVNVWTYLGCEYTGARELASDPPLAQAIEQLTRAPLKPQQRLRLLRDCLLPRYYHRWTVGTVSAKTLKGKDIIVRTAVRRWLRFPHDVPAGYLHAPIQSGGLGMPLLRTLIPILKHNRLQRLCRSTLPAACAAAETTYVARQLVWCENQMRVRGHRVTTTAELRQQCAAWLRESCDGSGLREVAASNLSSYWVSAGADAIPGADYVHYHHIRANCIPSRARCSRGRDGRDNRCRAGCPETETPAHCVQRCFRTHGGRILRHDDLCRQVGGYLQQKGWRVDAEQAYSTSAGRRRPDLTIAKGGEAVVVDAQVVSSETALEMSHERKVEKYRSCNDLAAAVAERTGVPRNNVRFTAITISWRGVWSSRSESELRELGLTSAQLRTLTTRVLWGSWLNWKRFNAMTSRYNEGRRNVASSGGA

SEQ ID NO: 4666 - protein, 1123 aa, Nylanderia fulva
MNKAKNDSDVPGSRMARGLRASARLSERARGAEDPDGVAAGPSRITIRTSQAEVDSLEEEMVSCEHCSARFRNMRGLGVHKVRAHPLQANSAINVDRVKARWSVEETRLMARAEAEGTLAGEPFINQYLETRFPNRSLEAIKGKRRQEPYRVMVRDFCQEIQSRRAIVIDEGDRDGAVMTRADTIPAAIEASTDDQSAHQPPPEQSSQRLRDKIQSLVEQSAAFRSYEADTLAGTARDALTAGRVDVLAIERWLGMIFPRPLQVRPPQRVSAKKHCPPVKRESKEQKRKREYAIVQSLYRKNKKSCLSRILEGDSVRERPSAVEFLNCWRPIMEASSGADGDMTDLRESFGEAAQAASAGRGRTSGPRGIHLEGLGDGAATDPVPVADKTLLWDPITPAEVNRISVRTGTAPGLDQITPRMWNAVPAILRALLFNLLLLAETIPSSIATTRTVFLEKGGMSDRPSPTEYRPLSIGSVIIRHFHKILAKRLAALDIFDRRQRGFRPVDGVCENVTVLSSVLWDARRRCRSLHVACVDLSKAFDTVAHAAIHTTLDELGLPREFREYVRAVYSNALTELQGVSAEEVSAIKIGRGVRQGDPLSPLLFNLVVDRALGILSEDVGYRLGGRLINALGYADDIVLLASTRDGLQENLTRLHDAFMRNGLEINARKTGVLSMVASGRDKKVKVDTTPYFTVGGAMIPQRSLVDVWTYLGCEYTGARELASDPPLAQAIEQLTRAPLKPQQRLRLLRDCLLPRYYHRWTVGTVSAKTLKGKDIIVRTAVRRWLRFPHDVPAGYLHALIQSGGLGMPLLRTLIPILKHNRLQRLCRSTLPAACAAAETTYVARQLVWCENQMRVRGHRVTTTAELRQQCAAWLRESCDGSGLREVAASNLSSYWVSAGADAIPGADYVHYHHIRANCIPSRARCSRGRDGRDNRCRAGCPETETPAHCVQRCFRTHGGRILRHDDLCRQVGGYLQQKGWRVDAEQAYSTSAGRRRPDLTIAKGGEAVVVDAQVVSSETALEMSHERKVEKYRSCNDLAAAVAERTGVPRNNVRFTAITISWRGVWSSRSESELRELGLTSAQLRTLTTRVLWGSWLNWKRFNAMTSRYNEERRNVASSGVA

SEQ ID NO: 4667 - protein, 1123 aa, Nylanderia fulva
MNKAKNDSDVPGSRMARGLRASARLSERARGAEDPDGVAAGPSRITIRTSQAEVDSLEEEMVSCEHCSARFRNMRGLGVHKVRAHPLQANSAINVDRVKARWSVEETRLMARAEAEGTLAGEPFINQYLETRFPNRSLEAIKGKRRQEPYRVMVRDFCQEIQSRRAIVIDEGDRDGVVMTRADTIPAAIEASTDDQSAHQPPPEQSSQRLRDKIQSLVEQSAAFRSYEADTLAGTARDALTAGRVDVLAIERWLGMIFPRPLQVRPPQRVSAKKHCPPVKQESKEQKRKREYAIVQSLYRKNKKSCLSRILEGDSVRERPSAVEFLNCWRPIMEASSGADGDMTDLRESFGEAAQAASAGRGRTSGPRGIHLEGLGDGAATDPVPVADKTLLWDPVTPAEVNRISVRTGTAPGLDQITPRMWNAVPAILRALLFNLLLLAETIPSSIATTRTVFLEKGGMSDRPGPTEYRPLSIGSVIIRHFHKILAKRLAALDIFDRRQRGFRPVDGVCENVTVLSSVLWDARRRCRSLHVACVDLSKAFDTVAHAAIHTTLDELGLPREFREYVRAVYSNALTELQGVSAKEVSAIKIGRGVRQGDPLSPLLFNLVVDRALGILSEDVGYRLGGRLINALGYADDIVLLASTRDGLQENLTRLHDAFMRNGLEINARKTGVLSMVASGRDKKVKVDTTPYFTVGGAMIPQRSLVDVWTYLACEYTGARELASDPPLAQAIEQLTRAPLKPQQRLRLLRDCLLPRYYHRWTVGTVSAKTLKGKDIIVRTAVRRWLRFPHDVPAGYLHAPIQSGGLGMPLLRTLIPILKHNRLQRLCRSTLPAACAAAETTYVARQLVWCENQMRVRGHRVTTTAELRQQCAAWLRESCDGSGLREVAASNLSSYWVSAGADAIPGADYVHYHHIRANCIPSRARCSRGRDGRDNRCRAGCPETETPAHCVQRCFRTHGGRILRHDDLCRQVGGYLQQKGWRVDAEQAYSTSAGRRRPDLTIAKGGEAVVVDAQVVSSETALEMSHERKVEKYRSCNDLAAAVAERTGVPRNNVRFTAITISWRGVWSSRSESELRELGLTSAQLRTLTTRVLWGSWLNWKRFNAMTSRYNEGRRNVASSGGA

SEQ ID NO: 4668 - protein, 1154 aa, Nylanderia fulva
MVSCGAKKDRGFLGGSRLSIRLPPYTQLIMERNLNENTVPGSRMARGLRASARLSESARGAEDPDGIAAGPSQTTIRTSQAEVDSLEEEMVSCEQCSARFRNMRGLGVHKVRAHPLQANSAINVDRVKARWSVEETRLMARAEAEGTLAGELFINQYLETRFPNKSLEAIKGKRQQEPYRVMVRDFCQEIQSRRAIVIDEGDRDGAVMTRADTIPAATEASTDDQSAHQPSPEQSSQRLRDKIQSLVEQSAAFRSYEADTLAGTARDALTAGRVDVLAIKKWLGMIFPRPLQVRPPQRVSAKKHCPPVKRESREQRRKREYAIVQSLYKKNKKSCLSRILEGDSVRERPSAVEFFNCWRPIMEASSGADGDMTDLRESFGEAAQAASAGRGRTSSLRGILLEGLGDGAATDPVPVADKTLLWDSITPAEVNRISVRTGTAPGWTRLRRGCGTLFLRFFVRFCSICCSWQRRSPRQSPQPERWPQLLEKEGMSDRPGPTEYRPLSIRSVITRHFHKILAKRLAALDIFDKRQRGFRPVDGVCENVTVLSSVLWDARRRCRSLHVACVDLSKAFDTVAHAAIHTTLNELGLPREFREYVRAVYSNALTELQGVSAKEVSAIKIGRGVRQGDPLSPLLFNLVVERALGILSENVGYRLGGRLINALGYADDIVLLASTRDGLQENLTRLYDAFMRNGLEINARKNGVLSMVASGRDKKVKVDTTPYFTVGGAMIPQRSLVDVWTYLGCECTGARELASDPPLAQAIEQLTRAPLKPQQRLRLLRDCLFPRYYHRWTVGTVSAKTLKGKDIIVRTAVRRWLRFPHDVPAGYLHAPIQSGGLGMPLLRTLIPILKHNRLQRLCRSTLPAACAAAETTYVARQLVWCENQMRVRGHRVTTTAELRQQCAAWLRESCDGSGLREVAASNLSSYWVSAGADAIPGADYVHYHHIRANCIPSRARCSRSRDGRDNRCRAGCPETETPAHCVQRCFRTHGGRILRHDDLCRQVGGYLQQKGWRVDAEQAYSTSAGRRRPDLTIAKGGEAVVVDAQVVSSETALEMSHERKVEKYRSCNDLAAAVAERTGVPRNNVRFTAITISWRGVLSSRSESELRELGLTSAQLRTLTTRVLWGSWLNWKRFNAMTSRYNEGRRNVASSGGA

SEQ ID NO: 4669 - protein, 1123 aa, Nylanderia fulva
MNKAKNDSDVPGSRMARGLRASARLSERARGAEDPDGVAAGPSRITIRTSQAEVDSLEEEMVSCEHCSARFRNMRGLGVHKVRAHPLQANSAINVDRVKARWSVEETRLMARAEAEGTLAGEPFINQYLETRFPNRSLEAIKGKRRQEPYRVMVRDFCQEIQSRRAIVIDEGDRDGVVMTRADTIPAAIEASTDDQSAHQPPPEQSSQRLRDKIQSLVEQSAAFRSYEADTLAGTARDALTAGRVDVLAIERWLGMIFPRPLQVRPPQRVSAKKHCPPVKQESKEQKRKREYAIVQSLYRKNKKSCLSRILEGDSVRERPSAVEFLNCWRPIMEASSGADGDMTDLRELFGEAAQAASAGRGRTSGPRGIHLEGLGDGAATDPVPVADKTLLWDPVTPAEVNRISVRTGTAPGLDQITPRMWNAVPAILRALLFNLLLLAETIPSSIATTRTVFLEKGGMSDRPGPTEYRPLSIGSVIIRHFHKILAKRLAALDIFDRRQRGFRPVDGVCENVTVLSSVLWDARRRCRSLHVACVDLSKAFDTVAHAAIHTTLDELGLPREFREYVRAVYSNALTELQGVSAKEVSAIKIGRGVRQGDPLSPLLFNLVVDRALGILSEDVGYRLGGRLINALGYADDIVLLASTRDGLQENLTRLHDAFMRNGLEINARKTGVLSMVASGKDKKVKVDTTPYFTVGGAMIPQRSLVDVWTYLACEYTGARELASDPPLAQAIEQLTRAPLKPQQRLRLLRDCLLPRYYHRWTVGTVSAKTLKGKDIIVRTAVRRWLRFPHDVPAGYLHAPIQSGGLGMPLLRTLIPILKHNRLQRLCRSTLPAACAAAETTYVARQLVWCENQMRVRGHRVTTTAELRQQCAAWLRESCDGSGLREVAASNLSSYWVSAGADAIPGADYVHYHHIRANCIPSRARCSRGRDGRDNRCRAGCPETETPAHCVQRCFRTHGGRILRHDDLCRQVGGNLQQKGWRVDAEQAYSTSAGRRRPDLTIAKGGEAVVVDAQVVSSETALEMSHERKVEKYRSCNDLAAAVAERTGVPRNNVRFTAITISWRGVWSSRSESELRELGLTSAQLRTLTTRVLWGSWLNWKRFNAMTSRYNEGRRNVASSGGA

SEQ ID NO: 4670 - protein, 1123 aa, Nylanderia fulva
MDKVKNESDVPGSRMARGLRASARLSERARGAEDPDGVAAGPSRTTIRTSQAEVDSLEEEMVSCEHCSARFRNMRGLGVHKVRAHPLQANSAINVDRVKARWSVEETRLMARAEAEGTLAGEPFINQYLETRFPNRSLEAIKGKRRQEPYRVMVRDFCQEIQSRRAIVIDEGDRDGAVMTRADTIPAAIEASTDDQSAHQPPPEQSSQRLRDKIQSLVEQSAAFRSYEADTLAGTARDALTAGRVDVLAIERWLGMIFPRPLQVRPPQRVSAKKHCPPVKRESKEQKRKREYAIVQSLYRKNKKSCLSRILEGDSVRERPSAVEFLNCWRPIMEASSGADGDMTDLRESFGEAAQAASAGRGRTSGPRGIHLEGLGDGAATDPVPVADKTLLWDPITPAEVNRISVRTGTAPGLDQITPRMWNAVPAILRALLFNLLLLAETIPSSIATTRTVFLEKGGMSDRPGPTEYRPLSIGSVIIRHFHKILAKRLAALDIFDRRQRGFRPVDGVCENVTVLSSVLWDARRRCRSLHVACVDLSKAFDTVAHAAIHTTLDELGLPREFREYVRAVYSNALTELQGVSAKEVSAIKIGRGVRQGDPLSPLLFNLVVDRALGILSEDVGYRLGGRLINALGYADDIVLLASTRDGLQENLTRLHDAFMRNGLEINARKTGVLSMVASGRDKKVKVDTTPYFTVGGAMIPQRSLVDVWTYLGCEYTGARELASDPPLAQAIEQLTRAPLKPQQRLRLLRDCLLPRYYHRWTVGTVSAKTLKGKDIIVRTAVRRWLRFPHDVPAGYLHAPIQSGGLGMPLLRTLIPILKHNRLQRLCRSTLPAACAAAETTYVARQLVWCENQMRVRGHRVTTTAELRQQCAAWLRESCDGSGLREVAASNLSSYWVSAGADAIPGADYVHYHHIRANCIPSRARCSRGRDGRDNRCRAGCPETETPAHCVQRCFRTHGGRILRHDDLCRQVGGYLQQKGWRVDAEQAYSTSAGRRRPDLTIAKGGEAVVVDAQVVSSETALEMSHERKVEKYRSCNDLAAAVAERTGVPRNNVRFTAITISWRGVWSSRSESELRELGLTSAQLRTLTTRVLWGSWLNWKRFNAMTSRYNEGRRNVASSGGA

SEQ ID NO: 4671 - protein, 1154 aa, Nylanderia fulva
MVSCGAKKDRGFLGGSRLSIRLPPYTQLIMERNLNENTVPGSRMARGLRASARLSESARGAEDPDGVAAGPSQTTIRTSQAEVDSLEEEMVSCEQCSARFRNMRGLGVHKVRAHPLQANSAINVDRVKARWSVEETRLMARAEAEGTLAGELFINQYLETRFPNKSLEAIKGKRQQEPYRVMVRDFCQEIQSRRAIVIDEGDRDGAVMTRADTIPAATEASTDDQSAHQPSPEQSSQRLRDKIQSLVEQSAAFRSYEADTLAGTARDALTAGRVDVLAIKRWLGMIFPRPLQVRPPQRVSAKKHCPPVKRESREQRRKREYAIVQSLYKKNKKSCLSRILEGDSVRERPSAVEFFNCWRPIMEASSGADGDMTDLRESFGEAAQAASAGRGRTSSLRGIHLEGLGDGAATDPVPVADKTLLWDSITPAEVNRISVRTGTAPGWTRLRRGCGTLFLRFFVRFCSICCSWQRRSPRQSPQPERWPQLLEKGGMSDRPGPTEYRPLSIRSVITRHFHKILAKRLAALDIFDKRQRGFRPVDGVCENVTVLSSVLWDARRRCRSLHVACVDLSKAFDTVAHAAIHTTLDELGLPREFREYVRAVYSNALTELQGVSAKEVSAIKIGRGVRQGDPLSPLLFNLVVERALGILSENVGYRLGGRLINALGYADDIVLLASTRDGLQENLTRLYDAFMRNGLEINARKTGVLSMVASGRDKKVKVDTTPYFTVGGAMIPQRSLVDVWTYLGCEYTGARELASDPPLAQAIEQLTRAPLKPQQRLRLLRDCLLPRYYHRWTVGTVSAKTLKGKDIIVRTAVRRWLRFPHDVPAGYLHAPIQSGGLGMPLLRTLIPILKHNRLQRLCRSTLPAACAAAETTYVARQLVWCENQMRVRGHRVTTTAELRQQCAAWLRESCDGSGLREVAASNLSSYWVSAGADAIPGADYVHYHHIRANCIPSRARCSRGRDGRDNRCRAGCPETETPAHCVQRCFRTHGGRILRHDDLCRQVGGYLQQKGWRVDAEQAYSTSAGRRRPDLTIAKGGEAVVVDAQVVSSETALEMSHERKVEKYRSCNDLAAAVAERTGVPRNNVRFTAITISWRGVLSSRSESELRELGLTSAQLRTLTTRVLWGSWLNWKRFNAMTSRYNEGRRNVASSGGA

SEQ ID NO: 4672 - protein, 1154 aa, Nylanderia fulva
MVSCGAKKDRGFLGGSRLSIRLPPYTQLIMERNLNENTVPGSRMARGLRASARLSESARGAEDPDGVAAGPSQTTIRTSQAEVDSLEEEMVSCEQCSARFRNMRGLGVHKVRAHPLQANSAINVDRVKARWSVEETRLMARAEAEGTLAGELFINQYLETRFPNKSLEAIKGKRQQEPYRVMVRDFCQEIQSRRAIVIDEGDRDGAVMTRADTIPAATEASTDDQSAHQPSPEQSSQRLRDKIQSLVEQSAAFRSYEADTLAGTARDALTAGRVDVLAIKRWLGMIFPRPLQVRPPQRVSAKKHCPPVKRESREQRRKREYAIVQSLYKKNKKSCLSRILEGDSVRERPSAVEFFNCWRPIMEASSGADGDMTDLRESFGEAAQAASAGRGRTSSLRGIHLEGLGDGAATDPVPVADKTLLWDSITPAEVNRISVRTGTAPGWTRLRRGCGTLFLRFFVRFCSICCSWQRRSPRQSPQPERWPQLLEKEGMSDRPGPTEYRPLSIRSVITRHFHKILAKRLAALDIFDKRQRGFRPVDGVCENVTVLSSVLWDARRRCRSLHVACVDLSKAFDTVAHAAIHTTLDELGLPREFREYVRAVYSNALTELQGVSAKEVSAIKIGRGVRQGDPLSPLLFNLVVERALGILSEDVGYRLGGRLINALGYADDIVLLASTRDGLQENLTRLYDAFMRNGLEINARKNGVLSMVASGRDKKVKVDTTPYFTVGGAMIPQRSLVDVWTYLGCECTGARELASDPPLAQAIEQLTRAPLKPQQRLRLLRDCLLPRYYHRWTVGTVSAKTLKGKDIIVRTAVRRWLRFPHDVPAGYLHAPIQSGGLGMPLLRTLIPILKHNRLQRLCRSTLPAACAAAETTYVARQLVWCENQMRVRGHRVTTTAELRQQCAAWLRESCDGSGLREVAASNLSSYWVSAGADAIPGADYVHYHHIRANCIPSRARCSRSRDGRDNRCRAGCPETETPAHCVQRCFRTHGGRILRHDDLCRQVGGYLQQKGWRVDAEQAYSTSAGRRRPDLTIAKGGEAVVVDAQVVSSETALEMSHERKVEKYRSCNDLAAAVAERTGVPRNNVRFTAITISWRGVLSSRSESELRELGLTSAQLRTLTTRVLWGSWLNWKRFNAMTSRYNEGRRNVASSGCA

SEQ ID NO: 4673 - protein, 915 aa, unidentified
MRLSRWRTSQMTFWLGESTFMPLRDGWTRSFLGRRLPLLDAQKRDSEILLKRSTWRRENRKQKRCREFAVVQTLYKKNLKYCLSKILDGDAERVRPSAVEFRDYWRPLMETTVEADGDMTELRRSLGESRQSGGASRSLPPRARGIHLEGLGEGATTDDVPTVDRTLLWDPVIPAEVARVSVKTGTAPGLDGIEPRAWNAVPNVIRALLFNLLLLAGKAPSSIATTRTVFLEKGKMPERPRPSDYRPLSIGSVVLRHFHKILAKRLAALDIFDQRQRGFRPVDGVCENVTVLSAVLDHARRRCKTIHMACVDLSKAFDTVSHTAIHKTLEEVGLPPSFREYIRAIYSDARTVLQPTVGQEVSMTQLGRGVRQGDPLSPLLFNLVVDRALGVLSEDVGFRFGGRVINALGYADDIILLSSTKVGLQENLTRLSAAFDRNGLSINASKTGVLSLVASGRDKKVKIDLTPSFTVGGALLPQRSPVEVWTYLGSTYQGAREFANVPPLAQSIELLTRAPLKPQQRLRLLRDCLLPRFYHRWVVGTVTSKTLRGVDVLVRTAVRRWLRMPHDVPAGYFHAPIQSGGLGMPLLRTLIPILKHNRLRRLCVSSMPAAAAAAESTYVAKQLAWCEKQMRVRTVRVTTTAELRQQCATWLHESCDGKGLREVGSSKLSSNWVAAGAQSIPGADYVHYHHVRANCLPSRARSSRGRDGREVRCRAGCPEIETPAHCVQRCFRTHGGRILRHDDLCRQVGSFLRTRGWHVDAEQAYSTSVGRRRPDLTIVKDGEAVVVDAQVVSSETALNVAHDRKVEKYRSIQDLKDRVAEHTGVHRDNVRFTAITISWRGAWSPDSERELKQLGLTTSQLRTLTTRVLWGSWLNWRRFNAITTRYNWRRRQAANGAVGLTSLAGGDSSQVAADA

SEQ ID NO: 4674 - protein, 1132 aa, Tetramorium bicarinatum
MTERENEFTHSGSRMARGLRVTREASRVDERAAGAADPDGVVSSSLQGQGPSGNAAEHGSRSTQELYSCESCDKEYRTMRGLAAHVVKAHPTVANSAIDVERVKARWSAEEVRLMARAEAAATSAGGIVFMNQHLYGKFPQRSLEAIKGKRRQGAYREMVRVFCQEIQSRERIEIDDGTEAGPTMIGVEAVPPTIETTENLDPSAHRSAPEQSSQRLLDMITQLVEQSSAIHSYQADTLAGIARDALLEGVVDVHAIERWLGEIFPPPATVRPPQRVSTRKRNPPTKRENREQRRKREFAHMQSLYKKSKKACLARILSGGSGRERPSADAFSAYWRPVMEASSGADGDMTALRESYGVSGQAASASRSPPRARGIHLEGIGGGAAAEPVPVADRTQLWDPITATMVRRIAIKPGTAPGLDQITPRMWNAVPIVLRALLFNLLLLARAVPSSIATTRTVFLEKGGMSARPGPEEYRPLSIGSVIIRHLHKILAKRLAALEIIDERQRGFRPVDGVCENITILTTVLGDARRRCRSLHLACVDVSKAFDTVSHAAIHTTLEELGLPWEFREYVRAVYSNARTVLQNHRAGQVSAINIGRGVRQGDPLSPLLFNLVVDRALGFLSEDVGYQLGGRLVNALGYADDIVLLASTKCGLQENLTRLHDAFERNGLSINAKKTGVLSMVASGRDKKVKIETTPCFTVGGALVPQRSPVEVWTYLGCMYQGAREVANDPPLAHTIELITKAPLKPQQRLRLLRDHLLPRYYYRWIVGSVTAKKLKGFDLVVRAAIRRWLRLPHDVPVGYFHAPIQSGGLGMPLLKNFIPILKHDRLQRLCKSTLPAARATAESAYVARQLVWCDNQMRVRDTRVTTTAELRQQMAARLYESCDGNGLREVSSSKLSSHWVSGGADAIPGADYVHYHHIRANCIPSRARLSRGRDGREVRCRAGCSERETSAHCVQRCFRTHGGRILRHNDLCRQVGGFLQQKGWHVDAELAYPTSAGRRRPDLTIAKGDEAVVVDAQVVSSETALDVSHERKVEKYRSCDDLVDRVAEYTGVPRNNVRFTALTISWRGVWSSRSEGEMRSIGLTTRQLQILTTRVLWGSWLNWKRFNTITTRSVQGRSTAAGTGAVAGT

SEQ ID NO: 4675 - protein, 1132 aa, Nylanderia fulva
MVSCGAKKDRGFLGGSRLSIRLPPYTQLIMERNLNENTVPGSRMARGLRASARLSESARGAEDPDGVAAGPSQTTIRTSQAEVDSLEEEMVSCEQCSARFRNMRGLGVHKVRAHPLQANSAINVDRVKARWSVEETRLMARAEAEGTLAGELFINQYLETRFPNRSLEAIKGKRQQEPYRVMVRDFCQEIQSRRAIVIDEGDRDGAVMTRADTIPAATEASTDDQSAHQPSPEQSSQRLRDKIQSLVEQSAAFRSYEADTLAGTARDALTAGRVDVLAIKRWLGMIFPRPLQVRPPQRVSAKKHCPPVKRESREQRRKREYAIVQSLYKKNKKSCLSRILEGDSVRERPSAVEFFNCWRPIMEASSGADGDMTDLRESFGEAAQAASAGRGRTSSLRGIHLEGLGDGAATDPVPVADKTLLWDSITPAEVNRISVRTGTAPGWTRLRRGCGTLFLRFFVRFCSICCSWQRRSPRQSPQPERWPQLLEKGGMSDRPGPTEYRPLSIRSVITRHFHKILAKRLAALDIFDKRQRGFRPVDGVCENVTVLSSVLWDARRRCRSLHVACVDLSKAFDTVAHAAIHTTLDELGLPREFREYVRAVYSNALTELQGVSAEEVSAIMIGRGVRQGDPLSPLLFNLVVDRALGILSEDVGYRLGNRLINALGYADDIVLLVSTRDGLQENLTRLHDAFMRNGLEINARKTGVLSMVASGRDKKVKVDTTPYFTVGGAMIPQRSLVDVWTYLGCEYTGARELASDPPLAQAIEQLTRAPLKPQQRLRLLRDCLLPRYYHRWTVGTVSAKTLKGKNIIVRTAVRRWLRFPHDVPAGYLHAPIQSGGLGMPLLRTLIPILKHNRLQRLCRSTLPAACAAAETTYVARQLVWCENQMRVRGHRVTTTAELRQQCAAWLRESCDGSGLREVAASNLSSYWVSAGADAIPGADYVHYHHIRANCIPSRARCFRGRDGRDNRCRAGCPETETPAHCVQRCFRTHGGKILRHDDLCRQVGGYLQQKGWRVDAEQAYSTSAGRRRPDLTIAKGGEAVVVDAQVVSSKTALEMSHERKVEKYRSCNDLAAAVAERTGVPRNNVRFTAITISWQGVWSSRSESELRGLGLTSAQLRTLTTRVLWGSWLETF

SEQ ID NO: 4676 - protein, 996 aa, Nylanderia fulva
MARGLRASARLSERARGAEDPDGVAAGPSRTTIRTSQAEVDSLEEEMVSCEHCSARFRNMRGLGVHKVRAHPLQANSAINVDRVKARWSVEETRLMARAEAEGTLAGEPFINQYLETRFPNRSLEAIKGKRRQEPYRVMVRDFCQEIQSRRAIVIDEGDRDGAVMTRADTIPAAIEASTDDQSAHQPPPEQSSQRLRDKIQSLVEQSAAFRSYEADTLAGTARDALTAGRVDVLAIERWLGMIFPRPLQVRPPQRVSAKKHCPPVKRESKEQKRKREYAIVQSLYRKNKKSCLSRILEGDSVRERPSAVEFLNCWRPIMEASSGADGDMTDLRESFGEAAQAASAGRGRTSGPRGIHLEGLGDGAATDPVPVADKTLLWDPITPAEVNRISVRTGTAPGLDQITPRMWNAVPAILRALLFNLLLLAETIPSSIATTRTVFLEKGGMSDRPGPTEYRPLSIGSVIIRHFHKILAKRLAALDIFDRRQRGFRPVDGVCENVTVLSSVLWDARRRCRSLHVACVDLSKAFDTVAHAAIHTTLDELGLPREFREYVRAVYSNALTELQGVSAKEVSAIKIGRGVRQGDPLSPLLFNLVVDRALGILSEDVGYRLGGRLINALGYADDIVLLASTRDGLQENLTRLHDAFMRNGLEINARKTGVLSMVASGRDKKVKVDTTPYFTVGGAMIPQRSLVDVWTYLGCEYTGARELASDPPLAQAIEQLTRAPLKPQQRLRLLRDCLLPRYYHRWTVGTVSAKTLKGKDIIVRTAVRRWLRFPHDVPAGYLHAPIQSGGLGMPLLRTLIPILKHNRLQRLCRSTLPAACAAAETTYVARQLVWCENQMRVRGHRVTTTAELRQQCAAWLRESCDGSGLREVAASNLSSYWVSAGADAIPGADYVHYHHIRANCIPSRARCSRGRDGRDNRCRAGCPETETPAHCVQRCFRTHGGRILRHDDLCRQVGGYLQQKGWRVDAEQAYSTSAGRRRPDLTIAKGVRQWS

SEQ ID NO: 4677 - protein, 1143 aa, Solenopsis invicta
MVSCGAKKDQAMWGALGCQSVCSPTRRNIMNGSKNKCVPGSRMARGLRVPRMNVAAGAEDPDGVVAGPSRTTSGPEAEHGSLNYKCHECPAEFRTKRGLGVHVASAHPLTANNAVNVERVKARWSAEEVSLMARAEAAATLAGGIVFMNQHLEDRFPHRSLEAIKGKRRQEAYRAMVRDFCQEMQTRQAAVIDEGDRADAAMIGADVAPATIETTNTSARRPPPEQRSQRLRDKISQLVEQSLAFRNFEADSLRQVARDALLTGVVDVLAIERWLGAVFPPPAVRPPRRASSRQRSPPTIRENRKQKRMREYAVVQTLYKKNIKSCLSHILEGDSVRKRPSTQEFRDYWRPIMETASTADGDMTALREPYGESGRAASADRIHPSGARGIHLEGLGEGAAAGPASAADKTLLWDPVTTGEVKRISVKIGTAPGLDKITPRMWNSVPVVLRALLFNLLLLARTIPLSIATTRTVFLEKSGMSDRPQPAEYRPLSIGSVIIRHFHKILAKRLAALDIFDSRQRGFRPVDGVCENITVLSTVLGDARRKIKSLHLACVDLSKAFDTVAHKAIHTTLDELGLPEEFREYVRAVYSNARTVVHTSGATEVPALKIGRGVRQGDPLSPLLFNLVVDRALGILSEDVGYRVGGRLVSALGYADDIVLLASTRSGLQENLTRLHAAFVQNGLTINANKTGVLSVVASGRDKKVKIDQTPSFTVGGALIPQRSLLDVWTYLGCMYQGAREFANDPPLAQIIEQLTRAPLKPQQRLRLLRDCLLPRYYHRWVIGTVTAKKLKGVDIQVRAALRRWLRLPHDVPAGYFHAPIQSGGLGMPLLKVFIPILKHNRLQRLCRSDLPAARAAAESTYVARQLVWCENQMRLRGDRVTTTAELRQQCASWLHESCDGRGLREVGSSKLSSHWVSGGADAIPGADYVHYHHIRANCIPSRARLSRGREGRDVRCRAGCPDIETPAHCVQRCFRTHGGRILRHNDLCRQVGGFLQQKGWHVDAEKAYSTTAGLRRPDLTIARGDEVVVVDAQVVSSETALEVSHERKVEKYRSCNDLADLVAAQAGVPRDNVRFTALTISWRGVWSSQSEDEMRGLGLTSGQLRGLTTRVLWGSWLNWKRFNAITTRYGRNIAATGAGTGT

SEQ ID NO: 4678 - protein, 1152 aa, Nylanderia fulva
MVSCGAKKDRGFLGGSRLSIRLPPYTQLIMERNLNENTVPGSRMARGLRASARLSERARGAEDPDGVAAGPSRTTIRTSQAEVDSLEEEMVSCEQCSARFRNMRGLGVHKVRAHPLQANSAINVDRVKARWSVEETRLMARAEAEGTLAGELFINQYLETKFPNRSLEAIKGKRQQEPYRVVVRDFCQKIQSRRAIVIDEGDRDGAVMTRADTIPAATEASTDDQSAHQPPPEQSSQRLRDKIQSLVEQSAAFRSYEADTLAGTARDALTAGRVDVLAIERWLGMIFPRPLQVRPPQRLSAKKHCPPVKRESREQRRKWEYAIVQSLYKKNKKSCLSRILEGDSVRKRPSAVKFFNCWRLIMEASSGADGDMTDLRESFGEAAQAASAGRGRTSGLRGIHLEGLGDGAATDPVPVADKTLLWDPITPAEVNRISVRTGTAPGLDQITPRMWNAVPAILRALLFNLLLLAETIPSSIATTRTVFLEKGGMSDRPGPTEYRPLSIRSVITRHFHKILAKRLAALDIFDKRQRGFRPVDGVCENVTVLSSVLWDARRRCRSLHVACIDLSKAFDTVAHAAIHTTLDELGLPREFREYVRAVYSNALTELQGVSAEEVSAIKIGRGVRQGDPLSPLLFNLVVDRALGILSKDVGYRLSGRLINALGYADDIVLLASTRDGLQENLTRLHDAFMRNGLEINARKTGVLSMVASGRDKKVKVDTTPYFTVGGAMIPQRSLVDVWTYLGCEYTGARELASDPPLAQAIEQLTRAPLKPQQRLRLLRDCLLPRYYHRWTVGTVSAKTLKGKNIIVRTAVRRWLRFPHDVPAGYLHAPIQSGGLGMPLLRTLIPILKHNRLQRLCRSTLPAACAAAETTYVARQLVWCENQMRVRGHRVTTTAELRQQCAAWLRESCDGSGLREVAASNLSSYWVSAGADAIPGADYVHYHHIRANCIPSRARCSRGRDGRDNRCRAGCPETETPAHCVQRCFRTHGGRILRHDDLCRQVGGYLQQKGWRVDAEQAYSTSAGRRRPDLTIAKGGEAVVVDAQVVSSETALEMSHERKVEKYRSCNDLAAAVAERTGVPRNNVCFTAITISWQDVWSSRSESELRGLGLTSAQLRTLTTRVLWGSWLNWKRFNAMTSRYNERRRNVASSGGA

SEQ ID NO: 4679 - protein, 1040 aa, Monomorium pharaonis
MMEQNNRLNVPGSRMARGLRVQSECSASAEDPDGVVSGSRRSTSDGALNTAEHGSHNRAEAEHGSQESYSCGHCPKEFRTKSGLGLHVARAHIEVANRAVNVERVKARWSVEEVRLMARAEATATLAGDVLFMNQHLQERIPDRSLEAIKGKRRQEAYREMVRGFCQEMRQRCTMGSAADIDEGDRTDEAMIGAESVPITAMETAINERSNDPSAHQPPPGQSSQRLRDHIQLLIEQSTAVRGFEADTLVGTARDALLSGAVDVHAIERWLGKIFPPAVQVRPPQRAKTRRPGPHPTVRENKKRKRKREFAVTQSLYKKNKKTCLAHILEGDSGRKRPSAVEFCDYWRPVMEATGVADGDMTALRNRFRVEDRMASASQSLPSGARGIHLEGLGEGAVADPVNAMDRILLWDPITTAEIRRISVKTGTAPGLDQITPRMWNAVPFVLRALLFNLLLLAREVPMSIATTRTVFLEKGGMSAVPAPAEYRPLSIGSVVLRHFHKIIAKRLAALDIFDARQRGFRPVDGVCENVTVLSAVLGDARRQRRTLHLACVDLSKAFDTVSHAAIHTTLDELGLPREFREYVRAVYSGARTVLHMSGTKEVSAIKVGRGVRQGDPLSPLLFNLVVDRALGILSEDVGYRMGGRLVSALGYADDIVLLASTKAGLQENLTRLHEAFMRNELSINAKKTGVLSMVASGRDKKVKVDTTPYFTVGGALIPQRSPVDVWAYLGCMYQGAREYANVPPLAHSIELLTRAPLKPQQRLRLLRDHLLPRYYHRWIVGSVSAKTLKGVDVTVRNATRRWLRFPHDVPAGYLHAPIQSGGLGMPLLKVLIPILKHSRLQRLCRSTLPAARAAAESTYVARQLVWCENQMRVRGNRVTTTAELREQCTAWLRESCDGNGLREVVSSKLSSHWVSGGADAIPGADYVHYHHIRANCVPSRARVSRGREGREVRCRAGCPEIETTAHCVQRCFRSHGGRILRHNDLCRQIGGFLQQKGWHVDAELAYSTSAGLRRPDLTIVKGDEAVGRRRASSVLRNSA

SEQ ID NO: 4680 - protein, 1154 aa, Nylanderia fulva
MVSCGAKKDRGFLGGSRLSIRLPPYTQLFMERNLNENTVPGSRMARGLRASARLSESARGAEDPDGVAAGPSQTTIRTSQAEVDSLEEEMVSCEQCSARFRNMRGLGVHKVRAHPLQANSAINVDRVKARWSVEETRLMARAEAEGTLAGELFINQYLETRFPNKSLEAIKGKRQQEPYRVMVRDFCQEIQSRRAIVIDEGDRDGAVMTRADTIPAATEASTDDQSAHQPSPEQSSQRLRDKIQSLVEQSAAFRSYEADTLAGTARDALTAGRVDVLAIKRWLGMIFPRPLQVRPPQRVSAKKHCPPVKRESREQRRKREYAIVQSLYKKNKKSCLSRILEGDSVRKRPSAVEFFNCWRPIMEASSGADGDMTDLRESFEEAAQAASAGRGRTSSLRGIHLEGLGDGAATDPVPVADKTLLWDSITPAEVNRISVRTGTAPGWTRLRRGCGTLFLRFFVRFCSICCSWQRRSPRQSPQPERWPQLLEKGGMSDRPGPTEYRPLSIRSVITRHFHKILAKRLAALDIFDKRQRGFRPVDGVCENVTVLSSVLWDARRRCRSLHVACVDLSKAFDTFAHAAIHTTLDELGLPREFREYVRAVYSNALTELQGVSAEEVSAIMIGRGVRQGDPLSPLLFNLVVDRALGILSEDVGYRLGNRLINALGYADDIVLLASTRDGLQENLTRLYDAFMRNGLEINARKTGVLSMVASGRDKKVKVDTTPYFTVGGAMIPQRSLVDVWTYLGCEYTGARELASDPPLAQAIEQLTRAPLKPQQRLRLLRDCLLPRYYHRWTVGTVSAKTLKGKDIIVRTAVRRWLRFPHDVPAGYLHAPIQSGGLGMPLLRTLIPILKHNRLQRLCRSTLPAACAAAETTYVARQLVWCENQMRVRGHRVTTTAELRQQCAAWLRESCDGSGLREVAASNLSSYWVSAGADAIPGADYVHYHHIRANCIPSRARCSRGRDGRDNRCRAGCPETETPAHCVQRCFRTHGGRILRHDDLCRQVGGYLQQKGWRVDAEQAYSTSAGRRRPDLTIAKGGEAVVVDAQVVSSETALEMSHERKVEKYRSCNDLAAAVAERTGVPRNNVRFTAITISWRGVLSSRSESELRELGLTSAQLRTLTTRVLWGSWLNWKRFNAMTSRYNEGRRNVASSGGA

SEQ ID NO: 4681 - protein, 1014 aa, Nylanderia fulva
MARAEAEGTLAGEPFINQYLETRFPNRSLEAIKGKRRQEPYRVMVRDFCQEIQSRRATVIDEGDRDGAVMTRADTVPAAIEASTDDQSAHQPPPEQSSQRLRDKIQSLVEQSAAFRSYEADTLAGTARDALTAGRVDVLAIERWLGMIFPRPLQVRPPQRVSAKKHCPPVKRESKEQKRKREYAIVQSLYRKNKKSCLSRILEGDSVRERPSAVEFLNCWRPIMEASSGADGDMTDLRESFGEAAQAASAGRGRTSGPRGIHLEGLGDGAATDPVPVADKTLLWDPITPAEVNRISVRTGTAPGLDQITPRMWNAVPAILRALLFNLLLLAETIPSSIATTRTVFLEKGGMSDRPGPTEYRPLSIGSVIIRHFHKILAKRLAALDIFDRRQRGFRPVDGVCENVTVLSSVLWDARRRCRSLHVACVDLSKAFDTVAHAAIHTTLDELGLPREFREYVRAVYSNALTELQGVSAKEVSAIKIGRGVRQGDPLSPLLFNLVVDRALGILSEDVGYRLGGRLINALGYADDIVLLASTRDGLQENLTRLHDAFMRNGLEINARKTGVLSMVASGRDKKVKVDTTPYFTVGGAMIPQRSLVDVWTYLGCEYTGARELASDPPLAQAIEQLTRAPLKPQQRLRLLRDCLLPRYYHRWTVGTVSAKTLKGKDIIVRTAVRRWLRFPHDVPAGYLHAPIQSGGLGMPLLRTLIPILKHNRLQRLCRSTLPAACAAAETTYVARQLVWCENQMRVRGHRVTTTAELRQQCAAWLRESCDGSGLREVAASNLSSYWVSAGADAIPGADYVHYHHIRANCIPSRARCSRGRDGRDNRCRAGCPETETPAHCVQRCFRTHGGRILRHDDLCRQVGGYLQQKGWRVDAEQAYSTSAGRRRPDLTIAKGGEAVVVDAQVVSSETALEMSHERKVEKYRSCNDLAAAVAERTGVPRNNVRFTAITISWRGVWSSRSESELRELGLTSAQLRTLTTRVLWGSWLNWKRFNAMTSRYNEGRRNVASSGGA

SEQ ID NO: 4682 - protein, 1153 aa, Cardiocondyla obscurior
MTELPGVFGCQIRLPPLRSTRMSDKRNKCNRLGSRMAQDLRERNAASAADPDGVVAGSVQTASGSRVVATDDESSIEIFSCEQCRTQYRTKRGLGAHIAKAHPVAANSAVNTDRVKARWPVEEVRLMARAEAEATSGSGVLFMNQFLHDKFPGRSLEAIKGKRRQEAYREMVRVFCQEISNNEIDDGNRASPTMIRVGTEPVRTDVTYTNIDIDTSAHRSAPEQSSQRLRSSILQAIEQSTSLRSYQADTLRNIAREALRTGEVEFDAIARWLDSIFPPPVVRPPRHALRKTSSKPKKRENREQRIKRLFATTQTLYKRNLKTCLAHILNQGATPERPSNVDLNRYWAPVMEADSPAAGDMTALRLQYGVASQRAGTSRSRPSGARGIHLEGLGEGANADQARAKDKTSLWDPITHIEVERISVKTGTAPGLDQITPRMWNAVPTVLRALLFNLLLFARGVPESIATTRTVFLEKSGMSVRPSPSEYRPLSIGSVIIRQLHKILAKRLAALEIIDERQRGFRPVDGVCENVTVLSAVLGDARGRCRTLHLATVDLSKAFDTVSHKAIHATLEELELPWEFREYVRAVYSNARTVLSGASSSSAIKIGRGVRQGDPLSPLLFNLVVDRALGVLSEDVGYTMGGKRINALGYADDIVLLASTRNGLQENLTRLHAAFSTNGLTINAKKTGVLSLVASGRDKKVKVDTIPHFSVGGVVIPQRSPVEVWTYLGNVYEGTRELANMPPIAKTIGLLNKAPLKPQQRLRLLRDCVLPRYYHRWTVGTVTSKTLKGVDIQVRTAVRRWLRFPHDVPAGYFHAPIQSGGLGMPLLRTLIPILKYNRLRRLCTSTLPAACAAAESTYVARQLVWCENQMRVRGNRVTTTSELRQQCASWLYESCDGSGLREASSSTLSNHWVMAGAGAVPGADYVHYHHVRANCLPSRARLSRGRDGREVQCRAGCPERETSAHCVQRCFRTHGGRIQRHNDLCRQVGNFLQQKGWHVDAEQAYPTTAGRRRPDLTISRGGEAVVVDAQVVSCETALEVSHERKVEKYRSCNDLADRVAERTGVTRNNVRFAAITISWRGVWCSKSERELRALGLTSSQMRSLTTRVLWGSWLNWKRYNSITSRYRTGFNSQYASGAWRRHVELGSAARTAE

SEQ ID NO: 4683 - protein, 1117 aa, Wasmannia auropunctata
MEDRINEFSRPGSRMAWALRASNANVNSADAEASGASGSHRPFNVAEEALPVICEVCGRGFQTVCGLGVHRVKAHPVEANRAVNVDRVKARWSVEEVRLMARAEATATLAGGVLFMNQHLHEKFPHRSLEVVKGKRRNGDYREMVRGFCQEMQSRATDIDEGSGPGAMIGATGDPTTIETTNEHSAHQSVPQQDAERLRSRLLSHIEQSAALQSYRADTLAGTARDALLVGVVDMQAIERWLREIFPPPAVHPPRRASTKQRSPPSKRESRKQIRKREFAKVQILYRKNLKTCLSYVLDGGSERVRPSPSEFCDYWRPIMETASVADGDMTGLRELYGEPTQVASAGRSHPPGARGIHLEGFGEGAAVDRGQAAGRTSLWDPISDLEVDRISVRTGTAPGLDGITPRMWNAVPVTLRALLFNLLLLAETAPSLIATTRTVFLEKGGMPDRPGPSDYRPLSIGSVIIRHFHKILATRLSALDIFDKRQRGFRPVDGVCENITVLSAVLGDARKRCKSLHVACVDLSKAFDTVAHSAIHKTLHDLDLPREFLKYIRAVYEDARTELQTSEEVSSIKIGRGVRQGDPLSPPLFNLVVDRALGVLSEDVGYRMGGRLISALGYADDIVLLASTKVGLQENLTRLHAAFKQNGLEVNAKKTGVLSMVASGRDKKMKIDMEPYFTVGGALIPQRSPIDVWTYLGCMYKGAREVANVPPLAQTIELVTKAPLKPQQRLRLLRDCILPRYYHRWVLGAISAKTLKGVDVLVRGAVRRWLRFPHDVPAGYFHAPIQSGGLGMPLLKTLIPILKHDRLRRLCQSTLPAACAAAESTYVAKQLVWCENQMRVRGNRVSTTAQLRQQCAAWLRESCDGNGLREVESSKLSSYWVAQGADAVPGADYVHYHYIRANCIPSRARVSRGRDGRDVRCRAGCPETETPAHCVQRCFRTHGGRILQHNDLCHRVDGFLQQKGWHIDAELAYSTSVGLRRPDLTIVKGGEAVVVDAQVVSSETALTVSHERKVEKYRSCEDLADRVAEHTGVPRNNVRFTALTISWRGVWCPQSEGQMRRIGLTSGQLRNLTTRVLWGSWLNWRRFNSITTRYQRRRSNDNGGGASPRIAPDGSA

SEQ ID NO: 4684 - protein, 1125 aa, Cardiocondyla obscurior
MVSCKNGGAKNDRASRGFRLSIRSPPSCSKRMSKKQNEKHCMGSRMAQNLRERNAASAADPNGVVAGSMQTTSGSRVVATVDESSIETFSCEQCWTQYRTKRGLGAHIAKAHPVAANSAVKIDRVKARWPVEEVRLMARAEAEATSRSGVLFMNQYIHDKFPGRSLEVIKSKRRQEAYREMVRVFSQEISNNEIDDGNRASPTMIGVGTEPVRTDKTYTIIDTGTSAHRPAPEQSSQKLRSNILQAVERSTSFRSYQADTLRSIAREALRAGEVEFDAIARWLDSIFPPPVVRPPRHALRKTSSNPQKRENREQKKKRLFATTQTLYKRNFKTCLAHILNQGATPERPSNVDLNRYWAPVMEVTSPAEGDMTALRLQYGVASQRAGTSRSRPSGARGIHLEGLGEGANADLVTAENKTSLWDPIIHIEVERISVKTGTAPGLNQITPRMWNAVPTILRVLLFNLLLFARGVPESIATTRTVFLEKSGMSERPSPSEYRPLSIGSVIIRQLHKILAKRLAALDIIDTRQRGFRPVDGVCENVTVLSAVLGDARSRCRSLHLATIDLSKAFDTVSHNAIHTTLEELGLPWEFREYVRAVYSSARTVLSGASSSSAIKIGRGVRQGDPLSPLLFNLVVDRALGVLSEDVGYTMGGKRINALGYADDIVLLASTRNGLQENLTRLHAAFSTNGLTINAKKTGVLSLVASGRDKKVKVDTVPHFSVGGVVLPQRSPVEVWSYLGNVYEGTRELANIPPVAKTIGLLTKAPLKPQQRLRLLRDCVLPRYYHRWTVGTVTSKTLKGVDVQIRTAVRRWLRFPHDVPAGYFHAPIQSGGLGLPLLRTLIPILKYNRLRRLCTSTLSAACAAAESTYVARQLVWCENQMRVRGNKVTTTSELRQQCADWLYGSCDGSGLREASSSTLSNHWVMAGAGAVPGADYVHYHHVRANCLPSRARLSRGRDGREVQCRAGCPERKTSAHCVQRCFRTHGGRIQRHNDLCRQVGNFLQQKGWHVDAEQAYPTTAGRRRPDLTISRGEETVVVDAQVVSCETALEVSHERKVEKYRSCNDLADRVAERTNVTRNNVRFAAITISWRGVWCSKSERELRALGLTSSQMRSLTTRVLWGSWLN

SEQ ID NO: 4685 - protein, 799 aa, Crematogaster levior
METPSEADGDMTALRESYGTSTQVASAGRSLPPRARGIHLEGLGEGAAADPVLAVDKSSLWGPITPAEVKGTSVKTGTAPGLDQITPRMWDAVPPDLRALLFNLLLLAGTVPWSLTATRTVFLEKGGISERTGPAEYRPLSIGSVIARHLHKILAKRLAALDIFDNRQRGFRPVDGVCENVTVLSAVLDDARRHCRTLHLACVDVSKAFDTVAHDAIHATLQELGLPREFREYVRAVYSSARTVIHGTGSGTDEGAAIKIGRGVRQGDPLSPLLFNLVVDRALGILSEDVGYRMGARLISALGYADDIVLLASTRNGLQENLTRLDNAFKVNGLNINAKKTGVLSMVASGRDKKVKIDITPNFTLGGAWITQRSPVDVWAYLGCMYQGAREYANDPPLAQAIEQLTRAPLKPQQRLRLLRDCLLPRYYHRWVVGTVSAKTLKGMDIVVRTAVRRWLRFPHDVPAGYFHAPIQSGGLGMPLLKTLIPILKYNRLRRLCRSTLPAACAAAETTYVARQLVWCENQMRVRGSRVTTTAELRQHCTAWLRESCDGNGLREAENSAKLSSYWVSGGADSIPGADYVHYHHIRAQCIPSRARVSRGREGRNVHCRAGCLEIETPAHCVQRCFRTHGGRILRHNDLCRQVGNFLQQKGWQVDAELAYSTSAGLRRPDLTIAKGGEAVVVDAQVVSSETALNVSHERKVHKYRSSDDLADLVANRTGVPRENVRFTALTISWRGVWSSRSEEEMRRLGLTTGQLRTLTTRVLWGSWLNWKRFNGITTRYMAGRSMASAASGAWTEGT

SEQ ID NO: 4686 - protein, 1149 aa, Crematogaster levior
MERINDDTLPGSRMARVLRARVRGRAVVAADPDGVVAGSSRQTAGEAMAEGSSQDTAEHGSQVVEQGNQNNMFRCEHCPGEFRTKRGLGVHVVRAHPLVANSAVDVERVKARWPAEEVSLMARAEATATSAGEVLFMNQHLQRYFPNRSLEAIKGKRRQEAYREMVRGFCQEILSRRTTVIDEGDGAGAAMIGADAAPATIETGHEENAPRPAPEQSSQRLRDTIRNIIEHSPASRRAYQADTLVAIAREALLSGVVNVEAIERWIGAIFPPTAVRPPQRASAKRRSPPGTHDKREPRENRKQRRRREFAHVQTLYKKNLKTCLSHVLGGGSVRERPSAVEFRDYWRPIMATPSEADGDMTALRESYGTSTQVTACASRSLPPRARGIHLEGLGEGAAADPVPAVDKSSLWGPITPAEVKGTSVKTGTAPGLDQITPRMWNAVPPDLRALLFNLLLLAGTVPWSLTATRTVFLEKGGISERTGPAEYRPLSIGSVIARHLHKILAKRLAALDIFDNRQRGFRPVDGVCENVTVLSAVLDDARRHCRTLHLACVDVSKAFDTVAHDAIHATLQELGLPREFREYVRAVYSSARTVIHGTGSGTDEGAAIKIGRGVRQGDPLSPLLFNLVVDRALGILSEDVGYRMGARLISALGYADDIVLLASTRNGLQENLTRLDNAFKVNGLNINAKKTGVLSMVASGRDKKVKIDITPNFTLGGAWITQRSPVDVWAYLGCMYQGAREYANDPPLAQAIEQLTRAPLKPQQRLRLLRDCLLPRYYHRWVVGTVSAKTLKGMDIVVRTAVRRWLRFPHDVPAGYFHAPIQSGGLGMPLLKTLIPILKYNRLRRLCRSTLPAACAAAETTYVARQLVWCENQMRVRGSRVTTTAELRQHCTAWLRESCDGNGLREAENSAKLSSYWVSGGADSIPGADYVHYHHIRAQCIPSRARVSRGREGRNVHCRAGCLEIETPAHCVQRCFRTHGGRILRHNDLCRQVGNFLQQKGWQVDAELAYSTSAGLRRPDLTIAKGGEAVVVDAQVVSSETALNVSHERKVHKYRSSDDLANLVANRTGVPRENVRFTALTISWRGVWSSRSEEGMRRLGLTTGQLRTLTTRVLWGSWLNWKRFNGITTRYMAGRSIAPAASGAWTEGT

SEQ ID NO: 4687 - protein, 1149 aa, Crematogaster levior
MESINDETLPGSRMARVLRARVRGRAVVAADPDGVVAGSSRQTAGEAMAEGSSQDTAEHGSQVVEQGNQNNMFRCEHCPGEFRTKRGLGVHVVRAHPLVANSAVDVERVKARWPAEEVSLMARAEATATSAGEVLFMNQHLQRYFPNRSLEAIKGKRRQEAYREMVRGFCQEILSRRTTVIDEGDGAGAAMIGADAAPATIETGQEENAPRPAPEQSSQRLRDVITNIIEHSPASRRAYQADTLVAIAREALLSGVVNVDAIERWIGAIFPPTAVRPPQRASAKRRSPPGTHDKREPRENRKQRRRREFAHVQTLYKKNLKTCLSHVLGGGSVRERPSAVEFRDYWRPIMATPSEADGDMTALRESYGTSTQVAACASRSLPPRARGIHLEGLGEGAAADPVPAVDKSSLWGPITPAEVKGTSVKTGTAPGLDQITPRMWNAVPPDLRALLFNLLLLAGTVPWSLTATRTVFLEKGGISERTGPAEYRPLSIGSVIARHLHKILAKRLAALDIFDNRQRGFRPVDGVCENVTVLSAVLDDARRHCRTLHLACVDVSKAFDTVAHDAIHATLQELGLPREFREYVRAVYSSARTVLHGIGSGTDEGAAIKIGRGVRQGDPLSPLLFNLVVDRALGILSEDVGYRMGARLISALGYADDIVLLASTRNGLQENLTRLDNAFKVNGLNINAKKTGVLSMVASGRDKKVKIDITPNFTLGGAWITQRSPVDVWAYLGCMYQGAREYANDPPLAQAIEQLTRAPLKPQQRLRLLRDCLLPRYYHRWVVGTVSAKTLKGMDIVVRTAVRRWLRFPHDVPAGYFHAPIQSGGLGMPLLKTLIPILKYNRLRRLCRSTLPAACAAAETTYVARQLVWCENQMRVRGSRVTTTAELRQHCTAWLRESCDGNGLREAENSAKLSSYWVSGGADSIPGADYVHYHHIRAQCIPSRARVSRGREGRNVHCRAGCLEIETPAHCVQRCFRTHGGRILRHNDLCRQVGNFLQQKGWQVDAELAYSTSAGLRRPDLTIAKGGEAVVVDAQVVSSETALNVSHERKVHKYRSSDDLANLVANRTGVPRENVRFTALTISWRGVWCSRSEEEMRGLGLTTGQLRTLTTRVLWGSWLNWKRFNGITTRYMAGRSIAPAASGAWTEGT

SEQ ID NO: 4688 - protein, 1048 aa, Crematogaster levior
MTDRIIENTLPGSRMARVLRARVRGRAVVAADPDGVVAGSSRQTAGEAMAEGSSQDTAEHGSQVVEQGNQNNMFRCEHCPGEYRTKRGLGVHVVRAHPLVANSAVDVERVKARWPAEEVSLMARAEATATSAGEVLFMNQHLQRYFPNRSLEAIKGKRRQEAYREMVRGFCQEILSRRTTVIDEGDGAGAAMIGADAAPATMETGQEENAPRPAPEQSSQRLRDVITNIIEHSPASRRAYQADTLVAIAREALLSGVVNVDAIERWIGAIFPPTAVRPPQRASAKRRSPPGTHDKREPRENRKQRRRREFAHVQTLYKKNLKTCLSHVLGGGSVRERPSAVEFRDYWRPIMATPSEADGDMTALRESYGTSTQVAACASRSLPPRARGIHLEGLGEGAAADPVPAVDKSSLWGPITPAEVKGTSVKTGTAPGLDQITPRMWNAVPPDLRALLFNLLLLAGTVPWSLTATRTVFLEKGGISERTGPAEYRPLSIGSVIARHLHKILAKRLAALDIFDNRQRGFRPVDGVCENVTVLSAVLDDARRHCRTLHLACVDVSKAFDTVAHDAIHATLQELGLPREFREYVRAVYSSARTVLHGIGSGTNEGAAIKIGRGVRQGDPLSPLLFNLVVDRALGILSEDVGYRMGARLISALGYADDIVLLASTRNGLQENLTRLDNAFKVNGLNINAKKTGVLSMVASGRDKKVKIDITPNFTLGGAWITQRSPVDVWAYLGCMYQGAREYANDPPLAQAIELLTRAPLKPQQRLRLLRDCLLPRYYHRWVVGTVSAKTLKGMDIVVRTAVRRWLRFPHDVPAGYFHAPIQSGGLGMPLLKTLIPILKYNRLRRLCRSTLPAACAAAETTYVARQLVWCENQMRVRGSRVTTTAELRQHCTAWLRESCDGNGLREAENSAKLSSYWVSGGADSIPGADYVHYHHIRAQCIPSRARVSRGREGRNVHCRAGCLEIETPAHCVQRCFRTHGGRILRHNDLCRQVGNFLQQKGWQVDAELAYSTSAGLRRPDLTIAKGGEAVVVDAQVVSSETALNVSQ

SEQ ID NO: 4689 - protein, 1142 aa, Harpegnathos saltator
MKGTNKETYRTGSRMARALREREGESVEVSADEGQRPYSVRLRSRTAQTAEAGAVEQPLAMEQPKVACEHCGREFRTKRGLGVHVRSAHLMEANNAIDVERTRARWPVEEVRLMARAEAAATSAGVLFMNFHLHDKFPHRTLGAIKGKRRQEAYKEMVRVFSQEVASTAGGGGEDDEGNEGSGAARINEPTGPQLAHGTTNLNDAHGPLIPYQNDERLLDVIRELCEACTRFSCYEVPSLAEIASDTLATGVVDVHAIERWLGKIFPGRRKVQPPRGVKQKSHSLPKIENEKQRRVQRYAVVQNLYRKNLKSCLAHILDGDSKSSRPSAVEFGSYWRPLMEATSDADGDMTSMKESYRGAKGVAGASRRHPPGARGIHLEGLGEGATEVQRQQVDKSTLWNPITAAEVARISVKTGTAPGLDGITAREWNRVPDLVRALLFNLLLFAREAPASISVTRTVFLEKGGMPERPAPSDYRPLSIGSVVLRHLHKILAYRLTALDVIDNRQRGFRPVDGVCENVAVISAVLADARKHCKTVHIACVDVSKAFDTVSHKAIVRALEELELPIGFREYIQAVYNNAQTVLCPISSNEEVSRIQLGRGVRQGDPLSPMLFNLVVDRALGVLSEDVGYCLRNRVVGALGYADDIVLLSSTRVGLQENLSRLQAAFQCSGLTVNAKKTGVLSLVASGRDKKVKVDMTPYFTVGGALIPQRSPVEVWRYLGSAFQGAREYATVPPLAQYIERVGKAPLKPQQKLRLLRECLLPRYYHQWTVGSITAKILRGADIQVRTAVRRWLRLPHDVPVGYFHAPIQSGGLGLPLLRTFIPILKHNRLQKLCKSTVPAACAAAETMYVAKQLVWCENQMRVRGVRVCTNSELRQQCAAQLYESCDGSGLREVCSSGLNSRWVAADAAAIPGADYVHYHHIRANCLPSRARVSRGRSGREVRCRAGCPEVETPAHCVQRCFRTHGGRILRHNDLCRQVGGFLEQKGWHVDAELAYSTSAGRRRPDLTISRGDKAVVVDAQVVSSETALDVSHMRKVEKYRANDDLADRVAEHAGVPRNNVSFTALTISWRGVWSPRSEVEMRSLGLTPRQLRTLTTRVLWGSWLNWKRFNAITTRYSWRRQHSNNRDSGRPPECAHLRSE

SEQ ID NO: 4690 - protein, 968 aa, Pogonomyrmex californicus
MVREFCHDVHSLAEDDEGTGTGEAMIGAAGVPTTIETQVRLVEQSCARQPVPQQSSERLREHIGGLISKNESLRSFEVDTLLDIARDALVGEVDLHAIERWLERIFPPPNVYPPRREPTRERGYPKKRKNREQRKKREYAQVQTLYKKNLKFCLSHILEDGSERTRPSAVEFCDYWRPLMEASSVANGDMTELRELYGEATQEAGASRSHPSRGIHLEDLDEGAAANPGSATDKTSLWDPILATEVARISVRNGTAPGLDGITPRAWNAVPVSLRALVFNLLLLAKTAPLSITTTRTVFLEKGGMSDKPGPSEYRPLSIGSVIIRHLHKILAKRLAALDIFDNRQRGFRPVDGVCENITVLSSVLGDARRRCKSLHVACVDLSKAFDTVSHAAIHRTLEELGLPREFREYVRAIYTEARTVLQPTGGLRISPIHVGRGVRQGDPLSPLLFNLVVDRRSLGILSEDVGYRLESRLINALGYADDIVLLSSTKIGLQENLTRLHAAFLQNGLTINARKTGVLSMVASGRDKKVKVDMTPYFTMGGALIPQRSPVDVWTYLGDMYQGAREYANVPPLANSIRQITKAPLKPQQRLRLLRDCLLPRYYHRWIIGTITSKILKEMDVLLRAAVRRWLRLPHDVPAGYFHAPIQSGGLGMPLLRTFIPILKHNRLQRLCRSTLPAACAAAETTYVARQMVWCDNQMRVRGNRVTTTAELKQQCAAWLCESCDGGGLREVGSSKLSSHWVSAGADAIPGADYVHYHHVRINSLPSRARVSRGREGRNVRCRAGCPDTETPAHCVQRCFRTHGGRILRHNDLCRKVGGFLQQKGWQVDAELAYSTSAGRRRPDLTIAKNGEAVVVDAQVVSSETALSVSHERKVEKYRSNDDLADRVAEHAGVPRNNVRFTAITISWRGVWCSQSEREMRALGLTSGQLRSLTTRVLWGSWMNWRRFNEITSRYSARWRPNIDSGA

SEQ ID NO: 4691 - protein, 1082 aa, Harpegnathos saltator
MEQPKVACEHCGREFRTKRGLGVHVRSAHLMEANNAIDVERTRARWPVEEVRLMARAEAAATSAGVLFMNFHLHDKFPHRTLGAIKGKRRQEAYKEMVRVFSQEVASTAGGGGEDDEGNEGSGAARINEPTGPQLAHGTTNLNDAHGPLIPYQNDERLLDVIRELCEACTRFSCYEVPSLAEIASDTLATGVVDVHAIERWLGKIFPGRRKVQPPRGVKQKSHSLPKIENEKQRRVQRYAVVQNLYRKNLKSCLAHILDGDSKSSRPSAVEFGSYWRPLMEATSDADGDMTSMKESYRGAKGVAGASRRHPPGARGIHLEGLGEGATEVQRQQVDKSTLWNPITAAEVARISVKTGTAPGLDGITAREWNRVPDLVRALLFNLLLFAREAPASISVTRTVFLEKGGMPERPAPSDYRPLSIGSVVLRHLHKILAYRLTALDVIDNRQRGFRPVDGVCENVAVISAVLADARKHCKTVHIACVDVSKAFDTVSHKAIVRALEELELPIGFREYIQAVYNNAQTVLCPISSNEEVSRIQLGRGVRQGDPLSPMLFNLVVDRALGVLSEDVGYCLRNRVVGALGYADDIVLLSSTRVGLQENLSRLQAAFQCSGLTVNAKKTGVLSLVASGRDKKVKVDMTPYFTVGGALIPQRSPVEVWRYLGSAFQGAREYATVPPLAQYIERVGKAPLKPQQKLRLLRECLLPRYYHQWTVGSITAKILRGADIQVRTAVRRWLRLPHDVPVGYFHAPIQSGGLGLPLLRTFIPILKHNRLQKLCKSTVPAACAAAETMYVAKQLVWCENQMRVRGVRVCTNSELRQQCAAQLYESCDGSGLREVCSSGLNSRWVAADAAAIPGADYVHYHHIRANCLPSRARVSRGRSGREVRCRAGCPEVETPAHCVQRCFRTHGGRILRHNDLCRQVGGFLEQKGWHVDAELAYSTSAGRRRPDLTISRGDKAVVVDAQVVSSETALDVSHMRKVEKYRANDDLADRVAEHAGVPRNNVSFTALTISWRGVWSPRSEVEMRSLGLTPRQLRTLTTRVLWGSWLNWKRFNAITTRYSWRRQHSNNRDSGRPPECAHLRSE

SEQ ID NO: 4692 - protein, 803 aa, Harpegnathos saltator
MEATSGADGDMTSMKESYRGARGVAGVSRRHPPGARGIHLEGLGEGATEVQRQQVDKSTLWNPITAAEVARISVKTGTAPGLDGITAREWNRVPDLVRALLFNLLLFAREAPASISVTRTVFLEKGGMPERPAPSDYRPLSIGSVVLRHLHKILAYRLTALDVIDSRQRGFRPVDGVCENVAVISAVLADARKHCKTVHIACVDVSKAFDTVSHKAIVRALEELELPIGFREYIQAVYNNAQTVLCPISSNEEVSRIQLGRGVRQGDPLSPMLFNLVVDRALGVLSEDVGYCLRNRVVGALGYADDIVLLSSTRVGLQENLSRLQAAFQCSGLTVNAKKTGVLSLVASGRDKKVKVDMTPYFTVGGALIPQRSPVEVWRYLGSAFQGAREYATVPPLAQYIERVGKAPLKPQQKLRLLRECLLPRYYHQWTVGSITAKILRGADIQVRTAVRRWLRLPHDVPVGYFHAPIQSGGLGLPLLRTFIPILKHNRLQKLCKSTVPAACAAAETMYVAKQLVWCENQMRVRGVRVCTNSELRQQCAAQLYESCDGSGLREVCSSGLNSRWVAADAAAIPGADYVHYHHIRANCLPSRARVSRGRSGREVRCRAGCPEVETPAHCVQRCFRTHGGRILRHNDLCRQVGGFLEQKGWHVDAELAYSTSAGRRRPDLTISRGDKAVVVDAQVVSSETALDVSHMRKVEKYRANDDLADRVAEHAGVPRNNVSFTALTISWRGVWSPRSEVEMRSLGLTPRQLRTLTTRVLWGSWLNWKRFNAITTRYSWRRQHSNNRDSGRPPECAHLRSE

SEQ ID NO: 4693 - protein, 1148 aa, Dinoponera quadriceps
MDRTNIKIPRSGSRMARPLHDRGDRANDDEVRGDAVGGQCSGVRTRARANKEKAHREPPVYAEVAQEAVVEPEPPVLLVCEHCDREFRNMRGMGVHVRHAHPIEANNAVNVERVKARWPAEEVRLMARAEAVATSAGGIIFMNQHLHEKFPQRTLEAIKGKRRAEAYKEMVRSFMHDVVVSDDDDECTGAGPAMTLEAAEPRTATESAKVPSAPVPVVLPHQNDERLRNAIRELIELSSRFRSYEAESIRAIANDSLAGTVDVHAIERWLIKIFPRPKVHPPQRRKQKQHSPPKNRENREQKRKREFAIVQNLYRKNLKSCLSHVLEGDSQRDRPSPVEFDRYWRPLMEETSAADGDMAALRWSYRVRQGVRVRQRVTTRARGIHLEGLGDGANEGSGPSGDKSLLWGPITPAEIERISVRSGTAPGVDGVTVREWNVVPASLRALLFNLLLLAREAPPSIAATRTVFLEKGGMPDRPMPSDYRPLSIGSVVLRHFHKILAQRLTALNIVDVRQRGFRPVDGVCENVTVLSAVLSEARKRCQSIHVACVDLSKAFDTVSHAAINRTLKDLDLPLGFREYIGAVYSNARTIFQPNVSVCETSMIQLGRGVRQGDPLSPLLFNLVVDRALGVLSEDVGFQIGGRVVGVLGYADDIVLLSSTRNGLQENLTRLHAAFQCNGLSINARKTGVLSVVASGRDKKVKVDMTPYFTVGGALIPQRSPVEVWTYLGNTYQGAKEFASVPPLVHSIEQLSKAPLKPQQRLRLLRDCLLPRYYHRWIVGTITAKTLRGADILVRAAVRRWLRLPHDVPVGYYHAPIQSGGLGMPLLRATIPILKHNRLQRLCRSALPAACAAAETSYMARQLVWCENQMRVSGTRVSTTDELRRLCTALLYGSCDGSGLREVGSSKLSSHWVSAGAAAIPGADYVHYHHVRVNSLPSRARVSRGREGREVRCRAGCPERETPAHCVQRCFRAHGGRILRHNDLCRRVGGFLKQKGWHVDAELAYSTSAGRRRPDLTISKGDEAVVVDAQVVSSETALNVAHMRKVEKYRSNEDLVDRVAGYAGVPRNNVRFTALTISWRGVWSPESEREMRRLGLTSGQLRSLTTRVLWGSWMNWRRFNAITTRFDTRHRANNSETRSAPPDASSRME

SEQ ID NO: 4694 - protein, 1122 aa, Temnothorax curvispinosus
MESQRMYVKPPGSRMARVLRARCASDSAIGAEVPDGVVAGPSRTRSRAMSDVIEGTETFSCEFCPREFRTMRGLSLHVTKTHPVVANSAVDVERVKARWSVEEVRLMARAEATATLAGIIFMNPHLQDKFPHRSLEAIKGKRRQEAYREMVRVFCQEMQSRNAVGIDKGDRDGAAMIRAAAGPATIGSDTVDPSAHQPSPEQRSQRLRDIINQLIEQSSASRSYQADTLVGIARDALLTGVVDVQAIERWLTLIFPPSAVRPPRRALTKQRNPPNTKESRKQKIKREYAHVQTIYKKSPKACLSHVLEGGLERERPSAVEFDAYWRPVMEASSGADGDMTALRESYGEAGRVARTSRSRPPTARGIHLEGLGEGAATGPTRAADKASLWDPIKPIEVRRISIKTGTAPGLDQITPRMWNAVPLVLRALLFNLLLLARTVPSSIATTRTVFLEKGGMSDRPSPAEYRPLSIGSVVVRHFHKILAKRLAALNVFDTRQRGFRPVDGVCENVTVLSAVLGDARRRCRTLHLACVDLSKAFDTVSHPAIHRTLEELELPWEFREYIRAVYSDAQTVIGSVTNNVSAIKIGRGVRQGDPLSPLLFNLVVDRALAILSEDVGYQLGDELISALGYADDIVLLASTRSGLQENLTRLQAAFARNGLTINAKKTGVLSMVASGKDKKVKIDTTPYFTVGGALIPQRSPVEIWAYLGCMYEGAREFANDPPLAHSIELLTKAPLKPQQRLRLLRDFLLPRYYHRWIVGTVTAKTLRGVDIMVRKAIRRWLRFPHDVPAGYFHAPIQSGGLGLPLLKTLIPILKFDRLQRLCRSTLPAARAAAETTFVARRLVWCENQMRIRGNRVLTTAELRQQCAAWLRESCDGNGLREAETSKLSSHWVSAGADLIPGADYVHYHHIRANCILSRARVSRGRDGREVRCRAGCPDIETPAHCVQRCFRTHGGRILRHNDLCRRVGGFFQQKGWHVDAELAYSTSAGLRRPDLTIAKGDEAVVVDAQVVSSETALEVSHERKVEKYRSCNDLVDRVAERTGVPRDNVRFTAITISWRGVWSPRSEGELRNLGLTPAQLRTLTTCVLWGSWLNWKRFNGITTRYVPGRNVTAISGARRGGT

SEQ ID NO: 4695 - protein, 1122 aa, Temnothorax curvispinosus
MESPRMNVKPPGSRMARVLRARCASDSVVGAEVPDGVVAGSSGTRSRAMSDVIEGTEAFSCEFCPREFRTMRGLSLHVTKTHPVVANSAVDVERVKARWSVEEVRLMARAEATATLAGIIFMNPHLQDKFPHRSLEAIKGKRRQEAYREMVRVFCQEMQSRNAVGIDEGDRDGAAMIRAAAGPATIGSDIVDPSAHQPSPEQRSQRLRDIINQLIEQSSASRSYQADTLVGIARDALLTGVVDVQAIERWLALIFPPSAVRPPRRASTKQRNPPNTKESRKQKRKREYAHVQILYKKSPKACLSHVLEGGSERERPSAVEFDAYWRPVMEASSGADGDMTALRESYGEAGRVARTSRSRPPTARGIHLEGLGEGAATGPTRAADKASLWDPIKPIEVRRISIKTGTAPGLDQITPRMWNAVPLVLRALLFNLLLLARTVPSSIATTRTVFLEKGGMSNRPSPAEYRPLSIGSVVIRHFHKILAKRLAALNVFDTHQRGFRPVDGVCENVTVLSAVLGDARRRCRTLHLACVDLSKAFDTVSHPAIHRTLEELELPWEFREYIGAVYSDAQTVIGSVTNNVSAIKIGRGVRQGDPLSPLLFNLVVDRALAILSEDVGYQLGDELIGALGYADDIVLLASTRSGLQENLTRLQAVFARNGLTINAKKTGVLSMVASGKDKKVKIDTTPYFTVGGALIPQRSPVEIWTYLGCMFVGAREFANDPPLAHSIELLTKAPLKPQQRLRLLRDFLLPRYYHRWIVGTVTAKTLRGVDIMVRKAIRRWLRFPHDVPAGYFHAPIQSGGLGLPLLKTLIPILKFDRLQRLCRSTLPAARAAAETTFVARRLVWCENQMRIRGNRVLTTAELGQQCAAWLRESCDGNGLREAETSKLSSHWVSAGADLIPGADYVHYHHIRANCIPSRARVSRGRDGREVRCRAGCPDIETPAHCVQRCFRTHGGRILRHNDLCRRVGGFFQQKRWHVDAELAYSTSAGLRRPDLTIAKGDEAVVVDAQVVSSETALEVSHERKVEKYRSCNDLVDRVAERTGVPRDNVRFTAITISWRGVWSPRSEGELRSLGLTPAQLRTLTTRVLWGSWLNWKRFNGITTRYVPGRNVTAISGARRGGT

SEQ ID NO: 4696 - protein, 991 aa, Temnothorax curvispinosus
MESQRMNVKPPGSRMARVLRARCASDSAIGAEVPDGVVAGPSRTRSRAMSDVIEGTETFSCEFCPREFRTMRGLSLHVTKTHPVVANSAVDVERVKARWSVEEVRLMARAEATATLAGIIFMNPHLQDKFPHRSLEAIKGKRRQEAYREMVRVFCQKMQSRNAVGIDEGDRDGAAMIRAAAGPATIGSDTVDPSAHQPSPEQRSQRSSASHSYQADTLVGIARDALLTGVVDVQAIERWLALIFPPSAVRPPRRASTKQRNPPNTKESRKQKIKREYAHVQTLYKKSPKACLSHVLEGGSERERPSAVEFDAYWRPVMEASRGADGDMTALRESYGEAGRVARTSRSRPPTARGIHLENLGEGAATGPTRAADKASLWDPIKPIEVRRISIKTGTAPGLDQITPRMWNAVPLVLCALLFNLLLLARTVPSSIATTRTVFLEKGGMSDRPSPAEYRPLSIGSVVVRHFHKILAKRLAALNVFDTRQRGFRPVDGVCENVTVLSAVLGDARRRCRTLHLACVDLSKAFDTVSHPAIHRTLEELELPWEFREYIRAVYSDAQTVIGSVTNNVSAIKIGRGVRQGDPLSPLLFNLVVDRALAILSEDVGYQLGDELISALGYADDIVLLASTRSGLQENLTRLQAAFARNGLTINAKKTGVLSMVASGKDKKVKIDTTPYFTVGGALIPQRSPVEIWAYLGCMYEGAREFANDPPLAHSIELLTKAPLKPQQRLRLLRDFLLPRYYHRWIVGTVTAKTLRGVDIMVRKAIKRWLRFPHDVPAGYFHAPIQSGGLGLPLLKTLIPILKFDRLQRLCRSTLPAARAAAETTFVARRLVCRRVGGFFQQKGWHVDAELAYSTSAGLRRPDLTIAKGDEAVVVDAQVVSSETALEVSHERKVEKYRSCNDLVDRVAERTGVPRDNVRFTAITISWRGVWSPRSEGELRSLGLTPAQLRTLTTRVLWGSWLNWKRFNGITTRYVPGRNVTVISGARRGGT

SEQ ID NO: 4697 - protein, 1129 aa, Acromyrmex insinuator
MVSCGAKKGRGYLGGSRLSIRLLPYMQLIMVKSKKGTSRPGSRMARALHDSCANADSACAEAPEENLAGSARNTLIEVPPRGTLQNMAEHGSQDPSVTCEHCGRTFRTMRGLGVHIVRAHPVEANSAVDVDRVKARWPAEEVRLMAPAEAAATSAGGIRFMNQHLQDKFPHRSLEAIKGKRRQEAYREMVRGFCQEIQSRAAVIDEGDGPVAAMIGAVGVPETMETTTSGESVHQSSPRQAAERLRAHISELLLQGSLCRSYEADTLVGIARVASETGEVDVLAIERWLRRIFPSPAVHPPQRASTKRRNPSTTQENRKQKRKREYAHVQSLYKKNLRTCLSHILEGGSERKRPSAVEFRDYWRPLMETSGVADGDMTELRELYGEARQAAGASRSRPSRARGIHLEGLGEGAAVDRDPHGADRSLLWDPISTAEVVRISVKTGTAPGLDGITPRMWNSVPSILRALLFNLLLQAGTIPSSLATAKTVFLEKGGMSESPVPSEYRPLSIGSVIIRHLHKILANRLSALDIFDNRQRGFRPVDGVCENITVLSAVLGDARRNCRTLHLACVDLSKAFDTATHHAIVRTLEEAGLPLEFRNYIRALYKDSRTMLQASGDKEMPIKIGRGVRQGDPLSPLLFNLVVDRALGILSEDVGYRMGDKLINALGYADDIVLLSSTRVGLQENLTRLHAAFVRNGLEINAKKTGVLSMVASGRDKKVKVDTTPYFTVGGALIPQRSPVEVWTYLGCMYQGAREYANVPPLAHSIERLTRAPLKPQQRLRLLRDCLLPRYYHQWVLGAVTSKTLKGLDVLVRTAVRRWLRFPHDVPAGYFHAPIQSGGLGMPLLKVFIPILKHNRLQRLCRSTLPAASAAAESTYVARQLVWCENQMRVRGYRVTSAAELRQQCAAWLRESCDGNGLREVESSKLSSYWVAHGADAIPGADYVHYHHIRANCIPSRARLSRGRDGRDVRCRAGCPERETPAHCVQRCFRTHGGRILRHNDLCRQVGGYLQQKGWQVDAELAYSTSAGRRRPDLTIAKDGEAVVVDAQVVSSETALNVSHERKVEKYRSCEDLADRVADHTGVPRNNVRFIAITITWRGVWSSQSECEMRDLGLTSGQLRLTTRVLWGS

SEQ ID NO: 4698 - protein, 1151 aa, Nylanderia fulva
MVSCGAKKDRGFLGGSRLSIRLPPYTQLIMERNLNENTVPGSRMARGLRASARLSERARGAEDPDGVAAGPSRTTIRTSQAEVDSLEEEMVSCEQCSARFRNMRGLGVHKVRAHPLQANSAINVDRVKARWSVEETRLMARAEAEGILAGELFINQYLETKFPNRSLEAIKGKRQQEPYRVMVRDFCQKIQSRRAIVIDEGDRDGAVMTRADTIPAATEASTDDQSAHQPPPEQSSQRLRDKIQSLVEQSAAFRSYEADTLAGTARDALTAGRVDVLAIERWLGMIFPRPLQVRPPQRVSAKKHCPPVKRESREQRRKWEYAIVQSLYKKNKKSCLSRILEGDSVRERPSAVEFFNCWRPIMEASSGADGDMTDLRESFGEAAQAASAGRGRTSSLRGIHLEGLGDGAATDPVPVADKTLLWDPITPAEVNRISVRTGTAPGLDQITPRMWNAVPAILRALLFNLLLLAETIPSSIATTRTVFLEKGGMSDRPGPTEYRPLSIRSVITRHFHKILAKRLAALDIFDKRQRGFRPVDGVCENVTVLSSVLWDARRRCRSLHVACVDLSKAFDTVAHAAIHTTLDELGLPREFREYVRAVYSNALTELQGVSAEEVSAIKIGRGVRQGDPLSPLLFNLVVDRALGILSEDVGYRLGGRLINALGYADDIVLLASTRDGLQENLTRLHDAFMRNGLEINARKTGVLSMVASGRDKKVKVDTTPYFTVGGAMIPQRSLVDVWTYLGCEYTGARELASDPPLAQAIEQLTRAPLKPQQRLRLLRDCLLPRYYHRWTVGTVSAKTLKGKNIIVRTAVRRWLRFPHDVPAGYLHAPIQSGGLGMPLLRTLIPILKHNRLQRLCRSTLPAACAAAETTYVARQLVWCENQMRVRGHRVTTTAELRQQCAAWLRESCDGRLREVAASNLSSYWVSAGADAIPGADYVHYHHIRANCIPSRARCSRGRDGRDNRCRAGCPETETPAHCVQRCFRTHGGRILRHDDLCRQVGGYLQQKGWRVDAEQAYSTSAGRRRPDLTIAKGGEAVVVDAQVVSSETALEMSHERKVEKYRSCNDLAAAVAERTGVPRNNVCFTAITISWQGVWSSRSESELRGLGLTSAQLRTLTTRVLWGSWLNWKRFNAMTSRYNERRRNVASSGGA

SEQ ID NO: 4699 - protein, 1106 aa, Ampulex compressa
MDRSIIEIPRPGSRMARALRARERERGVASDGVSEAPGVRPRAREDDREVVGVVPPVRCEFCGRGFQTKRGLGVHVTRGHPEAANAVIEVERDKARWSVEEVRLVARAEARASLAGVRFMNQHLLNLFPHRTLEAIKGRRRQEAYREMVQAFCLEAQTGSAAADDSVESAAMIGAAGPSGAHERIECVSPTSLSPGSAESQRLRDAIVELIEDASHIQGFGAGDLSSIARSALEGEDVMDAISGWLHATFPTSASAKPPHRATRNSRNPRSKRRENREYKRRREYAIVQTLFKKNLRSCLNRILDGDSEREKPSDVDFADYWRPLMEASSAADGDMSALRSAYREARQEGTNTSFARGIHLAGVDGASPEIAPVLDKSVLWHPITAAEVARIVVRVGSAPGCDGITPRKWNVVPKCLRALLYNILLLARDVPESMTRTRTVFLEKGGMPVRPRPADYRPLSVGTVVLRQFHKILGSRLVALKLGDTRQRGFKPVDGVCENVTVLSAVLDEARRKCRTLHLACIDLSKAFDTVGHKAIAKALEEADLPPSFQSYIRATYARAKTTLSLSGSAGEPICLGRGVRQGDPLSPLLFNLVVDRALGILSEDVGFRMGGYLVNALAYADDIVLLSSTTMGLQENLERLSSAFQVHGLEINAKKSGVLSLVASGRDKKVKVVTQPSFTLGGSLLPQRSPVEVWSYLGALYEGARESATHVTLGHAIDKIRRAPLKPQQRLRLLRDCLLPRYYHRWILGSVNIRSLKAIDVQVRTAVRSWLRLPHDVPVGYFHAPILEGGIGMPQVKTLIPLLKFGRLQRLCRSDLPAARAAAESRYVARQLVWCENHMKVRGCRVNTTVELRRELASLLHESCDGRGLREAGNSKLSSWWVSGGDSAIPGADYVHYHHVRANSIPSRARVSRGRPGHDVRCRAGCPESETPAHCVQRCFRSHGGRILRHNDLCRQVAGFLKQKGWHVEQELAFSTSAGRRRPDLTISRGGKAVVVDAQVVSSEEALRSSHRRKVDKYRLNEDLADRVAENTGVPRNDVSFTALTISWRGVWSADSEAEMRGLGLTTGQLRLLTTRVLWGSWLNWRRFNSITSRYNSGGGRRVE

SEQ ID NO: 4700 - protein, 1077 aa, Propylea japonica
MASWGPGVIPPSARHQLDMERRNEPRMENNGRSSDRTVPADPTEPNPQAGPSTSQGHVCPCPGCGGIFPTRRGLGVHANRAHPDWNDARHLAQRVVVKERWSEEELRMMARREAQLINRGGVRLNLALMEYTSRTQKSIKGQRLRPAYKEMVRTYLGEISEEDSSVETVSTPSASSSDDNSSEEPPPSPQSSSPGPSEHSSPRDKLAEELASMEPLSGRDFNEAWLNKICKLPLRLDPDCVILELNTYLEDTFRPGRRPRRGPPAATPNRPCNRKERRRIEYARVQDMFRKNPGGCARRILDGTLVRERPIPEDVMEPFWRSIMEHPNSSTSVLDDPPAVLNNLWDPIRADEVRTSFPPTSAAAGPDGVTVEFLRKVPSEILRRVFSLFMWCERLPKRLYESRTVLVPKKADSSSPGDFRPITISSVILRTFHKLLANRLKAVKIDPRQRAFIESDGCAENIALLDLVLRYHHTRAQPLFMASLDLSKAFDSHKALQETMRAKGLPSEMCRYLVNIYERSSTCLQHGGWTSDRITPTQGVKQGDPLSPILFNFLLDELLKRLPPEIGAKVEGLLVSILAFADDLILFASTKAGLQQLLDFVLGFLESCGLTANAQKCSTVAIKTMPNMKKTVVDPKCIFNVGGTPIPAMKRTDQWKYLGIPFSPEGRASTNSLEQLQGYLDTLTKAPLKPQQRMWILRAVIIPRLKYQLIMGGTKLSYLKAMDVKVRNSIRKWINLPHDCPLGYFHAAVEDGGLGVTSFRWKIPLERLLCLEKLKRSQFMVQNKTSTYLESEILRASSRLKANSNQVLRSSKLLSDYWARVLYGSCDGMALKHSRNVKGQNAWIHDRTKFLSGRDYINSCKIRINALPTASRTSRGRLRDKRCRAGCQNVETMNHILQLCHRTHGMRIKRHNAIVHYIQRNLERSGYRVEEEPTLRTDEGLRKPDLVAVMGRTAVVVDAQIVGEQVDLDLADKRKIKYYSDNVSLQAEIKNKYQVDSILTLSATLSWRGLWSARSARSLLERGVIGARDIKTVSSRVVIGSIAAWNYYNKVTSVRRGAGPGGAGPRQGPEAGRTGIG

SEQ ID NO: 4701 - protein, 1145 aa, Lasioglossum morio
MEQPGLGCSMTDLSVRQETNVDDQANVVRLNEKSIIITAPTPEEGIKCMLCQENNRSFMFIDPKNFVMHCQKEHLIEEIKWKCGRCERLWPGLHNWRCHYAKCKGKISQVKTYKCEECDQSFDTTRGLATHERHMHPSVRNVKRQTAHERERLQAGRKATVWSAEETALLIELDNKYRHLKQANAEIIKHLPNKSLKQISDKRRRLYPVRRAATRGNNNENINSDSSSSNEETSEHPQPQVDMDSLNNSVRGIKEAIASRPENPPEECKKIFDEIANLWSKIGDISDESIFGTEIDQFIEETLTPFLLPQEKQATKSKNTNKNNTGNNLRAEAAPANKRRKKNQKAKDNKNNRNKKKYARCQDWYKNCPKKLVEAVVSGDLECTIAPLKVPDINSIKTLYDSLWGVKGPEEVKIKSNVIVDIPTEQIIKKIKDEEIIERIAKIPKKSAAGPDGIKVAHLRRNKIETILAKIYNILLIKKYIPKPWLQNRTILIPKLGKDSEDAKNWRPITIGSLLNRIFSALIDARLRWKLKHNMRQKGFVASNGCLSNITILKHAINEMKSSDGGVMISIDITKAFDTVPHAAVYEALRVKGTPEHAIELIRSMYSNCTTTIRGAENTSINIKLERGVKQGDPLSPFLFNTVIDHIIDKVQNTTEGILLPGGNVTILAFADDIVLLGKNAVEAQKQAQILTKKLQELGMSIAPDKCSCFQVTATNRSWFIKNPEIKIGGVSVKYIGPDETFAYLGARMGPWRDAYRKITLNEINRIINNVKKLKLKPMQKIKLIVTYILPKFIYELTTFPPSSGTLKMIDSDIRGHIKEILHLTVSTANGLIYAPKRDGGLGIPKIENIIKIAVLNAGLKLKTSSDPITKALAEDINYNKTLKEIANSLRINWPIYEDDIAREKIRLKREASLDWEKLKSQGHGVKEFRNNPLSNVWLYRPELLKPSRFNDALRLRSNTYGTKVALSRSKKVSDVNCRKCKCQPESLGHILGLCVATKPLRIKRHDEIKNLLAENISKKENVMVEPSFVLQSGPLKPDLVIINEERVDIVDVSVRYEHRDYLKHAYEEKLLKYNCLLENLKNKFKKKKLGKIMPIIIGCRGAIPEFTLKNLKELKTTNKDITTISMMALRASIEIANIFMDYDI

SEQ ID NO: 4702 - protein, 903 aa, Lasioglossum morio
MDSLNNSVRGIKEAIASRPENPPEECKKIFDEIANLWSKIGDISDESIFGTEIDQFIEETLTPFLLPQEKQATKSKNTNKNNTGNNLRAEAAPANKRRKKNQKAKDNKNNRNKKKYARCQDWYKNCPKKLVEAVVSGDLECTIAPLKVPDINSIKTLYDSLWGVKGPEEVKIKSNVIVDIPTEQIIKKIKDEEIIERIAKIPKKSAAGPDGIKVAHLRRNKIETILAKIYNILLIKKYIPKPWLQNRTILIPKLGKDSEDAKNWRPITIGSLLNRIFSALIDARLRWKLKHNMRQKGFVASNGCLSNITILKHAINEMKSSDGGVMISIDITKAFDTVPHAAVYEALRVKGTPEHAIELIRSMYSNCTTTIRGAENTSINIKLERGVKQGDPLSPFLFNTVIDHIIDKVQNTTEGILLPGGNVTILAFADDIVLLGKNAVEAQKQAQILTKKLQELGMSIAPDKCSCFQVTATNRSWFIKNPEIKIGGVSVKYIGPDETFAYLGARMGPWRDAYRKITLNEINRIINNVKKLKLKPMQKIKLIVTYILPKFIYELTTFPPSSGTLKMIDSDIRGHIKEILHLTVSTANGLIYAPKRDGGLGIPKIENIIKIAVLNAGLKLKTSSDPITKALAEDINYNKTLKEIANSLRINWPIYEDDIAREKIRLKREASLDWEKLKSQGHGVKEFRNNPLSNVWLYRPELLKPSRFNDALRLRSNTYGTKVALSRSKKVSDVNCRKCKCQPESLGHILGLCVATKPLRIKRHDEIKNLLAENISKKENVMVEPSFVLQSGPLKPDLVIINEERVDIVDVSVRYEHRDYLKHAYEEKLLKYNCLLENLKNKFKKKKLGKIMPIIIGCRGAIPEFTLKNLKELKTTNKDITTISMMALRASIEIANIFMDYDI

SEQ ID NO: 4703 - protein, 957 aa, Lasioglossum lativentre
MIGLSMHERHRHPSVRNRKRQMTQEKERLPAGRKASVWSKEETTLLIELNNRYKHLKQINVEINKYLPNKTLKQISDKRRQLKPEHVEPNTENNNTDMESDSSSSDGIPDQLPSGLEVDTLNNSIFRGIKEAITSRPDDTPEDCVKILDDIASLWSKIEGTSDESIYSVEIDKFIGDILTPFILPHKKHANKITNTNKINTLGNNLRAKTVTTNNIIYPNNDKNRNNRNSNKKRYKNAKAKKKNNKNNRNKTKYSRCQDWFKNCPKKLVEAVLLGDLECTVKTQKLPDIEAIKILYDDLWGVKGPENIKIKTCIDGTENISTESIIRKISDEEVIEKIRKIPNKSAAGPDGIKKPHLNRKKNIGNILAKIYNILLIKSYFPKPWLQNRTVLIPKLDKNTDDVKNWRPITIGSQLSRIFSALVDERLRSKLKHNMRQKGFVASNGCLNNITILKHAINEMKCNDGGVMISIDITKAFDTVPHAAVYEALRSKGAPEHTIDLIKSMYCNCTTTIRGAENNSINIKLERGVKQGDPLSPFLFNIVIDHILDKVQNSTEGISLPGGNAAILAFADDIILLGKNTKEAQKQADILFRKLHELGMAIAPDKCSCFKVVAINRSWYIKNPEIKIGDAPIKYIGPDETFAYLGARMGSWRNTYRKITLTEINRIINNVKRLKLKPTQKIKLITIYILPRFIYELTTFPPSSGTLKMIDIDIRGHIKEILHLPVSTTNGLLYASKRDGGLGLPKMENIIKIAALNAGLKLKISNDPIIKALANDLNYNKSLKEIANSLRINWPAEDIDLAKEKKRLKRDAVMEWEKLKSQGHGVRDFYNNPLSNIWLYQPEYLKPSRFTDALRLRSNTCGTKVALSRSKVISDVSCRKCKSQPESLGHVLGLCTSTKPLRIKRHDEIKTLLAEEISKKENVIVIVEPSFSMPSGLLKPDLVILNEERVDVVDVSIR

SEQ ID NO: 4704 - protein, 1192 aa, Tachypleus gigas
MATTSSGIDRPPSGTVRDGTALTVYHPPPSTFACTEPGCGAKFHAFSWTAMRRSLERHLLAEHLVKITSTKNICKHCRRNLGLRPTGHICQQAPTRTSASPPVQYPHACDRCPKTFPSKRGLSNHLQWHKQDDMRRDRSQAVQLPKPNTRQRRTAARAAVPPPAPAGFAYTPSTVDISPKDTPVSIDVVAPFSSPHGDSPIEVLSPIANVAVAPSPSPHQLSPLIKSFQTTGGSLPPLEESFHPANRVSPRRSSSSSSSGSDVFNPSPEADIAPVSPLPAGEEAAVDPPADFSLLDPSDHSPLHVYCAELRDLLRAPVSPTSWDRFEVLLDSITKRAAEVLKLPTRANRDRPARPTNIQDAATIQRLYRRNRRRAVRLILKGEAPPCQLDRSTVEEFFTNAWSRTEFDPSIYLDNSPAATPVNVDPFTPQEVLKRLSKCENTSPGDDRLTYHHWKTLDPNAVLITHILNICLVYRKIPASWKSTSIILIYKKGDQEDLGNWRPISISRTLYKLYTGCLAQRLSGWIKQHHILSSCQKGFLPFDGVFEHNFVLQERLASARKSRRDLVVAWLDIANAFGSVPHLAITTSLLSLGAGQQFTDVVDDLYKDASSRILLGCGVTEQIPIRSGVRQGCPISGLLFNIVLDPILRAVQGTAIIHNVLAYADDLSLLANSPGDLQRSIDVISRVGSMIGLHLKPSKCAVMHFSGKPPVGCRKVDITIDGQPIRCLREGESFSFLGRPVGFNVISDWSTLDAVIKTGLSIMSSKLAPWQRIDALKTFFYPSLHFALRTHQFPKGDWKKVDNVLRPEIKRTLNLPQEATNDYLYGSRQLGACGIPLLADDTDIITVDGAYKLLSSMDPIVVELARAMLRDTVATRLRRPVDHDDVALYLTGAQDGEFQGNTNAYRNLWTEARKSSARLEVTWQAEGDNFNITHGATTIRPKQRSSICRTIRDNLARQRFGNLAQFPSQGKVMECVALSKSSSHFISAGYLTRFADWRFIHRARLNLLPLNACRPWAADADKRCRRCGAQDETLPHVINHCMRYSALLRKRHNLIVEQVKKAASPRFTIIAEDQECGVPDLRPDLVIVKGDSAVIIDVTMPFDNRPEALAAARTLKLAKYAPVMDHLRGRYRHVSIEPVVVGSLGSWDPANDPFLRRLCSRKYASLLRKIAVSNAIRISRDIYAEHITGDVQ

SEQ ID NO: 4705 - protein, 1006 aa, Tachypleus gigas
MRRDGSQAVQLPKPNTRQLQTAARAAVPPPAPAGFAYTPSTVDISPKDTPVSIDVVAPFSPPHGDSPIKVLSPIANVAVAPSPHKLSPLIKSFQTTGGSLPPLEESFHPANRVSPRRSSSSSSSGSDVSNPSPEADITPVSPLPAGEEAAVDPPADFSLLDPSDHSPLHVYCAELRDLLRAPVSPTSWDRFEVLLDSITQRAAEVLKLPTRANRDRPARPTNIQDAATIQRLYRRNRRRAVRLILEGKAPPCQLDRSTVEEYFTDVWSRTEFDPSIYLDNAPAATPVNVDPFTPQEVLKRLSKCENTSPGDDRLTYHHWKTLDPNAVLVTHILNICLVYRKIPASWKSTSIILIYKKGDQEDLGNWRPISISRTLYKLYTGCLAQRLSRWIQQHHILSSCQKGFLSFDGVFEHNFVLQERLASARKSRQDLVVTWLDIANAFGSVPHLAITTSLLSLGAGQQFTDVVDDLYKDASSRILLGCGVTEQIPIRSGVRQGCPISGLLFNIVLDPILRAVQGTAIVHNVLAYADDICLLANSPGDLQRSIDVISRVGSMIGLHLKPSKCAVMHFSGKPPVGCREVDIAMDGWPIRCLREGESFSFLGRPVGFNVISDWSTLDAVIKTGLTIMSSKLAPWQRIDALKTFFYPSLHFALRTHQFPKGDWKKVDNVLRPEIKRTLNLPQEATNDYLYGSRQLGACGIPLLADDTDIITVDGAYKLLSSLDPIVVELARTMLRDTVATRLRRPVDHDDVALYLTGAQDGEFQGNTNAYRNLWTEARKSSTRLEVTWQVEGDNFNITHGATTIRPKQRSSISRTIRNNLARQRFGNLAQFPSQGKVMECVALSKSSSHFISAGYLTRFADWRFIHRARLNLLPLNACRPWAADTDKRCRRCGAQDETLPHVINHCMRYSALLRKRHNLIVEQVKKAASPRFTIIAEDQECGVPDLRPDLVIVIGDSALIIDVTMPFDQQAAGACDARTFKTCPKYAPGDDLSLVGRYRQVSNSSR

SEQ ID NO: 4706 - protein, 1192 aa, Tachypleus gigas
MATASSGINRPPSGTVRDGTALTVYHPPPSTFACTEPGCGAKFHAFSWTAMRRSLERHLLAEHLIKITSTKNICKHFRRNLGLRPTGHICQQAPTRTSASPPVQYPHACDRCPKTFPSKRGLSNHLQWHKQDDMRRDRSQAVQLPKPNTRQRRTAARAAVPPPAPAGFAYTPSTVDISPKDTPVSIDVVAPFSPSHGDSPIEVLSPIANVAVAPSPSPHQLSPLIKSFQTTGGSLPPLEESFHPANRVSPRRSSSSSSSGSDVFNPSPEAELAPVSPLPAGEEAAVDPPADISLLDPSDHSPLHVYCAELRDLLRAPVSPTSWDRFEVLLDSITKRAAEVLKLPTRANRDRPARPTNIQDAATIQRLYRRNRRRAVRLILKGEAPPCQLDRSTVEEFFTNAWSRTEFDPSIYLDNSPAATPVNVDPFTPQEVLKRLSKCENTSPGDDRLTYHHWKTLDPNAVLITHILNICLVYRKIPASWKSTSIILIYKKGDQEDLGNWRPISISRTLYKLYTGCLAQRLSGWIKQHHILSSCQKGFLPFDGVFEHNFVLQERLASARKSRQDLVVAWLDIANAFGSVPHLAITTSLLSLGAGQQFTDVVDDLYKDASSRILLGCGVTEQIPIRSGVRQGCPISGLLFNIVLDPILRAVQGTAIVHNVLAYADDISLLANSPGDLQRSIDVISRVGSMIGLHLKPSKCAVMHFSGKPPVGCRKVDITIDGQPIRCLREGESFSFLGRPVGFNVISDWSTLDAVIKTGLTIMSSKLAPWQRIDALKTFFYPSLHFALRTHQFPKGDWKKVDNVLRPEIKRTLNLPQEATNDYLYGSRQLGACGIPLLADDTDIITVDGAYKLLSSMDPIVVELARAMLRDTVATRLRRPVDHDDVALYLTGAQDGEFQGNTNAYRDLWTEARKSSARLEVTWQAEGDNFNITHGATTIRPKQRSSICRTIRDNLARQRFGNLAQFPSQGKVMECVALSKSSSHFISAGYLTWFSDWRFIHRARLNLLPLNACRPWAADADKRCRRCGAQDETLPHVINHCMRYSALLRKRHNLIVEQVKKAASPRFTIIAEDQECGVPDLRPDLVIVKGDSAVIIDVTMPFDNRPEALAAARTLKLAKYAPVMDHLRGRYRHVSIEPVVVGSLGSWDPANDPFLRRLCSRKYASLLRKIAVSNAIRISRDIYAEHITGDVQ

SEQ ID NO: 4707 - protein, 1192 aa, Tachypleus gigas
MATASSGIDRPPSGTVRDGTALTVYHPPPSTFACTEPGCGAKFHAFSWTAMRRSLERHLLAEHLIKITSTKNICKHCRRNLGLRPTGHICQQAPTRTSASPPVQYPHACDRCPKTFPSKRGLSNHLQWHKQDDMRRDRSQAVQLPKPNTRQRRTAARAAVPPPAPAGFAYTTSTVDISPKDTPVSIDVVAPFSPPHGDSPIEVLSPIANVAVAPSPSPHQLSPLIKSFQTTGGSLPPLEESFHPANRVSPRRSSSSSSSGSDVFNPSPEADIAPVSPLPAGEEAAVDPPADISLLDPSDHSPLHVYCAELRDLLRAPVSPTSWDRFEVLLDSITKRAAEVLKLPTRANRDRPARPTNIQDAATIQRLYRRNRRRAVRLILKGEAPPCQLDRSTVEEFFTNAWSRTEFDPSIYLDNSPAATPVNVDPFTPQEVLKRLSKCENTSPGDDRLTYHHWKTLDPNAVLITHILNICLVYRKIPASWKSTSIILIYKKGDQEDLGNWRPISISRTLYKLYTGCLAQRLSGWIKQHHILSSCQKGFLPFDGVFEHNFVLQERLASARKSRQDLVVAWLDIANAFGSVPHLAITTSLLSLGAGQQFTDVVDDLYKDASSRILLGCGVTEQIPIRSGVRQGCPISGLLFNIVLDPILRAVQGTAIVHNVLAYADDISLLANSPGDLQRSIDVISRVGSMIGLHLKPSKCAVMHFSGKPPVGCRKVDITIDGQPIRCLREGESFSFLGRPVGFNVISDWSTLDAVIKTGLTIMSSKLAPWQRIDALKTFFYPSLHFALRTHQFPKGDWKKVDNVLRPEIKRTLNLPQEATNDYLYGSRQLGACGIPLLADDTDIITVDGAYKLLSSMDPIVVELARAMLRDTVATRLRRPVDHDDVALYLTGAQDGEFQGNTNAYRNLWTEARKSSARLEVTWQAEGDNFNITHGATTIRPKQRSSICRTIRDNLARQRFGNLAQFPSQGKVMECVALSKSSSHFISAGYLTRFADWRFIHRARLNLLPLNACRPWAADADKRCRRCGAQDETLPHVINHCMRYSALLRKRHNLIVEQVKKAASPRFTIIAEDQECGVPDLRPDLVIVKGDSAVIIDVTMPFDNRPEALAAARTLKLAKYAPVMDHLRGRYRHVSIEPVVVGSLGSWDPANDPFLRRLCSRKYASLLRKIAVSNAIRISRDIYAEHITGDVQ

SEQ ID NO: 4708 - protein, 1192 aa, Tachypleus gigas
MATASSGIDRPPSGTVRDGTALTVYHPPPSTFACTEPGCGAKFHAFSWTAMRRSLERHLLAEHLIKITSTKNICKHCRRNLGLRPTGHICQQAPTRTSASPPVQYPHACDRCPKTFPSKRGLSNHLQWHKQDDMRRDRSQAVQLPKPNTRQRRTAARAAVPPPAPAGFAYTPSTVDISPKDTPVSIDVVAPFSPPHGDSPIEVLSPIANVAVAPSPSPHQLSPLIKSFQTTGGSLPPLEESFHPANRVSPRRSSSSSSSGSDVFNPSPEADIAPASPLPAGEEAAVDPPADFSLLDPSDHSPLHVYCAELRDLLRAPVSPTSWDRFEVLLDSITKRAAEVLKLPTRANRDRPARPTNIQDAATIQRLYRRNRRRAVRLILKGEAPPCQLDRSTVEEFFTNAWSRTEFDPSIYLDNSPAATPVNVDPFTPQEVLKRLSKCENTSPGDDRLTYHHWKTLDPNAVLITHILNICLVYRKIPASWKSTSIILIYKKGDQEDLRNWRPISISRTLYKLYTGCLAQRLSGWIKQHHILSSCQKGFLPFDGVFEHNFVLQERLASARKSRQDLVVAWLDIANAFGSVPHLAITTSLLSLGAGQQFTDVVDDLYKDASSRILLGCGVTEQIPIRSGVRQGCPISGLLFNIVLDPILRAVQGTAIVHNVLAYADDISLLANSPGDLQRSIDVISRVGSMIGLHLKPSKCAVMHFSGKPPVGCRKVDITIDGQPIRCLREGESFSFLGRPVGFNVISDWSTLDAVIKTGLTIMSSKLAPWQRIDALKTFFYPSLHFALRTHQFPKGDWKKVDNVLRPEIKRTLNLPQEATNDYLYGSRQLGACGIPLLADDTDIITVDGAYKLLSSMDPIVVELARAMLRDTVATRLRRPVDHDDVALYLTGAQDGEFQGNTNAYRDLWTEARKSSARLEVTWQAEGDNFNITHGATTIRPKQRSSICRTIRDNLARQRFGNLAQFPSQGKVMECVALSKSSSHFISAGYLTRFADWRFIHRARLNLLPLNACRPWAADADKRCRRCGAQDETLPHVINHCMRYSALLRKRHNLIVEQVKKAASPRFTIIAEDQECGVPDLRPDLVIVKGDSAVIIDVTMPFDNRPEALAAARTLKLAKYAPVMDHLRGRYRHVSIEPVVVGSLGSWDPANDPFLRRLCSRKYASLLRKIAVSNAIRISRDIYAEHITGDVQ

SEQ ID NO: 4709 - protein, 678 aa, Girardia tigrina
MIKLISNQYKRGDFEYRNIDSRPGLKHAYFLFLDATSAFDSVVHSYLFDLLSIIGLSSSSLALITQIYSKNLVFAECGPHKISNIPIKKGVKQGCPLSMLLFCIYVNIGIKAIEEDSQLSAIKINNKSYKILSYADDIILISEGSLNMQNLMNSLRNILLPLNLEFNANKSSVLVVPETKHKGHSPIILNGTFIPRVSKTNPQKVLGENYNGSKFSKTSNTVESALDSLQKISRSNLYRNLKNLAYRFFIHSSILYNFRIHSYGIKQFQDSFLDGPGIDSRFGRIIKQINGLPLRTQNLFIQLSNDLGGPQAISPSNEYYIQSIVYICNLMWSNDESIITLLINDLTNFFFSHYQSNLTFNEALHNCITSDPILPQHPCEWAKFFTSCKNLSVTLNITVTPLWNEQTSRFSLRIQSAETISIISNLEKNSLSRQLHKILQSGMLEKLINTGCSKILFNNCSSNVKINKMLINGNLDNKLVSFFNQYRLGILATRTTCSAANQSCRLCHRFPETISHLTVNCPILHCEIVNRHNQLCDLLEEILRRCFGSAVHKELTHRLNDNSKPRPDFTIFNLDIVWLIEVKCPFDSDLSLQFRQTEIIDKYEAVSQFLINKYAPRSFRLFSFIVGAGGSWDSNNSILLQKLSLSPEEIAQFRIKCSLQNINSLYSQWKNNVYNTHF

SEQ ID NO: 4710 - protein, 678 aa, Girardia tigrina
MIKLISNQYKRGDFEYRNIDTRPGLKHAYFLFLDATSAFDSVVHSYLFDLLSIIGLSSSSLALITQIYSKNLVFAECGPHKISNIPIKKGVKQGCPLSMLLFCIYINIGIKAIEEDSQLSAIKINNKSFKILSYADDIILLSEGSMNMQSMVNSLSNILLPLNLEFNANKSSVLIVPETKHKGHSPIILNGTFIPRVSKTNPQKILGENYNGSKFSKTSNTIETALDSLQKISKSNLFRNLKNLAYRFFIHSSMVYNFRIHSYGNKQFQDSFLDGPGIDSRFGRVIKQINGLPLRTQNLFIQLSNDLGGPQAISPSNEYYIQSIVYICNLIWSNDENIIALLTNDLTNFFLSHYQSNLTFNEALHNCLISDPIIPQHPCEWAKFFTACKNLSTTLNIIISPLWNEQSSRFSLRIHASGIISIISNLEKNSLSRQLHKILQTGMLEKLINTGCSKILFNNCSSNVKINKMLINGHLDNKLVSFFNQYRLGILATRTTCSAAVQSCRLCHQLPETISHLTVNCPVLHCEIVNQHNQLCDLLEEILRRCYGSAVHKELTHRLTDNSKPRPDFTIFNLDIVWLIEVKCPFDSNLSLQFRQTEIIDKYEAVSQFLINKYAPRSFQLFTFIVGAGGSWDSNNAILLHKLNLSPEEIAQFRIKCSLQNINSLYSQWKNNVYNTHF

SEQ ID NO: 4711 - protein, 1004 aa, Malaclemys terrapin
MYSGEKYINKLIAEAIKTKTAKQVSEKRRLLNLYRKKTSGTADSGPGAQKHNLEVRSETPISTIGLENSYMRTITNRLRANNQGPLRQGLEKFEAEVLSAWVAGDPNIRSLVETTSIDVLSSFLAPEHEHKHKQKGNTRGRKSKSGKGQSWRQKRATKRGTYIRFQHLFENDRCKLASIILDGTERLQCEIPLEKVFQTYKDKWESRTPFQGLGQFKSHALADNSAFDILISAKEVLKNISEMNMNSAPGPDKVSLKDLVRVDPEGDTLAGLFNTWLVTGIIPDGIKECRSLLIPKTMDPEALQDLGNWRPLTIGSIVLRLFSRILTNRLAKACPINARQRGFIAAPGCSENLKVLHTITKQAKKEKKPWSCIVDIAKAFDSVSHDHIMWVLQERGLDQHIINIIGDSYRNVHTRMEVGKELTSPIAIDVGVKQGDPMSPLLFNLALDPLISTLEMAGKGFSFGAQKVTALAFADDLVMLSDSWEGMRANIQILESFCHLSGLKVQAKKCHGFLLSPTHDSFTVNNCEAWKIGADGLNMIAPGESEKYLGLKVDPWIGFSKPALSDKLSTWLERINRAPLKPSQKLEMLNTFTIPRVIYLADHTDCKKTLLSSLDDNIRRAVKEWLHLPADTCNSFLYTRSRDGGLGVTRLASLIPSIQARRLHRIAHSEDMTIRFIALANDIESEYQSLWLAAGGTQDTMPAITDPVTIDHRLPQRALELLNEWERPAPRVIYPIPCNWRDAEFSQWKDLPCQGSGVSHFGNDPTSNSWLKHLTGFSQRQFLTALKMRANVYPTREYLGRGKNKYMVNCRHCEAPYESLSHILGQCPAVQGARIRRHNKLCEILTREARKLEWTVYQEPHLRTSKNELRKPDLVFVKDGTALVVDVTVRFQYKDQTFSDAAAEKVRHYQSLTSEISRLTGANKVRYFGLPLGARGKWPKINDRVLSALGLSESAQGRAARLLSRRALLYSIDILNTFSGIGKGLLNSDDTKSVGTQREQLGIS

SEQ ID NO: 4712 - protein, 1005 aa, Chrysemys picta
MYSGEKYINKLIAEAIKTKTAKQVSEKRRLLNLYRKKTSGIADSGPGAQKHNLEVRSETPISTIGLENSYMRTIANRLRANNQGPLRQGLEKFEAEVLSAWVAGDPNIRSLVETTSIDVLSSFLAPEHEHKHKKKGNTRGRKPKSGKGQSWRQKRATKRGTYIRFQHLFENDRCKLASIILDGTERLQCEIPLEKVFQTYKDKWESRTPFQGLGQFKSHALADNSAFDILISAKEVLKNITEMNMNSAPGPDKVSLKDLVRVDPEGDTLAGLFNTWLVTGIIPDGIKECRSLLIPKTMDPEALQDIGNWRPLTIGSIVLRLFSRILTNRLAKACPINARQRGFIAAPGCSENLKVLHTITKQAKKEKKPLGVVFIDIAKAFDSVSHDHIMWVLQERGLDQHIINIIGDSYRNVHTRMEVGKELTSPIAIDVGVKQGDPMSPLLFNLALDPLISTLETAGKGFSFGAQKVTALAFADDLVMLSDSWEGMHTNIQILESFCHLSGLKVQAKKCHGFLLSPTHDSFTVNNCEAWKIDADGLNMIAPGESEKYLGLKVDPWIGFSKPALSDKLSTWLERINRAPLKPSQKLEMLNTFTIPRVIYLADHTDCKKTLLSSLDDNIRRAVKEWLHLPADTCNSFLYTRSRDGGLGVTRLASLIPSIQARRLHRIAHSEDMTIRFIALANGIESEYQSLWLAAGGTQDTMPAITDPVTTDHRLRQRALELLNEWERPAPRVIYPIPCNWRDAEFSQWKDLPCQGSGVSHFGNDPTSNSWIKHLTGFSQRQFLTALKLRANVYPTREYLGRGKNEYMVKCRHCDAPYESLSHILGQFPAVQGARIRRHNKLCEILTREARKLEWTVYQEPHLRTSKNELRKPDLVFVKDGTALVVDVTVRFEYKDQTFSDAAAEKVRHYQSLTSEISRLTGANKVRYFGLPLGARGKWPKINDRVLSALGLSESAQGRAARLLSRRALLYFIDVLNTFSGIGKGLPNSADTKSVGTQREQLGIS

SEQ ID NO: 4713 - protein, 1325 aa, Terrapene carolina
MMKALASAQLGPRRRANSTHLNADVVPWGRCTFRTFEPLARYRVKVSTVATQTDSHEITDGEAYPTLKSSQATVTEGEMYPIPGTSQTPTAAGAISCETVAQTEAEEILPALPLEILNSAFGETVRPDTSPEPCVPTTPVSEKERDAEGSEALTDGIDGTICVPSNAPTVVVTEGECENRVQGKVLVKLPQGNPACPFCGDHVGKPTALSAHLKRHHGGKDVEFQCSLCNKIDPNVHSILCHVPKCKGLTSQEPAGDWACEVCARRFGTKSGLSQHKRRAHPVVRNTERILASQPKQNSQRGKHKSCWSAEEELLLIDFDKMYSGEKYINKLIAEAIKTKTAKQVSEKRRLLNLYKKGTSGATDPGPGAQNNLEVRSDTPIPTAGLENCYMRTVNNRLRDHKQGSLHQGLEKFEAEILSAWVAGDPNIRSLVENTSIDVLSSFLAPEHEHKHKKKGNTKGHNPKSGKDQSWRQKRATKRGTYIRFQHLFENDRCKLASIILDGTERLQCQIPLDEVFQTYKDKWESRTPFQGLGQFKSHALADNSAFDILISAKEVLKNIKEMNKNSAPGPDKVSLKDLVRVDPDGDTLAGLFNTWLVTGIIPDGIKECRSLLIPKTMDPEALQDLGNWRPLTIGSIVLRLFSRILTNRLAKACPLNARQRGFIAAPGCSENLKILHTITKQAKKDKKPLGVVFVDIAKAFDSVSHDHIMWVLQERGLDQHIINIIGDSYRNVHTRMEVGKELTSPIAIDVGVKQGDPMSPLLFNLALDPLISTLEMAGKGFSFGAQQVTALAFADDLVMLSDSWEGMHSNIQILESFCRLSGLKVQAKKCHGFMLTPTHDSFTVNNCEAWKIGTDGLNMIAPGESEKYLGVKVDPWIGFSKPALSDKLSTWLERINRAPLKPSQKLEMLNTFTIPRVIYLADHTDCKKTLLSSLDDNIRRAVKEWLHLPADTCNSFLYARSRDGGLGVTRLASLIPSIQARRLHRIAHSEDATIRCIALANDIESEYQGLWLAAGGTLDTMPAITDPVTIDHRLPQRALELLNEWERPAPRVIYPIPCNWRDTEFSQWKDLPCQGSGVSHFGNDATSNNWLKHLQGFSQRQFLTALKLRANVYPTREYLGRGKNDYIIRCRHCDAPYESLSHILGQCPAVQGARIRRHNKLCEILTREARKLEWTVYQEPHLRTSTNELRKPDLVFVKDGTALVVDVTVRFEYKDQTFSNAAAEKVRHYQSLTGEISRLTGANKIRYFGFPLGARGKWPTINDRVLSALGLSESAQGRAAKLLSRRALLYSIDVLNTFSGIGKGLLNPADPKPLGTHREQMGIS

SEQ ID NO: 4714 - protein, 1308 aa, Podocnemis expansa
MTLLLDKKIVPWGRCIFRPSEPLARYQAKVCTVATQTECPDTTISEVQCTRTSQTTNIKDKYGYSYVAEKRNMKPFVVQTNEILNSIYNIKDVLLTPHRREDRLSRLWLEEGMGFDEDEGVYESSPSQETSISEGTPTLHEPAKYVVSLPNDDPECPVCGDHIGKPTALSIHLKRTHGDKEVEYLCLLCGKSEQRVHSILCHIPKCKGETTTEPEGDWPCPECEKQFQSKSGLSQHKRSAHPALRNAERIQASQPKSDSQRGNHKRCWTDEEVALLLELEKTYLGHKHVNKMIATEIKTKTAKQVGEKRRLLAQSKKKVTVENTNPGPGAERHSNEKGNFKLKETPLSTLEVRPIQPASKLGLNGAYQRKLKVYLENQKKMKQDNGFPDFAKDIFSAWVKGDHNIQEMVEQTSSDILSNFHPTLPKPKRTDRQNNEKGNFKLKEAKSWMRKRAVKRGTFLRYQHLFDRDRCKLASIILDDTERLKCEVSPDEILKVYKEKWETRTPFNGLGHFTSHGKTDNSAFELLISAKEVIKNVKEMNKKSAPGPDGLTIEDLLGEDPEGERLAGLFNIWLVTGYIPNKIKDCRSILIPKTMDPAALRELGNWRPITIGSIVLRLYSRILTTRLAKACPLNARQRGFIAAPGCSENLKILHLLTRDAKRSKKPLGVVFVDIAKAFDSVSHDHIMWVLRERGLDQHMAKIIADSYTNVHTRIEIDKKSTEPISLNVGVKQGDPMSPLLFNLALDPLISQLETTGCGFSHGNKTITALAFADDLVMLSESWDGMTKNIEILEAFCSLSGLKVQAKKCHGFFLSPTHDSYTVNNCKPWRISDDALDMIAPGESEKYLGLRVDPWIGFSKPALSDKLDNWLQRITRAPLKPPQKLEILNTFTIPRLIYLADHTDIKKTMLSSLDKNIRRAVKAWLHLPADACDNFLYSRTRDGGLGVARLSSLIPSIQARRLHRIAHSQDETIRSIALANGITDDYHKLWITAGGDENKIPVITAPVYIDYKLPQGVLDELTEWEKPAPKAIYPIPCSWREAELSEWKTKQCQGSGIQHFKNDPISNTWLRNQRGFPARHYITALKLRSNVYPSREYQGRGNKNMNVNCRHCPAKYESLSHILGQCPAVQGARIQRHNKLCNILKQRARKLKWTIYQEPQLRTAENELRKPDLIFVKDQKALVVDVTVRFEYKDKVFQDAADEKIQHYCSLTPQIKDLTGAEEVEYFGFPLGARGKWPEINYKVLTALGLSDTEQGRTARFFSRRTLLYSIDVINTFASLGKNKPSTVNLYPVNKDHNQEGAAGKSCND

SEQ ID NO: 4715 - protein, 1062 aa, Pelusios castaneus
MQEPEGDWLCSVCEKQLRTKLGLSQHKRSAHPAVRNVERIEACQPKPSSQRGKHKSCWTDEEVALLKDLEILYLGHRCINKMIADDMRTKTAKQVGDKRRLLGVSKKNIAAIVKPGPGVQKSTLEIQSLEPKAKTGLTSAYKQEIEKYLRSLGNLNGNMPQKTYPDFADNIFRAWIDGNPELHDQIEHTSSDVLSTFSISKSEPRKRDKKKAETGNSGKEKAWMRKRAVERGTYLRYQCLFDRDRCKLASIILDGTERLQCTIPPEEVQRVYKDKWETCTPFKGLGQFTSHGKADNTAFDLLISKKEVVKNMKEMTINSSSGPDGITMSELLGEDPDGEKLAGLFNMWLVTGYIPEGVKECKSILIPKTMESEALKDLGNWRPITIGSIVLRLFSRIVTTRLAKACPINERQRGFIVASGCSENLKVLHLLTRDAKRSKKPLGVIFVDIAKAFDSVSHDHIMWVLRERNLDQHMVNIIRDSYKNITTRIKVDKESTEFIAINVGVKQGDPLPPLLFNLALDPLISKLENSGMGYLYGDKKITALAFADDLVMLSESWEGMRTNIEILEAFCELCGLKVQARKCYGFFLSPTHDSFTINNCEAWKIVDDNLNMITPGDSEKHLGLKVDPWIGFSKPTLSNKLDTWLERITRAPLKPPQRLEILNTFTVPQLIYLADHTDCKKTMLPSLDSCIRRAVKEWLHLPVGTCDSFLYSKTRDGGLGVARLASLIPSIQARRLHRIVHSQDETIRYIALISGINEDFQKLWVTAGGDEKKIPVITDLVYIDYKLPQGILEELTEWERPRSRAVYPMPCNWRKNEFIQWKTLQCQGSGIEHFENDPISNHWIGNNRGFSARHYILALKLRSNVYPTREYQGRGKNNTPVSCRHCPAQYESLSHILGQCPAVQEARIRRHNKLCKHPKHEAKKQKWTVYQEPQFKTEDNELRKLDLVFVKEKKTLVVDVTVRFEYKEKVFEEAATEKIQHYKSLTAQIRKLTGADEVEYYGFPLGARGKWPGTSEKVLVALGLTDSQQRWAARFFSRRTLLYSLNVLNIFASIGKNKSAFV

SEQ ID NO: 4716 - protein, 1324 aa, Mauremys reevesii
MMAAPASAQISPCRRANSTILDTEIVPWGRCLSRQFIPPMRYRVTVSSVATQTDSPGTTDGVAPLTRESTQTLLTAGEVYPISGPSQTYRTEGVISGTTIAQTEDWEPLPPLPLEFSNSVFGETVRPDTSPEPCAPTTPASEKEGDAEGSTTLADEIDNNCVSTDASTVLTAEGDGETRAQGKVLVQLPNDNPACPFCGDVVGKPTALHVHLKRHHGGKDVAFQCALCEKIDPKAHSILCHIPKCKGLILQVPAGDWPCEVCAKQFSTKSGLSQHKRRAHPMVRNAERIAASQPKQNSQRGKHKSCWSADEELLLLDFDKMYTGERYINKIIAEAMKTKTAKQVSEKRRLLKLYPRATSETADPGPGATPHSLEARSEVPSPTEGLYTTYMRKISQCLSKQKKGPVHQGLAQFETEILGAWVAGDPNIRSLIEAASIDVLSSFLAPESEPKRDNGRATVSKAKSGKGKSWMKKRAAKRHTYLRYQHLFENDRCKLASIILDGTERLQCQIPLEEVFQAYKKKWETQTPFQGLGQFKSQTRADNTAFNTLISAKEVVKNIKEMNKNSAPGPDRVSLKDLVRVDPEGDTLAGLFNTWLVTGIIPDGIKTCRSLLIPKTMDPDALKDLGNWRPLTIGSIVLRLFSRILTTRLAKACPLNERQRGFIAAPGCSENLKILHTIMKQAKREKKPLGVVFVDIAKAFDSVSHQHIQWVLQQRGLDQHVINIICDSYRNVHTRMEVGKELTEPIAIEVGVKQGDPMSPLLFNLALDPLISTLEMAGKGFSVGTQKVTALAFADDLVMLSDSWEGMTANIKILESFCTLSGLKVQAKKCHGFQVTPTHDSFTINNCEAWKIGDDTLNMIIPGESEKYLGVKVDPWIGFAKPALSEKLDTWLERINRAPLKPSQKLAMLNTFTVPRVIYLADHTDCKIAHLSTLDDKIRRAVKEWLHLPANTCNGFLYARSRDGGLGVTRLASLIPSIQARRLHRIAHSKDETIRCIALANDIESEYRKLWLAAGGTLDTVPAITDPVIMDHQLPQHVLEQLTEWEKPAPRAIYPIPCNWRTAEFSQWKDLPCQGSGVSHFENDPTSNDWLTHHKGFSQRQFLTALKLRANVYPTREYLGRGKSNSIVGCRHCSASYESLSHILGQCPAVQGARIRRHNKLCDILTREARKLQWKIYKEPNLRTANNELRKPDLIFVKEGKALVVDVTVRFEYKEKTFSDAAAEKVRHYQPLTEEIKKLTNASEVSYFGLPLGARGKWPTINERVLSSLGLSESAQKRTARLLSRRAILYSTDILSTFESIGKGLSNPADAKPEGTPIRQRGIL

SEQ ID NO: 4717 - protein, 1281 aa, Mauremys reevesii
MMAAPASAQISPCRRANSTILDTEIVPWGRCLSRQFIPPMRYRVTVSSVATQTDSPGTTDGVAPLTRESTQTLLTAGEVYPISGPSQTYRTEGVISGTTIAQTEDWEPLPPLPLEFSNSVFGETVRPDTSPEPCAPTTPASEKEGDAEGSTTLADEIDNNCVSTDASTVLTTEGDGETRAQGKVLVQLPNDNPACPFCGDVVGKPTALHVHLKRHHGGKDVAFQCALCEKTDPKAHSILCHIPKCKGLILQVRAGDWPCEVCAKQFSTKSGLSQHKRRAHPMVRNAERIAASQPKQNSQRGKHKSCWSADEELLLLDFDKMYTGERYINKIIAEAMKTKTAKQVSEKRRLLKLYPRATSETADPGPGATPHSLEARSEVPSPTEGLYTTYMRKISQCLSKQKKGPVHQGLAQFETEILGAWVAGDPNIRSLIEAASIDVLSSFLAPESEPKRDNGRATVSKAKSGKRKSWMKKRAAKRHTYLRYQHLFENDRCKLASIILDGTERLQCQIPLEEVFQAYKKKWETQTPFQGLGQFKSQTRADNTAFNTLISAKEVVKNIKEMNKNSAPGPDRVSLKDLVRVDPEGDTLAGLFNTWLVTGIIPDGIKTCRSLLIPKTMDPDALKDLGNWRPLTIGSIVLRLFSRILTTRLAKACPLNEQQRGFIAAPGCSENLKILHTIMKQAKREKKPLGVVFVDIAKAFDSVSHQHIQWVLQQRGLDQHVINIICDSYRNVHTRMEVGKELTEPIAIEVGVKQGDPMSPLLFNLALDPLISTLEMAGKGFSVGTQKVTALAFADDLVMLSDSWEGMTANIKILESFCTLSGLKVQAKKCHGFQVTPTHDSFTINNCEAWKIGDDTLNMIIPGESEKYLGVKVDPWIGFAKPALSEKLDTWLERINRAPLKPSQKLAMLNTFTVPRVIYLADHTDCKIAHLSTLDDKIRRAVKEWLHLPANTCNGFLYARSRDGGLGVTRLASLIPSIQARRLHRIAHSKDETIRCIALANDIESEYRKLWLAAGGTLDTVPAITDPVIMDHQLPQHVLEQLTEWEKPAPRVIYPIPCNWRTAEFSQWKDLPCQGSGVSHFENDPTSNDWLTHHKGFSQRQFLTALKLRANVYPTREYLGRGKSNSIVGCRHCSASYESLSHILGQCPAVQGARIRRHNKLCDILTREARKLQWKIYKEPNLRTANNELRKPDLIFVKEGKALVVDVTVRFEYKEKTFSDAAAEKVRHYQPLTEEIKKLTNASEVSYFGLPLGARGKWPTINERVLIPRSVRERQKDGKTT

SEQ ID NO: 4718 - protein, 1301 aa, Pelusios castaneus
MEALSCALLSPPRRALTLLDTKIIPWGRCIFRPFEPLARYRAKVNTVATQTEGPNTTTSVVQSVIGTSQTLSTLNKTNYNCAVETHTVKPFPILTLEIVNSAFKLTGKSSIPLQPNIPIVSSTTTEMEGDGGSSEMLLENNERPSMTSTTTEENCGTENQEKFLVMLPNDDPECPVCGDHVGKPTALNIHMKRVHGNKVVEYQCLLCGKQESRAHSIICHIPKCKGPQTQEPEGDWPCPACEKQFRTKSGLSQHKRSAHPAIRNAERIEACQPKPNSQRGKHKSCWTDEEVTLLKDLETLYLGHRSINKMIAEDMKTKTAKQVGEKRRLLGTSKKKNTAIVTPEPGLEAQPLKPKAKTGLKNAYKREIEKYLQTLGHLNGNMAQKNYPDFANEIFRAWIAEDPELNDQIEQTSSSVLSTFLSSTPRLTKRGKKKTESTKSGKEKAWMRKRAVERGTYLRHQQLFDRDRCKLASIILDGTERLQCKIPPDEVLRVYKDKWETCTPFEGLGQFTSYGKADNSAFDLLISRKEVVKNMKEMTTNSSPGPDGITMSDLLGEDPEGEKLAGLFNMWLVTGFIPTGVKECKSILIPKTMEPEALKELGNWRPITIGSIVLRLFSRILTTRLAKACPMNERQRGFIAAPGCSENLKVLHLLTRDAKRSKKPLGVVFVDIAKAFDSVSHDHIMWVLRERNLDQHMVNIIKDSYKNVKTRMELDKELTEQIAINVGVKQGDPMSPLLFNLALDPLISKLENAGMGYLHGDKKITALAFADDLVMLSDSWDGMKTNIEILEAFCKLSGLKVQARKCHGFFLSPTHDSFTINNCEAWKIATDNLNMIAPGESEKYLGLKVDPWIGFSKPALQNKLDTWLERITRAPLKPPQKLEILNTFTIPRLIYLADHTDYKKTMLASLDHSIRRAVKEWLHLPADTCDNFFYSRARDGGLGVARLASLIPSIQARRLHRIAHSQDEIIRYVALTNGINEDFQKLWVAAGGDEKKIPVITDPVYIDYKLPQGILEQLTEWEKPRPKAMYPMPCSWRENEFSRWKTLHCQGSGIEHFKNDPISNHWIRNNRGFPARHYILALKMRSNVYPTREYQGRGKNNAPVSCRHCPAKYESLSHILGQCPAVQGARIRRHNKLCELLKREAKKQKWTVYQEPQLRTEDNELRKPDLVFVKDKKALVVDVTVRFEYKEKVFTDAAAEKTQHYESLTPQIRKLTDADEVEYYGFPLGARGKWPEISEQVLTALGLTDSEQRRAARFFSRRTLLYSVDVLNTFTSIGKNKPDFVNKDLAKGGDRWESCND

SEQ ID NO: 4719 - protein, 1301 aa, Pelusios castaneus
MEALSCALLSPPRRALTLLDTKIIPWGRCIFRPFEPLARYRAKVNTVATQTEGPNTTTSVVQSVIGTSQTLSTLNKTNYNCAVETHTVKPFPILTLEIVNSAFKLTGKSSIPLQPNIPIVSSTTTEMEGDGGSSEMLLENNERPSMTSTTTEEDCGTENQEKFLVMLPNDDPECPVCGDHVGKPTALSIHMKRVHGNKVVEYQCLLCGKQESRAHSIICHIPKCKGPQTQEPEGDWPCPACEKQFRTKSGLSQHKRSAHPAIRNAERIEACQPKPNSQRGKHKSCWTDEEVTLLKDLETLYLGHRSINKMIADDMKTKTAKQVGEKRRLLGTSKKKNTAIVTPEPGLEAQPLKPKAKTGLKNAYKREIEKYLQTLGHLNGNMAQKNYPDFANEIFRAWIAEDPELNDQIEQTSSSVLSTFLSSTPRLTKRGKKKTESTKSGKEKAWMRKRAVERGTYLRHQQLFDRDRCKLASIILDGTERLQCKIPPDEVLRVYKDKWETCTPFEGLGQFTSYGKADNSAFDLLISRKEVVKNMKEMTTNSSPGPDGITMSDLLGEDPEGEKLAGLFNMWLVTGFIPTGVKECKSILIPKTMEPEALKELGNWRPITIGSIVLRLFSRILTTRLAKACPMNERQRGFIAAPGCSENLKVLHLLTRDAKRSKKPLGVVFVDIAKAFDSVSHDHIMWVLRERNLDQHMVNIIKDSYKNVKTRMELDKELTEQIAINVGVKQGDPMSPLLFNLALDPLISKLENAGMGYLHGDKKITALAFADDLVMLSDSWDGMKTNIEILEAFCKLSGLKVQARKCHGFFLSPTHDSFTINNCEAWKIATDNLNMIAPGESEKYLGLKVDPWIGFSKPALQNKLDTWLERITRAPLKPPQKLEILNTFTIPRLIYLADHTDYKKTMLASLDHSIRRAVKEWLHLPADTCDNFFYSRARDGGLGVARLASLIPSIQARRLHRIAHSQDEIIRYVALTNGINEDFQKLWVAAGGDEKKIPVITDPVYIDYKLPQGILKQLTEWEKPRPKAMYPMPCSWRENEFSRWKTLHCQGSGIEHFKNDPISNHWIRNNRGFPARHYILALKMRSNVYPTREYQGRGKNNAPVSCRHCPAKYESLSHILGQCPAVQGARIRRHNKLCELLKREAKKQKWTVYQEPQLRTEDNELRKPDLVFVKDKKALVVDVTVRFEYKEKVFTDAAAEKTQHYESLTPQIRKLTDADEVEYYGFPLGARGKWPEISEQVLTALGLTDSEQRRAARFFSRRTLLYSVDVLNTFTSIGKNKPDFVNKDLAKGGDRWESCND

SEQ ID NO: 4720 - protein, 1267 aa, Pelusios castaneus
MMEASFCASVSPMFRAFPSLDYTKIVPWGRCIFRPFEPLAHYRAKVCSVATQTEGPDTTVSEVLPVGLTSQIHDNNFKTSVGFPLISCMEFVNSAFRKPEDSNVLSTSSMMDDEEEGTDVLIEDKSGPQLVSDVTEGSGESGDRTFVVLLPNDDPECPVCGDHVGKPTALNNHLKRVHGDRQVEYQCQQCGKRELRVHSILCHVPKCKGMKMDEVEGDWHCTLCDRYFRSKSGLSQHKRSAHPVTRNIERIEATRPKGDSQRGKSKSCWLDEEVVLLRELEVAYAGHRYINKMISAVMTTKTAKQVSDKRRQLGASKKTIVVTSGSGPGVQYDPYNMPVLEPQTTTGLVNVYKREITTYLATCGTLNVDTSQRNHPDFTIDVFRAWVDGDLELIDRIENTSSKVLSSFMTPKPVKRTVRRVKKVIEGFEKNWMRKRAIKRGTYLRYQRLFEKDRCKLASIVLNGSERLRCSIAVSEIFRAYKDKWETNIGFGGLGDFISHSKTDNSAFDLLISPKEVVKNMKEMASNSSPGPDGITLSDLMGEDPKGERLAGLFNLWLVTGYIPEAVKECKTILIPKVMGSEALKDLGSWRPITIGSIVLRLFSRILTARLSKACPLNARQRGFIAAPGCSENLKILHLLTRDAKRSKKSLGVVFVDVAKAFDSVSHEHIMWVLRERELDQHIMEVIKNAYKNVRTRIKVEGGTTEPINIKVGVKQGDPMSPLLFNLALDPLIVKLEAAGMGYPCGENKISALAFADDLVLLSDSWDGMRNNIAILEAFCGVSGLKVQARKCYGFYLSPTHDSFTINNCDAWKIFDADLNMIAPGESEKYLGLKIDPWIGFSRPALLDKLALWLERITRAPLKPPQRLELLNTYTVPRLIYLADHVDCKKSVLTSLDNCIKRAVKDWLHLPPSTCDGFLYSKTRDGGLGVVKLVNLIPSIQARRLHRIAQSSDKMTRSIALLNGIEDDFHKVWISAGGEEKKIPIISDPVMMDYRLPHSVLDELTEWERPKVKAIYPKPCNWRSIEFVRWRTLQCQGSGVEHFENDPISNYWMKYNKGFSARHYILALKLRTNVYPTREYLGRGRSNASVGCRHCPANYESLSHILGQCPAVQDARIKRHNKLCDHLKQEAKKQNWIVYVEPHFKTIENELRKPDLIFVKDQKALVVDVTVRFEYKDKVFEEAAQDKIKHYNSLTSQIHDLTGAEVVEYYGFPLGARGKWPVESEKVLSALGLTTGQQKRVARFFSRRTLLYSIDVLNIFTSIGKTK

SEQ ID NO: 4721 - protein, 1321 aa, Podocnemis expansa
MEALTVALLSPPRRALNLLDKKIVPWGRCIFRPYEPLAQYRAKVCTVATQTECPDTTISEVQWTRTSQTTNIKDKYGYSYVAEKRNMKPFVVQTNEILNSIYNIKDVLLTPRRREDRLSRLWLEESMGFDEDEGVYESSPSQETSISEGTPTLHEPAKYVVSLPNDDPECPVCGDHIGKPTALSIHLKRTHGDKEVEYLCLLCGKSEQRVHSILCHIPKCKGETTTEPEGDWPCPECEKQFQSKSGLSQHKRSAHPALRNAEQIQASQPKSDSQRGNHKRCWTDEEVALLLELEKTYLGHKHVNKMIATEIKTKTAKQVGEKRRLLAQSKKKVTVENTNPGPGAERHSNEKGNFKLKETPLSTLEVRPVQPASKLGLNGAYKRKLKVYLENQKKMKQDNGFPDFAKDIFSAWVKGDHNIQEMVEQTSSDILSNFRPTLPKPKRTERQNNEKGNFKLKEAKSWMRKRAVKRGTFLRYQHLFDRDRCKLASIILDDTERLKCEVSPDEILKVYKDKWETRTPFNGLGHFTSHGKIDNSAFELLISAKEVIKNVKEMNKKSAPGPDGLTIEDLLGEDPEGERLAGLFNIWLVTGYIPNKIKDCRSILIPKTMDPVALRELGNWRPITIGSIVLRLYSRILTTRLAKACPLNARQRGFIATPGCSENLKTLHLLTRDAKRSKKPLGVVFVDIAKAFDSVSHDHIMWVLRERVLDQHMAKIIADSYTNVHTRIEIDNKSTEPISLNVGVKQGDPMSPLLFNLALDPLISQLETTGCGFSHGNKTITALAFADDLVMLSESWDGMTKNIEILEAFCSLSGLKVQAKKCHGFFLSPTHDSYTVNNCKPWQISDDALNMITPGESEKYLGLRVDPWIGFSKPALSDKLDNWLQRITRAPLKPPQKLEILNTFMIPRLIYLADHTDIKKTMLSSLDKNIRRAVKAWLHLPADACDNFLYSRTRDGGLGVARLSSLIPSIQARRLHRIAHSQDETIQSIALANGITDDYHKLWITAGGDENKIPVITAPVYIDYKLPQGVLDELTEWEKPAPKAIYPIPCSWREAELSEWKTKQCQGSGIQHFKNDPISNTWLRNQRGFPARHYITALKLRSNVYPSREYQGRGNKNMNVNCRHCPAKYESLSHILGQCPAVQGARIQRHNKLCNILKQRARKLKWTIYQEPQLRTAENELRKPDFIFVKDQKALVVDVTVRFEYKDKVFQDAADEKIQHYCSLTPQIKDLTGAEKVEYFGFPLGARGKWPEINYKVLTALGLSDTEQGRTAKFFSRRTLLYSIDVINTFASLGKNKPSTVNHPVNKDHNQEGAAGKSCND

SEQ ID NO: 4722 - protein, 1034 aa, Cuora mccordi
MEERSGDWACKTCNKQFNTKSGLSQHKRIAHPAIRNQERIEASQPKTTSQRGKHNSCWTVEEEQLLAAFNNMFWGKRNINILISDHIQTKTAKQISEKRRLLGLNKKAAVTTTDPLPVSSTYHLEMKTGSPNITTGLKDAYMGKIKQNIVNQGQIKFDSEIISAWMAGDSNIRLLVESTSLDILSTFLMEAPKPRKRGNNKTASKKSGKKKKWMEKRAAKKGFYKRYQHLFETDRCKLASIILDGTERLQCQIPLTEVLETYKSKWETLTPFEGLGQFKSHAAADNTAFELLLSAKEIMKNIKEMNKNSAPGPDKISLRDLLLGDPECNALEKLFNTWLITGIVPDTVKECRSLLIPKTADPEALKDLGNWRPLTIGSIVLRLFSRIITNRLAKACPINARQRGFIATPGCSENLKILHTILKEAKKSKKLLGVVFVDIAKAFDSVSHDHIMWVLQERGLDQHIVSIIEDSYKKIHTRIEVGTERTPPIEIKVGVKQGDPMSPLLFNLAIDPLITALEKANMGFSYGTNKVTSLAFADDLVMLSDTWEGMNKNIQILEAFCKLSGLKVQAKKCYGFFLSPTHDSYTINKCDAWKIDKDSLNMILPGESEKYLGLKVDPWIGFSKPLLAERLDIWLKRLTKVPLKPSQKLTMLNIYTIPRIVYLADHTDTKKTLLSSLDDTIRTVVKGWLHLPPDTCNGFIYTRTRNGGLGVTRLASLIPSIQARRLHRIANSEDETIWSIVLANNIDEFQNLWITAGGKEDEIPRITDPVSIDYRLPRRILELLNEWEKPAPKKIYPIPCNWREAELAHWKNLPCQGSGIEHFDNNTISNDWLQFHREFSERQFLTGLKLRANVYPTREYQGRGRMNKNVNCRHCTASYESLSHILGQCPAVQEARIRRHNKLCNLLKRKAKDLKWVVYEEPHLHTTEKELRKPDLIFVKDEIALVVDVTVRFEYMEKVFEDAAAEKVRHYKDLSNQIKELTGAKEIEYFGFPLGARGKWPKINEKVLIALGMPDYQQRRTAKCFSKKNFVIFH

SEQ ID NO: 4723 - protein, 1118 aa, Platysternon megacephalum
MCNKTDPKAHSILCHIPKCKGKVTEEPAGDWACETCNKQFNTKSGLSQHKRIAHPAVRNQERIEASQPKPNSQRGKHNSCWTVEEEQLLAAFNNMFWGKRNINILISDHIQTKTAKQISEKRRLLGLNKNAAVTTADPEPVSSTCHLEVRTRNPNTTTGLKDAYICKVNENIVNQGQIKFDSEVISAWMAGDSSIRSLVESTSLDILSTFLMEAPKPRKRGNNKATNKKSGKKKKWMEKRAAQKGIYKRYEHLFETDRCKLASIILNGTERLQCQIPLIEVLETYKSKWETLTPFEGLGQFKSHAAADNTAFEILLSAKEIMKNIKEMNKNSAPGPDKVSLRDLLLADPECNALEKLFNTWLISGIIPDSIKECRSLLIPTTADPEALKDLGNWRPLTIGSIVLRLFSRIITNRLAKACPINARQRGFIATPGCSENLKILHTILKQAKKSKKSLGVVFVDIAKALDSVSHDHIMWVLQERGLDQHIVNIIEDSYKKIHTRMEVGTERTPPIEIKVGVKQGDPMSPLLFNLALDPLITALEKANMGFSYGTNKITSLAFADDLVMLSDTWEGLNKSIQILEAFCKLFGLKVQAKKCYGFFLSPTHYSYTINKCDAWKIDKDSLNMILPGESEKYLGLKVDPWIGFSKPLLAEKLDMWLKRLTEAPLKPSQKLTMLNIYTVPRIIYLADHTDTKKTLLSSLDDNIRTVVKGWLHLPPDTCNGFIYTRTRDGGLGVTRLASLIPSIQARRLHRIANSEDETIRYIALANNTEEEFQNLWVTAGGKEDEIPRLTDPVSIDYRLPRWILELLNEWEKPAPKKIYLIPCNWRETDLAHWKNLPCQSSGIEHFDNDTISNNWLQFHRGFSERQFLMGLKLRANVYPTREYQGRGRMNKNVNCRHCTASYESLSHILGQSPAVQGARRGRHNKLCSMLKRKAKERKWVVYEEPHLHTTEKELRKPDLIFVKEEMALVVDVTVRFEYKEKVFKDAAAEKVRHYKDLTSQIKELTGAKEIEYFGFPLGARGKWPEINEKVLTALGMPDYQQKRTAKRFSKRTLLYSFDVISTFENIGKNQVNPHLPSAVGAPSLGNPPQRRRAIFFPGFQGPDPVCQAAVPRSGWGG

SEQ ID NO: 4724 - protein, 1326 aa, Platysternon megacephalum
MMAALASAQICPSRRANSTIMDTEIVPWGRFISRHFEPLARYRVKVSTVATQTDSPVTTDGEALHTLESSQTLPTEGEMYPISGPSQDTVTAGAISCTTVAQTEAEEILPPLPMEIINSAFGETVRPDTSPEPCVPTTPASEKERAAEGSVTLADEVIDNTSVSSNTSTVAMAEGECENRVQGKVLVQLPHANPACPFCGDHVGKPNALTVHLKRHHGGKDVEFQCAICGKTDPKAHSILCHIPKCKGLTSQEPAGDWPCEVCAKRFGTKSGLSQHKRRAHPVIRNAERIRASQPKQNSQRGKHKSCWSAEEEFLLIDLDKMYSGERCINKLIAEAMSTKTAKQVSEKRRLLNLYQKSRSEIAGPGPGANTHHLETRSEMPTSTVGLENTYMREVKRLLTNRFQGPQHQGLAKFESDILSAWVAGDPNVRSLVETASIDVLSSFLAPEPETKKKRMNRKSQKPKSGKAKSWMKKRAANRSTYMRFQHLFENDRCKLASIILDGTERLQCQIPLEEVFQMYKDKWETRTAFQGLGRFKPHALADNSAFDILISAKEVLKNIKEMNKNSAPGPDKVSLKDLVRVDPEGDTLAGLFNTWLVTGIIPDGIKECRSLLIPKTMDPEALKDLGNWRPLTIGSIVLRLFSRILTNRLAKACPLNERQRGFIAAPGCSENLKILHTITKHAKKGKKPLGVVFIDIAKAFDSVSHEHIMWVLQQRGLDQHVINIIGDSYRNVHTRMEIGKELTSPIAIEVGVKQGDPMSPLLFNLALDPLISMLEMAGKGFSFGAQKVTALAFADDLVMLSDSWEGMNANIQILESFCTLSGLKVQARKCHGFLLNPTHDSFTVNNCEAWKIGSDELNMIAPGESEKYLGVKVDPWIGFSKPALSDKLDTWLERINRAPLKPSQKLDMLNTFTVPRVIYLADHTDCKKALLSALDDNIRRAVKEWLHLPADTCNNFLYARSRDGGLGVTRLASLIPSIQARRLHRIAHSEDATIRYIALASDIESEYQKLWLAAGGTQDTMPAIADPVIIDHKLPHRVLELLNEWERPAPRAIYPIPCNWRDAEFSQWKDLPCQGSGVSQFWNDAISNDWLKQHRGFSQRQFLTALKLRANVYPTREYLGRGKNNNIVQCRHCNASYESLSHILGQCPAVQGARIRRHNKLCDILTREARKLQWTVYQEPHLHTARNELRKPDLVFVKEGTALVVDVTVRYEYKDKTFSDAAAEKVRHYETLTDEIRQLTGANKVNYFGFPLGARGKWPSINERVLSALGLSDGAQKPVARLFSRRALLYSTDIINTFASIGKGFLNPAEAKPVGTQRRQTGISS

SEQ ID NO: 4725 - protein, 982 aa, Cuora mccordi
MFWGKRNINILISDHIQTKTAKQISEKRRLLGLNKKAAVTTTDPLPISSTYHLEVKTGSPNITTGLKDAYMGKIKQNIVNQGQTKFDSAIISAWMAGDSNIRSLVESTSLDILSTFLMEAPKPRKRGNNKTTNKKSEKKKKWMIKRAAKKGFYKRYQHLFETDRCKLASIILDGTERLQCQIPLTEVLETYKNKWETLAPFEGLGQFKSHAAADNTAFDLLLSAKEIMKNIKEMNKNSAPGPDKISLRDLLLADPECNALEKLFNTWLITGIIPDTIKECRSLLIPKTADPKALKYLGNWRPLTIGSIVLRLFSRILTNRLAKACPINARQRGFIATPGCSENLKILHTILKQAKKSKKSLGVVFVDIAKAFDSVSHDHIMWVLQERGLDQHIMSIIEDSYKKIHTRIEVGTEHTPPIEIKVGVKQGDPMSPLLFNLAIDPLITALEKANMGFSYGTNKVTSLAFADDLVMLSDTWEGMNKNIQILEAFCKLSGLKVQAKKCYGFFLSPTHDSYTINKCDAWKIDKDSLNMILPGESEKYLGLKVDPCTGFSKPLLAERLASWLKRLTKVPLKPSQKLTMLNVYTVPRIIYLADHTDTKKTLLSSLDDNIKTVVKEWLHLPPDTCNGFIYTKTRNGGLGVTRLASLIPSIQARRLHRIANSEDETIRSIVLANNIDEEFQNLWKTAGGKEDEIPRITDPVPIDYRLPQRILELLNEWEKPAPKKIYPIPCNWREAELAQWKNLPCQGSGIEHFDNDTTSNDWLQFHRGFSERQFLMGLKLRANVYPTREYQGRGRMNKIVNCRHCTASYESLSHILGQCPAVQEARIRRHNKLCNMLKRKAKDLKWVVYEEPHLHTTEKELRKPDLIFVKEETALVVDVTVRFEYREKVFEDAAAEKVRHYKDLTSQIKELTGAKDVEYFGFPLSARGKWPKINEKVLTALGMPDYQQKRTAKCFSKRTLLYSIDVINTFESIGKNNKNTVP

SEQ ID NO: 4726 - protein, 1290 aa, Platysternon megacephalum
MMAALDSARISPSRGANSTDRSKKIVPWGRCVFRPNEPLARFRANVSTVATQTESPVNTDSKASNVQHALQTNISTKEVHPKPRTSRDPTKRLTVTRKKKWIGPIHTTEIISNAFKETVKPTCLPNPDLSLITSDEEDLDSEGPNTETSEILTTLSIEETVEPIINGTQQKTIIQLPNDNPACPFCGDHVGKPSALNVHLKRNHGGREVEFQCSMCNKADPKAHSILCHIPKCKGKVTEEPTGDWACETCNKQFNTKSGLSQHKRIAHPAIRNQERIAASQPKPNSQRGKHNSCWTVEEEQLLAAFNNMFWGKKNINILISDHIHMKTAKQISEKRRLLGLNKNATVTTTNPLPVSSTCHLKIRTDSPNTTTGLKDTYMCKINENIVNQGQIKFDSEVISAWMAGDSNIRSLVESTSLDILSTFLMETPKPRKKGNNKITNKKSGKKKKWMEKRAVKKGFYKRYQHLFETDRCKLASIILDGTERLQCQIPLTEILETYKSKWETLTPFEGLGQFKSHAVADNTAFEILLSAKEIMKNIKEMNKNSAPGPDKVSLRDLLLADPECNALEKLFNTWLITGIIPNSIKECRSLLIPKTADPEALKELGNWRPLTIGSIVLRLFSRIITNRLAKACPINARQRGFIATPGCSENLKILHTIVKQAKTSKKSLGVVFVDIAKAFDSVSHDHIMWVLQERGLDQHIVNIIEDSYKKIHTRMEVGTERTPPIEIKVGVKQGDPMSPLLFNLAIDPLITALEKANTGFSYGKNKITSLAFADDLVMLSDTWEGMNKNIQILETFCNLSGLKVQAKKCYGFFLSPTHDSYTINKCDAWKIDKDSLNMIQPGESEKYLGLKVDPWIGFSKPVLAEKLTIWLKRLTEAPLKPSQKLTMLNIYTIPRIIYLADHTDTKKTLLSSLDDNIRTVVKGWLHLPPDTCNGFIYTKTRDGGLGVTRLASLIPSIQARRLHRIATSEDETIRNIAMANNIEEEFQNLWVTAGGKKEEIPRITDPVSIDYRLPRRILELLNEWEKPAPKKMYPIPCNWREAEMAHWKNLPCQGSGIEHFDNDTISNDWLQFHRGFSERQFLMGLKIRANVYPTREYQGRGRTNKNVNCRNCTASYESLSHILGQCPAVQGARIRRHNKLCSMLKREAKELKWVVYEEPHLHTTEKELRKPDLIFVKEEMALVVDVTVRFEYKEKVFEDAAAEKVRHYKDLTSQIKELTGAKEIEYFGFPLGARGKWPEINEKVLTALGMPDYQQKRTAKRFSKRTLLYSIDVINTFENIGKNNKNNVP

SEQ ID NO: 4727 - protein, 1323 aa, Cuora mccordi
MEALASAQLPLSRRANSTILDTEIVPWGRCISRHFIPPVRYRVTVSTVATQTDSPGTTDGVTPLTREFTQTLTTAGEMDPISGPSQTSSTEGVISGNTIAQTEDWEPLPPLPLEFLNSVFGETVRPDTSPEPCAPTTPASEKEGDAEGSTTLADEIDNNYVSTDASTVPTTEGDGETRAQEKVLVQLPHDNPACPFCGDVVGKATALHVHLKRHHGGKDVAFQCALCGKTDPKAHSILCHIPKCKGLTLQVPAGDWPCEVCAKQFSTKSGLSQHKRLAHPMVRNAERIAASQPKQNSQRGKHKSCWSAEEELLLLDFDKMYTGEKYINKLIAEAMKTKTAKQVSDKRRLLKLYPRASSETADPGPGATPHSLEARSEAPFPTRGLHTNYMRKIRQCLSKQKQGPDHQNLAQFETEILSAWVAGDPNIRSLIEAASIDVLSSFLAPESEPKKGKRRATVPKAKSGKERSWMKKRAAKRHTYLRYQHLYEHDRCKLASIILDGTERLQCQIPLEEVFQAYKSKWETQTPFQGLGQFKPKTRADNTAFDSLISAKEVMKNIKEMNKNSAPGPDRVSLKDLVRVDPEGDILAGLFNTWLVTGIIPDGIKECRSLLIPKTMDPDALNDLGNWRPLTIGSIVLRLFSRILTNRLAKACPLNERQRGFIAAPGCSENLKVLHTIMKQAKREKKPLGVVFVDIAKAFDSVSHQHILWVLQQRGLDQHVIDIICDSYRNVHTRMEVGKELTAPIAIDVGVKQGDPMSPLLFNLALDPLISTLEMAGKGFSVGTQKVTALAFADDLVMLSDSWEGMNANIQILESFCTLSGLKVQARKCHGFQLTPTHDSFTINNCEAWKIGADTLNMINPGESEKYLGVKVDPWIGFSKPALSDKLDTWFERINRAPLKPSQKLAMLNTFTIPRLIYLADHTDCKIALLSTLDDKIRRAVKEWLHLPANTCNGFLYARSRDGGLGVTRLASLIPSIQARRLHRIAHSEDDTIRCIALANDIESEYRKLWLAAGGTQDTMPAITDPVIMDHQLPQHVLEQLTEWEKPAPRAIYPIPCNWRNAEFSQWKDLPCQGSGVSHFENDPTSNDWLTHHKGFSQRQFLTALKLRANVYPTREYLGRGKNNSIVRCRHCSASYESLSHILGQCPAVQGARIRRHNKLCDILSREARKLQWKIYQEPHLRTANNELRKPDLIFVKEGKALVVDVTVRFEYKEKTFSDAAAEKVRHYQPLTEAIKKLTGANKVSYFGFPLGARGKWPTINESVLSSLGLSESAIKRAARLLSRRALLYSTDILSTFENIGKGLSNPADAKPEGTPKRQMGIL

SEQ ID NO: 4728 - protein, 1305 aa, Mauremys reevesii
MMAALDSAGNSLSRGANSTDRNTKVVPWGRCIFRPNVPLARFRVNVSTVATQTECPVITESGADNVQPAPQTKKVYFQPRLSRNYTRRLAVIEEEQWSGPLCTIEIIGSAFRETVKSTGLSNPDFSFITSDDEDLDSGGRNTEVCESHVNTDIEERMEIISSESHILTTIEEIVEPTVSGVQEKILIPLPNDNPACPFCGDHVGKPTALSVHLKRNHGGRMAEFQCSRCDKSDSKVHSILCHIPKCKGKITEDRLGDWACEICKKQFNTKSGLSQHKRIAHPAVRNKERIEASLPKVISQRGKHKSCWTVEEEQLLVTFNNMFWGERNINMLISDHISTKTAKQISDKRRLLGLNKKAVVTILDPVSELSVCHSEAKTGSFITITGLRDAYICKIKQDIGEQGQMKFDPDIISAWMADDSNIRSLVESTSFDILSTFLRESSQPRQRGNDKIMSNKSGKKKKKKWMEKRAAKKGFYKRYQHLFEIDRCKLASIILDGTERLKCQIPLIEIFETYKNKWENLVPFEGLGQFKSHAAANNTAFEVLFSAKEIMKNVEGMNKNSAPGPDKISLRDLLQVDPECTELVKLFNTWLIVGMIPDAIKECRSLLIPKTADPEALKDLGNWRPLTIGSIILRLFSRILTNRLAKACPINPRQRGFIATSGCSENLKILHILLKQAKKSKKSLGVIFVDIAKAFDSISHDHIMWVLRERGLDQHIMNIIEDSYKNIHTRIEVGMERTSSIEIKVGVKQGDPMSPLLFNLAMDPLITALEEANMGFSYGMNKVTSLAFADDLVMLSDTWEGMTKNIQILEDFCRVSGLKVQAKKCYGFFVSPTHDAYTINNCETWNIDKDSVNMILPGESEKYLGLKVDPWIGFSKPLLEEKLAVWLERLTKAPLKPSQKLTMLNNYTIPRIIYLADHTDTKKTLLSSLDATIRTVVKGWLHLPPDTCNGFIYTRIRNGGLGVMRLASLIPSIQARRLYRIANSDDEIIRSIALANNIDEEFKSLWITAGGKEDKIPVITDPVFIDYGLPRQILESLNEWEKPAPKKIYPIPSNWREVELAHWKDLPCQGSGIEHFINDTISNDWLQFHPEFSERQFLIALKLRVNVYPTREYQGRGRMNKNVNCRHCTAPYESLSHILGQCSAVQEARIRRHNKLCGLLKQKAKDLKWVVYEEPHLQTVERELRKPDFIFVKEDVALVVDVTVRFEYMEKVFEDAAAEKVRHYKNLTSQIKELTGAKEVEYYGFPLGARGKWPKINEKVLTALGIPSSQHKRIAQRFSKRTLQYSIDIINTFESIGKNKQFAVP

SEQ ID NO: 4729 - protein, 1326 aa, Chrysemys picta
MMEALASAQLGPGRRANSTHLDTDVVPWGRCTFRTFEPLARYRVKVSTVATQTDSHQLTDNEAYPTLKSSKTTITEGEMYPIPGTSQTHTAAGAISCETVAQTEAEEILPALPLEILNSAFGETVGPDTSPEPCVPTTPVSEKERDAGGSETLADGTDGTICVPSSAPTVVVTEGECENRVQGKVLVTLPHDNPACPFCGDHVGKPKALSVHMKHHHGGKDVEFQCSLCTRADPNVHSILCHIPKCKGLTPQEPAGDWACEVCARRFGTKSGLSQHKRRAHPVVRNAERIQASQPKQNSQRGKHKSCWSAEEELLLTDFDTMYSGEKYINKLIAEAIKTKTAKQVSDKRRLLNLYRKKSSGTADPGPGAQKHNLEVRSETPISTTGLKNSYMRTITNRLRASNRGPLRQDLEKFEAEVLSAWVAGDPNIRSLVETTSIDVLSSFLAPEHEHKHKQKGNTKGRKSKSGKGQSWRQKRATKRGTYIRFQHLFENDRCKLASIILDGTEHLQCEIPLEKVFQTYKDKWESRTPFQGLGQFKSHALADNSAFDILISAKEVLKNISEMNKNSAPGPDKVSLKDLVRVDPEGDTLAGLFNTWLVTGIIPDGIKECRSLLIPKTMDPEALQDLGNWRPLTIGSIVLRLFSRILTNRLAKACPINARQRGFIAAPGCSENLKVLHTITKQAKKEKKPLGVVFIDIAKAFDSVSHDHIMWVLQERGLDQHIINIIGDSYRNVHTRMEVGKELTSPIAIDVGVKQGDPMSPLLFNLALDPLISTLETAGKGFSFGAQKVTALTFADDLVMLSDSWEGMHTNIQILESFCHLSGLKVQAKKCHGFLLSPTHDSFTVNNCEAWKIGADGLNMIAPGESEKYLGLKVDPWIGFSKPALSDKLSTWLERINRAPLKPSQKLEMLNTFTIPRVIYLADHTDCKKTLLSSLDDNIRRAVKEWLHLPADTCNSFLYTRSRDGGLGVTRLASLIPSIQARRLHRIAHSEDMTIRFIALANDIESEYQSLWLAAGGTQDTMPAITDPVTIDHRLPQHALELLNEWERPAPRVIYPIPCNWRDAEFSQWKDLPCQGSGVSHFGNDPTSNSWIKHLTGFSQRQFLTALKLRANVYPTREYLGRGKNEYMVKCRHCDAPYESLSHILGQCPAVQGARIRRHNKICEILTREARKLEWTVYQEPHLRTSTNELRKPDLVFVKDGTALVVDVTVRFEYKEQTFSDAAAEKVRHYQSLTSEISRLTGASKVRYFGFPLGARGKWPKINDRVLSALGLSESAQGRAARLLSRRALLYSIDVLNTFSGIGKGLPNSADTKSVGTQREQLGIS

SEQ ID NO: 4730 - protein, 1211 aa, Mauremys reevesii
MMAALDSAGNSLSRGANSTDRSTKVVPWGRCIFRPNEPLAQFRVNVSTVATQTESPVITESKADNVQPAPQTKEVYFQPRILRNYTRWLTVIPEEQWLGPLHTIEIIGSAFRETVKSACLSNPDFSFITSDDEDLDFGGRSTEVHESNMITNIEERMETISSESHILTTIEETVETTVSGAQEKTLIPLPNDNPACPFCGDHVGKPTALSVHLKRNHGGRVAEFQCSMCDKSDSKVHSILCHIPKCKGKITEDQFGDWACEICNKQFNTKSGLSQHKRIAHPAVRNKERIEASQPKVISQRGKHKSCWTAEEEQLLVTFNNMFWGERNINILISDHIQTKTAKQISDKRRLLGLNKKALVTTMDQVPVLSVCHLEAKTGSPITITGLRDAYICKIKQNIGEQGQIKFDPDIISAWMAGDSNIRSLLESTSFDILSTFLRESPKPRQRGNNKIMSNKSGKKKKWMEKRAAKKGFYKRYQHLFEIDRCKLASIILDGTERLQCQIPLTEIFETYKNKWESLTPFEGLGQFKSHTAANNTAFESLLSAKEIMKNIKGMNKNSAPGPDKISLRDLLQADPECTALVKLFNTWLITGMIPDTIKECRSLLIPKTADPEALKDLGNWRPLTIGSIILRLFSRIITNRLAKACPINPRQRGFIATSGCSENLKILHTILKQAKKSKKSLGVIFVDIAKAFDSISHDHIMWVLQERGLDQHIVNIIEDSYKNIHTRIEVGTERTSSIEIKVGVKQGDPMSPLLFNLAMDPLITALEKANMGFSYGMNKVTSLAFADDLVMLSDTWEGMTKNIQILEDFCKLSGLKVQAKKCYGFFVSPTHDSYTINNCETWNIDKDSLNMILPGESEKYLGLKVDPWIGFSKPLLEEKLVVWLERLTKAPLKPSQKLTMLNNYTIPRIIYLADHTDTKKTLLSSLDDTIRTVVKGWLHLPPDTCNGFIYTRIRNGGLGVARLASLIPSIQAQRLYRIANSDDEIIRSIALANNIDEEFKKLWITAGGKEDKIPGITDPVSIDYGLPRQILESLNEWEKPAPMKIYPIPCNWREVELAHWKDLPCQGSGIEHFINDTISNDWLQFHPEFSERQFLIGLKLRVNVYPTREYQGRGRMNKNVNCRHCTAPYESLSHILGQCSAVQEARIRRHNKLCGLLKQKAKDLKWVVYEEPHLQTIERELRKPDFIFVKEDVALVVDVTVRFEYRIIES

SEQ ID NO: 4731 - protein, 1326 aa, Chrysemys picta
MMEALASAQLGPGRRANSTHLDTDVVPWGRCTFRTFEPLARYRVKVSTVATQTDSHQLTDNEAYPTLKSSKTTVTEGEMYPIPGTSQTHTAAGAISCETVAQTEAEEILPALPLEILNSAFGETVGPDTSPEPCVPTTPVSEKERDAGGSETLADGTDGTICVPSSAPTVVVTEGECENRVQGKVLVTLPHDNPACPFCGDHVGKPKALSVHMKHHHGGKDVEFQCSLCTRADPNVHSILCHIPKCKGLTPQEPAGDWACEVCARRFGTKSGLSQHKRRAHPVVRNAERIQASQPKQNSQRGKHKSCWSAEEELLLTDFDTMYSGEKYINKLIAEAIKTKTAKQVSDKRRLLNLYRKKSSGTADPGPGAQKHNLEVRSETPISTTGLKNSYMRTITNRLRASNRGPLRQDLEKFEAEVLSAWVAGDPNIRSLVETTSIDVLSSFLAPEHEHKHKQKGNTKGRKSKSGKGQSWRQKRATKRGTYIRFQHLFENDRCKLASIILDGTERLQCEIPLEKVFQTYKDKWESRTPFQGLGQFKSHALADNSAFDILISAKEVLKNISEMNKNSAPGPDKVSLKDLVRVDPEGDTLAGLFNTWLVTGIIPDGIKECRSLLIPKTMDPEALQDLGNWRPLTIGSIVLRLFSRILTNRLAKACPINARQRGFIAAPGCSENLKVLHTITKQAKKEKKPLGVVFIDIAKAFDSVSHDHIMWVLQERGLDQHIINIIGDSYRNVHTRMEVGKELTSPIAIDVGVKQGDPMSPLLFNLALDPLISTLETAGKGFSFGAQKVTALAFADDLVMLSDSWEGMHTNIQILESFCHLSGLKVQAKKCHGFLLSPTHDSFTVNNCEAWKIGADGLNMIAPGESEKYLGLKVDPWIGFSKPALSDKLSTWLERINRAPLKPSQKLEMLNTFTIPRVIYLADHTDCKKTLLSSLDDNIRRAVKEWLHLPADTCNSFLYTRSRDGGLGVTRLASLIPSIQARRLHRIAHSEDMTIRFIALANDIESEYQSLWLAAGGTQDTMPAITDPVTIDHRLPQHALELLNEWERPAPRVIYPIPCNWRDAEFSQWKDLPCQGSGVSHFGNDPTSNSWIKHLTGFSQRQFLTALKLRANVYPTREYLGRGKNEYMVKCRHCDAPYESLSHILGQCPAVQGARIRRHNKICEILTREARKLEWTVYQEPHLRTSTNELRKPDLVFVKDGTALVVDVTVRFEYKEQTFSDAAAEKVRHYQSLTSEISRLTGASKVRYFGFPLGARGKWPKINDRVLSALGLSESAQGRAARLLSRRALLYSIDVLNTFSGIGKGLPNSADTKSVGTQREQLGIS

SEQ ID NO: 4732 - protein, 1292 aa, Mauremys reevesii
MVENHKMMAALDSAGNSPSRGANSTDRSKKTVPWGRCIFRPNEPLAQYRANVSTVATQTESPVNTESEADNVQHAPQTKEVHSKPRISQNQTKWLTVTRKKQWIGPIRTTEIISSAFKETVKPTCLPNPDLSLITSGEEDLDTEGPSTETNKSHIITTIEETVETIINGTQEKTLIQLPNDNPACPFCGDHVGKPIALSVHLKRNHGGKVVEFQCSMCNKTDSKAHSILCHIPKCKGKINEERSGDWACKTCNKQFNTKSGLSQHKRIAHPAIRNQERIEASQPKTTSQRGKHNSCWTVEEEQLLAAFNNMFWGKRNINILISDHIQTKTAKQISEKRRLLGLNKKAAVTTMDPLPVSSTCHLEVKTGSPITTTGLKDAYMCKIKQNIVNQGQIKFDSEIISAWMAGDSNIRSLVESTSLDILSTFLMETPKPRKRGNNKTVSKKSGKKKKWMENRAAKKGFYKRYQHLFETDRCKLASIILDGTEHLQCQIPLTEVLETYKSKWETLTPFEGLGQFKSHAAADNTAFEILLLAKEIMKNIKEMNKNSAPGPDKISLRDLLLADPECNALEKLFNTWLITGIIPDTIKECRSLLIPKTADPEALKDLGNWSPLTIGSIILRLFSRIISNRLAKACPINARQRGFIATPGCSENLKILHTILKQAKKNKKSLGVVFVDIAKAFDSVSHDHIIWVLQERGLDQHIVNIIEDSYKKIHTRIEVGTERIPPIEIKVGVKQGDPVSPLLFNLAIDPLITALEKANMGFSYGTNKVTSLAFADDLVMLSDTWEGMNKNIQILEAFCKLSGLKVQAKKCYGFFLSPTHDSYTINKCDAWKIDKDSLYMILPGESEKYLGLKVDPWIGFSKPLLAERLAIWLKRLTKAPLKPSQKLTMLNIYTLPRIIYLADHTDTKKTLLSSLDDNIRTVVKGWLHLPPDTCNSFIYTRTRNGGLGATRLASLIPSIQARRLHRIANSEDETIRSIVLSNNIDEEFQNLWITAGGKEDEIPKITDPVSIDYRLPRRILELLNEWEKPAPKKIYSIPCNWREADLAHWKNLPCQGSGIEHFDNDIISNDWLQFHREFSERQFLMGLKLRANVYPTREYQGRGRKNKKVNCRHCTASYESLSHILRQCPAVQEARIRRHNKLCNMLKRKAKDLKWVVYEEPHLLTTEKELRKPDLIFVKEEIALVVDVTVWFEYMEKVFEDAAAEKVRHYKDLTSQIKELTGAKEIEYFGFPLGARGKWPKINEKVLTALGMPDYQQKRTAKCFSKRTLLYSIDVINTFESIGKNNKNTVP

SEQ ID NO: 4733 - protein, 1182 aa, Pelusios castaneus
MEGDGGSSEMLLENNERPPMTSTTTEETCGTENQEKFLVMLPNDDPECPVCGDHVGKPTALSVHMKRVHGNKVVEYQCLLCGKQESRVHSIICHIPKCKGPETQEPEGDWPCPACEKQFRTKSGLSQHKRSAHPAIRNAERIEACQPKPNSQRGKHKSCWTDEEVTLLKDLETLYLGHRSINKMIADDMKTKTAKQVGDKRRLLGTSKKNNTAIVKPEPGTQKNTLEAQPLKPKAKTGLKNAYKREIEKYLQTLGHLNGNMAQKNYPDFANEIFRAWIAEDPELHDQIEQTSSSVLSTFLSSTPRLTKRGKKKTESTKSGKEKAWMRKRAVERGTYLRHQQLFDRDRCKLASIIMDGTERLQCKIPPDEVLRVYKDKWETCTPFEGLGQFTSYGEADNSAFDLLISRKEVVKNMKEMTTNSSPGPNGITMSDLLGEDPEGEKLAGLFNMWLVTGFIPTGVKECKSILIPKTMEPEALKELGNWRPITIGSIVLRLFSRILTTRLAKACPMNERQRGFIAAPGCSENLKVLHLLTRDAKRSKKPLGVVFVDIAKAFDSVSHDHIMWVLRERNLDQHMVNIIKDSYKNVKTRMELDKEFTEQIAINVGVKQGDPMSPLLFNLALDPLISKLENAGMGYLHGDKKITALAFADDLVMLSDSWDGMKTNIEILEAFCKLSGLKVQARKCHGFFLSPTHDSFTINNCEAWKIATDTLNMIAPGESEKYLGLKVDPCIGFSKPALQNKLDTWLERITRAPLKPPQKLEILNTFTIPRLIYLADHTDYKKTMLASLDHSIRRAVKEWLHLPADTCDNFFYSRARDGGLGVARLASLIPSIQARRLHRIAHSQDEIIRYVALNSIRGINEDFQKLWIAAGGDEKKIPVITDPVYIDYKLPQGILEQLTEWEKPRPKAMYPMPCSWRENEFSRWKTLHCQGSGIEHFKNDPISNHWIRNHRGFPARHYILALKMRSNVYPTREYQGRGKNNAHVSCRHCPAKYESLSHILGQCPAVQGARIWRHNKLCELLKREAKKQKWTVYQEPQLRTEDNELRKPDLVFVKDKKALVVDVTVRFEYKEKVFTDAAAEKTQHYELLTPQIRKLTGADEVEYYGFPLGARGKWPEISEQVLTALGLTDSEQRRAARFFSRRTLLYSVDVLNTFTSIGKNKPDFVNKDLAKGGDRWESCND

SEQ ID NO: 4734 - protein, 728 aa, Mesoclemmys tuberculata
MKRTSALGPDKLSLKDLLCRDPDGDTLSGLFNLWMTTGIIPDTIKECKSLLIPKTMDLKALKDIGNWRPLTIGPIVLRLFSRILTSRLAKACPLNKRQRGFIAASGCSENLKTLQILTKHAKNKRKPLGVVFVDIAKAFDSVSHEHIIWVLRKRGVDEHIINIIDDSYKNVHTRIQIGKELTPRIAIKVGVKQGDPMSPLLFNLALDPLITMLEERGKGFSCGSKKITALAFADDLVLLSDSWTGMKDNINILESFCKLSGLKVQAKKCHGFFLSPTHDSYTTNNCEAWTIGTDTLNMVEPGQSEKYLGVKVDPWVGFTKPTLTHRLHTWLQRITDAPLKPSQKLVILNTFTIPRLIYLADHTDCKKTMLSSLDDDIRREVKEWLHLPADTNNGIIYTSTRNGGLGVIKLASLIPSVQARRMHRIVQSSDDVTRNIALENNIDVEYKKLWIAAGGTEEDMPMITYPVMEFKETKIPSNILAKLNEWEKPTPKPIYPIPCKWRENEFAQWKNLPCQGSGIEHFHNDPISNYWIKNHKGFSERQFLTALKIKSNVYPTREYLGRGKKNALVSCRHCKAKYESLSHIMGQCPVVQDARIKRHNKLCDILKKEAKRLKWETYEEPRLYTKNGELRKPDLVFTKDDIALVVDVTVRFEYKDKQFTDAAAEKVRHYRDLTKEIQTLTGAKTVLYYGFPIGARGKWPNDNYKLLADLGLSEGRRETVAKLCSKRA

SEQ ID NO: 4735 - protein, 1260 aa, Mesoclemmys tuberculata
MAAQLCAQSYPNHLTHVMLLDKMIVPWGRCIIRRFEPPNYYKVRVHSMGTQTDTLTLPNGGLLPIMEKPQTTLTRRAANKETAARSKRPKSTRPVFSMIIENSSKELNVQDDNTKNLNEEETEGTRKAIVKLPDNNPACPFCQNHVGKPLALKEHLKRHHGNHEALFECSMCGKIDPKPHSILCHIPKCKGMKNEEPPGEWQCEICAKQFGTKSGLSQHKRLTHPATRNTERIQATLPKTISQRGKHKSCWTEEEEKLLTDLHFLYRGHRFINKIIAEKLTTKTAIQIKDKRAAMGLLNRIGSETNEPETAVYNLEDTSEQLSATNGLREAYLQRAVKDLQRPVLEIFEADILKAWVKGEPDIRSKIESTTIDVLSTFLHEEPKPRSKPKTSNSKRYGKEKSWIRKRAEQRGQYRKYQQLYASNRDKLASIILDGTEKHQCQISLAEVHKAYKDKWETETPFAGLGQFKPYEKADNSAFELKISAKEIIKNINEMNKNSAPGPDKLSLKDLLRRDKDGEILSGLFNVWITTGIIPDTIKECRSLLIPKTMDPEALKDIGNWRPLTIGSIILRLFSRILTSRLAKACPLNKRQRGFIAASGCSENLKTLQILTKHAKNKKKPLGVVFVDIAKAFDSVSHEHIIWVLRKRGVDQHIINIIADSYKNVHTRMEIGKEQTPRIEIKVGVKQGDPMSPLLFNLALDPLITMLEDRGKGFSCGSKKITALAFADDLVLLSDSWTGMKENIKILESFCKLSGLKVQAKKCHGFFLSPTHDSYTTNNCEAWTIGTDTLNMVEPGQSEKYLGVQVDPWIGFTKPTLTNKLNTWLQRITNAPLKPSQKLVILNTFTIPRLIYLADHTDCKKTMLSSLDDDIRRAIKDWLHLPADTNNGLIYTSTRNGGLGVIKLASLIPSVQARRMHRIVQSSDDVTRNIALENDIDVEYEKLWLTAGGTEEDMPMITNPVMEFKETRIPSHVLVTLNEWERPTPKPMYPIPCKWREAEFSQWKNLPCQGSGIEHFYNDPISNNWIRNHRGFSERQFLTALKIKANVYPTREYLGRGKKNAPVTCRHCKAKYESLSHIMGQCPAVQDARIKRHNKLCNILQKEAKRLKWVVYEEPRLYTKNRELRKPDLVFQKDDVALVVDVTVRFEYKNKQFTDAAAEKVRHYRDLTKEIQALTGAKTVLYYGFPIGARGKWPNDNYKLLKDLGLSEGRREAVAKLCSRRALLYSADIVNIFANIGKNTVNVTNKANTVSESRNDYNNS

SEQ ID NO: 4736 - protein, 1102 aa, Ceratina calcarata
MDNWVLRNQGVMGGAGDGDPPEPDRAPQGVAPNSGRALTSRDNQTNCQSASFRGITAGTGILQPLYAHVVAPATAAGGSSGTRNNELNMDEPRRTAMEVFAENTAGATGDDLSGPIICPECFICFSTKIGLGVHRRRKHEREVNDEIDTTREKRRWTQEEIDILVQTEVEADTTIQAINQYLKEKTGSSRSIEAIKGLRKQRRYRDRLEVAKEQLRQGNRGNGNGEEPQTPSNISLYESTDSMLVRWLVKAKEEISPEMPGAVHILKAIDLTVTNEDPMEELAAWSTASFPARSVEGRGERRIDLSGLSSKKKRRAEYRALQKLWRRNMSKAAKKILDGDTDVMNHPDLQTQLAFWKNIIESEDVREPDERDAVTDHGPAVHCIMHPVLEKEIVECKVSKGSAAGPDGIGTDQWNKEIPIIVKAAIMNIMLKCGRVPKIWRDSRTILIPKVMGADDPSLYRPISISSVILRHLHKVLAKRISALNLLDPRQKAFIDQDGIAENVFALASLLEDATAKLKPLHLATLDIRKAFDTVCRRELLRIIAKKGLEEKFCEYLRNLYRLSNTVLEVDGVRSPEMRPTVGVRQGDPLSPLLFNMGIDEVLESIPNHIGYELGGCNYNALAFADDLVLVASTKEGLGQLLETVESKLATLGLQMMPAKCHALSLQPDGRNKKMKICTDAAFQIAGVPIRQLQPGEIWRYVGVDFSSRGPAEVQEDLQEKLSRISKGPLKPQQRLKILTTYLLPRFVHRMVFGSIKYTSLRKLDKIVRREVRKWLYLPGDVPTAFFHAAVREGGLGIPAFETWIPETKKKRISNLMKSRWDGSKAVGESCYTLGVLRWCSLARYDRAKWGDLLHAAVDGFELREVSSAKPSYSWFQDPYVSIPSKDWIQYVRTRINALPSAVRTSRGNQREGRNVRCRAGCNRDETTAHIIQECHRTHGGRIMRHDAIAKRVAELLDAKGYRVEREKIFPTREGARKPDILALKEGKIHVLDVQIVSASDNLTKIGKRKTNYYRNNSDLIAGIASRSGFSTAEVNVMDVTISWRGVWSSDSVDYLRGLGVSQNDLKGLTTRVLQGSHTNFTRFNRMTTMSYGNGTPAVGIG

SEQ ID NO: 4737 - protein, 839 aa, Ceratina japonica
MPGAVSILRAIELVLENSDPTGELLTWSITVFPDKAGREAEATSWDLSQLSAKKKRKAEYKALQRLWRKNMTKAAKKVLDGDTDSVKHPDMQTQLAFWRNIIEGEIDNQPEEEEPPSDSEGGLRRVMYPVQPKEVVEGKVPKGSAAGPDGIQTDLWNREIPVIIKATIMNILLKWGRIPKIWRDSRTVLIPKVMGSEDPATYRPISIASVVLRHLHKILARRIAAFNLLDPRQKAFINQDGIAENVYALSALLEDARKKLAPIHMATLDIRKAFDTVSRNELLRAVAKKGLEAKFCTYLKNLYDESTTVLEVDGAVSPDLKPTRGVRQGDPLSPLLFNIVIDEVLQSVPEYVGCKMGGLNFNPLAFADDLVLIASTREGLRESLKSAEEKLKIFGLQMMPAKCHALSMVPDGRGKKIKVSTEASFHLGGVTIRQIQPGDIWRYLGVDFSCRGPAEIQEDLSEKLQRITKGPLKPQQRLKILTTYLLPRFVHSLVLGSVRHSSLRKLDKTVRRAVRKWLFLPDDIPVAFFHAPVQDGGLGIAPFESWVPETKRKRINNLDNSRWEASKVIKESLYIQGVLKWCGMAKFGRSDWSGRLHRSVDGFELREVRKTKASSTWFHDPYIAIPSRDWIQHVRTRINALPSAMRTSRGTRREGRSIRCRAGCNKVETTAHIIQECHRTHGGRIMRHDAIAKKVADILDSKGYNVQREKIFPTSEGARKPDILASKDGHVHVLDVQIVSAYEDITKTGKRKAAYYSNNPDLIAGIARWSGLSTADVKVSDITISWRGVWSPDSATYLTGLGLTLKDLRGLTTRVLQGSHTNFSRFNRMTTMQPRRGIG

SEQ ID NO: 4738 - protein, 980 aa, Coccinella septempunctata
MKFSGIAPETRPKLPRMKHSKEFLATVRHLNSILPKHLQNVDTLEPIVDIVYAGAVTACEIHGREVGQNSTPRPDSAPPWKLRLERKINVMRKKIGNLHTYINTDNPSMKVTKAVRRIASEFRVGRRDPSFVDKILLISDTLKQKIRALGNRIRRYNDRAKRYKNNRLFFSNQKQFFRDLEGGKNDGTIQVEPAEAHKYWSEIWSESAIHDDGAYWIGEAEAQIPKVQMSDIQISEMDIKEALKGSNNWSSPGPDKIQNYWWKHLTSIHKALSMALQKSIADPTTIPDFCTLGVTHLQPKDGDFRNPKNYRPITCLSTVYKVLTAVLTRYISQHLRNNNLMAREQNGGRIRTKGCKELLVIDQIVTKQARRKLRHISVAWVDYRKAFDSVPHTWLLRVLKMHGIDEKVTNLLGHLMRGWRTQLAVRMEDRTVKLEVIKINRGIFQGDTLSPIWFCMALNPLSMLLNNTNYGYTISKQSSIRINHQLYMDDLKLYAANADQLRRMLEIVSSFSDSINMKLGVEKCATLEVKRGKIQEPKQETTLMNQIKIPSLNKDDTYKYLGIHQALDIKTAEMKELFKQKLYKRISLLLKSKLNSRSLFTAINIWAVPSMTYSFGILTWSVTELREVDRAVRAMLTKYGVHHPHSSTIRLYLPRQHGGRGLLNLESVHEGNIISLRKYCLKDHSPFFTAIREADDRISPLKLAESSHQDTRRPQCEIMEEWRSRALHGRYPGHLESGDVNKVESLTYLRAGYLFPETEGRLLAIQDQVVPTRVYLKHIAQQDIPTDRCRRCSQGPESIQHLTSSCPILAPKDYLDRHNSMAKIFHQQMALKLGLLLSETQQHLYVPKTLLQNASYKLYWDATMVTDRSVAHNRPDITLFDNVRKTCLLIDFTIPADDNITRAYSEKISKYTDLAFQLREMYALEAVSVLPMIISVNGIVERHLLENTQRLCLDKDIISASQKQVILHTTRIIRKVLQGP

SEQ ID NO: 4739 - protein, 1093 aa, Coccinella septempunctata
MRAHYIAADLALNSGKTYRQHLMEIWEIICPNRPTYAQLLSNRARWILQNQKLSRAELENIKSSCYPHVSAEIQSSSTQEQESRRSSPRIRRSGLFTRAESEDTTEKRFLGNLMKFSGIAPETRPKLPRMKHSRAFLATVMHLNSILPKHLENVDTLEPIVDIVYAGAVTACEIHGREVGQNSTLRPDTAPPWKLRLERKINVMRKKIGNLHTYINTDNPSMKVTKAVRRIASEFRVRRRDPSFVDKILLISDTLKQKIRALGNRIRRYNDRAKRYKNNRLFFSNQKQFFRDLEGGRNDGTIQVKPAEAHKYWSEIWSESANHDDGAYWIGEAEAQIPKVRMSDIQISEMDIKEALKGSNNWSSPGPDKIQNYWWKHLTSIHKALSMALQKSIADPTTIPDFCTLGVTHLQPKDGDFRNPKNYRPITCLSTVYKVLTAVLTRYISQHLRNNNLMAREQNGGRIRTKGCKELLVIDQIVTKQARRKLRHISVAWVDYRKAFDSVPHTWLLRVLKMHGIDEKVTNLLGHLMRGWRTQLAVRMEDRTVKSEVIKINRGIFQGDTLSPIWFCMALNPLSMLLNNTNYGYTISKQRNIRINHQLYMDDLKLYAANADQLRRMLEIVSSFSDSINMQLGVEKCATLEVKRGKIQESKQETTLMNQIKIPSLNKDDDYKYLGIHQALDIKTAEMKELFKQKLYKRISLLLKSKLNSRSLFTAINIWAVPSMTYSFGILTWSVTELREVDRAVRAILTKYGVHHPHSSTIRLYLPRQHGGRGLLNLESVHEGNIISLRKYFLKDHSPFFTAIREADDRISPLKLAESSHQDTRRPQCEIMEEWRSRALHGRYPGHLESGDVNKVESLTYLRAGYLFPETEGRLLAIQDQVVPTRVYLKHIAQQDIPTDRCRRCSQGPESIQHLTSSCPILAPKDYLDRHNSMAKIFHQQMALKLGLLLSETQQHLYVPKTLLQNASYKLYWDATMVTDRLVAHNRPDITLFDNVRKTCLLIDFTIPADDNISRAYSEKISKYTDLAFQLREMYALEAVSVLPMIISVNGIVERHLLENTQRLCLDKDIISASQKQVILHTTRIIRKVLQGP

SEQ ID NO: 4740 - protein, 890 aa, Coccinella septempunctata
MRKKIGNLHTYINTDNPSMKVTKAVRRIASEFRVRRRDPSFVDKILLISDTLKQKIRALGNRIRRYNDRAKRYKNNRLFFSNQKQFFRDLEGGKNDGTIQVEPAEAHKYWSEIWSESANHDDGAYWIGEAEAQIPKVQMSDIQISEMDIKEALKGSNNWSSPGPDKIQNYWWKHLTSIHKALSMALQKSIADPTTIPDFCTLGVTHLQPKDGDFRNPKNYRPITCLSTVYKVLTAVLTRYISQHLRNNNLMAREQNGGRIRTKGCKELLVIDQIVTKQARRKLRHISVAWVDYRKAFDSVPHTWLLRVLKMHGIDEKVTNLLGHLMRGWRTQLAVRMEDRTVKSEVIKINRGIFQGDTLSPIWFCMALNPLSMLLNNTNYGYTISKQSNIRINHQLYMDDLKLYAANADQLRRMLEIASSFSDSINMQLGVEKCATLEVKRGKIQEPKQETTLMNQIKIPSLNKDDTYKYLGIHQALDIKTAEMKELFKQKLYKRISLLLKSKLNSRSLFTAINIWAVPSMTYSFGILTWSVTELREVDRAVRAMLTKYGVHHPHSSTIRLYLPRQHGGRGLLNLESVHEGNIISLRKYFLKDHSPFFTAIREADDRISPLKLAESSHQDTRRPQCEIMEEWRSRALHGRYPGHLESGDVNKVESLTYLRAGYLFPETEGRLLAIQDQVVPTRVYLKHIAQQDTPTDRCRRCSQGPESIQHLTSSCPILAPKDYLDRHNSMAKIFHQQMALKLGLLLSETQQHLYVPKTLLQNASYKLYWDATMVTDRSVAHNRPDITLFDNVRKTCLLIDFSIPADDNISRAYSEKISKYTDLAFQLREMYALEAVSVLPMIISVNGIVERHLLENTQRLCLDKDIISASQKQVILHTTRIIRKVLQGP

SEQ ID NO: 4741 - protein, 880 aa, Harmonia axyridis
MASDNPTAKVAKAVRKISSEFRVKRRDPSFRDRLSVVLDNLKQKIRALGHRIRRYNERCKRYKNNRIFYQNQKQFFRDLEETEHEGGCRVDPGVAHKFWSEIWSSGGAHDEQAYWIDEAQSQIPDVRMAEMQISEADIGEALKGSNNWSAPGPDKLHNYWWKHLTSSHRTLARLLQRSLEDPTTVPDFFTVGVTHLLPKDGNPQDPKNYRPITCLSTVYKILTAVLTRNISQHLRNNNLIAREQNGGRIRTKGCKELLVIDYILTKQARRKLRNISVAWVDYQKAFGLVPHSWLIKVLEMHGVNDKVTKLLAYLMKSWRTSLLLGTGDRMVESDRIRIGRGIFQGDTLSPIWFCMALNPISMILNNTAYGYVIDKQRRTRINHQLYMDDLKLYAANADQLKRLLEIVSIFSDSIGMKMGIDKCAILEVKRGKIQESCKGTTLMNQITVPPLNTDDTYKYLGIRQALEIKTSEMKELFKQRLYKRVNLLLKSKLNSRSLFTAINIWAIPSITYSFGVLTWSLTELREIDRAMRSMLTKYGMHHPHASKIRLYLPRHQGGRGLMNLENVHEGNLISLRNYFLKENSPLFLSIREADDKITALNLSAPEHHDTRRSREDMIGEWNAKALHGRYPSHLKNNNHVNEVESLTYLRAGYLFPETEGRLIAIQDQVVATRAYMKNIARIDIPTDRCRRCAQALESIQHITSACPVLAPRDYLERHNSKARIYHQKIALRLGLLQNETPSYWYQPKSLLQSEEYKLYWDTTLVTDRGVAHNRPDVAIFDLKRKTCMLLDFTIPADDNISRAYSEKVSKYSDLAFQLRELYELRTISVLPMIISVNGLVEKHLPENTKKLCLDNDTISSSQKQVILGTVRTVRKFLQGP

SEQ ID NO: 4742 - protein, 753 aa, Propylea japonica
MSEVQITEADIGDALKGSKNWSAPGPDKLHNYWWKHLTSTHGALARLLQRSLEDPTTVPDFFTVGVTHLLPKDGNLQDPKNYRPITCLSTVYKILTAVLTRYISQHLRNNNLMAREQNGGRIRTKGCKELLVVDYILTKQARRKLRNISVAWVDYQKAFDSVPHSWLVKVLEMHGVNDKVIKLLAHLMKSWRTSLLLGTGDRMEESDTIRINRGIFQGDTLSPIWFCMALNPLSMILNNTTYGYVIDKQRRTRINHLLYMDDLKLYASNADQLKRLLEIVSTFSDSIGMKMGIEKCATLEVKRGKIQGTSKGTTLMNQITINPLSIEETYKYLGIRQALEIKTSEMKELFKQKLYKRVNLLLKSKLNSRSLFTAINIWAIPSITYSFGILTWSLTDLREIDRAIRSMLTKYGMHHPHASTIRLYLPRHQGGRGLMNLESVHEGSIISLRNYYLKENSPLFMSLCEADDKITALNLSQPEHLDTRRSREDMMEEWNAKALHGRYPSHLKNNNHVNEVESLTYLRAGYLFPETEGRLIAIQDQVVATRAYMKNIARIDIPTDRCRKCGQALESIQHITSACPILAPRDYLERHNSMAKIYHQKIALRLGLLQDETPSYWYQPKSLLQSNEYKLYWDTTLVTDRGVAHNRPDVAVFDLKRKTCMLLDFTIPADDNISRAYSEKINKYSDLAFQLRELYELQTISILPMIISVNGLIERHLPENTKRLCLDNDTISSSQKQVILGTIRTVRKFLQGP

SEQ ID NO: 4743 - protein, 1096 aa, Coccinella septempunctata
MVMRAHYIALDLAAEHGRTYRQHLVEVWENICPSRPAYAQLLSNRVRWILQNQKLSRAELENIKASCYPHVLTEQLSSELQERTPRRSSARIRRSGLHTQVEDINELEQRFLGNVLKFSGIAPEKRPKIPRMQHSRKFLATVKMINSILSKYMEKVDRLEEIVDLVYAGAVTTCEEHGRGTEHHHGPKSFEVPPWKKRLEKKIAIIRKKIGVIHAYMASDSPTAKVAKAVRRISSEFPVKRRDPSFRDRLSVVLDNLKQKIRALGHRIRRYNERCKRYKNNRVFYQNQKQFFRDLQETEHERGCRVDPGVAHKFWSEVWSSGGVHDEQAYWIDEAQTQIPDVRMAEMQISEADIGEALKGSNNWSAPGPDKLHNYWWKHLTSSHGTLARLLQRSLEDPTTIPDFFTVGVTHLSPKDGNPQDPKNYRPITCLSTVYKILTAVLTRNISQHLRNNNLMAREQNGGRIRTKGCKELLVIDYILTKQARRKLRNISVTWVDYQKAFDSVPHSWLIKVLEMHGVNDKVIKLLAYLMKSWRTALLLRTGDRMVESDRIRIGRGIFQGDTLSPIWFCMALNPLSMILNNTAFGYVIDKQRRTRINHQLYMDDLKLYAANADQLKRLLEIVSTFSDSIGMKMGIEKCATLEVKRGKIQETCMGTTMMNQITIPPLNTDDTYKYLGIRQALKIKTSEMKELSKQRLYKRVNLILKSKLNSRSLFTAINIWAIPSITYSFGILTWSLTELREIDRAIRSMLTKYGMHHPHASTIRFYLPRHQGGRGLMNLENVHEGNLISLRKYFLKENSPLFLSIREADDRITALNLSAPEHHDNRRTREDMIGEWNAKSLHGRYPSHLKNNNHVNEVESLTYLRAGYLFPETEGRLIAIQDQVVATRAYMKNIARIDIPTDRCRRCAQALESIQHITSACPVLAPRDYLERHNSMARIYHQKIALRLGMLQNETPSYWYQPKSLLQSEEYKLYWDTILVTDRGVAHNRPDVAIFDLKRKTCMLLDFAIPADDNISRPYSEKVSKYSDLAFQLRELYDLQTISVLPMIISMNGLVERHLPENTKKLCLDNDTISSSQKQVILGTIRTVRKFLQSP

SEQ ID NO: 4744 - protein, 965 aa, Harmonia axyridis
MQHSREFLATVKMINSILSKYMEKVDKLEEIVDLVYAGAATTCEEHGRGTEHHHGPKSSEVPPWKKRLDKKIVIIRKKIGVIHAYMASDNPTAKVAKAVRKISSEFRVKRRDPSFRDRLSVVLDNLKQKIRALGHRIRRYNERCKRYKNNRIFYQNQKQFFRDLEETEHEGGCRVDPGVAHKFWSEIWSSGGAHDEQAYWIDEAQSQIPDVRMAEMQISEADIGEALKGSNNWSAPGPDKLHNYWWKHLTSSHRTLARLLQRSLEDPTTVPDFFTVGVTHLLPKDGNPQDPKNYRPITCLSTVYKILTAVLTRNISQHLRNNNLIAREQNGGRIRTKGCKELLVIDYILTKQARRKLRNISVTWVDYQKAFDSVPHSWLIKVLEMHGVNDKVTKLLAYLMKSWRTSLLLGTGDRMVESDRIRIGRGIFQGDTLSPIWFCMALNPISMILNNTAYGYVIDKQRRTRINHQLYMDDLKLYAANADQLKRLLEIVSIFSDSIGMKMGIDKCAILEVKRGKIQESCKGTTLMNQITVPPLNTDDTYKYLGIRQALEIKTSEMKELFKQRLYKRVNLLLKSKLNSRSLFTAINIWAIPSITYSFGVLTWSLTELREIDRAMRSMLTKYGMHHPHASKIRLYLPRHQGGRGLMNLENVHEGNLISLRNYFLKENSPLFLSIREADDKITALNLSAPEHHDTRRSREDMIGEWNAKALHGRYPSHLKNNNHVNEVESLTYLRAGYLFPETEGRLIAIQDQVVATRAYMKNIARIDIPTDRCRRCAQALESIQHITSACPVLAPRDYLERHNSMARIYHQKIALRLGLLQNETPSYWYQPKSLLQSEEYKLYWDTTLVTDRGVAHNRPDVAIFDLKRKTCMLLDFTIPADDNISRAYSEKVSKYSDLAFQLRELYELRTISVLPMIISVNGLVEKHLPENTKKLCLDNDTISSSQKQVILGTVRTVRKFLQGP

SEQ ID NO: 4745 - protein, 1096 aa, Harmonia axyridis
MVMRAHYIALDLAAEPGRTYRQHLVDVWENICPSRPAYAQLLSNRVRWILQNQKLSRAELENIKASCCPLILTEQLSSELQERTPRRSSARIRRSGLQTQVEDNNELEQRFLGNVLKFSGVAPEKRPKIPRMQHSREFLATVKMINLILSKYMEKVDKLEEIVDLVYAGAATTCEEHGRGTEHHHGPKSSEVPPWKKRLEKKIVIIRKKIGVIHAYMASDNPTAKVAKAVRKISSEFRVKRGDPSFRDRLSVVLDNLKQKIRALGHRIRRYNERCKRYKNNRIFYQNQKQFFRDLEETEHEGGCRVDPGVAHKFWSEIWSSGGAHDEQAYWIDEAQSQIPDVRMAEMQISEADIGEALKGSNNWSAPGPDKLHNYWWKHLTSSHRTLARLLQRSLEDPTTVPDFFTVGVTHLLPKDGNPQDPKNYRPITCLSTVYKILTAVLTRNISQHLRNNNLIAREQNGGRIRTKGCKELLVIDYILTKQARRKLRNISVAWVDYQKAFDSVPHSWLIKVLEMHGVNDKVTKLLAYLMKSWRTSLLLGTGDRMVESDRIRIGRGIFQGDTLSPIWFCMALNPISMILNNTAYGYVIDKQRRTRINHQLYMDDLKLYAANADQLKRLLEIVSIFSDSIGMKMGIDKCAILEVKRGKIQESCKGTTLMNQITVPPLNTDDTYKYLGIRQALEIKTSEMKELFKQRLYKRVNLLLKSKLNSRSLFTAINIWAIPSITYSFGVLTWSLTELREIDRAMRSMLTKYGMHHPHASKIRLYLPRHQGGRGLMNLENVHEGNLISLRNYFLKENSPLFLSIREADDKITALNLSAPEHHDTRRSREDMIGEWNAKALHGRYPSRLKNNNHVNEVKSLTYLRAGYLFPETEGRLIAIQDQVVATRAYMKNIARIDIPTDRCRRCAQALESIQHITSACPVLAPRDYLERHNSMARIYHQKIALRLGLLQNETPSYWYQPKSLLQSEEYKLYWDTTLVTDRGVAHNRPDVAIFDLKRKTCMLLDFTIPADDNISRAYSEKVSKYSDLAFQLRELYELRTISVLPMIISVNGLVEKHLPENTKKLCLDNDTISSSQKQVILGTVRTVRKFLQGP

SEQ ID NO: 4746 - protein, 880 aa, Harmonia axyridis
MASDNPTAKVAKAVRKISSEFQVKRRDPSFRDRLSVVLDNLKQKIRALGHRIRRYNERCKRYKNNRIFYQNQKQFFRDLEETEHEGGCRVDPGVAHKFWSEIWSSGGAHDEQAYWIDEAQSQIPDVRMAEMQISEADIGEALKGSNNWSAPGPDKLHNYWWKHLTSSHRTLARLLQRSLEDPTTVPDFFTVGVTHLLPKDGNPQDPKNYRPITCLSTVYKILTAVLTRNISQHLRNNNLIAREQNGGRIRTKGCKELLVIDYILTKQARRKLRNISVAWVDYQKAFDSVPHSWLIKVLEMHGVNDKVTKLLAYLMKSWRTSLLLGTGDRMVESDRIRIGRGIFQGDTLSPIWFCMALNPISMILNNTAYGYVIDKQRRTRINHQLYMDDLKLYAANADQLKRLLEIVSVFSGSIGMKMGIDKCAILEVKRGKIQESCKGTTLMNQITVPPLNTDDTYKYLGIRQALEIKTSEMKELFKQRLYKRVNLLLKSKLNSRSLFTAINIWAIPSITYSFGVLTWSLTELREIDRAMRSMLTKYGMHHPHASKIRLYLPRHQGGRGLMNLENVHEGNLISLRNYFLKENSPLFLSIREADDKITALNLSAPEHHDTRRSREDMIGEWNAKALHGRYPSHLKNNNHVNEVESLTYLRAGYLFPETEGRLIAIQDQVVATRAYMKNIARIDIPTDRCRRCAQALESIQHITSACPVLAPRDYLERHNSMARIYHQKIALRLGLLQNETPSYWYQPKSLLQSEEYKLYWDTTFVTDRGVAHNRPDVAIFDLKRKTCMLLDFTIPADDNISRAYSEKVSKYSDLAFQLRELYELRTISVLPMIISVNGLVEKHLPENTKKLCLDNDTISSSQKQVILGTVRTVRKFLQGP

SEQ ID NO: 4747 - protein, 1091 aa, Coccinella septempunctata
MRAHYIASELALESTRTYRQHLIAIWEDLCPSRPAYAQLLSNRVRWILEKQKLSRVELANIKASSFPRFVQEQGEPADQGRDPRRSSVRIRRSILLPPTDQTGAIKELFLTNLMKYSSIQAERRPKMARLQYSKYVADTVAAMNTVLTGQLESVHSLREMVDMVYAGAATVCEIHGESLESRDSHRPTAPPWKVRLENNINSMRKKIGVMHTYLNTPHPSNKTIRMTRKLVSAYRVKRRDPAFRERVNIICDSLKQKIKALGNRIRRYNLRTKRYKNNRLFYHNQKQFFRNLECNNEEECHHLDPNEAYKYWYEIWSERVDHDNEAHWIDEAQSQIPSTHMEDVNITESDITATLRRSNNWASPGADGLQNFWWKHFTSVHGRLATLFQKALSDPSNIPEFFTLGITHLVPKKGDLKDPRNYRPITCLPSVYKILTGVLNLYVHGHLREHHLMADEQNGCRNKNKGCKELLVVDHIITKQAKKKLRNISVAWIDYKKAFDSVPHTWLIKVLEMHGIAPQVMNLLKHLMNTWRTTLFLRTMEGIVKSSVIDIRRGIFQGDTLSCMWFCLSLNPLSKLLNNTNYGYIINKERGVRISYRPYIDDLKIYASSTEQLRRQLEIVAAFSDSIKMEMGTDKCATLEVKRGKIQEPRTTTLMNFNRISALNEDESYKYLGINQALDIRTSEMKVIFRERLYRRVNLLLKSGLNSKSLFTAINIWAIPGITYSFGVLAWSQTDLREIDRKIRTMLTKNGMHHPHSSTIRLYLPRKNGGRGLINIETAHAENVNALRTYFMQLDSPVSAAIREADVNISILKLSVPDYKVAAPSVGECVEEWSGKALHGRYPGHLKSREVNEVESLTYLRAGYLFPETEGRLLAIQDQVMPTRMYLKHIAGRDIPSTLCRKCSQAPESIQHMTSACSIMAPRDYLERHNAMGKIYHQKLALKLGLIQDEIHQYLYAPKPLLLNHRYKLYWDSTLITDRGVAHNRPDVALFDEEKKTCLLLDFTIPADENLARAYSDKISKYGDLAYQLREMYDLRSISILPLIMSVNGLVERHLVENTERLGLGREVISSAQKQVILGTVRIVRKFLEAP

SEQ ID NO: 4748 - protein, 978 aa, Coccinella septempunctata
MKYSSIQAERRPKMARLQYSKYVADTVGAMNTVLTGQLENVHSLREMVDMVYAGAATVCEIHGESLESRDSHRPTAPPWKVRLENNINSMRKKIGVMHTYLNTPHPSNKTIRMTRKLVSAYRVKRRDPAFRERVNIICDSLKQKIKALGNRIRRYNLRTKRYKNNKLFYHNQKQFFRNLECNNEEECHHLDPNEAYKYWYEIWSERVDHDNEAHWIDEAQSQIPSTHMEDVNITGSDITATLRRSNNWASPGADGLQNFWWKHFTSVHGRLATLFQRALSDPSNLPEFFTLGITHLVPKKGDLKDPRNYRPITCLPSVYKILTGVLNLYVHGHLREHHLMADEQNGCRNKNKGCKELLVVDHIITKQAKKKLRNISVAWIDYKKAFDSVPHTWLIKVLEMHGIAPQVINLLKHLMNTWRTTLFLRTMEGIVKSSIIDIRRGIFQGDTLSCMWFCLSLNPLSKLLNNTNYGYTINKERGVRISHRLYIDDLKIYASSTEQLRRQLEIVAAFSDSIKMEMGTDKCATLEVKRGKIQEPRTTTLMNFNRISALNEDESYKYLGINQALDIRTSEMKVIFRERLYRRVNLLLKSGLNSKSLFTAINIWAIPGITYSFGVLAWSQTDLREIDRKIRTMLTKNGMHHPHSSTIRLYLPRKNGGRGLINIETAHAENVNALRTYFMQLDSPVSAAIREADVNISILKLSVPDYKLAAPSVSECVEEWGGKALHGRYPGHLKSREVNEVESLTYLRAGYLFPETEGRLLAIQDQVMPTRMYLKHIAGQDIPSTLCRKCSQAPESIQHMTSACSIMAPRDYLERHNAMGKIYHQKLALKLGLIQNEIHQYLYAPKPLLLNHRYKLYWDSTLITDRGVAHNRPDVALFDEEKKTCLLLDFTIPADENLARAYSDKISKYGDLAYQLREMYDLRSISILPLIMSVNGLVERHLVENTKRLGLGRKVISSAQKQVILGTVRIVRKFLEAP

SEQ ID NO: 4749 - protein, 1091 aa, Coccinella septempunctata
MRAHYIASELALESTRTYRQHLIAIWEDLCPSRPAYAQLLSNRVRWILEKQKLSRVELANIKASSFPRFVQEQGEPANQERDPRRSSVRIRRSILLPPTDQTGAIKELFLTNLMKYSSIQAERRPKMARLQYSKYVADTVGAMNTVLTGQLENVHSLREMVDMVYAGAATVCEIHGESLESRDSHRPTAPPWKVRLENNINSMRKKIGVMHTYLNTPHPSNKTIRMTRKLVSAYRVKRRDPAFRERVNIICDSLKQKIKALGNRIRRYNLRTKRYKNNRLFYHNQKQFFRNLECNNEEECHHLDPNEAYKYWYEIWSERVDHDNEAHWMDEAQSQIPSTHMEDVNITESDITATLRSSNNWASPGADGLQNFWWKHFTSVHGRLATLFQRALSDPSNIPEFFTLGITHLVPKKGDLKDPRNYRPITCLPSVYKILTGVLNLYVHGHLREHHLMADEQNGCRNKNKGCKELLVVDHIITKQAKKKLRNISVAWIDYKKAFDSVPHTWLIKVLEMHGIAPQVINLLKHLMNTWRTTLFLRTMEGIVKSSIIDIRRGIFQGDTLSCMWFCLSLNPLSKLLNNTNYGYIINKERGVRISHRLYIDDLKIYASSTEQLRRQLEIVAAFSDSIKMEMGTDKCATLEVKRGKIQEPRTTTLMNFNRISALNEDESYKYLGINQALDIRTSEMKVIFRERLYRRVNLLLKSGLNSKSLFTAINIWAIPGITYSFGVLAWSQTDLREIDRKIRTMLTKNGMHHPHSSTIRLYLPRKNGGRGLINIETAHAENVNALRTYFMQLDSPVSVAIREADVNISILKLSVPDYKLAAPSVSECVEEWGGKALHGRYPGHLKSREVNEVESLTYLRAGYLFPETEGRLLAIQDQVMPTRMYLKHIAGQDIPSTLCRKCSQAPESIQHMTSACSIMAPRDYLERHNAMGKIYHQKLALKLGLIQNEIHQYLYAPKPLLLNHRYKLYWDSTLITDRGVAHNRPDVALFDEEKKTCLLLDFTIPADENLARAYSDKISKYGDLAYQLREMYDLRSISILPLIVSVNGLVERHLVENTERLGLGREVISSAQKQVILGTVRIVRKFLEAP

SEQ ID NO: 4750 - protein, 1054 aa, Coccinella septempunctata
MRAHYIASELALESTRTYRQHLIAIWEDLCPSRPAYAQLLSNRVRWILEKQKLSRVELANIKASSFPRFIQEQGESADQERDPRRSSVRIRRSILLPPTDQTEAIKEPFLTNLMKYSSIQAERRPKMARLQYSKYVADTVGAMNTVLTGQLENVHSLREMVDMVYAGAATVCEIHGESLESRDSHRPTAPPWKVRLENNINSMRRKIGVMHTYLNTPHPSNKTIRMTRKLVSAYRVKRRDPAFRERVICDSLKQKIKALGNRIRRCNLRTKRYKNNRLFYHNQKQFFRNLECNNEEECHHLDPNEAYKYWYEIWSERVDHDNEAHWIDEAQSQIPSTHMEDVNITESDITATLRRSNNWASPGADGLQNFWWKHFTSVHGRLATLFQRALSDPSNIPEFFTLGITHLVPKKGDLKDPRNYRPITCLPSVYKILTGVLDLYVHGHLREHHLMADEQNGCRNKNKGCKELLVVDHIITKQAKKKLRNISVAWIDYKKAFDSVPHTWLIKVLEMHGIAPQVINLLKHLMNTWRTTLFLRTMEGIVKSRIIDIRRVIFQGDSLSCLWFCLSSNPLSKLLNNTNYGYIINKQGGVRISHRLYIDDLKIYASSTEQLRRQLEIVAAFSDSIKMEMGTDKCATLEVKRGKIQEPRTTTLMNFNRISALDGDESYKYLGINQALDIRTSEMKVIFRERLYRRVNLLLKSGLNSKSLFTAINIWAIPGITYSFGVLAWSQTDLREIDRKIRTMLTKNGIHHPHSSTIRLYLPRKNGGRGLINIETAHAENVNALRTYFMQLDSPVSAAVREADVNISILKLSVSNYKLAAPSVSECVEEWSGKALHGRYPGHLKSREVNEVESLTYLRAGYLFPETEGRLLAIQDQVMPTRMYLKHIAKQDIPSTLCRKCSQAPESIQHMTSACSIMAPRDYLERHNAMGKIYHQKLALKLGLIQNEIHQYLYAPKPLLLNHRYRLYWDSTLITDRGVAHNRPDVALFDEEKKTCLLLDFTIPADENLARAYSDKISKYGDLAYQLREMYDLRSISILPLIMSVNGLVERHLV

SEQ ID NO: 4751 - protein, 1034 aa, Adalia bipunctata
MDQMSPNGPIHASKCPRKDRFIYIYIYIYIYIRRSGLFVRSDENNAIKEQFLTNLMKYSCIAPEKRPKIPRLQHSRHVLDNVKTMNLVLSTHLDGVDNLTEMVDVVYAAATTVCEIYGENPKERHEYHLPTEPPWKVRLERRIVSMRKKIGVMHTYLSSPNPSNKTIKAVRKLASEYRVKRRDPEFKGKINIICDSLKQKIKALGNRIRRYNERTKRYKNNRLFFHNPKQFFRNLEEDKVVDNNHLNPQETHKFWSDMWSRSVAHDNEAYWMDEAQSQIPDTQMDSLVVTESDIVEALKRSNNWVSPGADGIHNYWWKQFTCVHKKLALMFQEALSDPSRVPDSFTLGITHLIPKSGELRDPRNYRPITCLPSVYKIFTAVLTRHICKHLKENNLIAEEQNGCRPKTKGCKELLVVDYIITKQARRKLRNISVAWIDYKKAFDSVPHTWLIKVLEMHGIDTQVINLLKQLMNNWRTALLMRTTRGTHGSEEIKINRGLFQGDTLSPIWFCLALNPLSRLLNNTQYGYVIDKQRNIRISHHLYMDDLKIYASNSEQQRRQLEIIAAFSDAIRMEMGVDKCATLEVKRGKLQAARSTTLMNHNTISALNEDESYKYLGINQALEINTSEMKEVFRQKLYKRVKLLLKSGLNSKSLFTAINIWAIPSLTYSFGILTWSQTDLREIDRKIRSLLTSNGIHHPHSSTIRLYLPRKNGGRGLLNLETTHSNNINALRVYFMQLDSPVALAIREADERISALKLSDPDYQATTQSLSATMEEWNSKALHGRYPSNLKSKEVDESESLTYLRAGYLFPETEGRLLAIQDQVMPTRMYIKHIAKQDIPSDLCRRCSQARESIQHITSSCSILAPKDYLDRHNAMGKIYHQQIALKLGLVQGEVQQHLYQPKPLLWNQRFRLYWDTTIITDRGSAHNRPDIALFDAERETCLLLDFTIPADENLARAYSEKISKYGDLAYQIREMYRLKSISILPMIISVNGLVEKHLQENTERLQLGRDIISSAQKQVILATVRIVRKVLQGP

SEQ ID NO: 4752 - protein, 1182 aa, Adalia bipunctata
MKLAHPITTRTQGGGESQAGSSRNRPDDRLVGVRCGASGAPPRDGTARPSHVTPQRVLRDSLGERPRHSASRTPRRDRRTRWTYDENCTLMRAHYIALELATESNMTYRQLLTAIWNELYPIKPSYAQLLSNRVRWIVEKQKMSRAELENIKASCFPNFTQHEEQNDQNEQVSRRSSTRIRRSGLFVRSDENNAIKEQFLTNLMKYSCIAPEKRPKIPRLQHSRHVLDNVKTMNLVLSTHLDRVDNLTEMVDVVYAAATTVCEIHGENPKERHEYHLPTEPPWKVRLERRIVSMRKKIGVMHTYLSSPNPSNKTMKAVRKLASEYRVKRRDPEFKDKINIICDSLKQKIKALGNRIRRYNERTKRYKNNRLFFHNPKQFFRNLEEDKVVDNNHLNPQETHKFWSDMWSGGVAHDKEAYWMDEAQSQIPDTQMDSLVVTESDIVEALKRSNNWVSPGADGIHNYWWKQFTCVHKKLALMFQEALSDPSRVPDSFTLGITHLIPKRGDLRDPRNYRPITCLPSVYKIFTAVLTRHICKHLKENNLIAEEQNGCRPKTKGCKELLVVDYIITKQARRKLRNISVAWIDYKKAFDSVPHTWLIKVLEMHGIDTQVINLLKQLMNNWRTALLMRTTRGTHGSEEIKINRGLFQGDTLSPIWFCLALNPLSKLLNNTQYGYVIDKQRNIRISHQLYMDDLKIYASNSEQQRRQLEIIAAFSDAIRMEMGVDKCATLEVKRGKLQAARSTTLMNHNTISALNEDESYKYLGINQALEINTSEMKEVFRQKLYKRVKLLLKSGLNSKSLFTAINIWAIPSLTYSFGILTWSQTDLREIDRKIRSLLTSNGIHHPHSSTIRLYLPRKNGGRGLLNLETTHSNNINALRVYFMQLDSPVALAIREADERISALKLSDPDYQATTQSLSATMEEWNSKALHGRYPSNLKSKEVDESESLTYLRAGYLFPETEGRLLAIQDQVMPTRMYIKHIAKQDIPSDLCRRCSQARESIQHITSSCSILAPKDYLDRHNAMGKIYHQQIALKLGLVQGEVQQHLYQPKPLLRNQRFRLYWDTTIITDRGSAHNRPDIALFDAERETCLLLDFTIPADENLARAYSEKISKYGDLAYQIREMYRLKSISILPMIISVNGLVEKHLQENTERLQLGRDIISSAQKQVILATVRIVRKVLQGP

SEQ ID NO: 4753 - protein, 1098 aa, Coccinella septempunctata
MRAHYITLELATESNMTYRQLLTAIWNELYPIKLSYAQLLSNRVRWILKNQKMSRAELENIKASCFPHFTQQEEQNDQNEQDDQNEQVTRRSSTRIRRSGLFIRSDENNAIEEQFLTNLLKYSCIAPGKRPKIPRLQHSKHVLDTVKTMNLVLSTHLDNVESLTKMVDVVYAAAVTVCENHGENPKEPHKYHRPTEPPWKVRLESRIVFMRKKIGVMHTYLSSPSPSNKTIKAVRKLASEYRVKRRDPEFKDKINIICDSLKQKIKALGNRIRRYNERTKRYKNNRLFFHNPKQFFRNLGEGEVMDNNHLNHQEAHKFWSDVWSGSVAHDNGAYWIDEAQSQIPKTQMDSLVVTESDIVEALKRSNGWASPGADGLHNYWWKQFTCVHKKLAFMFQEALSDPSRVPDSFTLGITHLIPKKGDLKDPRNYRPITCLPSVYKIFTAVLTRHICKHLKENNLIAEEQNGCRSKTKGCKELLVVDYIITKQARKKLRNISVAWIDYKKAFDSVPHTWLIKVLEMHGIAIQVIDLLKQLMNNWRTALLMRTTGGTHVSEEIKINRGLFQGDTLSPIWFCLALNPLSKLLNNTQYGYVIDKQRDIRISHRLYIDDLKIYASNSEQQRRQLEIIAAFSDAIRMEMGVDKCATLEVKRGKLQAGRSTTLMNHNSISALGEDESYKYLGINQALEINTSEMKEIFRQKLYKRVKLLLKSGLNSKSLFTAINIWAIPSLTYSFGILTWSETDLREIDRKIRSLLTSSGIHHPHSSTIRLYLPRKNGGRGLLNLETTHANNINALRAYFMQLNSPVALAIREADERISALKLSDPDYRATTQSLSAMIEEWNSKALHGRYPSNLKSKEVDESESLTYLRAGYLFPETEGRLLAIQDQVMPTRMYIKHITKQDIPSDLCRRCSQARESIQHITSSCSILAPKDYLDRHNAVGKIYHQQIALKLGLIRKEVQQHLYQPKPILQNQRFKLYWDTTIITDRGSAHNRPDITLFDAERETCLLLDFTIPADENLARAYSEKISKYGDLAYQIREMYRLKSISILPMIISVNGLVENHLLENTERLQLGRDIISSAQKQVILGTVRIVRKVLQGP

SEQ ID NO: 4754 - protein, 1098 aa, Coccinella septempunctata
MRAHYIALELATESNMTYRQLLTAIWNELYPIKLSYAQLLSNRVRWILKNQKMSRAELENIKASCFPHFTQQEEQNDQNEQDDQNEQVTRRSSTRIRRSGLFIRSDENNAIEEQFLTNLLKYSCIAPGKRPKIPRLQHSKHVLDTVKTMNLVLSTHLDNVESLTKMVDVVYAAAVTVCENHGENPKEPHKYHRPTEPPWKVRLESRIVFMRKKIGVMHTYLSSPSPSNKTIKAVRKLASEYRVKRMDPEFKDKINIICDSLKQKIKALGNRIRRYNERTKRYKNNRLFFHNPKQFFRNLGEGEVMDNNHLNHQEAHKFWSDVWSGSVAHDNGAYWIDEAQSQIPKTQMDSLVVTESDIVEALKRSNGWASPGADGLHNYWWKQFTCVHKKLAFMFQEALSDPSRVPDSFTLGITHLIPKKGDLKDPRNYRPITCLPSVYKIFTAVLTRHICKHLKENNLIAEEQNGCRSKTKGCKELLVVDYIITKQARKKLRNISVAWIDYKKAFDSVPHTWLIKVLEMHGIAIQVIDLLKQLMNNWRTALLMRTTGGTHVSEEIKINRGLFQGDTLSPIWFCLALNPLSKLLNNTQYGYVIDKQRDIRISHRLYIDDLKIYASNSEQQRRQLEIIAAFSDAIRMEMGVDKCATLEVKRGKLQAGRSTTLMNHNSISALGEDESYKYLGINQALEINTSEMKEIFRQKLYKRVKLLLKSGLNSKSLFTAINIWAIPSLTYSFGILTWSETDLREIDRKIRSLLTSSGIHHPHSSTIRLYLPRKNGGRGLLNLETTHANNINALRAYFMQLNSPVALAIREADEHISALKLSDPDYRATTQSLSAMIEEWNSKALHGRYPSNLKSKEVDESESLTYLRAGYLFPETEGRLLAIQDQVMPTRMYIKHITKQDIPSDLCRRCSQARESIQHITSSCSILAPKDYLDRHNAVGKIYHQQIALKLGLIRKEVQQHLYQPKPILQNQRFKLYWDTTIITDRGSAHNRPDITLFDAERETCLLLDFTIPADENLARAYSEKISKYGDLAYQIREMYRLKSISILPMIISVNGLVENHLLENTERLQLGRDIISSAQKQVILGTVRIVRKVLQGP

SEQ ID NO: 4755 - protein, 950 aa, Adalia bipunctata
MNLVLSTHLDSVDNLTEMVDVVYAAATTVCEIHGENPKERHEYHLPTEPPWKVRLERRIVSMRKKIGVMHTYLSSPNPSNKTMKAVRKLASEYRVKRRDPEFKDKINIICDSLKQKIKALGNRIRRYNERTKRYKNNRLFFHNPKQFFRNLEEDKVVDNNHLNPQETHKFWSDMWSGSVAHDNEAYWMDEAQSQIPDTQMDSLVVTESDIVEALKRSNNWVSPGADGIHNYWWKQFTCVHKKLALMFQEALSDPSRVPDSFTLGITHLIPKRGDLRDPRNYRPITCLPSVYKIFTAVLTRHICKHLKENNLIAEEQNGCRPKTKGCKELLVVDYIITKQARRKLRNISVAWIDYKKAFDSVPHTWLIKVLEMHGIDTQVINLLKQLMNNWRTALLMRTTRGTHGSEEIKINRGLFQGDTLSPIWFCLALNPLSKLLNNTQYGYVIDKQRNIRISHQLYMDDLKIYASNSEQQRRQLEIIAAFSDAIRMEMGVDKCATLEVKRGKLQAARSTTLMNHNTISALNEDESYKYLGINQALEINTSEMKEVFRQKLYKRVKLLLKSGLNSKSLFTAINIWAIPSLTYSFGILTWSQTDLREIDRKIRSLLTSNGIHHPHSSTIRLYLPRKNGGRGLLNLETTHSNNINALRVYFMQLDSPVALAIREADERISALKLSDPDYQATTQSMSATVEEWNSKALHGRYPSNLKSKEVDESESLTYLRAGYLFPETEGRLLAIQDQVMPTRMYIKHIAKQDIPSDLCRRCSQARESIQHITSSCSILAPNDYLDRHNAMGKIYHQQIALKLGLVQGEVQQHLYQPRPLLRNQRFRLYWDTTIITDRGSAHNRPDIALFDAERETCLLLDFTIPADENLARAYSEKISKYGDLAYQIREMYRLKSISILPMIISVNGLVEKHLQENTERLQLGRDIISSAQKQVILATVRIVRKVLQGP

SEQ ID NO: 4756 - protein, 1182 aa, Adalia bipunctata
MKLAHPITTRTQGGGESQAGSSRNRPDDRLVGVRCGASGAPPRDGTARPSHVTPQRELRDSLGERPRHSASRTPRRDRRTRWTYDENCTLMRAHYIALELATESNMTYRQLLTAIWNELYPIKPSYAQLLSNRVRWIVEKQKMSRAELENIKASCFPNFTQHEEQNDQNEQVSRRSSTRIRRSGLFVRSDENNAIKEQFLTNLMKYSCIAPEKRPKIPRLQHSRHVLDNVKTMNLVLSTHLDRVDNLTEMVDVVYAAATTVCEIHGENPKERHEYHLPTEPPWKVRLERRIVSMRKKIGVMHTYLSSPNPSNKTMKAVRKLASEYRVKRRDPEFKDKINIICDSLKQKIKALGNRIRRYNERTKRYKNNRLFFHNPKQFFRNLEEDKVVDNNHLNPQETHKFWSDMWSGSVAHDKEAYWMDEAQSQIPDTQMDSLVVTESDIVEALKRSNNWVSPGADGIHNYWWKQFTCVHKKLALMFQEALSDPSRVPDSFTLGITHLIPKRGDLRDPRNYRPITCLPSVYKIFTAVLTRHICKHLKENNLIAEEQNGCRPKTKGCKELLVVDYIITKQARRKLRNISVAWIDYKKAFDSVPHTWLIKVLEMHGIDTQVINLLKQLMNNWRTALLMRTTRGTHGSEEIKINRGLFQGDTLSPIWFCLALNPLSKLLNNTQYGYVIDKQRNIRISHQLYMDDLKIYASNSEQQRRQLEIIAAFSDAIRMEMGVDKCATLEVKRGKLQAARSTTLMNHNTISALNEDESYKYLGINQALEINTSEMKEVFRQKLYKRVKLLLKSGLNSKSLFTAINIWAIPSLTYSFGILTWSQTDLREIDRKIRSLLTSNGIHHPHSSTIRLYLPRKNGGRGLLNLETTHSNNINALRVYFMQLDSPVALAIREADERISALKLSDPDYQATTQSLSATMEEWNSKALHGRYPSNLKSKEVDESESLTYLRAGYLFPETEGRLLAIQDQVMPTRMYIKHIAKQDIPSYLCRRCSQARESIQHITSSCSILAPKDYLDRHNAMGKIYHQQIALKLGLVQGEVQQHLYQPKPLLRNQRFRLYWDTTIITDRGSAHNRPDIALFDAERETCLLLDFTIPADENLARAYSEKISKYGDLAYQIREMYRLKSISILPMIISVNGLVEKHLQENTERLQLGRDIISSAQKQVILATVRIVRKVLQGP

SEQ ID NO: 4757 - protein, 1117 aa, Coccinella septempunctata
MGGAGRPLCYFICPASCNIFLNKESFIANTCSECSKKFHSYLGLRQHLKHAHQEAYNQDMIEEVQSKSRKNLWTRGEIEEMARLEAAYEGHLLLDYLAEKMGRSKDGLKKKRTAEYKCLVEKYREELRTTPVFDTTTRCTAGPSRIPPSAQAAAAALLPTRSPRYNTRSRTTRPAPRDQTSPSSDFPIGGLQHETVDIASPVGAQPSVASLPNVTADGHHRTAETSSPRVGHQPSAPDAVATNNDNANTPHSGQNPDEPLNYAEIEDPILRHLLQACLSLECQTDLEICSKVCQKSENYQEDFDIWTETICRQYGTALKPKVPRPPRDNTDLGRRKNRALQYKQMQFQYDKNRKKLAENILEGATQGYARTKPNKQDIAREYRMFFEAEPPVDEKPIKDIKPSKHETYLPITKDMIKETIKSFGNSTAGPDGIDARRLQRIPVGKIELLLNMILLSKYIPANLRRNRTVLIPKSTEGLEDIKNWRPITISSILLRTLNKIMAKRLSSAIDLDECQRGFVDMDGCFANNITVQATIKRKRREGKGFTILTLDLQKAFDNVAHSSIDRALRRFKIDHDTSEYIRANFKNMQTTVFCEGEEVVTVEIRKGVKQGDPLAPILFNMVMDELISSLSSRRGLTMGDVNLSVLGYADDLLLLADNDRDAQYLLKHACEFFEDRHLRLNTGKCSSISLSTLPSKKKLYMQSTPKFYIAGTPIPPIRTMKETFGYLGRKFSGAGAIQCNTETLDEQIGRLMKSPLKSFQKLDILKKYLIPKYIHALQTPSINQKILRKADHKVRKAVKKMLKLPTHIIDEALYTPTRLGGLGIFSFTRKIPVIMRDRLERTSARCVGFQKIIELCSHYKRRIYSMIKPEYNSKNQIDHQNARRLEESFYGGGTTQAKNDPASNFFIDNPPRIWTNKDFINAIKLRTNTLPTRGLPYGPMEARMCRAGCGRVESLSHVLQKCPLGHTRRMQRHNYVARRLVKMAAAKGWMITEEPHIRDQRGILQKPDLLFEGGEQIVVADVGVSWESPRLLSESYLLKKATYDQPEFLTIMQERYPGKDIKVLPFIIGARGLWCKESSLLLDILNINNLHNRRELVTTTMRGGWTIHADVCRRTWS

SEQ ID NO: 4758 - protein, 977 aa, Zygaena filipendulae
MRDLPLELRPRIPRIPLSRRNRDVVRAVNNMLQPLLQNSPDLSDADLVLFGAATAVCRFIGAKFPVRNQPAQQREREPAWRRRIESRIAGARALIGRLICFRSGNRRPRVVRTVRAAFAGSNVDPLHITERDLTVRIDDLKQRIAAWGKRIRRYSERVARFCENRLFASDQRKFYQSIEQRGICAAGERPDKAALIGFWRSVWSRPVIHHEGEWMDGVKEACANLQLMEPITISEEDVRSATRRAPNWKTPGIDGVHMYWLKWFPSCHAALARQFQEALEQRCIPSFLTSGVTHLAPKSERTSDPSQYRPITCLCTIYKVLTSVLKTKIARHAEDNLIMAVNQNGCRGGSRGAKELLLIDAVVGKLVRRNRRNFSAAWIDYKKAFDSVPHSWLARILELYKVDATVCGFLEACMGQWSTTLSLSGERLSDAEDRIEIRRGIFQGDCLSPLWFCLSLNPLSVMLDKTGTGFQFRRGSMKLTHLLYMDDLKLFAPSATRLEELLTVTKRFSDSICMGLGADKCAFLHVERGRIVRSSEVAVEGGIRALSETETYRYLGMAQNMGVEEKQVKDAVRESFFGRLTKVLKSHLSGGNKVKAFNGWVMPVLLYTFAVLRWSQTELDALDRKVRTTLTLHRMHHPRSSVMRLYLPRKSGGRGFLSATTLHNREVCNLRSYFLTKSESELHKTAIECDSGLTPLSLATEDWQAPQILSTQDREAVWKEKELHGRFYTALREAHVDLNASVHWLRFGDLFGETEGFVCAIQDQIVRTNNHRRFILKDGTVDICRSCRHPGETIRHITSGCSTLANTEYLHRHNQAAKILHQELALKYGLVTPRVPYYKYVPEPVLENDRIRLYWDRSIITDRTLPSNKPDIVMMDREQSKVFLVDITIPHDGNLVKAERDKFAKYLELADEVTEMWRVESTEIIPIVVSTNGLVPTSLQRHLRRLDVRAGPVTAAIQKAVLLDNARIVRRFLNLPT

SEQ ID NO: 4759 - protein, 1192 aa, Zygaena filipendulae
MSSIVMMAQNNESIRIGSLPGGRRGAPSRQAGAGRGRERASQRSGRPPGPSSPSLPPDGLAAAGPSGTQQMLPATGGVRRMRWTRTQNANVMRAYFRSIGGETGETGFRARLPLEFQLLEPDIPVTDQNLSDRVRFIQRRGLFSAEELDQLRREAGHHSARTQNEAIVTESATLRDSRDIPYVAPTVTEVDAESEEPATQDIERMRRIFDEAILEMRDLPLELRPRIPRIPLSRRNRDVVRAVNNMLQPLLENSPDLSDADSVLFGAATAVCRFIGAKFPVRNQPAQQREREPAWRRRIESRIAGARALIGRLICFRSGNRRPRVVRTVRAAFAGSNVDPLHITERDLTVRIDDLKQRIAAWGKRIRRYSERVARFCENRLFASDQRKFYQSIEQRGICAAGERPDKAALIGFWRSVWSRPVIHHEGEWMDGVKEACANLQLMEPITISEEDVRSATQRAPNWKTPGIDGVHMYWLKWFPSCHAALARQFQEALEQRCIPSFLTSGVTHLAPKSERTSDPSQYRPITCLCTIYKVLTSVLKTKIARHVEDNLIMAVNQNGCKGGSRGAKELLLIDAVVGKLVRRNRRNFSAAWIDYKKAFDSVPHSWLARILELYKVDATIRGFLEACMGQWSTTLSLSGERLSDAEDRIEIRRGIFQGDCLSPLWFCLSLNPLSVMLDKTGTGFQFRRGSMKLTHLLYMDDLKLFAPSATRLEELLTVTKRFSDSICMGLGADKCAFLHVERGRIVRSSEVAVEGGIRALSETETYRYLGMAQNMGVEEKQVKDAVRESFFGRLTKVLKSHLSGGNKVKAFNGWVMPVLLYTFAVLRWSQTELDALDRKVRTTLTLHRMHHPRSSVMRLYLPRKSGGRGFLSATTLHNREVCNLRSYFLTKSESELHKAAIECDNGLTPLSLATEDWQAPQILSTQDREAVWKEKELHGRFYTALREAHVDLNASVHWLRFGDLFGETEGFVCAIQDQIIRTNNHRRFILKDGTVDICRSCRHPGETIRHITSGCSTLANTEYLHRHNQAAKILHQELALKYGLVTPRVPYYKYVPEPVLENDRIRLYWDRSIITDRTLPSNKPDIVMMDREQSKVFLVDITIPHDGNLVKAERDKFAKYLELADEVTEMWRVESTEIIPIVVSTNGLVPTSLQRHLRRLDVRAGPVTAAIQKAVLLDNARIVRRFLNLPT

SEQ ID NO: 4760 - protein, 1193 aa, Zygaena filipendulae
MSSIVMMAQNNESIRIGSLPGGRRGAPSRQAGAGRGRERASQRSGRPPGPSSPSLPPDGLAAAGPSGTQQMLPATGGVRRMRWTRIQNANVMRAYFRSIGGETGETGFRARLPLEFQLLEPDISVTDQNLSDRVRFIQRRGIFSAEELDQLRREAGHHSARTQNNEATVTESATLQDSRDIPHVAPTVTEVDAESEEPATQDIERLRRIFDEAISEMRDLPLELRPRIPRIPLSRRNRDVVRAVNNMLQPLLQNSPDLSGADSVLFGAATAVCRFIGAKFPVRNQPAQRREREPAWRRRIESRIAGARALIGRLICFRSGNRRPRVVRTVRAAFAGSNVDPLHITERDLTVRIDDLKQRIAAWGKRIRRYSERVARFCENRLFASDQRKFYQSIEQRGICAAGERPDKAALIEFWRSVWSRPVIHHEGEWMDGVKEACANLQLMEPITISEEDVRSATRRAPNWKTPGIDGVHMYWLKWFPSCHAALARQFQEALEQRCIPSFLTSGVTHLAPKSERTSDPSQYRPITCLCTIYKVLTSVLKTKIARHAEDNLIMAVNQNGCRGGSRGAKELLLIDAIVGKLVRRNRRNFSAAWIDYKKAFDSVPHSWLARILELYKVDATVRGFLEACMGQWSTTLSLSGERLSDAEDRIEIRRGIFQGDCLSPLWFCLSLNPLSVMLDKTGTGFQFRRGSMKLTHLLYMDDLKLFAPSATRLEELLTVTKRFSDSICMGLGADKCAFLHVERGRIVRSSEVAVEGGIRALSETETYRYLGMAQNMGVEEKQVKDAVRESFFGRLTKVLKSHLSGGNKVKAFNGWVMPVLLYTFAVLRWSQTELDALDRKVRTTLTLHRMHHPRSSVMRLYLPRKSGGRGFLSATTLHNREVCNLRSYFLTKSESELHKTAIECDNGLTPLSLATEDWQAPQILSTQDREAVWKEKELHGRFYTALREAHVDLNASVHWLRFGDLFGETEGFVCAIQDQIVRTNNHRRFILKDGTVDICRSCRHPGETIRHITSGCSTLANTEYLHRHNQAAKILHQELALKYGLVTPRVPYYKYVPEPVLENDRIRLYWDRSIITDRTLPSNKPDIVMMDREQSKVFLVDITIPHDGNLVKAERDKFAKYLELADEVTEMWRVESTEIIPIVVSTNGVVPTSLQRHLRRLDVRAGPVTAAIQKAVLLDNARIVRRFLNLPT

SEQ ID NO: 4761 - protein, 1193 aa, Zygaena filipendulae
MSSIVMMAQNNESIRIGSLPGGRRGAPSRQAGAGRGRERASQRSGHPPGPSSPSLPPDGLAAAGPSGTQQMLPATGGVRRMRWTRIQNANVMRAYFRSIGGETGETGFRARLPLEFQLLEPDISVTDQNLSDRVRFIQRRGIFSAEELDQLRREAGHHSARTQNNEATVTESATLQDSRDIPHVAPTVTEVDAESEEPATQDIERLRRIFDEAISEMRDLPLELRPRIPRIPLSRRNRDVVRAVNNMLQPLLQNSPDLSDADLVLFGAATAVCRFIGAKFPVRNQPAQQREREPAWRRRIESRIAGARAVIGRLICFRSGNRRPRVVRTVRAAFAGSNVDPLHITERDLTVRIDDLKQRIAAWGKRIRRYSERVARFCENRLFASDQRKFYQSIEQRGICAAGERPDKAALIGFWRSVWSRPVIHHEGEWMDGVKEACANLQLMEPITISEEDVRSATRRAPNWKTPGIDGVHMYWLKWFPSCHAALARQFQEALEQRCIPSFLTSGVTHLAPKSERTSDPSQYRPITCLCTIYKVLTSVLKTKIARHAEDNLIMAVNQNGCRGGSRGAKELLLIDAVVGKLVRRNRRNFSAAWIDYKKAFDSVPHSWLARILELYKVDATVCGFLEACMGQWSTTLSLSGERLSDAEDRIEIRRGIFQGDCLSPLWFCLSLNPLSVMLDKTGTGFQFRRGSMKLTHLLYMDDLKLFAPSATRLEELLTVTKRFSDSICMGLGADKCAFLHVERGRIVRSSEVAVEGGIRALSETETYRYLGMAQNMGVEEKQVKDAVRESFFGRLTKVLKSHLSGGNKVKAFNGWVMPVLLYTFAVLRWSQTELDALDRKVRTTLTLHRMHHPRSSVMRLYLPRKSGGRGFLSATTLHNREVCNLRSYFLTKSESELHKTAIECDSGLTPLSLATEDWQAPQILSTQDREAVWKEKELHGRFYTALREAHVDLNASVHWLRFGDLFGETEGFVCAIQDQIVRTNNHRRFILKDGTVDICRSCRHPGETIRHITSGCSTLANTEYLHRHNQAAKILHQELALKYGLVTPRVPYYKYVPEPVLENDRIRLYWDRSIITDRTLPSNKPDIVMMDREQSKVFLVDITIPHDGNLVKAERDKFAKYLELADEVTEMWRVESTEIIPIVVSTNGLVPTSLQRHLRRLDVRAGPVTAAIQKAVLLDNARIVRRFLNLPT

SEQ ID NO: 4762 - protein, 1187 aa, Zygaena filipendulae
MMENNENERIGSLPGGRRGAPSRQAGAGRGRERASQRSGRPPGPSSPSLPPDGLVAAGSSGTQQMLPAPGGVRRMRWTRTQNANVMRAYFRSIGGETGGMGFRARLPLEFQLLEPAISVTDQNLSDRVRFIQRRGLFSAEELDQLRREAGLHSTRTRTDGAIGTDSDTLWNRSDTLHVAPAVTEADVQLEEPATQDMERMRRIFEEAILEIRDLPLESRPKIPRITLSRRNRDVVRAVNDMLQPLLQNSTSLNDTDSILFGAATAVCRFIGAKFPARNPPAQQREREPAWRKRIESRIAGARALIGRLICFKSGNRRPRVVRTVRAAFVGSNVDPLHITERDLTVRIDDLKQRVAAWGKRIRRYSERGARFCENRLFVSDQRKFYQSLDQRRVCATGERPDKAALIEFWRSIWSRPVSHHEGDWMDDVEEACANLQLMEPIAISEDDVCSAAQRAPNWKTPGIDGVHMYWLKCFPSCHAVLACQFQEALEQRSLPSFLTTGITHLAPKSERTSDPSQYRPITCLCTIYKVLTSVLKTKIARHVEDNLIMAVNQNGCRGGSRGTKELLLIDAVVGKLVRRNRRNFSAAWIDYKKAFDSVPHTWLARILELYKVDATVRGFLEACMGQWSTTLSLSGEQLSDAEDRIEIRRGIFQGDCLSPLWFCLSLNPLSVMLDKTGTGFQFRRGSMKLTHLLYMDDLKLYAPSAARLEELLTVTKRFSDSICMGLGMDKCALLHVERGRIVRSSEIAVEGGIRALSDTETYRYLGMAQNMGVEEKQVKDAVREAFFGRLTKVLKSHLSGGNKVKAFNGWVMPVLLYTFAVLRWSQTELDALDRKVRTTLTLHRMHHPRSSVMRLYLPRKSGGRGFLSAAALHNREVCNLRSYFLTKSESELHKAVIECDNGRTPLSLATEDWQAPQILSTQDREAVWKEKELHGRFYTALREAHIDLNASVHWLRFGDLFGETEGFVCAIQDQIIRTNNHRRFILKDGTVDICRSCRLPGETIRHITSGCSTLANTEYLHRHNQAAKILHQELALKYGLVTPRVPYYKYVPEPVLENDRIRLYWDRSIITDRTLPSNKPDIVMMDREQSKVFLVDITIPHDGNLVKAERDKLAKYLELADEVTEMWRVESTEIIPIVISTNGLVPTSLQRHLRRLDVRAGPVTAAIQKAVLLDNARIVRRFLNLPT

SEQ ID NO: 4763 - protein, 1187 aa, Zygaena filipendulae
MMANNENERIGSLPGGRRGAPSRQAGAGRGRERASQRSGRPPGPSSPSLPPDGLVAAGSSGTQQMLPAPGGVRRMRWTRTQNANVMRAYFRSIGGETGGMGFRARLPLEFQLLEPAISVTDQNLSDRVRFIQRRGLFSAEELDQLRREAGLHSARTRTDGAIGTDSDTLWNRSDTLHVAPAVTEADVELEEPATQDMERMRRIFEEAILEIRDLPIESRPKIPRITLSRRNRDVVRAVNDMLQPLLQNSTSLNDTDSILFGAATAVCRFIGAKFPARNPPAQQREREPAWRKRIESRIAGARALIGRLICFKSGNRRPRVVRTVRAAFVGSNVDPLHITERDLTVRIDDLKQRVAAWGKRIRRYSERGARFYENRLFVSDQRKFYQSLDQRRVCATGERPDKAALIEFWRSIWSRPVSHHEGDWMDDVEEACANLQLMEPIAISEDDVCSAAQRAPNWKTPGIDGVHMYWLKCFPSCHAVLACQFQEALEQRSLPSFLTTGITHLAPKSERTSDPSQYRPITCLCTIYKVLTSVLKTKIARHVEDNLIMAVNQNGCRGGSRGTKELLLIDAVVGKLVRRNRRNFSAAWIDYKKAFDSVPHTWLARILELYKVDATVRGFLEACMGQWSTTLSLSGEQLSDAEDRIEIRRGIFQGDCLSPLWFCLSLNPLSVMLDKTGTGFQFRRGSMKLTHLLYMDDLKLYAPSAARLEELLTVTKRFSDSICMGLGTDKCALLHVERGRIVRSSEIAVEGGIRALSETETYRYLGMAQNMGVEEKQVKDAVREAFFGRLTKVLKSHLSGGNKVKAFNGWVMPVLLYTFAVLRWSQTELDALDRKVRTTLTLHRMHHPRSSVMRLYLPRKSGGRGFLSATALHNREVCNLRSYFLTKSESELHKAVIECDNGRTPLSLATEDWQAPQILSTQDREAVWKEKELHGRFYTALREAHIDLNASVHWLRFGDLFGETEGFVCAIQDQIIRTNNHRRFILKDGTVDICRSCRLPGETIRHITSGCSTLANTEYLHRHNQAAKILHQELALKYGLVTSRVPYYKYVPEPVLENDRIRLYWDRSIITDRTLPSNKPDIVMMDREQSKVFLVDITIPHDGNLVKAERDKLAKYLELADEVTEMWRVESTEIIPIVISTNGLVPTSLQRHLRRLDVRAGPVTAAIQKAVLLDNARIVRRFLNLPT

SEQ ID NO: 4764 - protein, 1187 aa, Zygaena filipendulae
MMANNENERIGSLPGGRRGAPSRQAGAGRGRERASQRSGRPPGPSSPSLPPDGLVAAGSSGTQQMLPAPGGVRRMRWTRTQNANVMRAYFRSIGGETGGMGFRARLPLEFQLLEPAISVTDQNLSDRVRFIQRRGLFSAEELDQLRREAGLHSARTQTDGAIVTDSDTMWNRSDTLHVAPAVTEADVELEEPATQDMERMRRILEEAILEIRDLPLESRPKIPRITLSRRNRDVVRAVNDMLQPLLQNSTSLNDTDSILFGAATAVCRFIGAKFPARNPPAQQREREPAWRKRIESRIAGARALIGRLICFKSGNRRPRVVRTVRAAFAGSNVDPLHITERDLTVRIDDLKQRIAAWGKRIRRYSERGARFYENRLFVSDQRKFYQSLDQRRVCATGERPDKAALIDFWRSIWSRPVNHHEGDWMDDVEEACANLQLMEPIAISEDDVCSAAQRAPNWKTPGIDGVHMYWLKCFPSCHAVLACQFQEALEQRSLPSFLTTGITHLAPKSERTSDPSQYRPITCLCTIYKVLTSVLKTKIARHVEDNLIMAVNQNGCRGGSRGTKELLLIDAVVGKLVRRNRRNFSAAWIDYKKAFDSVPHTWLARILELYKVDATVRGFLEACMGQWSTTLSLSGEQLSDAEDRIEIRRGIFQGDCLSPLWFCLSLNPLSVMLDKTGTGFQFRRGSMKLTHLLYMDDLKLCAPSAARLEELLTVTKRFSDSICMGLGTDKCALLHVERGRIVRSSEIAVEGGIRALSETETYRYLGMAQNMGVEEKQVKDAVREAFFGRLTKVLKSHLSGGNKVKAFNGWVMPVLLYTFAVLRWSQTELDALDRKVRTTLTLHRMHHPRSSVMRLYLPRKSGGRGFLSATALHNREVCNLRSYFLTKSESELHKAVIECDNGRTPLSLATEDWQAPQILSTQDREAVWKEKELHGRFYTALREAHIDLNASVHWLRFGDLFGETEGFVCAIQDQIIRTNNHRRFILKDGTVDICRSCRLPGETIRHITSGCSTLANTEYLHRHNQAAKILHQELALKHGLVTSRVPYYKYVPEPVLENDRIRLYWDRSIITDRTLPSNKPDIVMMDREQSKVFLVDITIPHDGNLVKAERDKLAKYLELADEVTEMWRVESTEIIPIVISTNGLVPTSLQRHLRRLDVRAGPVTAAIQKAVLLDNARIVRRFLNLPT

SEQ ID NO: 4765 - protein, 763 aa, Zygaena filipendulae
MDGVKEACANLQLMEPITISEEDVRSATQRAPNWKTPGIDGVHMYWLKWFPSCHAALARQFQEALEQRCIPSFLTSGVTHLAPKSERTSDPSQYRPITCLCTIYKVVTSVLKTKIARHVEDNLIMAVNQNGCRGGSRGAKELLLIDAVVGKLVRRNRRNFSAAWIDYKKAFDSVPHSWLARILELYKVDATVRGFLEACMGQWSTTLSLSGERLSDAEDRIEIRRGIFQGDCLSPLWFCLSLNPLSVMLDKTGTGFQFRRGSMKLTHLLYMDDLKLFAPSATRLEELLTVTKRFSDSICMGLGTDKCAFLHVERGRIVRSSEVAVEGGIRALSETETYRYLGMAQNMGVEEKLVKDAVRESFFGRLTKVLKSHLSGGNKVKAFNGWVMPVLLYTFAVLRWSQTELDALDRKVRTTLTLHRMHHPRSSVMRLYLPRKSGGRGFLSATTLHNREVCNLRSYFLTKSESELHRAAIECDNGLTPLSLATEDWQAPQILSTQDREAVWKEKELHGRFYTALREAHVDLNASVHWLRFGDLFGETEGFVCAIQDQIVRTNNHRRFILKDGTVDICRSCRHPGETIRHITSGCSTLANTEYLHRHNQAAKILHQELALKYGLVTSRVPYYKYVPEPVLENDRIRLYWDRSIITDRTLPSNKPDIVMMDREQSKVFLVDITIPHDGNLVKAERDKFAKYLELADEVTEMWRVESTEIIPIVVSTNGLVPTSLQRHLRRLDVRTGPVTAAIQKAVLLDNARIVRRFLNLPT

SEQ ID NO: 4766 - protein, 1193 aa, Zygaena filipendulae
MSSIVMMAQNNESIRIGSLPGGRRGAPSRQAGAGRGRERASQRSGRPPGPSSPSLPPDGLAAAGPSGTQQMLPATGGVRRMRWTRTQNANVMRAYFRSIGGETGETGFRARLPLEFQLLEPDISVTDQNLSDRVRFIQRRGLFSAEELDQLRREAGHHSARTQNNGAIVTESATLRDSRDIPHVAPTVTEVDAESEEPATQDIERMRRIFDEAILEMRDLPLELRPRIPRIPLSRRNRDVVRAVNNMLQPLLENSPDLSDADSVLFGAATAVCRFIGAKFPVRNQPAQQREREPAWRRRIESRIAGARALIGRLICFRSGNRRPRVVRTVRAAFAGSNVDPLHITERDLTVRIDDLKQRIAAWGKRIRRYSERVARFCENRLFASDQRKFYQSIEQRGICAAGERPDKAALIGFWRSVWSRPVIHHEGEWMDGVKEACANFQLMEPITISEEDVRSATQRAPNWKTPGIDGVHMYWLKWFPSCHAALARQFQEALEQRCIPSFLTSGVTHLAPKSERTSDPSQYRPITCLCTIYKVLTSVLKTKIARHVEDNLIMAVNQNGCRGGSRGAKELLLIDAVVGKLVRRNRRNFSAAWIDYKKAFDSVPHSWLARILELYKVDATIRGFLEACMGQWSTTLSLSGERLSDAEDRIEIRRGIFQGDCLSPLWFCLSLNPLSVMLDKTGTGFQFRRGSMKLTHLLYMDDLKLFAPSATRLEELLTVTKRFSDSICMGLGADKCAFLHVERGRIVRSSEVAVEGGIRALSETETYRYLGMAQNMGVEEKQVKDAVRESFFGRLTKVLKSHLSGGNKVKAFNGWVMPVLLYTFAVLRWSQTELDALDRKVRTTLTLHRMHHPRSSVMRLYLPRKSGGRGFLSATTLHNREVCNLRSYFLTKSESELHKAAIECDNGLTPLSLATEDWQAPQILSTQDREAVWKEKELHGRFYTALREAHVDLNSSVHWLRFGDLFGETEGFVCAIQDQIIRTNNHRRFILKDGTVDICRSCRHPGETIRHITSGCSTLANTEYLHRHNQAAKILHQELALKYGLVTPRVPYYKYVPEPVLENDRIRLYWDRSIITDRTLPSNKPDIVMMDREQSKVFLVDITIPHDGNLVKAERDKFAKYLELADEVTEMWRVESTEIIPIVVSTNGLVPTSLQRHLRRLDVRAGPVTAAIQKAVLLDNARIVRRFLNLPT

SEQ ID NO: 4767 - protein, 1187 aa, Zygaena filipendulae
MMENNENERIGSLPGGRRGAPSRQAGAGRGRERASQRSGRPPGPSSPSLPPDGLVAAGSSGTQQMLPAPGGVRRMRWTRTQNANVMRAYFRSIGGETGGMGFRARLPLEFQLLEPAISVTDQNLSDRVRFIQRRGLFSAEELDQLRREAGLHSTRTRTDGAIGTDSDTLWNRSDTLHVAPAVTEADVQLEEPATQDMERMRRIFEEAILEIRDLPLESRPKIPRITLSRRNRDVVRAVNDMLQPLLQNSTSLNDTDSILFGAATAVCRFIGAKFPARNPPAQQREREPAWRKRIESRIAGARALIGRLICFKSGNRRPRVVRTVRAAFVGSNVDPLHITERDLTVRIDDLKQRVAAWGKRIRRYSERGARFCENRLFVSDQRKFYQSLDQRRVCATGERPDKAALIEFWRSIWSRPVSHHEGDWMDDVEEACANLQLMEPIAISEDDVCSAAQRAPNWKTPGIDGVHMYWLKCFPSCHAVLACQFQEALEQRSLPSFLTTGITHLAPKSERTSDPSQYRPITCLCTIYKVLTSVLKTKIARHVEDNLIMAVNQNGCRGGSRGTKELLLIDAVVGKLVRRNRRNFSAAWIDYKKAFDSVPHTWLARILELYKVDATVRGFLEACMGQWSTTLSLSGEQLSDAEDRIEIRRGIFQGDCLSPLWFCLSLNPLSVMLDKTGTGFQFRRGSMKLTHLLYMDDLKLYAPSAARLEELLTVTKRFSDSICMGLGTDKCALLHVERGRIVRSSEIAVEGGIRALSETETYRYLGMAQNMGVEEKQVKDAVREAFFGRLTKVLKSHLSGGNKVKAFNGWVMPVLLYTFAVLRWSQTELDALDRKVRTTLTLHRMHHPRSSVMRLYLPRKSGGRGFLSATALHNREVCNLRSYFLTKSESELHKAVIECDNGRTPLSLATEDWQAPQILSTQDREAVWKEKELHGRFYTALREAHIDLNASVHWLRFGDLFGETEGFVCAIQDQIIRTNNHRRFILKDGTVDICRSCRLPGETIRHITSGCSTLANTEYLHRHNQAAKILHQELALKYGLVTPRVPYYKYVPEPVLENDRIRLYWDRSIITDRTLPSNKPDIVMMDREQSKVFLVDITIPHDGNLVKAERDKLAKYLELADEVTEMWRVESTEIIPIVISTNGLVPTSLQRHLRRLDVRAGPVTAAIQKAVLLDNARIVRRFLNLPT

SEQ ID NO: 4768 - protein, 1187 aa, Zygaena filipendulae
MMENNENERIGSLPGGRRGAPSRQAGAGRGRERASQRSGRPPGPSSPSLPPDGLVAAGSSGTQQMLPAPGGVRRMRWTRTQNANVMRAYFRSIGGETGGMGFRARLPLEFQLLEPAISVTDQNLSDRVRFIQRRGLFSAEELDQLRREAGLHSTRTQTDGAIGTDSDTLWNRSDTLHVAPAVTEADVQLEEPATQDMERMRRIFEEAILEIRDLPLESRPKIPRITLSRRNRDVVRAVNDMLQPLLQNSTSLNDTDSILFGAATAVCRFIGAKFPARNPPAQQREREPAWRKRIESRIAGARALIGRLICFKSGNRRPRVVRTVRAAFVGSNVDPLHITERDLTVRIDDLKQRVAAWGKRIRRYSERGARFCENRLFVSDQRKFYQSLDQRRVCATGERPDKAALIEFWRSIWSRPVSHHEGDWMDDVEEACANLQLMEPIAISEDDVCSAAQRAPNWKTPGIDGVHMYWLKCFPSCHAVLACQFQEALEQRSLPSFLTTGITHLAPKSERTSDPSQYRPITCLCTIYKVLTSVLKTKIARHVEDNLIMAVNQNGCRGGSRGTKELLLIDAVVGKLVRRNRRNFSAAWIDYKKAFDSVPHTWLARILELYKVDATVRGFLEACMGQWSTTLSLSGEQLSDAEDRIEIRRGIFQGDCLSPLWFCLSLNPLSVMLDKTGTGFQFRRGSMKLTHLLYMDDLKLYAPSAARLEELLTVTKRFSDSICMGLGTDKCALLHVERGRIVRSSEIAVEGGIRALSETETYRYLGMAQNMGVEEKQVKDAVREAFFGRLTKVLKSHLSGGNKVKAFNGWVMPVLLYTFAVLRWSQTELDALDRKVRTTLTLHRMHHPRSSVMRLYLPRKSGGRGFLSATALHNREVCNLRSYFLTKSESELHKAVIECDNGRTPLSLATEDWQAPQILSTQDREAVWKEKELHGRFYTALREAHIDLNASVHWLRFGDLFGETEGFVCAIQDQIIRTNNHRRFILKDGTVDICRSCRLPGETIRHITSGCSTLANTEYLHRHNQAAKILHQELALKYGLVTPRVPYYKYVPEPVLENDRIRLYWDRSIITDRTLPSNKPDIVMMDREQSKVFLVDITIPHDGNLVKAERDKLAKYLELADEVTEMWRVESTEIIPIVISTNGLVPTSLQRHLRRLDVRAGPVAAAIQKAVLLDNARIVRRFLNLPT

SEQ ID NO: 4769 - protein, 1196 aa, Blastobasis lacticolella
MMSEINRVRTGPLPGGRQGSPGAGAGSSRMRASQTQRPARPPCRPIPPSPPVGMRLAVTSQAQQSASATGGVVRRMRWTQHQNENVMRAYYRATETGIGGTGYRARLLAAFQTLEPSLSVTAQNLADRVRFILRRELFAPAELGRLRFEAVESTSPVGRRQSGRRSNTRRSTIFDPSIALASPAQTPAELGVVDDTVAQESERIGRLLTEAILEFRELPLEERPKVPRIPLSIRNRGVVEAISRMLLPFLEDSGSLSDTNSILFGAAVAVCRFVGIGVSASSVGGSSNDRRSGSPVWRKRIEKRIAEARVLIGKLISFRSGNTRPRVMRFVYRAMAGVEFSLSDPALVQKVSERIDDLKQKIAAWGSRIRRYSERVLRFHQNRLFGSDQKKFYRTWGIRAGPATGQRPSDAGVVAFWRNIWSQPGEHTEGEWMASIEEACAPIIPMEPITITSDDVLAAVQKAPNWKTPGCDGLHHYWLKGFRSTHEILARQFQEALEQRSLPHFLTAGVTHLAPKSACAVDPSQYRPITCLCTTYKTLTSILKAKIDAHVEGNHIMADVQNGCRGGSRGAKELLLIDAVAGQLVKRNRRNFSAAWIDYKKAFDSVPHTWLKRVLEIYKIDDTVRRFLETCMGQWSTQLSLSGVRLSAAEDRIRIERGIFQGDCLSPLWFCLSLNPLSTLLDKTGTGFQFRRGGPKLSHLFYMDDLKLFAPSAQRLAELLKVTEDFSGSIGMEFGLDKCAVVHVDRGRVRGAAVDSLNVDMRTLSETESYRYLGMSQGVGVDVVAVKQAVTDAFFGRLTRVLQSYLSGLNKIRAFNGWVMPVLIYTFGVLRWSQTELDALDRKVRTTLTLHRMHHPRSSLMRLYIPRNSGGRGLLSAKALHNREICKLRNYFMAKSESSSLHRVVKDCDKGLTPLSLATEHWREPVVLCTVDREAVWKEKELHGRFFKALHERHVDPKDSVHWLRFGDLFGETEGFLCAIQDQVIMTRNYRKYILKDGTEDVCRACLQPGESLRQITSGCPVLANTEYLHRHNQAAKILHLELAFKYGLIGEKVPYYKYSPEPVLENDRARLYWDRSIITDRTVPANKPDIVLVDRVKSCVFLVDVTIPFDENLVKAESDKIIKYLNLAHEVTDMWQVTSTEIIPVVVSTNGLVPTSLRGHLKRLDLSDGPVVARLQRAVLLDNARIVRRFLSLSP

SEQ ID NO: 4770 - protein, 1196 aa, Blastobasis lacticolella
MMSEINRVRTGPLPGGRQGSPGAGAGSSRMRASQTQRPARPPCRPIPPSPPVGLRLAGTSQAQQSASATGGVVRRMRWTQHQNENVMRAYYRATETGIGGTGYRARLLAAFQTLEPSLSVTAQNLADRVRFILRRELFAPAELGRLRFEAVESTSPVGRRQSGRRSNTRRSTIFDPSIALASPAQTPAELGVVDDTVAQESERIGRLLTEAILEFRELPLEERPKVPRIPLSIRNRGVVEAISRMLLPFLEDSGSLSDTNSILFGAAVAVCRFVGIGVSASSVGGSSNDRRSGSPVWRKRIEKRIAEARVLIGKLISFRSGNTRPRVMRFVYRAMAGVEFSLSDPALVQKVSERIDDLKQKIAAWGSRIRRYSERVLRFHQNRLFGSDQKKFYRTWGIRAGPATGQRPSDAGVVAFWRNIWSQPGEHTEGEWMASIEEACAPIIPMEPITITSDDVLAAVQKAPNWKTPGCDGLHHYWLKGFRSTHEILARQFQEALEQRSLPHFLTAGVTHLAPKSACAVDPSQYRPITCLCTTYKTLTSILKAKIDAHVEGNHIMADVQNGCRGGSRGAKELLLIDAVAGQLVKRNRRNFSAAWIDYKKAFDSVPHTWLKRVLEIYKIDDTVRRFLETCMGQWSTQLSLSGVRLSAAEDRIRIERGIFQGDCLSPLWFCLSLNPLSTLLDKTGTGFQFRRGGPKLSHLFYMDDLKLFAPSAQRLAELLKVTEDFSGSIGMEFGLDKCAVVHVDRGRVRGAAVDSLNVDMRTLSETESYRYLGMSQGVGVDVVAVKQAVTDAFFGRLTRVLQSYLSSLNKIRAFNGWVMPVLIYTFGVLRWSQTELDALDRKVRTTLTLHRMHHPRSSLMRLYIPRNSGGRGLLSAKALHNREICKLRNYFMAKSESSSLHRVVKDCDKGLTPLSLATEHWREPVVLCTVDREAVWKEKELHGRFFKALHERHVDPKDSVHWLRFGDLFGETEGFLCAIQDQVIMTRNYRKYILKDGTEDVCRACLQPGESLRHITSGCPVLANTEYLHRHNQAAKILHLELAFKYGLIGEKVPYYKYSPEPVLENDRARLYWDRSIITDRTVPANKPDIVLVDRVKSCVFLVDVTIPFDENLVKAESDKIIKYLNLAHEVTDMWQVTSTEIIPVVVSTNGLVPTSLRGHLKRLDLSDGPVVARLQRAVLLDNARIVRRFLSLSP

SEQ ID NO: 4771 - protein, 938 aa, Cherax destructor
MPDQATTVKFTTFHAPYPSQHVLLHSYSLPSQMNASQEEVSSQGNGTAGNIRRGKCRSCLQLRCLNSNGFLRKHGSCLGSGCPPVESDNPEPLQAPEPTPTDLISSDNILEAIKAAGTRTLTHIPKAVHPHAAEKLTDLLIKVNDGSAILNAPPTIKAWQNLLLFDNLIHLPRQRKNGRGRTPTHSTDSEKIRVQVSKKIEEGNTVGAIRIITSEDTVAPRDADTAEALIGKHPARETRGTNSSNTSVPTVEPLIVQDSDIYKAIMSFPSGSAGGYTGIRPQHLKEMVNPVIGKIAETLLSEITRFVNNSLAGLIPDEIKPFFFGASLCALKKKDGGIRPIAVGNTFRRLVSKAAVRSIRAEAAIMLQPNQLGFGVSQGSEAAVHATRAYIDNLPKDNAVVKLDFKNAFNLLKRDVVLAAVQEHFPGLFPFVSAGYSKESMLLFGEHEITSSEGVQQGDPLAPFLFCIAVREITVRLTSELNIWLLDDGTLAGTKESLLDDLTQVTTRGQEMGLILNPSKCEIISFNQQVIDAVISKLPGATVIAPTHSVLLGAPLGSDAIDTILRKKLEELRRMEQRIGNLDTHDALYLLTKCLSLPRLTYFLRCAPSHDNPILHEYDSILRQIFTKVLNLTLEDGQWDQATLPVRLGGIGVRKSSQIALPTFLFSCIASRGLVAAILPEHLKDKIGIHDQKFVDGARIWDNLTGSETRPASPNNYKQSHWDGPIVENIASAMLQSVSGKDRARLLAVRAPHAGDFQLAVPNSSLGTRLGTRLDPQTIRIGVALRLAAPILAEHRCICGSEAADRFGYHGLVCQKSEGKISRHEEVNNIIKRSLTTAGCPAVREPPQLCRSDGSQKRPDGITLQAWTDGKQVVWDYTCASTLADTYLQYTREEGGAAATFRESQKSRKYGEFAHHYMFVPIGSETLGSWGKSASKFL

SEQ ID NO: 4772 - protein, 833 aa, Cherax destructor
MIIKSLRNFPRADNLIHLPHQYKNGRGRTPTHSTDSEKIRVQVSKKIEEGNTVGAIRIITSEDTVAPRDADTAEALRGKHPARETRGTNSSNTSVPTVEPLIVQDSDIYKAIMSFPSGSAGGYTGIRSQHLKEMVNPVIREIAETLLSEITRFVNNSLAGLISDEIKPLFFGASLCALKKKDGGIRPIAVGNTFRRLVSKAAVRSIRAEAAIMLQPNQLGFGVSQGSEAAVHATRAYIDNLPEDNAVVKLDFKNAFNILKRDVVLAAVQEHFPGLFPFVSAGYSKESMLLFGEHEITSPEGVQQGDPLAPFLFCISVREITVRLTSELNIWFLDDGTLAGTKESLLDDLTQVMTRGQEMGLILNPSKCEIISVNQQVIDAVISKLPGATVIAPTNSVLLGAPLGSDAIDTILRKKLEELKRMEQRMINLDTHDALYLFTKCLSLPRLTYFLRCAPSYDNPILHEYDSILRQIFTKVLNLTLEDGQWDQATLPVRLGGIGVRKSSQIALPASLSSCIASRGLVAAILPKHLRDTIGIHDPKFVDGARIWDNLTGSETRPAPPNNYKQSHWDGPIVENIASAMLQSVSGKDRARLLAVRTPHAGDFLLAVPNSSLGTRLDPQTIRIGVALRLAAPILAEHRCICGSEAADRFGYHGLVCRKSEGKIARHEEVNNIIKRSLTTAGCPAVREPPQLCRSDGSQKRPDGITLQAWTDGKQVVWDYTCASTLADTYLQYTREEGGAAATFRESQKSRKYGELAHHYKFVPIGSETLGSWGKSASKFLKELGKRLNRVTRDHRAASFLFQRFSAAVQRGNACCILGTRPSSEELDEIFAL

SEQ ID NO: 4773 - protein, 981 aa, Cherax destructor
MADDAASQPQSQENGAPNNERRGTCQVCGEFRARNRDGLIRAHNGCAGSHRPPAESNPQPPQADVNPNGNLLSCENLLAFKSTASSTLSHIPKAARPYAAGKFTDLLKQVNGGSTNLEARGTIKAWRNLLLFGNVCLAVPERRGKLLTTSVIKAVRNYPRTDNCVPLPHHRRNHRGRPKKNSTENEKICAQVSKKIEEGNTVGAIRIITSDDTVAPKDETTAQALRDKHPTRDTIAINNNPEGDPITEQLILPESEVYKAIVSFPAGSAGGYTGIRPQHVKEMVNPVLGASASILLTELTTFVNNCLAGRIPEEIKPFFFGASLCALKKKDGGIRPIAVGNTLRRLVAKAAVRNIRLEAASLLQPHQLGFGVSQGSEAAAHAARAYIRDLSEDKAVVKLDFRNAFNMVKRDVVLPAVRDRFPSLFPFISAGYSKPSTLLFGEHEIPSSEGVQQGDPLAPLLFCLAVRELTSSLCSELNIWYLDDGTLAGTGESLLEDLQRVKTQGEALGLILNPSKCEIITTNQEIINAVQTILPEVTTTTPSNSTLLGAPLGHHAIDTVLKDKVNDLKRMEERISDLDAHDALYLLTRCLTMPRLTYFLRCAPSFENPTLDEYDAHLRLTFKKALNLSLEDQQWEQATLPVRLGGIGVRKARQLALPAFLSSCLASSGLVKRIVPERLRGVVGAQDPKFIEAAVQWDILADSSSRPAPPKEHKQSHWDKPIMEKISNTMLTNASGKDKARLLAVKAPHSGDFLLAVPNSSLGTRLDPQAIRIGVALRLAAPILTEHRCICGRATADQFGLHGLVCHTSEGKYARHEEVNDIIKRSLATARCPAQREPQVQRSDGSQKRPDGATMLPWKDGKQIAWDYTCAATLADTYLPHSLAEGGGVASHRETQKTRKYEDLPSCYNFIPIGSETHGAWGKCALKFLKELGGKLIIKTKDHRATSFLFQRLSVAIQRGNACSILGTRPTAGELDEVFDM

SEQ ID NO: 4774 - protein, 699 aa, Cherax destructor
MVNPVLGASASILLTELTTFVNNCLAGRIPEEIKPFYFGASLCALKKKDGGIRPIAVGNTLRRLVAKAAVRNIRLDAANLLQPHQLGFGVSQGSEAAAHAARAYIRDLPEDKAVVKLDFRNAFNMVKRDVVLPAVWDCFPSLFPFISVGYSKPSTLLFGEHEITSSEGVQQGDPLAPLLFCLAVRELTSSQRSELNIWYLDDGTLAGTGESLLEDLQLVKTQGEALGLILNPSKCEIITINQEIINAVQTILPEVTTTTPSNSTLLGAPLGHHAIDTILKDKVNDLKRMEERISDLDSHDALYLLTRCLTMPRLTYFLRCAPSFDNPTLDEYDAHLRSTFKKALNLSLEDRQWEQATLPVRLGGIGVRKARQVALPAFLSSCLASCGLVKKIVPERLRGVVGVQDPRFIEAAVRWDILADSSSRPSPPKEHKQSHWDKPIMEKIANTMLTNASGKDKARFLAVKAPHSGDFLLAVPNSSLGTRLDPQAIRIGVALRLAAPILTEHRCICGRATADQFGLHGLVCHTSEGKYARHEEVNEIIKRSLATARCPAQREPQVQRSDGSQKRPDGATLLPWKDGKQIAWDYTCAATMADTYLQYSVAEGGGAASHRKTQKTRKYEGLPPCYNFIPIGSETHGAWGKCALKFLKELGEKLIIETKDHRATSFLFQRLSVAIQRGNACSILGTRPTAGELDEVFEM

SEQ ID NO: 4775 - protein, 953 aa, Cherax destructor
MSGVWRVSITHRDGLIRAHNGCAGSHRPPAESNPQPPQADVNLNGNLLSCENLLLAFKSTASSTLSHIPKAARPYAAGKFTDLLKQVNGGSTNLEARGTIKAWRNLLLFGNVCLAVLERRGKLLTTSVIKAVRNYPRTDNCVPLPHHRRNHRGRPKKNSTENEKICSQVSKKIEEGNTVGAIRIITSDDTVAPKDETTAQALRYKHPTRDTIAINNNPEGDPITEQLILPESEVYKAIVSVLAESAGGYTGIRPQHLKEIVNPVLGASASILLTELTTFVNNCLAGRIPEEIKPFFFGASLCALKKDGGIRPIAVGNTLRRLVAKAAVRNIRLEAASLLQPHQLGFGVSQGSEAAAHAARAYIRDLSEDKAVVKLDFRNAFNMVKRDVVLPAVRDRFPSLFPFISAGYSKPSTLLFGEHEIPSSECVQQGDPLAPLLFCLAVRELTSSLCSELNIWYLDDGTLAGTGESLLEDLQRVKTQGEALGLILNPSKCEIITTNQEIINAVQTILPEVTTTTPSNSTLLGAPLGHHAIDTVLKDLKRMEERISDLDAHDALYLLTRCLTMPRLTYFLRCAPSFENPTLDEYDAHLRSTFKKALNLSLEDQQWEQATLSVRLGGIGVRKARQVALPAFLSSCLASCGLVKRIVPERLRGGVGAQDPKFIEAAVQWDILADTSSRPAPPKEHKQSHWDKPIMEKIANTMLTNASGKDKARLLAVKAPHSGDFLLAVPNSSLWTRLDPQAIRTGVALRLAAPILTEHRCICGRATADQFGLHGLVCHTSEGKYARHEEVNDIIKRSLATARCPAQREPQVQRSDGSQKRPDGATMLPWKDGKQIAWDYTCAATLADTYLPHSLAEGGGAASHRETKKTRKYEDLPSCYNFIPIGSETHGAWGKCALKFLKELGGKLIIETKAHRATSFLFQRLSVAIQRGNACSILGTRPTTGELDEVFDM

SEQ ID NO: 4776 - protein, 697 aa, Cherax destructor
MVNPVLGASASILLTELTTFVNCLAGRIPKEIKPFFFGASLCVLKKKDGGIRPIAVGNTLRRLVAKAAVRNIRLEAASLLQPHQLGFGISQGSEAAAHAARAYIRDLPEDKAVVKLDFRNAFNMVKRDVVLPAVRDRFPSLFPFISAGYSKPSTLVFGEHEIPSSEGVQQGDPLAPLLFCLAVRELTSSLCSELNIWYLDDGTLTGTGESLLEDLQRVKTQGEALGLILNPSKCEIITTNQEIINAVQTILPEVTTITPSNSTLLGAPLGHHAIDTVLKDKVNDLKRMEERISDLDAHDALYLLTRCLTMPRLTYFLRCAPSFENPTLDEYDAHLRSTFKKALNLSLEDQQWEQATLPVRLGGIGCKARQVALPAFLSSCLASCGLVKRIVPERLRGVVGAQDPKFIEAAVQWNILADSSSRPAPPKEHKQSHWDKPIMEKIANTMLTNASGKDKARLLAVKAPHSGDFLLAVPNSSLGTRLDPQAIRIGVALCLAATILTEHRCICGRATADQFELHGLVCHTSEGKYARHEEINDIIKRSLATARCPAQREPQMQRSDGSQKRPDGATMLPWKDGKQIAWDYTCAATLVDTYLPHSLAKGGGAASHRETQKTRKYEDLPSCYNFIPIGSETHGAWGKCALKFLKELGGKLIIETKDHRATSFLFQRLSVAIQRGNACSILGTRPTAGELDEVFDM

SEQ ID NO: 4777 - protein, 1211 aa, Laodelphax striatellus
MTRRSNRGGTGLRADPVRNRHEAQPVGEDVGGPSGTFLSTGTTRRQSISEIETGHDNSQPTHDASSDQQGTTRAGLPRRRMKWTDDMNLFIMRCYYNITKLETVNIYRQELHAAFTERFPTLQVSEQRVADQRRAIVVRNLIPEARLAELRSEVARTISVQADGEENQDFEITGDTMAPGPEPDPDPNPDPDPDPGPSGESVGDEESNRDLESLRFEFERALCEFMGTDPLSRPSLPRQHTSRRMAKFTHMMNQAILPQYLSGEGLEFEDLHSVLYVAAVSVIRAGGGKICDRGPRKTKKKEMPPWERRLSNSIEQLRKRIGRLLQYIAGNRSKRVLRELERVSVEMTTHTARDPHNCTPEQFLDTMQQKLAVKVKRLRRYRESRTKKENNSLFRKSEKLFYRSLQKADEEDYKEAPPITEIEKFWGSIWAEEVNHNDNASWLNGVEESLLNVPEMAAMVITAGDVTKSVNNTQNWKAPGPDGIQNFWIKRFTTLHRFIAERFSEFVRYPEKVPTYLSRGVTYLLPKGKTSKDPAKYRPITCLCTLYKILTSCIAEKIYCHLQENSLLAEEQKGCIRGSQGCKEQLIIDAVVMEQAVQKHRNINTAFIDYKKAFDSVPHSWLISVLSMYKIHPLTVSLLKHLMSSWSTVLQVESPGGRITSSCIPIRRGIFQGDSLSPLWFCLALNPLSFILNQSGYGYNLKGSTNLQCTLSHLMYMDDIKLYAASERQLKHLLALTEMFSADVQMSFGLDKCKTLSIQRGKIHPTNFVLGTGEAFHCMDESDAYKYLGLVQTKRLNHKEIRGVVTDEYLKRVSAVLKSRIDGRSTFKAINTYAVPVLTYTFGIVKWSNTELESLARSTRKLLTRYRVHHPKSAVERLIMPRNRGGRGLTDIYSSCQRQIQSLRNFFLTHTSFLHKVVVSADDSYTPLDLCHTEVADPRLEHDHIATIQQRWLEKPLHGRHAHDLNNPFVCREASNAWLNWGGIFAETEGFMLAIQDQCVATKNYLKYVVKENLENDTCRRCHKASETIQHVTSACQALVATHYLHRHNQVAGIIHQNLACLYNLLPSSVPYYKYTPSAVLENRTHKLYWDRSVLTDKTIPNNRPDIILIDKQEQITFLIDIGIPNTHNLKQYSEEKLLKYLPLAEEIKQLWRQEKVAIVPLVMSATGVIPKELSGRLKELGIPAWVLNLMQKSVILNTTSIVRSFLNIPQ

SEQ ID NO: 4778 - protein, 1035 aa, Laodelphax striatellus
MAPGPEPDSDPNPDPDPDPEPSGEGDGDEESNRDLQSLKFEFQRTLSEFMGTDPLLRPPLPRQHTSRRMARVTQMMNEIILPQYLSQEEIEFEDLHSILYAAAVSVIRATGGKVGQRRPIKVKKIMPPWEQRLSNSIEQLRKRIGRLTQYVAGNRSNKVLKEWQKVSVEMITHSARDPLNCTPEQFLDTMQQKLALKVKRLRRYRESRKKKENNSLFRRSEKLFYRSLQRADGEDCAVVPPVKEIERFWGGIWSEEVNHKGDATWLSGVEESLLHVPHMAAMVITAGDVTKAVNNTQNWKAPGPDGVQNFWIKRFTTFHESIARCFTVFLESPEKVPPYLSRGVTYLLPKEKNSEDPSKYRPITCLCTLYKILTACITEKIYSHLQENNLLAEEQKGCIRGSQGCKEQLIIDAVVMEQAVQKQRNIYTAFIDYKKAFDSVPHSWLLAVLSMYRVHPGTVSLLRHLMSSWSTVLQVEHSGGRITSSCIPIRRGIFQGDSLSPLWFCLSLNPLSFILKESGYGYSLKGSANLQCTLSHLLYMDDIKLYAASERQLKHLLALTEMFSADIRMSFGLSKCKTLSIVRGKVQPTNFVLESGEAFDCMGENDAYKYLGLVQTKRLNHKDIREVVTDTYLKRVSAVLRTRIDGKSTFKAINTYAIPVLTYTFGVVKWSATELESLARSTRKLLTKFRVHHPKSAVERLILPRSKGGRGLADIHRLCQGQKQSLRNYFLTHNSPLHQVVVAADDTYTPLDLCHSEVTDLRLSGNNIATTQQKWLEKPLHGRHAHDLCNPFISQEASNAWLSWGGIFAETEGFMLAIQDQCVATKNYLKYIIKENMETDACRRCHQASETIQHVTSACQALVATDYLHRHNQVARIVHQSLASQHNLLPNPVVPYYQYTPSAVLENATHKLYWDRSVLTDKTIPNNRPDIILIDKQKQNTFLIDIGIPNTHNMKQYSEEKLLKYLPLAEEIKDMWRQERVTIMPLIISATGVIPKELPERMQKLRLSVWVQNLMQKAVILCTTSIVRNFLNIPK

SEQ ID NO: 4779 - protein, 1167 aa, Laodelphax striatellus
MQPITEIESGSDNSQPVLDASSDQQRTTRAGLPRQRMKWTDEMNFFIMRCYYKITRLETINIYRQELHTAFIERFPTLQVTEQRVADQRRAIVVRNLIPDARLAELRSEVARALGVQEDVEQNQNIEIFGDSMAPGPEPDSDPDPDPDPDPEPSGEGDWDEESNRDLQSLKFEFQRTLSEFMGTDPLLRPPLPRQHTSRRMARVTQMMNEIILPQYLSQEEIEFEDLHSILYVAAVSVIRATGGKVGQRRPIKVKKIMPPWEQRLSNSIEQLRKRIGRLTQYVAGNRSNKVLKEWQKVSVEMITHSARDPLNCTPEQFLDTMQQKLALKVKRLRRYRESRKKKENNSLFRRSEKLFYRSLQRADGEDCAVVPPVKEIERFWGGIWSEEVNHKGDATWLSGVEESLLHVPQMAAMVITAGDVTKAVNNTQNWKAPGPDGVQNFWIKRFTTFHESIARCFTVFLESPEKVPPYLSRGVTYLLPKEKNSEDPSKYRPITCLCTLYKILTACISEKIDSNLQENNLLAQEQKGCIRGSQGCKEQLIIDAVVMEQAVQKQRNIHTAFIDYKKAFDSVPHSWLLAVLSMYRVHPGTLSLLRHLMSSWSTVLQVEHSGGRITSSCIPIRRGIFQGDSLSPLWFCLSLNPLSFILKESGYGYSLKGSANLQCTLSHLLYMDDIKLYAASERQLKHLLALTEMFSADIQMSFGLSKCKTLSIVRGKVQPTNFVLESGEAFDCMGENDAYKYLGLVQTKRLNHKDIQEVVTDTYLKRVSAVLRTRIDGKSTFKAINTYAIPVLTYTFGVVKWSVTELESLARSTRKLLTKFRVHHPKSAVERLILPRSKGGRGLADIHRLCQGQKQSLRNYFLTHNSPLHQVVVAADDTYTPLDLCHSEVTDLRHGGNNIATTQQKWLEKPLHGRHAHDLCNPFISQEASNAWLSWGGIFAETEGFMLAIQDQCVATKNYLKYIIKESMETDACRRCHQASETIQHVTSACQALVATDYLHRHNQVARIVHQSLASQHNLLPNPVVPYYQYTPSAVLENATHKLYWDRSVLTDKTIPNNRPDIILIDKQKQNTFLIDIGIPNTHNMKQYSEEKLLKYLPLAEEIKDMWRQERVTIMPLIISATGVIPKELPERMQKLRLSVWVQNLMQKAVILCTTSIVRNFLNIPK

SEQ ID NO: 4780 - protein, 1242 aa, Daphnia pulicaria
MSICITDGFIQLAHPLPAKVFCSTCGTSARWSGRNCISDAIRHFRTFHGKSVNVLVECSYCCNISETVQAAFFHQEKACPGLAPPDQLDSTSPAGETQLMGDKVILLYPPRPSKCPLCSWTCAGTRADANGTPTTGVADGIISHLYTHHNGIKVTRFWRCSRCLVLGGGMAMHHHHRHPIEDVDNVHSVEALLSPADHSNAAYCSPGAHTGLSPNSCTAHDHDLSTASSSDTIRMTDVPDIPSTVAPSPCQVSLPPVAMLDSRSDTQSQQPPAAIDTEATESTDCQSNGREDDQATNQPEAPSSQFFNKWEPRIAACSSFADLDQASTELTADWHMMTTSVDEATTTRPARQPRPVSDDQQKKRRTQSRQQQRIKRRSNSARWSQISRMQKLFNRYPRRAVRKVLGENSQAYTGTTEDATQFLRRTYTRPRPSAGEVNSARQAYDSCNWAKPSPVELSVLASPPTKEEIAQKLKRATNTAPGADGIEYRDIIKLDPEGKLLEKLYEAVWRLGIPTGWKSARTIPIFKKGDPTDFSNFRPISLLSTLYKVFSGTIASRLCTVASNNEWLSAEQKGFLPGAHGIQEHSMLLETAIGEAKHLRKDLTICWLDLANAFGSLPHDYLEELFNSLPIPIELQSTLADIYRDNISQFVVNDDLVPIASTSGVRQGDGLSSIIFNLAAEPLLRCAKAPSNAGFPMLGTTAKATSYADDISVMGQRPAQLQITIDAMCSVASTLGLQFNGAKCAAITFTKGKVDTSAPLRIDGKPIRTLDDGDNETYLGVPIGSRLLFRPATSIPDSLVKVADSDLAPWQKLEVFRSHLLPSLSHHLATGRVEKSFLHDLDKNCADFLRLVANVPHNAHTDFLYADRRAGGLGATRLSEDADVWTIARAAQLLDSSDAVVSSVARAQASKNIYNALKIEPTTALLSDYLSGSQTGGLYDIRFASTGANTWSRARRAAKRLRVRIDVSSDDTKTLLVADDVSTTSVKAVRGLRSVIRSRHTSNLCSAPHQGVVAKGLMLELKSSDMARLISCRTTLNFDDWELIHQTRLGLLPLHGAPGYQPSDKSCRKCGRQLETTTHVLNACPNNLPCMTLRHDAVLTRLNATLTRAGHTTRVNKCYDGTLLRPDLLITSVEPPVIIDITIPFDEPENLQLAHDEKVRKYSPLTTTIPFVVGSLGSWLTSNDAIATTLGITSRSWNSTRRDTRLLAIKGSLAIARQHICRPNQDPTTPAEQEPQAQSPPS

SEQ ID NO: 4781 - protein, 1143 aa, Daphnia pulicaria
MGDKVILLYPPRPSKCPLCSWTCAGTRADANGTPTTGVADGIISHLYTHHNGIKVTRFWRCSRCLVLGGGMAMHHHHRHPIEDVDNVHSVEALLSPADHSNAAYCSPGAHTGLSPNSCTAHDHDLSTASSSDTIRMTDVPDIPSTVAPSPCQVSLPPVAMLDSRSDTQSQQPPAAIDTEATESTDCQSNGREDDQATNQPEAPSSQFFNKWEPRIAACSSFADLDQASTELTADWHMMTTSVDEATTTRPARQPRPVSDDQQKKRRTQSRQQQRIKRRSNSARWSQISRMQKLFNRYPRRAVRKVLGENSQAYTGTTEDATQFLRRTYTRPRPSAGEVNSARQAYDSCNWAKPSPVELSVLASPPTKEEIAQKLKRATNTAPGADGIEYRDIIKLDPEGKLLEKLYEAVWRLGIPTGWKSARTIPIFKKGDPTDFSNFRPISLLSTLYKVFSGTIASRLCTVASNNEWLSAEQKGFLPGAHGIQEHSMLLETAIGEAKHLRKDLTICWLDLANAFGSLPHDYLEELFNSLPIPIELQSTLADIYRDNISQFVVNDDLVPIASTSGVRQGDGLSSIIFNLAAEPLLRCAKAPSNAGFPMLGTTAKATSYADDISVMGQRPAQLQITIDAMCSVASTLGLQFNGAKCAAITFTKGKVDTSAPLRIDGKPIRTLDDGDNETYLGVPIGSRLLFRPATSIPDSLVKVADSDLAPWQKLEVFRSHLLPSISHHLATGRVEKSFLHDLDKNCADFLRLVANVPHNAHTDFLYADRRAGGLGATRLSEDADVWTIARAAQLLDSSDAVVSSVARAQASKNIYNALKIEPTTALLSDYLSGSQTGGLYDIRFASTGANTWSRARRAAKRLRVRIDVSSDDTKTLLVADDVSTTSVKAVRGLRSVIRSRHTSNLCSAPHQGVVAKGLMLELKSSDMARLISCRTTLNFDDWELIHQTRLGLLPLHGAPGYQPSDKSCRKCGRQLETTTHVLNACPNNLPCMTLRHDAVLTRLNATLTRAGHTTRVNKCYDGTLLRPDLLITSVEPPVIIDITIPFDEPENLQLAHDEKVRKYSPLTTTIPFVVGSLGSWLTSNDAIATTLGITSRSWNSTRRDTRLLAIKGSLAIARQHICRPNQDPTTPAEQEPQAQSPPS

SEQ ID NO: 4782 - protein, 1376 aa, Daphnia pulicaria
MASTTKACGNPACPVTFTSVGNRKKYCSSGCYPSVTNRAKRPGQSLSSTTAAVNARLLPNYVDSPTGSPTGSSRDRSWAPSPSTITTRALSPVTPARLTGPSTASPGTSSTPTRPAPRNHSSRPSRRPPDRDPGMSICITDGSIQLAHPLPAKVFCSTCGTSARWSGRNCISDAIRHFRTFHGKSVNVLVECSYCCNISETVQAAFFHQEKACPGLAPPDQLDSTSPAGETQLMGDKVILLYPPRPSKCPLCSWTCAGTRADANGTPTTGVADGIISHLYTHHNGIKVTRFWRCSRCLVLGGGMAMHHHHRHPIEDVDNVHSVEALLSPADHSNAAYCSPGAHTGLSPNSCTAHDHDLSTASSSDTIRMTDVPDIPSTVAPSPCQVSLPPVAMLDSRSDTQSQQPPAAIDTEATESTDCQSNGREDDQATNQPEAPSSQFFNKWEPRIAACSSFADLDQASTELTADWHMMTTSVDEATTTRPARQPRPVSDDQQKKRRTQSRQQQRIKRRSNSARWSQISRMQKLFNRYPRRAVRKVLGENSQAYTGTTEDATQFLRRTYTRPRPSAGEVNSARQAYDSCNWAKPSPVELSVLASPPTKEEIAQKLKRATNTAPGADGIEYRDIIKLDPEGKLLEKLYEAVWRLGIPTGWKSARTIPIFKKGDPTDFSNFRPISLLSTLYKVFSGTIASRLCTVASNNEWLSAEQKGFLPGAHGIQEHSMLLETAIGEAKHLRKDLTICWLDLANAFGSLPHDYLEELFNSLPIPIELQSTLADIYRDNISQFVVNDDLVPIASTSGVRQGDGLSSIIFNLAAEPLLRCAKAPSNAGFPMLGTTAKATSYADDISVMGQRPAQLQITIDAMCSVASTLGLQFNGAKCAAITFTKGKVDTSAPLRIDGKPIRTLDDGDNETYLGVPIGSRLLFRPATSIPDSLVKVADSDLAPWQKLEVFRSHLLPSLSHHLATGRVEKSFLHDLDKNCADFLRLVANVPHNAHTDFLYADRRAGGLGATRLSEDADVWTIARAAQLLDSSDAVVSSVARAQASKNIYNALKIEPTTALLSDYLSGSQTGGLYDIRFASTGANTWSRARRAAKRLRVRIDVSSDDTKTLLVADDVSTTSVKAVRGLRSVIRSRHTSNLCSAPHQGVVAKGLMLELKSSDMARLISCRTTLNFDDWELIHQTRLGLLPLHGAPGYQPSDKSCRKCGRQLETTTHVLNACPNNLPCMTLRHDAVLTRLNATLTRAGHTTRVNKCYDGTLLRPDLLITSVEPPVIIDITIPFDEPENLQLAHDEKVRKYSPLTTTIPFVVGSLGSWLTSNDAIATTLGITSRSWNSTRRDTRLLAIKGSLAIARQHICRPNQDPTTPAEQEPQAQSPPS

SEQ ID NO: 4783 - protein, 1376 aa, Daphnia pulicaria
MASTTKACGNPACPVTFTSVGNRKKYCSSGCYPSVTNRAKRPGQSLSSTTAAVNARLLPNYVDSPTGSPTGSSRDRSWAPSPSTITTRALSPVTPARLTGPSTASPGTSSTPTRPAPRNHSSRPSRRPPDRDPGMSICITDGSIQLAHPLPAKVFCSTCGTSARWSGRNCISDAIRHFRTFHGKSVNVLVECSYCCNISETVQAAFFHQEKACPGLAPPDQLDSTSPAGETQLMGDKVILLYPPRPSKCPLCSWTCAGTRADANGTPTTGVADGIISHLYTHHNGIKVTRFWRCSRCLVLGGGMAMHHHHRHPIEDVDNVHSVEALLSPADHSNAAYCSPGAHTGLSPNSCTAHDHDLSTASSSDTIRMTDVPDIPSTVAPSPCQVSLPPVAMLDSRSDTQSQQPPAAIDTEATESTDCQSNGREDDQATNQPEAPSSQFFNKWEPRIAACSSFADLDQASTELTADWHMMTTSVDEATTTRPARQPRPVSDDQQKKRRTQSRQQQRIKRRSNSARWSQISRMQKLFNRYPRRAVRKVLGENSQAYTGTTEDATQFLRRTYTRPRPSAGEVNSARQAYDSCNWAKPSPVELSVLASPPTKEEIAQKLKRATNTAPGADGIEYRDIIKLDPEGKLLEKLYEAVWRLGIPTGWKSARTIPIFKKGDPTDFSNFRPISLLSTLYKVFSGTIASRLCTVASNNEWLSAEQKGFLPGAHGIQEHSMLLETAIGEAKHLRKDLTICWLDLANAFGSLPHDYLEELFNSLPIPIELQSTLADIYRDNISQFVVNDDLVPIASTSGVRQGDGLSSIIFNLAAEPLLRCAKAPSNAGFPMLGTTAKATSYADDISVMGQRPAQLQITIDAMCSVASTLGLQFNGAKCAAITFTKGKVDTSAPLRIDGKPIRTLDDGDNETYLGVPIGSRLLFRPATSIPDSLVKVADSDLAPWQKLEVFRSHLLPSISHHLATGRVEKSFLHDLDKNCADFLRLVANVPHNAHTDFLYADRRAGGLGATRLSEDADVWTIARAAQLLDSSDAVVSSVARAQASKNIYNALKIEPTTALLSDYLSGSQTGGLYDIRFASTGANTWSRARRAAKRLRVRIDVSSDDTKTLLVADDVSTTSVKAVRGLRSVIRSRHTSNLCSAPHQGVVAKGLMLELKSSDMARLISCRTTLNFDDWELIHQTRLGLLPLHGAPGYQPSDKSCRKCGRQLETTTHVLNACPNNLPCMTLRHDAVLTRLNATLTRAGHTTRVNKCYDGTLLRPDLLITSVEPPVIIDITIPFDEPENLQLAHDEKVRKYSPLTTTIPFVVGSLGSWLTSNDAIATTLGITSRSWNSTRRDTRLLAIKGSLAIARQHIRRPNQDPTIPAEQESQAQSPPS

SEQ ID NO: 4784 - protein, 1376 aa, Daphnia pulicaria
MASTTKACGNPACPVTFTSVGNRKKYCSSGCYPSVTNRAKRPGQSLSSTTAAVNARLPPNYVDSPTGSPTGSSRDRSWAPSPSTITTRALSPVTPARLTGPSTASPGTSSTPTRPAPRNHSSRPSRRPPDRDPGMSICITDGSIQLAHPLPAKVFCSTCGTSARWSGRNCISDAIRHFRTFHGKSVNVLVECSYCCNISETVQAAFFHQEKACPGLAPPDQLNSTSPAGETQLMGDKVILLYPPRPSKCPLCSWTCAGTRADANGTPTTGVADGIISHLYTHHNGIKVTRFWRCSKCLVLGGGMAMHHHHRHPIEDVDNVHSVEALLSPADHSNAAYCSPGAHTGLSPNSCTAHDHDLSTASSSDTTRMTDAPDIPSTVAPSPCQVSLPPVSMLDSRSDTQSQQPPAAIDTEATESTDCQSNGREDDQATTQPEAPSSQFFNKWEPRIAACSSFADLDQASTELTADWHMMTTSVDEATTTRPARQPRPVSDDQQKKRRTQSRQQQRIKRRSNSARRSQISRMQKLFNRYPRRAVRKVLGENSQAYTGTTEDATQFLRRTYTRPRPSAGEVNSARQAYDSCNWAKPSPVELSVLASPPTKEEIAQKLKRATNTAPGADGIEYRDIIKLDPEGKLLEKLYEAVWRFGIPTGWKSARTIPIFKKGDPTDFSNFRPISLLSTLYKVFSGTIASRLCTVASNNEWLSAEQKGFLPGAHGIQEHSMLLETAIGEAKHLRKDLTICWLDLANAFGSLPHDYLEELFNSLPIPIELQSTLADIYRDNISQFVVNDDLVPIASTSGVRQGDGLSSIIFNLAAEPLLRCAKAPSNAGFPMLGTTAKATSYADDISVMGQRPAQLQITIDAMCSVASTLGLQFNGAKCAAITFTKGKVDTSAPLRIDGKPIRTLDDGDNETYLGVPIGSRLLFRPATSIPDSLVKVADSDLAPWQKLEVFRSHLLPSISHHLATGRVEKSFLHDLDKNCADFLRLVANVPHNAHTDFLYADRRAGGLGATRLSEDADVWTIARAAQLLDSSDAVVSSVARAQASKNIYNAIKIEPTTALLSDYLSGSQTGGLYDIRFASTGANTWSRARRAAKRLKVRIDVSSDDTKTLLVADDVSTTSVKAVRGLRSVIRSRHTSNLCSAPHQGVVAKGLMLELKSSDMARLISCRTTLNFDDWELIHQTRLGLLPLHGAPGYQPSDKSCRKCGRQLETTTHVLNACPNNLPCMTLRHDAVLTRLNATLTRAGHTTRVNKCYDGTLLRPDLLITSVEPPVIIDITIPFDEPENLQLAHDEKVRKYSPLTTTIPFVVGSLGSWLTSNDAIATTLGITSRSWNSTRRDTRLLAIKGSLAIARQHIRRPNQDPTIPAEQESQAQSPPS

SEQ ID NO: 4785 - protein, 1073 aa, Daphnia pulicaria
MAMHHHHRHPIEDVDNVHSVEALLSPADHSNAAYCSPGAHTGLSPNSCTAHDHDLSTASSSDTTRMTDAPDIPSTVAPSPCQVSLPPVSMLDSRSDTQSQQPPAAIDTEATESTDCQSNGREDDQATTQPEAPSSQFFNKWEPRIAACSSFADLDQASTELTADWHMMTTSVDEATTTRPARQPRPVSDDQQKKRRTQSRQQQRIKRRSNSARRSQISRMQKLFNRYPRRAVRKVLGENSQAYTGTTEDATQFLRRTYTRPRPSAGEVNSARQAYDSCNWAKPSPVELSVLASPPTKEEIAQKLKRATNTAPGADGIEYRDIIKLDPEGKLLEKLYEAVWRFGIPTGWKSARTIPIFKKGDPTDFSNFRPISLLSTLYKVFSGTIASRLCTVASNNEWLSAEQKGFLPGAHGIQEHSMLLETAIGEAKHLRKDLTICWLDLANAFGSLPHDYLEELFNSLPIPIELQSTLADIYRDNISQFVVNDDLVPIASTSGVRQGDGLSSIIFNLAAEPLLRCAKAPSNAGFPMLGTTAKATSYADDISVMGQRPAQLQITIDAMCSVASTLGLQFNGAKCAAITFTKGKVDTSAPLRIDGKPIRTLDDGDNETYLGVPIGSRLLFRPATSIPDSLVKVADSDLAPWQKLEVFRSHLLPSISHHLATGRVEKSFLHDLDKNCADFLRLVANVPHNAHTDFLYADRRAGGLGATRLSEDADVWTIARAAQLLDSSDAVVSSVARAQASKNIYNAIKIEPTTALLSDYLSGSQTGGLYDIRFASTGANTWSRARRAAKRLKVRIDVSSDDTKTLLVADDVSTTSVKAVRGLRSVIRSRHTSNLCSAPHQGVVAKGLMLELKSSDMARLISCRTTLNFDDWELIHQTRLGLLPLHGAPGYQPSDKSCRKCGRQLETTTHVLNACPNNLPCMTLRHDAVLTRLNATLTRAGHTTRVNKCYDGTLLRPDLLITSVEPPVIIDITIPFDEPENLQLAHDEKVRKYSPLTTTIPFVVGSLGSWLTSNDAIATTLGITSRSWNSTRRDTRLLAIKGSLAIARQHIRRPNQDPTIPAEQESQAQSPPS

SEQ ID NO: 4786 - protein, 1376 aa, Daphnia pulicaria
MASTTKACGNPACPVTFTSVGNRKKYCSSGCYPSVTNRAKRPGQSLSSTTAAVNARLLPNYVDSPTGSPTGSSRDRSWAPSPSTITTRALSPVTPARLTGPSTASPGTSSTPTRPAPRNHSSRPSRRPPDRDPGMSICITDGSIQLAHPLPAKVFCSTCGTSARWSGRNCISDAIRHFRTFHGKSVNVLVECSYCCNISETVQAAFFHQEKACPGLAPPDQLDSTSPAGETQLMGDKVILLYPPRPSKCPLCSWTCAGTRADANGTPTTGVADGIISHLYTHHNGIKVTRFWRCSRCLVLGGGMAMHHHHRHPIEDVDNVHSVEALLSPADHSNAAYCSPGAHTGLSPNSCTAHDHDLSTASSSDTIRMTDVPDIPSTVAPSPCQVSLPPVAMLDSRSDTQSQQPPAAIDTEATESTDCQSNGREDDQATNQPEAPSSQFFNKWEPRIAACSSFADLDQASTELTADWHMMTTSVDEATTTRPARQPRPVSDDQQKKRRTQSRQQQRIKRRSNSARWSQISRMQKLFNRYPRRAVRKVLGENSQAYTGTTEDATQFLRRTYTRPRPSAGEVNSARQAYDSCNWAKPSPVELSVLASPPTKEEIAQKLKRATNTAPGADGIEYRDIIKLDPEGKLLEKLYEAVWRLGIPTGWKSARTIPIFKKGDPTDFSNFRPISLLSTLYKVFSGTIASRLCTVASNNEWLSAEQKGFLPGAHGIQEHSMLLETAIGEAKHLRKDLTICWLDLANAFGSLPHDYLEELFNSLPIPIELQSTLADIYRDNISQFVVNDDLVPIASTSGVRQGDGLSSIIFNLAAEPLLRCAKAPSNAGFPMLGTTAKATSYADDISVMGQRPAQLQITIDAMCSVASTLGLQFNGAKCAAITFTKGKVDTSAPLRIDGKPIRTLDDGDNETYLGVPIGSRLLFRPATSIPDSLVKVADSDLAPWQKLEVFRSHLLPSISHHLATGRVEKSFLHDLDKNCADFLRLVANVPHNAHTDFLYADRRAGGLGATRLSEDADVWTIARAAQLLDSSDAVVSSVARAQASKNIYNALKIEPTTALLSDYLSGSQTGGLYDIRFASTGANTWSRARRAAKRLRVRIDVSSDDTKTLLVADDVSTTSVKAVRGLRSVIRSRHTSNLCSAPHQGVVAKGLMLELKSSDMARLISCRTTLNFDDWELIHQTRLGLLPLHGAPGYQPSDKSCRKCGRQLETTTHVLNACPNNLPCMTLRHDAVLTRLNATLTRAGHTTRVNKCYDGTLLRPDLLITSVEPPVIIDITIPFDEPENLQLAHDEKVRKYSPLTTTIPFVVGSLGSWLTSNDAIATTLGITSRSWNSTRRDTRLLAIKGSLAIARQHICRPNQDPTTPAEQEPQAQSPPS

SEQ ID NO: 4787 - protein, 1061 aa, Leptotrombidium deliense
MSVSGHFKKCLGKNVSVDYLCLKCGKPNFATIRSVAAHFSKCRGPTETFERTSNLSCSVCGKGGFKNLTLHVRRAHLDIFDQLCATPVPKRHKWSEEELRLLRKAEITTMSAAQPSKKKVFQEFSKLVGNTAGTLKESQVVSMLKSKRYKEVSKRTDNTVQMPALSAPSRVPDSDLLAELDEYIESDMSALKSKQSSSAYMVSIEGAIAERVEWTVCTIYSLIISMCKEIGKKQKIRQRIIGRVSKKGQPLRNNSKGLKRARYLKAQRLWVKNRKACYKLIMEGETESPIELHVDEFHKFWGKAFSGEVSVSAASEPQSDCQVEVLETGRRQDCTSAFKPLTLSEIRTALSKGKRKALGLDGVAGMELCKVPARLLRLFFHLVMRYGYVPPAFKANRTVLIPKGEISADPGAWRPITVASALLRTLHSVLAKRLVKVIQFHPRQKGFVPGDGLLANIQLLDYLLKQKQRSLYLVSLDVSKAFDSVTWTSVHNALKAFGFPEPMIRYLMCTYDGSTTVLQVNGEMSNIINISKGVKQGDPLSPLIFNMIVDNLMYSLPAEVGLPVGAQKVNCLAFADDLVLVAGSRSGLTVLVDAANKFYQQQGLSLNPQKSIFFGKYYHGKLKTTRILQENIVINGREVPNLKRGQILRYLGVNFASEGKLKAQLKIFREALGRIAAAPLKPAQKLYFIKVHYLPKMLFYITTGRLTRVALEYCDFYVRRTVKQVLNLPDWTPNAFFHVPVAKGGLGLPWISATVPMSLRKRLLRLKESTDKVVQEYSKTPEYERLLQQLRRMYPRSWESKQDADKFLLESWHETSNGRDALIFAADKAGNHWLNGTNAKLRGEEFIRFVQLRSNTLPVLANALRGRPTPTCRACGQPGERETLAHILQRCAATHTARVRRHDEVVERCVKEWTRLGLDVRKEPTFTVNSVTYRPDVVLIKGNSIFVIDFAVPIETSVSFRKSYDLKVRKYEAALHSDLVREMCNQPNYVVRFRALIIGAKGAMEGKSIQTAELTNLSRTFQSYLRETAMRGSIKIWKQYRKIMNSSNPRVALSDAPSLAE

SEQ ID NO: 4788 - protein, 939 aa, Formica exsecta
MDAQQNTAAVKGRWNNEEILLLARKEMELTRHGVRFINQAIIDIFPGRTLEGIKGKRKQPAYRALVQELLSKAPGEPNEGHIADHSDETDYRSAIADCIRALPPSASADFKSARLQNICDSLQASKPEVVMMDLALYLREVFLLKARKARDTSNRRGVTLSKRQARRAEYARVQDLWRKNRSKCIGMVLDDITEVQVPPKDVMVPFWETVMTGSLDTSPGSVGSRPTINSLWSPISLVEIKKSMPANTISAGPDDLTARILRKIPPGILCRILNIIMWCGKAPLHLSESITTLIPKKSKAKTPGEFRPITVSSVLIRTLHKIFASRMARAVELDQRRAFRPTDGCSDNVFLLDLMLRYHNKSHKPLFIVSLDIAKAFDSVTHKSIQETLKIMGLPTPMIEYIMDAYSRSVTRLSCDSWTSEKIKPTYGVKQGDPMSPIIFNMVIERLLKELPEYIGARIGGVVINAAAFADDMLLFATTPIGLQKLLDISVAFLSKCGLQVNASKCLTVSLRNVPHEKKTVVDAETVFLCQGRMLPALRRTSEWIYLGVAFTPEGRVKLDISGKLRNMLEKLTKAPLKPQQRLFALRTNVNLGLYHQLELGCTNISILRKCDKIVRHAVRQWLALPTDAPNVYVHAGVKDGGLGIQSLRWQAPLRRLNRLLKLPLSQQGAVGAPSAFLETEIKLCRTRLLDGDSQLTSGVDVSSRWAKQLYGRVDSRGLQESARVPQQHPWMQDGTRFLSGKDFVQSCKLKINALPTKSRTSRGCPKERLCKAGCNCSKTLNHVLQQCHRTHGPRIKRHVASYIARNLEKQEYRVVVEPRIQTEEGLRKPDIIAWLGVTALVIDAQVVNDQVDLDGAHKRKIDYYENLTDAVRRLYGVREVRYTSITLSWRGVWSEESAQSMISLGVIKKNALKVLSSRVIIGGLASFHQFNKITTVRR

SEQ ID NO: 4789 - protein, 968 aa, Blattella germanica
MENNIISIDNAEEINLCKYCGKLFQTKRGINIHISRAHLSQYRDKIVNHHTVSKRKDSNFTLISNDNTQDDNRSAESTHDDTNKKSNSSTTKFNKKLSSYDTTFDIKVDEFISFLASAVKLLPGPKHPAQKYYEPRKTKNKADGQHSYKQSSNPQRVTKRDRAKRKNKFQYDLAQYYYYNQRRKAIRMIFNDDNTASPSDTKLLHEYFSGIFSKPNNLVRDEYVSTITEPQSIEINDTFNPIITKEEIMIAMKKIAIDTSSGPDHVIMRTIKNGTASEIIAIIASRVLSFGIVPSCLKQARTILIHKGGDVNSSSNYRPITICSVIRRVIERVLDKRIRAYVSLNPNQRGFINSPGTQINTSLLDAVLQDATLHKKYACVVALDIHKAFDNIGHLHLKETLQCSGVPNKLTNSIMALQENNTTRIEIKNHKTEPIVFCRGVMQGSPLSPFLYNLSTNYILNELSEELVINKYGYNLIPDEPNLSILSFADDTVLIGRNHAAATELMNIALHRFQEIGLQINTSKTKIINIKKEKIFETTFQINNENVITQKSTEPLRYLGVNFSNEITFDQKSTIITTKNYVEKLVNSPLLQADQKYSILNSSISPKLIYPFQTTPISKIPQTYLHDLDKILRSCLKEILQLPLDVPDSMLYSDRKYKGLGLFCATWEARLQRINACNILKAENNPYLNSLKDFQAECSACLQQLHIEASDKTTNIATLLPDARKIREQLREREFNRWSELPHKGKGVPLFKEHTPTNKWVRQHRGLSCSEWKDALKMISNVVAVRSVPGRSGDNTLCRRCGREHETLAHVLGSCPFGDVLRNGRHHTIRHMIANELQSKGLKVYEEVSGLATNGSSRRIDIIAFKPSSKTGIILDPTIRFETHSGQPEEVDKEKKTIYEPTIPYYQEKYNLDNISVTGLMLGARGTIPNFFVKFWSSLNLNKSILYDLSITAIRGYVLIMRNHLYSH

SEQ ID NO: 4790 - protein, 1013 aa, Dermanyssus gallinae
MIRNHPSLLNTDREALPKGKRPRWNPQDRELMASLEADIILENNGEAPYNINQEIAAKFSDRTLDSIKSQRKYQSYRTMVSEAIQQKRRRSSSDPDQDEAPEPRRARDNSPDRHASDPSPKNIILTHIHALTNTLPARHTMTPDLAHLAGVIQEGGDYTDTLNNFLNKHLHNTLPQRASDRRPSTEVTLSKRQQRREEYATTQKLFNKNRSKCANEVLDGKRSAHNMNGPDVVEHWASTMTLPAPPPLPPTPHTPNPDLTDLSSPISLDETVLALKGPSKALGLDGIGLSALRSIPTKIVCCLLNIIFISNVPDSLQEARIAFIPKVPICSSPGDLRPISITSYLQRTLNKILARRLQSTIELHPMQRAFLPYDGTFENLALLDGIIHDAKRRGVELRLASIDLRKAFDMVSHDSILWTLRRRGYPKMFVDYIERLYLSSRTLIEYNNSSRSVRPTRGVRQGDPLSPLLFNLVLDDILSKLNESNIGYQVADGNRILGLAFADDLILFAPTKQTLQQLLNLAYPLLNARGLEINTDKSFTLSHLFDGKAGVSYFRSQPEFTVGERLLPAKGINARWKYLGIEFDGNGKIDSTLDILLRLLSRLKAAPLRPHQRLILLKDYLIPRLLYKLVCGPSPSKQFLLKLDLEIRKAVKRDWLKLEQSVPNAFLYTRATHGGLNIPALITLIPRLRYSRLTRLERSTHTGLQWLATTEFFREQMAKTTALCSSTGTTITNAQQETEHWSKDLHNKFDGAHLKHAHKVPFVHNWVRGMPYLSGKEFINLVKLRINALPTRARLARGRPSYDKRCRHGCAAAETLAHVAQVCAYTNLQTTKRHDDVCARVTRVLREGGLQVDREQTFRRASQPSLRPDLVVTTPTEVWVLDAEICGPYRELPLARRDKMRKYDIPALRAQLDPTKIHRFGSITVSMTGVWDAESVKDLMGLGMSKKSLIDLTVQVVQGTLTHLPLPPGPQDLGSTRSGQTTTIITTTMTRNPATTTCQIWGTGPINSREDCV

SEQ ID NO: 4791 - protein, 988 aa, Dermanyssus gallinae
MIRNHPSLLNTDREALPKGKRPRWNPQDRELMASLEADIILENNGEAPYNINQEIAAKFSDRTLDSIKSQRKYQSYRTMVSEAIQQKRRRSSSDPDQDEAPEPRRARDNSPDRHASDPSPKNIILTHIHALTNTLPARHTMTPDLAHLAGVIQEGGDYTDTLNNFLNKHLHNTLPQRASDRRPSTEVTLSKRQQRREEYATTQKLFNKNRSKCANEVLDGKRSAHNMNGPDVVEHWASTMTLPAPPPLPPTPHTPNPDLTDLSSPISLDETVLALKGPSKALGLDGIGLSALRSIPTKIVCCLLNIIFISNVPDSLQEARIAFIPKVPICSSPGDLRPISITSYLQRTLNKILARRLQSTIELHPMQRAFLPYDGTFENLALLDGIIHDAKRRGVELRLASIDLRKAFDMVSHDSILWTLRRRGYPKMFVDYIERLYLSSRTLIEYNNSSRSVRPTRGVRQGDPLSPLLFNLVLDDILSKLNESNIGYQVADGNRILGLAFADDLILFAPTKQTLQQLLNLAYPLLNARGLEINTDKSFTLSHLFDGKAGVSYFRSQPEFTVGERLLPAKGINARWKYLGIEFDGNGKIDSTLDILLRLLSRLKAAPLRPHQRLILLKDYLIPRLLYKLVCGPSPSKQFLLKLDLEIRKAVKRDWLKLEQSVPNAFLYTRATHGGLNIPALITLIPRLRYSRLTRLERSTHTGLQWLATTEFFREQMAKTTALCSSTGTTITNAQQETEHWSKDLHNKFDGAHLKHAHKVPFVHNWVRGMPYLSGKEFINLVKLRINALPTRARLARGRPSYDKRCRHGCAAAETLAHVAQVCAYTNLQTTKRHDDVCARVTRVLREGGLQVDREQTFRRASQPSLRPDLVVTTPTEVWVLDAEICGPYRELPLARRDKMRKYDIPALRAQLDPTKIHRFGSITVSMTGVWDAESVKDLMGLGMSKKSLIDLTVQVVQGTLRIYRSHQDHKTWGRRGRGRPPPSSRRP

SEQ ID NO: 4792 - protein, 1136 aa, Dermanyssus gallinae
MDRRTCPDCGKVCKTGGGLAAHMRSHRRMDTHDTHRHTSPSPPGSPPTPSNNNNNSNNNNNNNNNSSAADNSTSISNRLQVPAEDLPSSSRLPSPTPSPSNLENSNLAAPPTQDAIPSPSPSSQSTPRYICRAAECTRSFKSKSGLTLHMKFNHPILLNDDREALPTGKRPRWNPQDRELMASIEADIILDNNGEVPTNINQAIASRFNDRTFESIKSQRKYQSYRTMVSEAIQKKRRRSSSDSDQAEAPEHRRVRDSSPDRYASNSSPENIILSHIQALTNTLPPRHTMTTDLTHLVGIIQEGGDYTDTLNKFLDTHLHNTLPQRASDRRPSTEVALSKRQKRREEYATTQKLYNKNRSKCANEVLNGKHTAHNMNGPDVIEHWAKTMTLPPPPPLPPTPHTPNPDLSDLSCPISLDETVLALKGPSKALGLDGIGLSALRSIPNKTVCCLLNILLISNIPDTLQEARIAFIPKVPLCSSPGDLRPISITSYLQRTLNKILARRLQASIDLHPMQRAFLPFDGTFENLALLDGIIHDAKRRGVELRLASIDLRKAFDMVSHDSILWTLRRRGYPKMFVDYIERLYLSSRTLLEYDNNSRSVRPTRGVRQGDPLSPLLFNLVLDDILSELNESNIGYQVADGNRILGLAFADDLILFAPTKSTLQQLLNLAFPLLNARGLEINTDKSFTLSHLYDGKAGTSFFRSRPEFTVGERLLPAKGIEARWKYLGIEFDGNGKIDSTLDTLLRLLSRLKAAPLRPHQRLVILKDYLVPRLLYKLVCGPSPSQKFLLRLDLEIRKAVKRDWLKLEQSVPNAFLYTRTTYGGLNIPALITLIPRLRLARLTRLERSTHTGIQWLTSTEFFREQMAKTTALCSSTGAAITNAQQETEYWSKDLHKMFDGAHLKNAHKVPFVHNWVKGMPYLSGKEFINLVKLRINALPTRARLARGRPSYDKRCRHGCGAAETLAHVSQVCAYTNRQTTKRHDDVCERVTRVLREGGLQVDRERTFRRASQPSLRPDLVVTTPTEVWVLDAEICGPYRELPLARRDKMRKYDIPALRAQLDPTKIHRFGSITVSMTGVWDAESVKDLMGLGMSKKNLIDLTVQVVQGTLRIYRSHQDHKTWGRRGRGRPPPSRRT

SEQ ID NO: 4793 - protein, 988 aa, Dermanyssus gallinae
MMRNHPSLLNTDREALPKGKRPRWNPQDRELMASLEADIILENNGEAPYNINQEIAAKFSDRTLDSIKSQRKYQSYRTMVSEAIQQKRRRSSSDPDQDEAPEPRRARDNSPDRHASDPSPKNIILTHIHALTNTLPARHTMTPDLAHLAGVIQEGGDYTDTLNNFLNKHLHNTLPQRASDRRPSTEVTLSKRQQRREEYATTQKLFNKNRSKCANEVLDGKRSAHNMNGPDVVEHWASTMTLPAPPPLPPTPHTPNPDLTDLSSPISLDETVLALKGPSKALGLDGIGLSALRSIPTKIVCCLLNIIFISNVPDSLQEARIAFIPKVPICSSPGDLRPISITSYLQRTLNKILARRLQSTIELHPMQRAFLPYDGTFENLALLDGIIHDAKRRGVELRLASIDLRKAFDMVSHDSILWTLRRRGYPKMFVDYIERLYLSSRTLIEYNNSSRSVRPTRGVRQGDPLSPLLFNLVLDDILSKLNESNIGYQVADGNRILGLAFADDLILFAPTKQTLQQLLNLAYPLLNARGLEINTDKSFTLSHLFDGKAGVSYFRSQPEFTVGERLLPAKGINARWKYLGIEFDGNGKIDSTLDILLRLLSRLKAAPLRPHQRLILLKDYLIPRLLYKLVCGPSPSKQFLLKLDLEIRKAVKRDWLKLEQSVPNAFLYTRATHGGLNIPALITLIPRLRYSRLTRLERSTHTGLQWLATTEFFREQMAKTTALCSSTGTTITNAQQETEHWSKDLHNKFDGAHLKHAHKVPFVHNWVRGMPYLSGKEFINLVKLRINALPTRARLARGRPSYDKRCRHGCAAAETLAHVAQVCAYTNLQTTKRHDDVCARVTRVLREGGLQVDREQTFRRASQPSLRPDLVVTTPTEVWVLDAEICGPYRELPLARRDKMRKYDIPALRAQLDPTKIHRFGSITVSMTGVWDAESVKDLMGLGMSKKSLIDLTVQVVQGTLRIYRSHQDHKTWGRRGRGRPPPSSRRP

SEQ ID NO: 4794 - protein, 1135 aa, Morbakka virulenta
MAVSYRRNRDYSKQFEWTYELNEDLYKYYKKAREDPRIGYMNRLKKLWDDTHPELSMFTSKNLRDQASRIEKRKNTTQQTQQGEVIINEQDNNRIDNDYTENNYRAPREQLRTENDLPEFNEHLKEQLKRIYNQNFENYYNKSLDERMFETKPRKQICKEILDAVDTIIKEHIESMNEVTIWDINCSLYCMAISCKQINNDLQENNSNSRLKKSEPSWIINLKNSIEKIRKLIAHTNVVIKCKLENKFTKHQLILKSKLQKKFGITSMNKLQTKLTILHQELKSKSQKLRYQNKLLERKRINKQFYTDPKKLFRSMKMEKIEPRSIPSKNEIEKFWKDIWQNKGDFDENAAWVNTLKETYCKQTTIKEYNITRPVIDKVVQKLNLNKAPGHDKIAPYWYKNITAYRNTLATIFDLMIHDDQKLPEWFSTAHTVLIPKSRETHIAKNYRPIACLNIQYKLYTSCINLFLSDHVEKNRVITKEQAAGKKGVWGTIEQLLLNKNILKEVKRTRRNLYTVWLDYKKAFDSIPHKWLLHALELAKVPEHLRNAIKNLTESWYTRLHLQGTNETITTDRIKIKKGIYQGDSLSTILFVLSLNPLSHMLQKTKGYAYGKTKNHQHTHNFFVDDLKLFSGNLNNLKHQLNIVTSFSRDISMNFGTDKCAYLQINKGKMVESNQHLEVNGLKIAPLATDDQYKYLGIDENISYVGPLNKQRISKEYLGRVKKIWNSELSDYNKVTAHNTFAVPVITPTIGIIDWTIAEIEQLDVKTRKMLSMTGNFHPNSDVDRLYINRNKGGRGLRNVRTLFESRIIAVHQHLKLNFARNEILKYINECEIDSIKRIADELLQQTNIIQEQNEKPKNLSRKFTLQKTEQRIERYTNKKVHGYFQRKLKDDNKIDHKTSLQRTKNRSTTSHFNSYLDSIIDQELPTRYLQHKRQQINDNKCRLCHISIEDVTHITNGCPKMSARYYLPLRHDALAKYVLKAVIRINHPEHNYFEKRDPEYVLKIDNVEYWWNLPIKTITKTPHNKPDMIIWDKSTKVCSIVEFSCPTDINIGNKIDEKMNNYAPLLRNMQIMYPDYRFKMIPIIIGALGYVPTCLQKVMEELGFEKKETAKHINKMQNIVTSGTVKICKTFLKF

SEQ ID NO: 4795 - protein, 887 aa, Morbakka virulenta
MNLTCFTLQSSYLLTYLLTYLLTYLLTYLLTYLLKSKSQKLRYQNKLLERKRINKQFYTDPTKLFRSMKMEKIEPRSIPSKNEIEKFWKDIWQNKGDFDENAAWVNTLKETYCKQTTIKEYNITRPVIDKVVQKLNLNKAPGHDKIAPYWYKNITAYRNTLATIFDLMIHDDQKLPEWFSTAHTVLIPKSRETHIAKNYRPIACLNIQYKLYTSCINLFLSDHVEKNRVITKEQAAGKKGVWGTTEQLLLNKNILKEVKRTRRNLYTVWLDYKKAFDSIPHKWLLHALELAKVPEHLRNAIKNLTESWYTRLHLQGTNETITTDRIKIKKGIYQGDSLSTILFVLSLNPLSHMLQKTKGYAYGKTKNHQHTHNFFVDDLKLFSGNLNNLKHQLNIVTSFSRDISMNFGTDKCAYLQINKGKMVESNQHLEVNGLKIAPLATDDQYKYLGIDENISYVGPLNKQRISKEYLGRVKKIWNSELSDYNKVTAHNTFAVPVITPTIGIIDWTIAEIEQLDVKTRKMLSMTGNFHPNSDVDRLYINRNKGGRGLRNVRTLFESRIIAVHQHLKLNFARNEILKYINECEIDSIKRIADELLQQTNIIQEQNEKPKNLSRKFTLQKTEQRIERYTNKKVHGYFQRKLKDDNKIDHKTSLQRTKNRSTTSHFNSYLDSIIDQELPTRYLQHKRQQINDNKCRLCHISIEDVTHITNGCPKMSARYYLPLRHDALAKYVLKAVIRINHPEHNYFEKRDPEYVLKIDNVEYWWNLPIKTITKTPHNKPDMIIWDKSTKVCSIVEFSCPTDINIGSKIDEKMNNYAPLLRNMQIMYPDYRFKMIPIIIGALGYVPTCLQKVMEELGFEKKETAKHINKMQNIVTSGTVKICKTFLKF

SEQ ID NO: 4796 - protein, 960 aa, Morbakka virulenta
MNEVTIWDINCSLYCMAISCKQINNDLQENNSNSQSKKSEPSWIINLKNSIEKIRKLIAHTNVVIKCKLENKFTKHQLILKSKLQKKFGITSMNKLQTKLTILHQELKSKSQKLRYQNKLLERKRINKQFYTDPKKLFRSMKMEKIEPRSIPSKNEIEKFWKDIWQNKGDFDENAAWVNTLKETYCKQTTIKEYNITRPVIDKVVQKLNLNKAPGHDKIAPYWYKNITAYRNTLATIFDLMIHDDQKLPEWFSTAHTVLIPKSRETHIAKNYRPIACLNIQYKLYTSCINLFLSDHVEKNRVITKEQAAGKKGVWGTTEQLLLNKNILKEVKRTRRNLYTVWLDYKKAFDSIPHKWLLHALELAKVPEHLRNAIKNLTESWYTRLHLQGTNETITTDRIKIKKGIYQGDSLSTILFVLSLNPLSHMLQKTKGYAYGKTKNHQHTHNFFVDDLKLFSGNLNNLKHQLNIVTSFSRDISMNFGTDKCAYLQINKGKMVESNQHLEVNGLKIAPLATDDQYKYLGIDENISYVGPLNKQRISKEYLGRVKKIWNSELSDYNKVTAHNTFAVPVITPTIGIIDWTIAEIEQLDVKTRKMLSMTGNFHPNSDVDRLYINRNKGGRGLRNVRTLFESRIIAVHQHLKLNFARNEILKYINECEIDSIKRIADELLQQTNIIQEQNEKPKNLSRKFTLQKTEQRIERYTNKKVHGYFQRKLKDDNKIDHKTSLQRTKNRSTTSHFNSYLDSIIDQELPTRYLQHKRQQINDNKCRLCHISIEDVTHITNGCPKMSARYYLPLRHDALAKYVLKAVIRMNHPEHNYFEKRDPEYVLKIDNVEYWWNLPIKTITKTPHNKPDMIIWDKSTKVCSIVEFSCPTDINIGNKIDEKMNNYAPLLRNMQIMYPDYRFKMIPIIIGALGYVPTCLQKVMEELGFEKKETAKHINKMQNIVTSGTVKICKTFLKF

SEQ ID NO: 4797 - protein, 858 aa, Morbakka virulenta
MNKLQTKLTILHQELKSKSQKLRYQNKLLERKRINKQFYTDPKKLFKSMKMEKIEPRSIPSKNEIENFWKDIWQNKGDFDENAAWVNTLKETYCKQTTIKEYNITRPVIDKVVQKLNLNKAPGHDKIAPYWYKNITAYRNTLATIFDLMIHDDQKLPEWFSTAHTVLIPKSRETHIAKNYRPIACLNIQYKLYTSCINLFLSDHVEKNRVITKEQAAGKKGVWGTTEQLLLNKNILKEVKRTRRNLYTVWLDYKKAFDSIPHKWLLHALELAKVPEHLRNAIKNLTESWYTRLHLQGTNETITTDRIKIKKGIYQGDSLSTILFVLSLNPLSHMLQKTKGYAYGKTKNHQHTHNFFVDDLKLFSGNLNNLKHQLNIVTSFSRDISMNFGTDKCAYLQINKGKMVESNQHLEVNGLKIAPLATDDQYKYLGIDENISYVGPLNKQRISKEYLGRVKKIWNSELSDYNKVTAHNTFAVPVITPTIGIIDWTIAEIEQLDVKTRKMLSMTGNFHPNSDVDRLYINRNKGGRGLRNVRTLFESRIIAVHQHLKLNFARNEILKYINECEIDSIKRIADELLQQTNIIQEQNEKPKNLSRKFTLQKTEQRIERYTNKKVHGYFQRKLKDDNKIDHKTSLQRTKNRSTTSHFNSYLDSIIDQELPTRYLQHKRQQINDNKCRLCHISIEDVTHITNGCPKMSARYYLPLRHDALAKYVLKAVIRINHPEHNYFEKRDPEYVLKIDNVEYWWNLPIKTITKTPHNKPDMIIWDKSTKVCSIVEFSCPTDINIGSKIDEKMNNYAPLLRNMQIMYPDYRFKMIPIIIGALGYVPTCLQKVMEELGFEKKETAKHINKMQNIVTSGT

SEQ ID NO: 4798 - protein, 1135 aa, Morbakka virulenta
MAVSYRRNRDYSKQFEWTYELNEDLYKCYKKAREDPRIGYMNRLKKLWDDTHPELSMFTSKNLRDQASRIEKRKNTTQQTQQGEVIINEQDNNRIDNDYTENNYRAPREQLRTENDLPEFNEHLKEQLKRIYNQNFENYYNKSLDERMFETKPRKQICKEILDAVDTIIKEHIESMNEVTIWDINCSLYCMAISCKQINNDLQENNSNSRLKKSEPSWIINLKNSIEKIRKLIAHTNVVIKCKLENKFTKHQLILKSKLQKKFGITSMNKLQTKLTILHQELKSKSQKLRYQNKLLERKRINKQFYTDPKKLFRSMKMEKIEPRSIPSKNEIEKFWKDIWQNKGDFDENAAWVNTLKETYCKQTTIKEYNITRPVIDKVVQKLNLNKAPGHDKIAPYWYKNITAYRNTLATIFDLMIHDDQKLPEWFSTAHTVLIPKSRETHIAKNYRPIACLNIQYKLYTSCINLFLSDHVEKNRVITKEQAAGKKGVWGTTEQLLLNKNILKEVKRTRRNLYTVWLDYKKAFDSIPHKWLLHALELAKVPEHLRNAIKNLTESWYTRLHLQGTNETITTDRIKIKKGIYQGDSLSTILFVLSLNPLSHMLQKTKGYAYGKTKNHQHTHNFFVDDLKLFSGNLNNLKHQLNIVTSFSRDISMNFGTDKCAYLQINKGKMVESNQHLEVNGLKIAPLATDDQYKYLGIDENISYVGPLNKQRISKEYLGRVKKIWNSELSDYNKVTAHNTFAVPVITPTIGIIDWTIAEIEQLDVKTRKMLSMTGNFHPNSDVDRLYINRNKGGRGLRNVRTLFESRIIAVHQHLKLNFARNEILKYINECEIDSIKRIADELLQQTNIIQEQNEKPKNLSRKFTLQKTEQRIERYTNKKVHGYFQRKLKDDNKIDHKTSLQRTKNRSTTSHFNSYLDSIIDQELPTRYLQHKRQQINDNKCRLCHISIEDVTHITNGCPKMSARYYLPLRHDALAKYVLKAVIRMNHPEHNYFEKRDPEYVLKIDNVEYWWNLPIKTITKTPHNKPDMIIWDKSTKVCSIVEFSCPTDINIGNKIDEKMNNYAPLLRNMQIMYPDYRFKMIPIIIRPLGYVPTCLQKVMEELGFEKKETAKHINKMQNIVTSGTVKICKTFLKF

SEQ ID NO: 4799 - protein, 1010 aa, Morbakka virulenta
MPLMMPTNGFFFNSFKTENNLPEFNGHLKEQLKRIYNQNFENYYNKSLDERMFETKPRKQICKEILDAVDTIIKEHIESMNEVTIWDINCSLYCMAISCKQINNDVKENNSNSRSKKSEPSWIINLKNSIEKIRKLIAHTNVVIKCKLENKFTKHQLILKSKLQKKFGITSMNKLQTKLTILHQELKSKSQKLRYQNKLLERKRINKQFYTDPKKLFRSMKMEKIEPRSIPSKNEIEKFWKDIWQNKGDFDENAAWVNTLKETYCKQTTIKEYNITRPVIDKVVQKLNLNKAPGHDKIAPYWYKNITAYRNTLATIFDLMIHDDQKLPEWFSTAHTVLIPKSRETHIAKNYRPIACLNIQYKLYTSCINLFLSDHVEKNRVITKEQAAGKKGVWGTTEQLLLNKNILKEVKRTRRNLYTVWLDYKKAFDSIPHKWLLHALELAKVPEHLRNAIKNLTESWYTRLHLQGTNETITTDRIKIKKGIYQGDSLSTILFVLSLNPLSHMLQKTKGYAYGKTKNHQHTHNFFVDDLKLFSGNLNNLKHQLNIVTSFSRDISMNFGTDKCAYLQINKGKMVESNQHLEVNGLKIAPLATDDQYKYLGIDENISYVGPLNKQRISKEYLGRVKKIWNSELSDYNKVTAHNTFAVPVITPTIGIIDWTIAEIEQLDVKTRKMLSMTGNFHPNSDVDRLYINRNKGGRGLRNVRTLFESRIIAVHQHLKLNFARNEILKYINECEIDSIKRIADELLQQTNIIQEQNEKPKNLSRKFTLQKTEQRIERYTNKKVHGYFQRKLKDNNKIDHKTSLQRTKNRSTTSHFNSYLDSIIDQKLPKRYLQHKRQQINDNKCRLCHISIEDTTHITNGCPKMSARYYLPLRHDALSKYVLKAVIRMNRPEHNYFEKRDPEYVLKIDNVEYWLNLKVKTVTKTPHNKPDMTIWDKSTKVCSIVEFSCPTDINIGNNYARLLRNMQIMYTDYRFKTLPIIIGALEYDPKCLQEVMEELGFEKKETTKH

SEQ ID NO: 4800 - protein, 1389 aa, Drepana arcuata
MRSYHHDLNHKLHITATNTLANTYPTNDSKPNPMEIMEKRKYNLRPLPGGRRGASGADAGCHSMRTVGDGGLSRRVPLEKLTTADQPSSCPSSPSSLFSSIPSSPPSYMDIVCNDPASSLSLSTSPVADVVQVASATNLVPTKTTLRARKKWSEDMNIFIMRTYYTITKLETINKKSYLAELHQIFSEAHPEMQASRQRIGDQRRAIINNKLLSTEKINNIRNEVETILQNTISSQTTQTTNTVHTGQRMKWSEDINESIIRHYFIVTNMESNKTSYRQLLHRAVIAEFPHLSHLTEQRIADQRQVIVKRKFLTEDRMQQIREEALLEVNRQHVQTSNTPHTSPLRQQTSPTQNYNLIQDADASLLNSQITSTLPQDHLNTNFLPDKQREIEEAFLTAFERFKNTDPVSRPFLPKQKTSKKLATIVNYINSVILPKHVPLDSPFEITQAAIYSAAYISTKLNGKKVSENSITNNSHINFIPAWQKRLERRIDDLRVKIGKLTEFIRGNPSKKLAKYIEDIKLSYRIHSQHEGENTHLSQFMDTLKQKLSAITSRLRRYKVTTKRKTQNNTFNNNEKQFYRSLGMNTTAQSTFEIPEPENMHKYWSDIWSAPVTHNTKAGWINKDRQNLQNLPNMEFNKISLEILKRVVDKLHSWKAPGSDNIHNYWYKKLTYLHPAILDQINSFIEAPETLPYYITLGMTYMLPKDKSDLKNPAKYRPITCLQNIYKIMTSCITEVIYRHTNTNSLIAEEQKGCRRGSQGCKEQLVIDAVVSKQAYKSKNNMFSMYIDYKKAFDSVPHSWLIYILEHYKIHPIIIKFLKHTMQNWKTKLKIKSDHSNMETEPIFINRGIFQGDSLSPLWFCLAINPLSKLLNDSCPGFKFSHSDTQHAITHLMYMDDIKLYGNTLEELHHLADVTHTFSSDIQMQFGIDKCKMLSVIRGKVENNSLQLKSGELIDHLDTTTGYKYLGYQQTQMIHQRQTKQLLDKTFKQRLNQILNTHLNAKNTVKAINTYVIPILTYSFGIIHWSQTNLKQLQRTINTHLTKYRKHHPRACTERLTIKKSDGGRGIIDIKNLHNKQITTLRKFFHQRASQSALHKATVKADTNLTPLNLQDNTEQPNERITTFTQKFDSWLQKSLHGRHRRDLLDPNVDIVSSNSWLRNGELFPETEGFMLAIQDQVIDTRNYRKHIIRDRTLQTDICRHCHSNSETIQHITGACRSITQSDYKHRHDQVAAIIHQYLAFKYNLIASKTAYYKYTPDIILDSADYKLYWDRTIITDKTIHCNRPDITLHDKRNKQVYLIDIAIPNTHNMTNTYTEKITKYADLSIEIKTQWKVDVVKTVPIILSSTGVIPHTLHKSLITLDIHKLTYMQLQKAVILNTCRIVRKFLSL

SEQ ID NO: 4801 - protein, 1389 aa, Drepana arcuata
MRSYHHDLNHKLHITATNTLANTYPTNDSKPNPMEIMEKRKYNLRPLPGGRRGASGADAGCHSMRTVGDGGLSRRVPLEKLTTADQPSSCPSSPSSLFSSIPSSPPSYMDIVCNDPASSLSLSTSPVADVVQVASATNLVPTKTTLRARKKWSEDMNIFIMRTYYTITKLETINKKSYLAELHQIFSEAHPEMQASRQRIGDQRRAIINNKLLSTEKINNIRNEVETILQNTISSQTTQTTNTVHTVQRMKWSEDINESIMRHYFIVTNMESNKTSYRQLLHRAVIAEFPHLSHLTEQRIADQRQVIVKRKFLTEDRMQQIREEALLEVNRQHVQTSNTPHTSPLRQQTSPTQNYNLIQDADASLLNSLITSTLPQDHLNTNFLPDKQREIEEAFLTAFERFKNTDPVSRPFLPKQKTSKKLATIVNYINSVILPKHVPLDSPFEITQAAIYSAAYISTKLNGKKVSENSITNNSHNNFIPAWQKRLERRIDDLRVKIDKLTEFIRGNPSKKLAKYIEDIKLNYRIHSQHEGENTHLSQFMDTLKQKLSAITSRLRRYKVTTKRKTQNNTFNNNEKQFYRSLGMNTTAQSTFEIPEPENMHKYWSDMWSAPVTHNTKAGWINKDRQNLQNLPNMEFNKISLEILKRVVDKLHSWKAPGSDNIHNYWYKKLTYLHPAILDQINSFIEAPETLPYYITLGMTYMLPKDKSDLKNPAKYRPITCLQNIYKIMTSCITEVIYRHTNTNSLIAEEQKGCRRGSQGCKEQLVIDAVVSKQAYKSKNNMFSMYIDYKKAFDSVPHSWLIYILEHYKIHPIIIKFLKHTMQNWKTKLKIKSDHSNMETEPIFINRGIFQGDSLSPLWFCLAINPLSKLLNDSCPGFKFSHSDTQHAITHLMYMDDIKLYGNTLEELHHLADVTHTFSSDIQMQFGIDKCKMLSVIRGKVENNSLQLKSGELIDHLDTTTGYKYLGYQQTQMIHQRQTKQLLDKTFKQRLNQILNTHLNAKNTVKAINTYVIPILTYSFGIIHWSQTNLKQLQRTINTHLTKYRKHHPRACTERLTIKKSDGGRGIIDIKNLHNKQITTLRKFFHQRASQSALHKATVKADTNLTPLNLQDNTEQPNERITTFTQKFDSWLQKSLHGRHRRDLLDPNVDIVSSNSWLRNGELFPETEGFMLAIQDQVIDTRNYRKHIIRDRTLQTDICRHCHSNSETIQHITGACRSITQSDYKHRHDQVAAIIHQYLAFKHNLIASKTAYYKYTPDIILDSADYKLYWDRTIITDKTIHCNRPDITLHDKRNKQVYLIDIAIPNTHNMTNTYTEKITKYADLSIEIKTQWKVDVVKTVPIILSSTGVIPHTLHKSLITLDIHKLTYMQLQKAVILNTCRIVRKFLSL

SEQ ID NO: 4802 - protein, 1352 aa, Ectropis grisescens
MTVGQNSLWPGRGESPAGSINCQTTNASITDSDFIPSTPAVDVVQEACADNTAPATAGTRKRKRWTEEMNSFIMRKFYILTRLETDTKSYLEQLHKLFSEQYPEMEVSRQRIGDQRRAIVNKKLISPDSIDKIKKEVEAILHSTTNTPNFIPTQDIGTTSMSQRMRWSNAMNETIMRAYYKITQLNTNKTGYRQPLHRAFIDEYPQLSHISEQRISDQRRVIVNNKLITEERLQQLRDDISTELNNVPQNLLSQTVNGININCDTNTVTQIYTSQNTSTSLAVNTIQTISLDTEQTTEQNELASTFDLNLNSETQSEYLATTELSIIQTQSMEDNHTLENSYLQALENFKNSDPISRPCLPKQKSSKKFATIVNYINNNILPKHITPLSSFTETQTATYCAAYTAVVQNGGKIKDNSSVDNSKTTDTRLINSYSRDKIPVWQQRLENRIQDLRANIARLTEYIRGNRTNRLKRLVENIKTRYKIHSQHEQDNSTLSQFLDTLKQKLNALVSRLRRYKLTTKRKSQNSMFNNNEKLFYRSLKENQNNANVLETPEPTALKDFWSNIWSVPVEHANAEWIENDKQTLQDIPEMEFEEVNLDILKQVICKLHNWKATGSDNIHNFWYKKFTYLHPILLNHINNFIKSPESMPEYISLGTTYMLPKDKTDTANPAQYRPITCLQNIYKIITSCINELVYQHTETHNILAEQQKGCRRYSQGCKEQLIIDAIASKQALIKKRNIYTMYIDYKKVFDSVPHTWLLYILRHYKIHPTVVNFLKSSMNKWNTIIKLKVGGTSMETEPIPIRRGIFQGDSFSPLWFCLALNPLSNLLNNSNNGFKIKHNPTQGSTHYTLSHLMYMDDIKLYGSNREEIEHLADITQSFSSDICMQFGIDKCKILSVKKGKIENNSYHLNTDEEIEPVDIDTGYKYLGYQQSRQIHQKQTKSAIETKFKARLHKILNTYLNSKNTVKAINTFAIPILTYSFGIINWSKSNLTKLQRIINTHLTKYRKHHPRACTQRLTLPKLEGGRAIIDIQNLHNKQITTLRNYFLNKSHTSKLHEASVKADLKFTPLNLNSTNVQANETIIQDPQKLATWLQKSLHGRHRRDLLDPNVDKIASNMWLKSGELFPETEGFMLAIQDQIIDTRNYRKYIIRDHTQPTDLCRHCHSNSETIQHITGACRTITQTDYKHRHDQVAAIIHQYLAIKYKFVKEKTPYYKYNPEIVHDSTDYKLYWDRTIITDKTIHFNRPDITLHDKRNKIVYLIDIAIPNTHNISTTYTEKITKYTDLAIELKTQWKVDTVRTVPIILSTTGVIPHTLFTSLESLHIHRNIFILLQKATILNTCRIVRKFLSLNQ

SEQ ID NO: 4803 - protein, 1373 aa, Peribatodes rhomboidaria
MNRKTLQCPQVPGGSRGDSYDSREEPTVARGEVNPRVRSINCQTTNASQMDSDYNLSSPAEDVVQEASANNTAPAKAVSRMRRRWTEDMNTFIMRTYFIITILETETKSYLAELHKQFSEQYPEMQSSRQRVGDQRRAIVNKNLLSTDKLDAIRKEAEVILHSTTTGLNSTQTTYTQTTGQKMRWSNAMNETIMRAYYRITLLNTNKTAYRQPLHRAFTDQYPHLSHISEQRIADQRRVIENNKLITDERLQQIRDETSTELETQTQNSHLTNSLNIINITQNLQLQDSLSDTQHATNNSLSETLSTNDVSLATPDNTQSSRITHVESNTRNQTQTETMNNISLEQQEKTEETYLKTFEMFQTTEPILRPSLPRQKPSRKLASIVHFINNTILPKYVTPESSFNHTQTSIYCAAYTAVLHNGGKIKDSSSTADTQLRMGNQNYRDRIPAWQKRLETRIQDIRGNIARLSEFIKGNRSDRLKKIVDNIKTRYKIHSQHEGENFNLTHFLDTLKQKLSALASRLRRYKLTTKRKAQNLQFNNNEKLFYRSLGEEQSANLSSETPEPTALKQFWSNIWSVPKEHVQAEWIDNDKERLQDLPDMDFEEINLDILKHVIGKLHNWKATGSDNIHNFWYKKFTYLHPIILNHINNFIKSPESMPKYISLGTTYMLAKDKTDTKNPAKYRPITCLQNIYKIITSCINELLYRHTNTHNILAEQQKGCRRYSQGCKEQLTIDAVTSKQALVKKRNIYTMYIDYKKAFDSVPHTWLLYILKHYKIHPTIIQFLENTMRQWNTVLKLKQGDTYLETDPIPIRRGIFQGDSLSPLWFCLALNPLSNILNNSNNGFKLKYGNTHYTLSHLMYMDDIKLYGSSLEEIEHLADITQSFSSDIHMEFGIDKCKILSVRRGKIEENTYQLSNDEQIEPVDVESGYKYLGYQQTKQIHQKQTKSTIEQKFKTRLHKILNTHLNAKNTIKAINTFAIPILTYSFGIIHWSKSNLLKLQRMINTHLTKYRKHHPRACFERLTLPNIEGGRGLIDIQNLHNKQITTLRNYFHDRVQKSILHEATVQADVKCTPLNLSNYSTQKNEHITTDPQKLNSWLQKSLHGRHRRDLLDPNVDKIASNAWLKSGELFPETEGFMLAIQDQIIDTRNYRKHIIRDNTLQSDLCRHCHSNSETIQHITGACRTITQTDYKHRHDQVAAIIHQYLAYKYKFIQEKTPYYKYTPEIIHDSPNYKLYWDRTIITDKTIHFNRPDITLQDKRNKIVYLIDIAIPNTHNLTSTHSEKITKYTDLAIEIKTQWKVDTVRTVPIILSTTGVIPYTLLTGLETLNIHRATYTQFAKGSNIKHLSHCPEVFVSFFLNNKIEITAFRLAKSP

SEQ ID NO: 4804 - protein, 1015 aa, Biston betularia
MSQELEQQINETFTRALNIFKITEPISRPSLPKQKSSRKFAAIVHYINDDILPRHITLESTFIDMQTAIYCAAYTAVIHNGGKIKDDSNVANTQSKNTNQKYRDRVPPWQKRLEKRIQDLRANIARLSEFIKGNTSTRLKNAVENIKIRYKIHSQYEGTNSNLSHFLDTLKQKLSALASRLRRYKLTTKRKTQNSMFANNEKQFYRSLKEEQNSQTVETPEPETLKEFWSNIWSMPIEHVEAEWIDDDKQTLKDVSDMEFSEVGLDTLKYVIGKLHNWKATGSDNIHNFWYKKFTYIHPIILHHINNFIKSPELMPEYISLGTTYMLPKDKTDTKNPAKYRPITCLQNIYKIITACINELIYKHTNTHNILAEQQKGCRRYSQGCKEQLTIDAIASKQALGKKRNIFTMYIDYKKAFDSVPHTWLLYILKHYKVHPTIIHFLRNTMTKWNTVLKLRLGDTSLETEPIPIRRGIFQGDSLSPLWFCLALNPLSNLLNNSNTGFKLKYENTYYTLSHLMYMDDIKLYGTNLKEIEHLADITHSFSSDIHMEFGIDKCKILSVRKGKIEENTYQLNNDEQIEPVDVDSGYKYLGYQQSRQIHQKETKATIEQKFKTRLHKILNTHLNAKNTIKAINTYAIPILTYSFGIIHWSKSNLIKLQRMINTHMTKYRKHHPRACFERLTLSNLEGGRGLIDIQNLHNKQITSLRSYFHEQTQRSELHKASVIADIKLTPLNLNDPNAQKNEKITTDTEKLSSWLQKSLHGRHRRDLLDPNVDKIASNAWLKSGDLFPETEGFMLAIQDQIIDTRNYRKHIIRDNTLHSDLCRHCHSNSETIQHITGACRTITQTDYKHRHDQVAAIIHQFLAIKYKFIQEKVPYYKYTPEIIHDSTNYKLYWDRTILTDKTIHFNRPDITLHDKQNKIVYLIDVAIPNTHNVTATYTDKITKYTDLAIEIKTQWKVDTVKTIPIILSTTGVIPYTLFTSLETLNIHRNTSIQLQKAVILNTCRIVRKFLSLNQ

SEQ ID NO: 4805 - protein, 1356 aa, Peribatodes rhomboidaria
MNRKTLQCPQVPGGSRGDSYDSREEPTVARGEVNPRVRSINCQTTNASQMDSDFNLSSPAEDVVQEASANNTAPAKAVTRMRRKWTEDMNTFIMRTYFIITILETETKSYLAELHKQFSEQYPEMQSSRQRVGDQRRAIVNKNLLSTDKLDAIRKEAEVILHSTTTGLNSTQTTYTQATGQKMRWSNAMNETIMRAYYRITHLNTNKTAYRQPLHRAFTDQYPHLSHISEQRIADQRRVIENNKLITDERLQQIRDETSTELEIQTQNSHLTNSLNIINITQNLQLQDSLSDTQHATNNSLSKTLSTNDVSLATPDNTQTALITHVESNTRNQTQTETMNNISLEQQEKTEETYLKTFEMFQTTEPILRPSLPRQKPSRKLAAIVHFINNTILPKYVTPESSFNHTQTSIYCAAYTAVLHNGGKIKDSSSTADTQLRMGNQNYRDRIPAWQKRLETRIQDIRGNIARLSEFIKGNRSDRLKKIVDNIKTRYKIHSQHEGENFNLTHFLDTLKQKLSALASRLRRYKLTTKRKAQNLQFNNNEKLFYRSLGEEQSANLSLETPEPTALKQFWSNIWSVPKEHVQAEWIDNDKERLQDLPDMDFEEINLDILKHVIGKLHNWKATGSDNIHNFWYKKFTYLHPIILNHINNFIKSPESMPKYISLGTTYMLAKDKTDTKNPAKYRPITCLQNIYKIITSCINELLYRHTNTHNILAEQQKGCRRYSQGCKEQLTIDAVTSKQALVKKRNIYTMYIDYKKAFDSVPHTWLLYILKHYKIHPTIIKFLENTMRQWNTVLKLKQGDTYLETDPIPIRRGIFQGDSLSPLWFCLALNPLSNILNNSNNGFKLKYGNTHYTLSHLMYMDDIKLYGSSLEEIEHLADITQSFSSDIHMEFGIDKCKILSVKRGKIEENTYQLSNDEQIEPVDVESGYKYLGYQQTKQIHQKQTKSTIEQKFKTRLHKILNTHLNAKNTIKAINTFAIPILTYSFGIIHWSKSNLLKLQRMINTHLTKYRKHHPRACFERLTLPNIEGGRGLIDIQNLHNKQITTLRNYFHDRVQKSILHEATVQADVKCTPLNLSNYSTQKNEHITTDPQKLNSWLQKSLHGRHRRDLLNPNVDKIASNAWLKSGELFPETEGFMLAIQDQIIDTRNYRKHIIRDNTLQSDLCRHCHSNSETIQHITGACRTITQTDYKHRHDQVAAIIHQYLAYKYKFIQEKTAYYKYTPEIIHDSPNYKLYWDRTIITDKTIHFNRPDITLQDKRNKIVYLIDIAIPNTHNLTSTHSEKITKYTDLAIEIKTQWKVDTVRTVPIILSTTGVIPYTLLTGLETLNIHRATYTQLQKAAILNTCRIVRKFLSLS

SEQ ID NO: 4806 - protein, 1420 aa, Campaea margaritaria
MALKRVDLAPWESTKIISQKNTMEMSANECDLLCDPANARRSQLSGPVSGKYVTEDCTGVGDQAPLLVNVTGNSANGGSRGEADDSKQVPSVTRGKMNLRVRSINCQTTNACQTDSAIFISSTAEDVVQEASADNPAPTKAKPRARKKWTDDMNTFILRTYFILTILETDTKSYLAELHKRFTKQFPEIEVSRQRIGDQRRAIVNRKLLSTDKIDKIRKEAEAILQHPTNELISTQTTNTETPGQRMRWSNEINETIMRIYYKITHLNTNITAYRQPLHQTFIAKYPHLSHLSEQRIADQRRVIVNNKLIADERLEQIRDDVSRELDQPPSPQPTESRITSDNMENLAPIPQNYPNQAQCSTQNLNETALTHGSHTNTPQSDIFNTEDNIENPTQIQTSNLSQEQTTNLPQEHQNQIEEAYTKTLESFKTTDPISRPSLPRQKTSKKFAAIVHFINTNILPKHITEESSFEDSQTAIYCAAYTAVTRNGGKVRENIATTQTTNRTPNTKTPMWQKRLGKRIQDIRANIGRLSEFIKGNRSERLKKTVDEIKTRYKIHSQHEGENTELSHFLDTLKQKLSALASRLRRYKLTTKRKSQNAKFNNNEKLFYRSLNEEQNNNTPAESPEPEVLKEFWSNIWSVPKEHAESQWIKQDKQTLHNIPDMEFDNLNLDTLKVVIGKLHNWKATGSDNIHNFWYKKFTYLHPIILNHINNFIKSPETMPEYVTLGTTYMLPKDKSDMKNPAKYRPITCLQNIYKIITSCITEIIYRHTNSNSILAEQQKGCRRHSQGCKEQLTIDAVVSKQALVKSRNIYTMYIDYKKAFDSVPHTWLLYILEHYKIHPIIVQFLGNTMNKWKTVLKLKLGETQLQTDSIAIRRGIFQGDSLSPLWFCLALNPLSNLLNDSNKGFKIKFETTHCTLSHLMYMDDIKLFGTNLKEIEHLADITQTFSSDIHMEFGIDKCKTLSVRRGKIEENSFQLNTEETIESVDVESGYKYLGYQQTRQIHQKQTRAAIEQKFKSRLHKILNTHLNAKNTIKAINTYAIPILTYSFGIIHWSKTNLIKLQRMINTHMTKYRKHHPRACSERLTLPNIEGGRGLIDIQNLHNTQITTLRKFFHLKAQNSLLHDATVQADIKFTPLNLNNRTTQKNENITSALQKLNSWLQKSLHGRHRRDLMDPNVDKIASNAWLKSGELFPETEGFMIAIQDQIIDTRNYRKHIIRDNTLQTDLCRQCHSNSETIQHITGACRSIAQTDYKHRHDQVAAIIHQYLAIKYKLIKDTTSYYKYKPEIILESINHKLYWDRTIITDKTVHFNRPDITLHDKNNKIVYLIDIAIPNTHNLNTTHTEKITKYTDLAIELKTQWKVDTVKTVPVVLSTTGVIPYTLHTSLETLNIHKLTYLQLQKATILNTCRIVRKFLSLNQ

SEQ ID NO: 4807 - protein, 1352 aa, Agriopis aurantiaria
MNRKTLHCPQVPGGSRGDANDSRQEPTVARGEMNLRAGSINCQTTNASQTDSDFNPSSMAEDVVQEASADNPVPAKATTRTRKRWTEDMNTFIMRTYFILTVLETDTKSYLGELHKQFSEQYPDMHVSRQRVGDQRRAIVNKKLLSTDKIDEIRKETEITLHSTTTRLDSIQTADTQTTDQRMRWSNAMNETIMRAYYKITHINTNKTGYRQPLHRAFINQYPHLSHISEQRIADQRRVIVNNKLITDERLQQIRDEISMELDDIQNSQVTNSINANRSIDALTQNSQNNILTNTQNTTQDNLSETLLAGNVLLSTQTDNIEPIESNIRNQIQIDTIGNIEQKQIEETYLRTLETFKTTEPISRPSLPRQKPSRKFAAIVHIINDSILPKYITPESSFNDTQTAIYCAAYTAVVRNGGKIRDSSNTADTQSRNQNQNSKDRTPAWQKRLERRIQDLRANIARLSEFIKGNRSDRLKKIVDNIQTRYKIHSQHEGENSSLSNFLDTLKQKLSALASRLRRYKLTTKRKAQNSQFSNNEKMFYRSLREEQNSNVTVETPEPEALKQFWSNIWSVPIEHVEAEWIDNDKQILQNVPDMEFDELNLDTLKLVIGKLHNWKATGSDNIHNFWYKKFTYLHPIILSHINNFIKSPESMPEYISLGTTYMLPKDKTDTKNPAKYRPITCLQNIYKIITSCISELIYRHTNTHNILAEQQKGCRRYSQGCKEQLTIDAIVSKQALAKRRNIYTMYIDYKKAFDSVPHTWLLYILKHYKIHPTIIQFLGNTMNKWNTVLKLRLGDTFLETEPIPIRKGIFQGDAFSPLWFCLALNPLSNLLNNSNSGFKLKHGNTQYTLSHLMYMDDIKLYGSNLKEIEHLADITQSFSSDIHMEFGIDKCKILSVRKGKIEENTYRLNNDEQIDPIDVDSGYKYLGYQQTRQIHQKQTKATIELNFKTRLHKILNTHLNAKNTVKAINTYAIPILTYSFGIIHWSKSNLLKLQRMINTHMTKYRKHHPRACYERLTLSHAEGGRGLIDIQNLHNKQITTLRNYFHEQVQRSKLHEATVQADIKFTPLNLNDYNTQKNENITPDSQKLSSWLQKSLHGRHRRDLIDPNVDKIASNAWLKSGELFPETEGFMTAIQDQIIDTRNYRKHIIRDNTLQSDLCRHCHSSSETIQHITGACRTITQTDYKHRHDQVAAIVHQYLAIKYKFIQEKIPYYKYTPEIIHDSSDYKLYWDRTIITDKTIHFNRPDITLHDKKNKVVYLIDIAIPNTHNLTNTYTEKITKYTDLAIEIKTQWKVDTVRTVPIILSSTGVIPYTLFTGLETLNIHRNTFIQLQKAIILNTCRIVRKFLSLNQ

SEQ ID NO: 4808 - protein, 1082 aa, Agriopis aurantiaria
MFQPIINNNIDALTQNSQNNILTNTQNTTQDNLSETLLAGNVLLSTQTDNIEPIESNIRNQIQIDTIGNIEQKQIEETYLRTLETFKTTEPISRPSLPRQKPSRKFAAIVHIINDSILPKYITPESSFNDTQTAIYCAAYTAVVRNGGKIRDSSNTADTQSRNQNQNSKDRTPAWQKRLERRIQDLRANIARLSEFIKGNRSDRLKKIVDNIQTRYKIHSQHEGENSSLSHFLDTLKQKLSALASRLRRYKLTTKRKAQNSQFSNNEKMFYRSLREEQNSNVTVETPEPEALKQFWSNIWSVPIEHVEAEWIDNDKQILQNVPDMEFDELNLDTLKLVIGKLHNWKATGSDNIHNFWYKKFTYLHPIILSHINNFIKSPESMPEYISLGTTYMLPKDKTDTKNPAKYRPITCLQNIYKIITSCISELIYRHTNTHNILAEQQKGCRRYSQGCKEQLTIDAIVSKQALAKRRNIYTMYIDYKKAFDSVPHTWLLYILKHYKIHPTIIQFLGNTMNKWNTVLKLRLGDTFLETEPIPIRKGIFQGDAFSPLWFCLALNPLSNLLNNSNSGFKLKHGNTQYTLSHLMYMDDIKLYGSNLKEIEHLADITQSFSSDIHMEFGIDKCKILSVRKGKIEENTYRLNNDEQIDPIDVDSGYKYLGYQQTRQIHQKQTKATIELNFKTRLHKILNTHLNAKNTVKAINTYAIPILTYSFGIIHWSKSNLLKLQRMINTHMTKYRKHHPRACYERLTLSHAEGGRGLIDIQNLHNKQITTLRNYFHEQVQRSKLHEATVQADIKFTPLNLNDYNTQKNENITPDSQKLSSWLQKSLHGRHRRDLIDPNVDKIASNAWLKSGELFPETEGFMTAIQDQIIDTRNYRKHIIRDNTLQSDLCRHCHSSSETIQHITGACRTITQTDYKHRHDQVAAIVHQYLAIKYKFIQEKIPYYKYTPEIIHDSSDYKLYWDRTIITDKTIHFNRPDITLHDKKNKVVYLIDIAIPNTHNLTNTYTEKITKYTDLAIEIKTQWKVDTVRTVPIILSSTGVIPYTLFTGLETLNIHRNTFIQLQKAIILNTCRIVRKFLSLNQ

SEQ ID NO: 4809 - protein, 1344 aa, Agriopis aurantiaria
MDRKTKHCPQVPGGSRGDADDSRREPTVARGKMNLRAGLINCQTTNASQMDSDFISSSPAEDVVREASANDPAPTKAGTRVRKKWTDEMNIFIMRTYFLITSLETDTKAYLAELHQTFTEKYPNMQASRQRVGDQRRAITQRKLLSTEKIEDIRKEVETLLKDTSDTNERHITQTHISQTGQRMRWSNEINEFIINSYYKITQLDTNKSAYRQPLHQAFIRNYPHLSHISEQRVADQRRVIINNKLISEERLQEIRDNVSIELNRVQNTQNITQNAPQLSHHTNTNEPEVSDDDCPLIHLLTHTQRHASSQFNTQTVAPQEAQNITSVQYISQELESKIEETYLKTLDKYKTTEPISRPSIPKQKSSNRFAAIVKYINDTVLPRHISSDSDFENAQLTIYCAAYTAVIHNGGKIREDRNINNNGNRTSTTRNQTPAWQKRLEIRIRTLRANIGRLSEFIKGNTSPRLKKLIDQIKNQYKIHSQYENENTELIHFLDTLKQKLSALASRLRRYKLTTKRKSQNTLFSNNEKLFYRTLNNEQPDNSNPETPELEQLETFWSNIWSTPKVHKNAEWIEEDKKKLEAIPLMEFDNITLDTLKQVIAKTHNWKAPGSDNIHNFWYKKFTHLHPILLHHINTFIKSPETMPQYITLGTTYMLPKDKSDLRNPAKYRPITCLQNIYKIITSCIGELIYKHTNSNNILAEQQKGCRRNSQGCKEQLTIDAVVSKQALVKKRNIFTMYIDYKKAFDSVPHSWLLYILNHYKIHPTIVNFLESTMKHWKTVLKLKLGDTSLETDPIQIRKGIFQGDSFSPQWFCLALNPLSNLLNSSGCGYKINNGDSRYTLSHLMYMDDIKLYGTNLDEINQLADITQSFSSDIHMEFGIDKCKILSVKKGKVEQNSFPLNTGEQIDPVDLQTGYKYLGYQQTRQIHQKQTKITLQQKFKSRLHQILNTHLNAKNTLKAINTYAIPILTYSFGIIHWSQTNLKVLQRTINTTMTKYRKHHPRACSERQTLPKSEGGRGLIDITNLHNSQITALRNFFHEQTQRSPLHEAIVKSDCKYTPLNLNNNNIQKNENITTQTQKTSTWLQKSLHGRHRRDLLDPNVDKVSSNAWLKFGELFPETEGFMLAIQDQIIDTRNYRKYIIKDHTMQSDLCRHCHSSSETIQHITGACRSITQTDYKHRHDQVAAIVHQNLAFKYKLIKEKTAYYKYTPDTVLDSNTHKLYWDRTILTDKTIHYNRPDITLHDKINKTVYLIDIAIPNTHNLTTTYTEKIAKYTDLAIELKTQWKVETVRTIPIVLSSTGVIPYTLHTSLKTLDMHNYTFVQLQKAVVLNTCRIVRKFLSQNQ

SEQ ID NO: 4810 - protein, 1420 aa, Campaea margaritaria
MALKRVDLAPWESTKIISQKNTMEMSANECDLLCDPANARRSQLSGPVSGKYVTEDCTGVGDQAPLLVNVTGNSAIGGSRGEADDSKQVPSVTRGKMNLRVRSINCQTTNACQTDSAIFISSTAEDVVQEASADNPAPTKAKPRARKKWTDDMNTFILRTYFILTILETDTKSYLAELHKRFTKQFPEIEVSRQRIGDQRRAIVNRKLLSTDKIDKIRKEAEAILQHPTNELISTQTTNTETPGQRMRWSNEINETIMRIYYKITHLNTNITAYRQPLHQTFIAKYPHLSHLSEQRIADQRRVIVNNKLIADERLEQIRDDVSRELDQPPSPQPTESRITSDNMENLAPIPQNYPNQAQCSTQNLNETALTHGSHTNTQQSDIFNTEDNIENPTQIQTSNLSQEQTTNLPQEHQNQIEEAYTKTLESFKTTDPISRPSLPRQKTSKKFAAIVHFINTNILPKHITEESSFEDSQTAIYCAAYTAVTRNGGKVRENIATTQTTNRTPNTKTPMWQKRLGKRIQDIRANIGRLSEFIKGNRSERLKKTVDEIKTRYKIHSQHEGENTELSHFLDTLKQKLSALASRLRRYKLTTKRKSQNAKFNNNEKLFYRSLNEEQNNNTPAESPEPEVLKEFWSNIWSVPKEHAESQWIKQDKQTLHNIPDMEFDNLNLDTLKVVIGKLHNWKATGSDNIHNFWYKKFTYLHPIILNHINNFIKSPETMPEYVTLGTTYMLPKDKSDMKNPAKYRPITCLQNIYKIITSCITEIIYRHTNSNSILAEQQKGCRRHSQGCKEQLTIDAVVSKQALVKSRNIYTMYIDYKKAFDSVPHTWLLYILEHYKIHPIIVQFLGNTMNKWKTVLKLKLGETQLQTDSIAIRRGIFQGDSLSPLWFCLALNPLSNLLNDSNKGFKIKFETTHCTLSHLMYMDDIKLFGTNLKEIEHLADITQTFSSDIHMEFGIDKCKTLSVRRGKIEENSFQLNTEETIESVDVESGYKYLGYQQTRQIHQKQTRAAIEQKFKSRLHKILNTHLNAKNTIKAINTYAIPILTYSFGIIHWSKTNLIKLQRMINTHMTKYRKHHPRACSERLTLPNIEGGRGLIDIQNLHNTQITTLRKFFHLKAQNSLLHDATVQADIKFTPLNLNNRTTQKNENITSALQKLNSWLQKSLHGRHRRDLMDPNVDKIASNAWLKSGELFPETEGFMIAIQDQIIDTRNYRKHIIRDNTLQTDLCRQCHSNSETIQHITGACRSIAQTDYKHRHDQVAAIIHQYLAIKYKLIKDTTSYYKYKPEIILESINHKLYWDRTIITDKTVHFNRPDITLHDKNNKIVYLIDIAIPNTHNLNTTHTEKITKYTDLAIELKTQWKVDTVKTVPVVLSTTGVIPYTLHTSLETLNIHKLTYLQLQKATILNTCRIVRKFLSLNQ

SEQ ID NO: 4811 - protein, 1018 aa, Peribatodes rhomboidaria
MNNISLEQQEKTEETYLKTFEMFQTTEPILRPSLPRQKPSRKLAAIVHFINNTILPKYVTPESSFNHTQTSIYCAAYTAVLHNGGKIKDSSSTADTQLRMGNQNYRDRIPAWQKRLETRIQDIRGNIARLSEFIKGNRSDRLKKIVDNIKTRYKIHSQHEGENFNLTHFLDTLKQKLSALASRLRRYKLTTKRKAQNLQFNNNEKLFYRSLGEEQSANLSLETPEPTALKQFWSNIWSVPKEHVQAEWIDNDKERLQDLPDMDFEEINLDILKHVIGKLHNWKATGSDNIHNFWYKKFTYLHPIILNHINNFIKSPESMPKYISLGTTYMLAKDKTDTKNPAKYRPITCLQNIYKIITSCINELLYRHTNTHNILAEQQKGCRRYSQGCKEQLTIDAVTSKQALVKKRNIYTMYIDYKKAFDSVPHTWLLYILKHYKIHPTIIKFLENTMRQWNTVLKLKQGDTYLETDPIPIRRGIFQGDSLSPLWFCLALNPLSNILNNSNNGFKLKYGNTHYTLSHLMYMDDIKLYGSSLEEIEHLADITQSFSSDIHMEFGIDKCKILSVKRGKIEENTYQLSNDEQIEPVDVESGYKYLGYQQTKQIHQKQTKSTIEQKFKTRLHKILNTHLNAKNTIKAINTFAIPILTYSFGIIHWSKSNLLKLQRMINTHLTKYRKHHPRACFERLTLPNIEGGRGLIDIQNLHNKQITTLRNYFHDRVQKSILHEATVQADVKCTPLNLSNYSTQKNEHITTDPQKLNSWLQKSLHGRHRRDLLNPNVDKIASNAWLKSGELFPETEGFMLAIQDQIIDTRNYRKHIIRDNTLQSDLCRHCHSNSETIQHITGACRTITQTDYKHRHDQVAAIIHQYLAYKYKFIQEKTAYYKYTPEIIHDSPNYKLYWDRTIITDKTIHFNRPDITLQDKRNKIVYLIDIAIPNTHNLTSTHSEKITKYTDLAIEIKTQWKVDTVRTVPIILSTTGVIPYTLLTGLETLNIHRATYTQLQKAAILNTCRIVRKFLSLS

SEQ ID NO: 4812 - protein, 1355 aa, Biston betularia
MNRKTLQCPQVPGGSRGKADDSRKEPCVARGEMNLRARLINCQTTNASQTDSDFNPSLPAEDVVQEACAENPVPTKAATRTRIRWTDAMNAFIMRTYFILTMIETDTKSYLAELHKRFSEQYPAIQVSRQRIGDQRRAIVNKNLLPPHKINEVRKEAEALLQSAANISNLTQTTDAQISGQRMRWSNAMNETIIRAYFKITQLDTNKTAYRQPLYRAFIDQYPNLSHISEQRVADQRRVIINNKLISDERLQQIRDEISVELDSMQNIQTTNSININQDIVASTPNTHDNLPNTLTQNITLDIASETISPSDEVLLATRTQTSLLEPNTRNPIRPEIVNNMSQELEQQINETFTRALNIFKITEPISRPSLPKQKSSRKFAAIVHYINDDILPRHITLESTFIDMQTAIYCAAYTAVIHNGGKIKDDSNVANTQSKNTNQKYRDRVPPWQKRLEKRIQDLRANIARLSEFIKGNTSTRLKNAVENIKIRYKIHSQYEGTNSNLSHFLDTLKQKLSALASRLRRYKLTTKRKTQNSMFANNEKQFYRSLKEEQNSQTVETPEPETLKEFWSNIWSMPIEHVEAEWIDDDKQTLKDVSDMEFSEVGLDTLKHVIGKLHNWKATGSDNIHNFWYKKFTYIHPIILHHINNFIKSPELMPEYISLGTTYMLPKDKTDTKNPAKYRPITCLQNIYKIITACINELIYKHTNTHNILAEQQKGCRRYSQGCKEQLTIDAIASKQALGKKRNIFTMYIDYKKAFDSVPHTWLLYILKHYKVHPTIIHFLRNTMTKWNTVLKLRLGDTSLETEPIPIRRGIFQGDSLSPLWFCLALNPLSNLLNNSNTGFKLKYENTYYTLSHLMYMDDIKLYGTNLKEIEHLADITLSFSSDIHMEFGIDKCKILSVRKGKIEENTYQLNNDEQIEPVDVDSGYKYLGYQQSRQIHQKETKATIEQKFKTRLHKILNTHLNAKNTIKAINTYAIPILTYSFGIIHWSKSNLIKLQRMINTHMTKYRKHHPRACFERLTLSNLEGGRGLIDIQNLHNKQITSLRSYFHEQTQRSELHKASVIADIKLTPLNLNDPNAQKNEKITTDTEKLSSWLQKSLHGRHRRDLLDPNVDKIASNAWLKSGDLFPETEGFMLAIQDQIIDTRNYRKHIIRDNTLHSDLCRHCHSNSETIQHITGACRTITQTDYKHRHDQVAAIIHQFLAIKYKFIQEKVPYYKYTPEIIHDSTNYKLYWDRTILTDKTIHFNRPDITLHDKQNKIVYLIDVAIPNTHNVTATYTDKITKYTDLAIEIKTQWKVDTVKTIPIILSTTGVIPYTLFTSLETLNIHRNTSIQLQKAVILNTCRIVRKFLSLNQ

SEQ ID NO: 4813 - protein, 1344 aa, Agriopis aurantiaria
MDRKTKHCPQVPGGSRGDADDSRREPTVARGKMNLRAGLINCQTTNASQMDSDFISSSPAEDVVREASANDPAPTKAGTRVRKKWTDEMNIFIMRTYFLITSLETDTKAYLAELHQTFTEKYPNMQASRQRVGDQRRAITQRKLLSTEKIEDIRKEVETLLKDTSDTNERHITQTHISQTGQRMRWSNEINEFIINSYYKITQLDTNKSAYRQPLHQAFISNYPHLSHISEQRVADQRRVIINNKLISEERLQEIRDNLSIELNRVQNTQNITQNAPQLSHHTNTNEPEVSDDDCPLIHLLTHTQRHASSQFNTQTVAPQEAQNITSVQYISQELESKIEETYLKTLDKYKTTEPISRPSIPKQKSSNRFAAIVKYINDTVLPRHISSDSDFENAQLTIYCAAYTAVIHNGGKIREDRNINNNGNRTSTTRNQTPAWQKRLEIRIRTLRANIGRLSEFIKGNTSPRLKKLIDQIKNQYKIHSQYENENTELIHFLDTLKQKLSALASRLRRYKLTTKRKSQNTLFSNNEKLFYRTLNNEQPDNSNPETPELEQLETFWSNIWSTPKVHKNAEWIEEDKKKLEAIPLMEFDNITLDTLKQVIAKTHNWKAPGSDNIHNFWYKKFTHLHPILLHHINTFIKSPETMPQYITLGTTYMLPKDKSDLRNPAKYRPITCLQNIYKIITSCIGELIYKHTNSNNILAEQQKGCRRNSQGCKEQLTIDAVVSKQALVKKRNIFTMYIDYKKAFDSVPHSWLLYILNHYKIHPTIVNFLESTMKHWKTVLKLKLGDTSLETDPIQIRKGIFQGDSFSPQWFCLALNPLSNLLNSSGCGYKINNGDSRYTLSHLMYMDDIKLYGTNLDEINQLADITQSFSSDIHMEFGIDKCKILSVKKGKVEQNSFPLNTGEQIDPVDLQTGYKYLGYQQTRQIHQKQTKITLQQKFKSRLHQILNTHLNAKNTLKAINTYAIPILTYSFGIIHWSQTNLKVLQRTINTTMTKYRKHHPRACSERQTLPKSEGGRGLIDITNLHNSQITTLRNFFHEQTQRSPLHEAIVKSDCKYTPLNLNNNNVQKNENITTQTQKTSTWLQKSLHGRHRRDLLDPNVDKVSSNAWLKFGELFPETEGFMLAIQDQIIDTRNYRKYIIKDHTMQSDLCRHCHSSSETIQHITGACRSITQTDYKHRHDQVAAIVHQNLAFKYKLIKEKTAYYKYTPDTVLDSNTHKLYWDRTILTDKTIHYNRPDITLHDKINKTVYLIDIAIPNTHNLTTTYTEKIAKYTDLAIELKTQWKVETVRTIPIVLSSTGVIPYTLHTSLKTLDMHNYTFVQLQKAVVLNTCRIVRKFLSQNQ

SEQ ID NO: 4814 - protein, 1357 aa, Peribatodes rhomboidaria
MNRKTLQCPQVPGGSRGDSYDSREEPTVARGEVNPRVRSINCQTTNASQMDSDFNLSSPAEDVVQEASANNTAPAKAVTRMRRRWTEDMNTFIMRTYFILTILETETKSYLAELHKQFSEQYPEMQSSRQRVGDQRRAIVNKNLLSTDKLDAIRKEAELILHSTTTGLNSTQTTYTQTTGQKMRWSNAMNETIMRAYYRITLLNTNKTAYRQPLHRAFTDQYPHLSHITEQRIADQRRVIENNKLITDERLQQIRDETSTELETQTQNSHLTNSLNIINITQNLQLQDSLSDTQHATNNSLSETLSTKDVSLATPDNTQSALITHVESNTRNQTQNETMNNILLEQQEKTEVTYLKTFEMFQTTEPILRPSLPRQKPSRKLASIVHFINNTILPKYVTPESSFNHTQTSIYCAAYTAVLHNGGKIKDSSSTADTQLRMGNQNYRDRIPAWQKRLETRIQDIRGNIARLSEFIKGNRSDRLKKIVDNIKTRYKIHSQHEGENFNLTHFLDTLKQKLSALASRLRRYKLTTKRKAQNLQFNNNEKLFYRSLGEEQSANLSSETPEPTALKQFWSNIWSVPKEHVQAEWIDNDKERLQDLPDMDFEEINLDILKHVIGKLHNWKATGSDNIHNFWYKKFTYLHPIILNHINNFIKSPESMPKYISLGTTYMLAKDKTDTKNPAKYRPITCLQNIYKIITSCINELLYRHTNTHNILAEQQKGCRRYSQGCKEQLTIDAVTSKQALVKKRNIYTMYIDYKKAFDSVPHTWLLYILKHYKIHPTIIQFLENTMRQWNTVLKLKQGDTYLETDPIPIRRGIFQGDSLSPLWFCLALNPLSNILNNSNNGFKLKYGNTHYTLSHLMYMDDIKLYGSSLEEIEHLADITQSFSSDIHMEFGIDKCKILSVRRGKIEENTYQLSNDEQIEPVDVESGYKYLGYQQTKQIHQKQTKSTIEQKFKTRLHKILNTHLNAKNTIKAINTFAIPILTYSFGIIHWSKSNLLKLQRMINTHLTKYRKHHPRACFERLTLPNIEGGRGLIDIQNLHNKQITTLRNYFHDRVQKSILHEATVQADVKCTPLNLSNYSTQQNEHITTDPQKLNSWLQKSLHGRHRRDLLDPNVDKIASNAWLKSGELFPETEGFMLAIQDQIIDTRNYRKHIIRDNTLQSDLCRHCHSNSETIQHITGACRTITQTDYKHRHDQVAAIIHQYLAYKYKFIQEKTPYYKYTPEIIHDSPNYKLYWDRTIITDKTIHFNRPDITLQDKRNKIVYLIDIAIPNTHNLTSTHSEKITKYTDLAIEIKTQWKVDTVRTVPIILSTTGVIPYTLLTGLETLNIHRATYTQLQKAAILNTCRIVRKFLSLSS

SEQ ID NO: 4815 - protein, 1428 aa, Notocelia uddmanniana
MQLRSRRLRPGPLPEGNRRGASGAVAGCHSMRTNGDAELSRRAPIEQYVTAADGPLPEGHRRGAPGAVAGCHSMRTSGDVELSRRASIEEYTTAENPSTRATSSPTSLCPSIPSSSCSLFSSVPSSPASYLNYSDSEITSACTSPSRSISTAEDVVQEASTANKPAPAAADQKVRKKWSRDMNIFILRAYLKITALETETRKYLPQLHDEFSQKFPTFKVSRQRLGDQRRAIVRNKLLSDADIAEIRKLAESDLKDSPCPSHQQQITTQNSNTRMIWTNEINESIMREFFRITQLETNTTAYRKPLYLTIIAKHPQLAHISEQRIADQRRAIINNKYITDQRLQEIKHEISRELSLVVGTQTDVSLPCIDTPYEISQTDSFFYEVPATLNHIESSHGTQTNNLSTEANQTQYQLPSGVQEEIEQAFLAAKETFYNTAPTNRPSIPKKRSSKKLASIVHFMNNAILPKYLSQEENFEFFQTTLYCAAYVAATQTGSKIRDFHHNPQFNDRPPYWQKRLQDRIVDLRAKIGRLTEFINGNTSPRLTRHINAIKRQYKLHSRHENENTQLTHFLDTLKQKLSALTSRLRRYKLTTLRKTQNKQFLNNEKVFYRALQNSNNSTPEPEPNSNTNSESPSAEDLHYFWSDIWSKPVEHRSAEWIEADKESLNSVPSMTFDHVSLDLLQSVIRKTHNWKTTGSDKIHNYWLKKFTYLHPILLTHINEFIHAPETLPLYITQGITYMLPKDKSDRKNPAKYRPITCLQNTYKIITSCISKLIYRHIDTHNILAEHQKGCRQNSQGCKEQLTIDAVISRQALKNKKDIYTMYIDYKKAFDSVPHSWLIHILKHYKIHHTIVRFLENAMLHWSTVLTISSNTTQVVTDPINIRRGIFQGDALSPLWFCLALNPLSNLLNNSKSGIKLKYDSDSHIISHLMYMDDIKLYSSNLTGIHKLADITQAFSSDINMEFGIDKCKIQSIREGKIEHSTYTLANGERIDPVDDEVGYKYLGYQQSQQIHHKITKITLKQKCTSRLHKILNTHLNAGNIIKAINSYAIPILTYSFGIIQWSQTDLLYLQRIINTLMTKYRKHHPRSCIQRLILPKAEGGRGLIDIKNLHNKQVSSLRKFFHDRSSNSQIHQAIVKADQKLTPLNLNSYDKQKNEEITEPQQKLQAWLQKSLHGRHRLDLINPNVDKLASNMWLKRGELFPETEGFMIAIQDQIIDTRNYRKHIIHDRNLPTDLCRRCHAASETIQHITGACRSITQTDYKHRHDQVAAIIHQYLAYKYQLIEKRTPYYKYSPQTVLESTEHKLYWDRTIITDKTVHYNRPDITLHDKAAKTVYLIDVAVPNTHNLASTHTEKISKYTDLSIEIKTQWKVNTVKTVPIVISSTGVIPRTLHTNLKTLDIHPLTYILLQKAVIMNTCRVVRKFLAIEP

SEQ ID NO: 4816 - protein, 1019 aa, Peribatodes rhomboidaria
MNNISLEQQEKTEETYLKTFEMFQTTEPILRPSLPRQKPSRKLASIVHFINNTILPKYVTPESSFNHTQTSIYCAAYTAVLHNGGKIKDSSSTADTQLRMGNQNYRDRIPAWQKRLETRIQDIRGNIARLSEFIKGNRSDRLKKIVDNIKTRYKIHSQHEGENFNLTHFLDTLKQKLSALASRLRRYKLTTKRKAQNLQFNNNEKLFYRSLGEEQSANLSSETPEPTALKQFWSNIWSVPKEHVQAEWIDNDKERLQDLPDMDFEEINLDILKHVIGKLHNWKATGSDNIHNFWYKKFTYLHPIILNHINNFIKSPESMPKYISLGTTYMLAKDKTDTKNPAKYRPITCLQNIYKIITSCINELLYRHTNTHNILAEQQKGCRRYSQGCKEQLTIDAVTSKQALVKKRNIYTMYIDYKKAFDSVPHTWLLYILKHYKIHPTIIQFLENTMRQWNTVLKLKQGDTYLETDPIPIRRGIFQGDSLSPLWFCLALNPLSNILNNSNNGFKLKYGNTHYTLSHLMYMDDIKLYGSSLEEIEHLADITQSFSSDIHMEFGIDKCKILSVRRGKIEENTYQLSNDEQIEPVDVESGYKYLGYQQTKQIHQKQTKSTIEQKFKTRLHKILNTHLNAKNTIKAINTFAIPILTYSFGIIHWSKSNLLKLQRMINTHLTKYRKHHPRACFERLTLPNIEGGRGLIDIQNLHNKQITTLRNYFHDRVQKSILHEATVQADVKCTPLNLSNYSTQKNEHITTDPQKLNSWLQKSLHGRHRRDLLDPNVDKIASNAWLKSGELFPETEGFMLAIQDQIIDTRNYRKHIIRDNTLQSDLCRHCHSNSETIQHITGACRTITQTDYKHRHDQVAAIIHQYLAYKYKFIQEKTPYYKYTPEIIHDSPNYKLYWDRTIITDKTIHFNRPDITLQDKRNKIVYLIDIAIPNTHNLTSTHSEKITKYTDLAIEIKTQWKVDTVRTVPIILSTTGVIPYTLLTGLETLNIHRATYTQLQKAAILNTCRIVRKFLSLSS

SEQ ID NO: 4817 - protein, 1428 aa, Notocelia uddmanniana
MQLRSRRLRPGPLPEGNRRGASGAVAGCHSMRTNGDAELSRRAPIEQYVTAADGPLPEGHRRGAPGAVAGCHSMRTSGDVELSRRASIEEYTTAENPSTRATSSPTSLCPSIPSSSCSLFSSVPSSPASYLNYSDSEITSACTSPSRSISTAEDVVQEASTANKPAPAAADQKVRKKWSRDMNIFILRAYLKITALETETRKYLPQLHDEFSQKFPTFKVSRQRLGDQRRAIVRNKLLSDADIAEIRKLAESDLKDSPCPSHQQQITTQNSNTRMIWTNEINESIMREFFRITQLETNTTAYRKPLYLTIIAKHPQLAHISEQRIADQRRAIINNKYITDQRLQEIKHEISRELSLVVGTQTDVSLPCIDTPYEISQTDSFFYEVPATLNHIESSHGTQTNNLSTEANQTQYQLPSGVQEEIEQAFLAAKETFYNTAPTNRPSIPKKRSSKKLASIVHFMNNAILPKYLSQEENFEFFQTTLYCAAYVAATQTGSKIRDFHHNPQFNDRPPYWQKRLQDRIVDLRAKIGRLTEFINGNTSPRLTRHINAIKRQYKLHSRHENENTQLTHFLDTLKQKLSALTSRLRRYKLTTLRKTQNKQFLNNEKVFYRALQNSNNSTPEPEPNSNTNSESPSAEDLHYFWSDIWSKPVEHRSAEWIEADKESLNSVPSMTFDHVSLDLLQSVIRKTHNWKTTGSDKIHNYWLKKFTYLHPILLTHINEFIHAPETLPLYITQGITYMLPKDKSDRKNPAKYRPITCLQNTYKIITSCISKLIYRHIDTHNILAEHQKGCRQNSQGCKEQLTIDAVISRQALKNKKDIYTMYIDYKKAFDSVPHSWLIHILKHYKIHHTIVRFLENAMLHWSTVLTISSNTTQVVTDPINIRRGIFQGDALSPLWFCLALNPLSNLLNNSKSGIKLKYDSDSHIISHLMYMDDIKLYSSNLTGIHKLADITQAFSSDINMEFGIDKCKIQSIREGKIEHSTYTLANGERIDPVDDEVGYKYLGYQQSQQIHHKITKITLKQKFTSRLHKILNTHLNAGNIIKAINSYAIPILTYSFGIIQWSQTDLLYLQRIINTLMTKYRKHHPRSCIQRLILPKAEGGRGLIDIKNLHNKQVSSLRKFFHDRSSNSQIHQAIVKADQKLTPLNLNSYDKQKNEEITEPQQKLQAWLQKSLHGRHRLDLINPNVDKLASNMWLKRGELFPETEGFMIAIQDQIIDTRNYRKHIIHDRNLPTDLCRRCHAASETIQHITGACRSITQTDYKHRHDQVAAIIHQYLAYKYQLIEKRTPYYKYSPQTVLESTEHKLYWDRTIITDKTVHYNRPDITLYDKAAKTVYLIDVAVPNTHNLASTHTEKISKYTDLSIEIKTQWKVNTVKTVPIVISSTGVIPRTLHTNLKTLDIHPLTYILLQKAVIMNTCRVVRKFLAIEP

SEQ ID NO: 4818 - protein, 1247 aa, Notocelia uddmanniana
MNIFILRAYLKITALETETRKYLPQLHDEFSQKFPTFKVSRQRLGDQRRAIVRNKLLSDADIAEIRKLAESDLKDSPCPSHQQQITTQNSNTRMIWTNEINESIMREFFRITQLETNTTAYRKPLYLTIIAKHPQLAHISEQRIADQRRAIINNKYITDQRLQEIKHEISRELSLVVGTQTDVSLPCIDTPYEISQTDSFFYEVPATLNHIESSHGTQTNNLSTEANQTQYQLPSGVQEEIEQAFLAAKETFYNTAPTNRPSIPKKRSSKKLASIVHFMNNAILPKYLSQEENFEFFQTTLYCAAYVAATQTGSKIRDFHHNPQFNDRPPYWQKRLQDRIVDLRAKIGRLTEFINGNTSPRLTRHINAIKRQYKLHSRHENENTQLTHFLDTLKQKLSALTSRLRRYKLTTLRKTQNKQFLNNEKVFYRALQNSNNSTPEPEPNSNTNSESPSAEDLHYFWSDIWSKPVEHRSAEWIEADKESLNSVPSMTFDHVSLDLLQSVIRKTHNWKTTGSDKIHNYWLKKFTYLHPILLTHINEFIHAPETLPLYITQGITYMLPKDKSDRKNPAKYRPITCLQNTYKIITSCISKLIYRHIDTHNILAEHQKGCRQNSQGCKEQLTIDAVISRQALKNKKDIYTMYIDYKKAFDSVPHSWLIHILKHYKIHHTIVRFLENAMLHWSTVLTISSNTTQVVTDPINIRRGIFQGDALSPLWFCLALNPLSNLLNNSKSGIKLKYDSDSHIISHLMYMDDIKLYSSNLTGIHKLADITQAFSSDINMEFGIDKCKIQSIREGKIEHSTYTLANGERIDPVDDEVGYKYLGYQQSQQIHHKITKITLKQKFTSRLHKILNTHLNAGNIIKAINSYAIPILTYSFGIIQWSQTDLLYLQRIINTLMTKYRKHHPRSCIQRLILPKAEGGRGLIDIKNLHNKQVSSLRKFFHDRSSNSQIHQAIVKADQKLTPLNLNSYDKQKNEEITEPQQKLQAWLQKSLHGRHRLDLINPNVDKLASNMWLKRGELFPETEGFMIAIQDQIIDTRNYRKHIIHDRNLPTDLCRRCHAASETIQHITGACRSITQTDYKHRHDQVAAIIHQYLAYKYQLIEKRTPYYKYSPQTVLESTEHKLYWDRTIITDKTVHYNRPDITLYDKAAKTVYLIDVAVPNTHNLASTHTEKISKYTDLSIEIKTQWKVNTVKTVPIVISSTGVIPRTLHTNLKTLDIHPLTYILLQKAVIMNTCRVVRKFLAIEP

SEQ ID NO: 4819 - protein, 1420 aa, Apotomis turbidana
MQLRSRSLRSGPLPEGDRRGASGAVAGCHSMRTNGDAELSRRAPIEQSVTAEVESLPEGERRGAFGAVAGCHSMRTNGDVELSRRASIEEYTTAEISETRESSPASLFPSNLSSPTSLFPSLPSSPASYLTFPESSSSSARTSPLNTFDTAVNVVQEASTANQPVPVTVDKNVRKKWSREMNIFILRTYLRITSLETETGRYLSQLHNEFRQAFPTFEVSKQRLGDQRRAIVRNKLLTDNDMIETRRLAETDLINSTQSSHQPIMPTQNSTQRMSWTNEINESIMREYYRITHVETNITAYRKPLHQSVIAKHPQLSHVSEQRIADQRRVIINYKYISEERLQELKHEILHELTMDNDPTLNTSVLSTSNNIPEYSSIINPSTELLTAESNSANNSEIPLENLDHSDNESDLDYPPVSVQEEIEETYLTAKARFHNSDPTTRPPIPKQKPSKKLTSIVHFINNVVLPKYLNQDSNFESTQTSLYCAAFTAATNNGSKIGDTHHTQNNKEKIPNWQKRLQDRITDLRAKIGRLTEFINGNTSPRLRRHVVSIKRQYKLHSRHETDNTQLNHFLDTLKQKLSALTNRIRRYKLTTLRKTQNSQFLNNEKVFYRKLHDPHTNNDSELPNPEDLHHFWAGIWSNPVEHKSADWIKADKESLNSTPDMPFEGISLDLLQSVIAKTHNWKATGSDKIHNYWLKKLSYLHPILLKHINEFIHTPATLPAYITLGTTYMLPKDSTDTKNPAKYRPITCLQNIYKIITSCISKLIHRHINTHNILAEQQKGCRPNSQGCKEQLTIDAVISKQSVSNKRNIYTMYIDYKKAFDSVPHSWLIYILEHYKIHHTIIQFLQNTMTRWSTVLKIFNKTTSIETDPINICRGIFQGDSLSPLWFCLALNPLSNLLNNSKSGFKLNFNNTSYTVSNLMYMDDIKLYSNNLTHIHKLADITQSFSSDIHMEFGIDKCKIQSMRRGKIEHNTYTLDNGDQIDPVDDVTGYKYLGYQQTQQIHQKTTKATLKHKFTTRLHKILNTHLNARNTVKAINTYAIPILTYSFGIIQWSQTDLCNLQRIINTLMSKYRKHHPRSCSQRLTLPKKEGGRGLIDIKNLHNKQVSSLRKFFHDHSSHSELHLAIVTSDKKYTPLNLKDPEKQKIEAITQPQQKLEGWIQKSLHGRHRLDLVNPTVDKLASNAWLKRGELFPETEGFMLAIQDQVIDTRNYRRYIIRDQNLPTDSCRHCHAASETIQHITGACRSIAQTDYKHRHDQVAAIIHQYLAYKHKLIKDRTSYYKYTPQVILESSEYKLYWDKTIITDKTIHYNRPDVTLLNKLTKTVYLIDIAIPNTHNLASTYTEKITKYTDLSIEIKAQWRVNTVKTVPIIISTTGAIPRNLHDSLKIIDVHPLTFIALQKAVILNTCRIVRKFLALDQ

SEQ ID NO: 4820 - protein, 1420 aa, Apotomis turbidana
MQLRSRSLRSGPLPEGDRRGASGAVAGCHSMRTNGDAELSRRAPIEQSVTAEVESLPEGERRGAFGAVAGCHSMRTNGDVELSRRASIEEYTTAEISETRESSPASLFPSNLSSPTSLFPSLPSSPASYLTFPESSSSSARTSPLNTFDTAVNVVQEASTANQPVPVTVDKNVRKKWSREMNIFILRTYLRITSLETETGRYLSQLHNEFRQAFPTFEVSKQRLGDQRRAIVRNKLLTDNDMIETRRLAETDLINSTQSSHQPIMPTQNSTQRMSWTNEINESIMREYYRITHVETNITAYRKPLHQSVIAKHPQLSHVSEQRIADQRRVIINYKYISEERLQELKHEILHELTMDNDPTLNTSVLSTSNNIPEYSSIINPSTELLTAESNSANNSEIPLENLDHSDNESDLDYPPVSVQEEIEETYLTAKARFHNSDPTTRPPIPKQKPSKKLTSIVHFINNVVLPKYLNQDSNFESTQTSLYCAAFTAATNNGSKIGDTHHTQNNKEKIPNWQKRLQDRITDLRAKIGRLTEFINGNTSPRLRRHVDSIKRQYKLHSRHETDNTQLNHFLDTLKQKLSALTNRIRRYKLTTLRKTQNSQFLNNEKVFYRKLHDPHTNNDSELPNPEDLHHFWAGIWSNPVEHKSADWIKADKESLNSTPDMPFEGISLDLLQSVIAKTHNWKATGSDKIHNYWLKKLSYLHPILLKHTNEFIHTPATLPAYITLGTTYMLPKDSTDTKNPAKYRPITCLQNIYKIITSCISKLIHRHINTHNILAEQQKGCRPNSQGCKEQLTIDAVISKQSVSNKRNIYTMYIDYKKAFDSVPHSWLIYILEHYKIHHTIIQFLQNTMTRWSTVLKIFNKTTSIETDPINICRGIFQGDSLSPLWFCLALNPLSNLLNNSKSGFKLNFNNTSYTVSNLMYMDDIKLYSNNLTHIHKLADITQSFSSDIHMEFGIDKCKIQSMRRGKIEHNTYTLDNGDQIYPVDDVTGYKYLGYQQTQQIHQKTTKATLKHKFTTRLHKILNTHLNARNTVKAINTYAIPILTYSFGIIQWSQTDLCNLQRIINTLMSKYRKHHPRSCSQRLTLPKKEGGRGLIDIKNLHNKQVSSLRKLFHDHSSHSELHLAIVTSDKKYTPLNLKDPEKQKIEAITQPQQKLEGWIQKSLHGRHRLDLVNPTVDKLASNAWLKRGELFPETEGFMLAIQDQVIDTRNYRRYIIRDQNLPTDSCRHCHAASETIQHITGACRSIAQTDYKHRHDQVAAIIHQYLAYKHKLIKDRTSYYKYTPQVILESSEYKLYWDKTIITDKTIHYNRPDVTLLNKLTKTVYLIDIAIPNTHNLASTYTEKITKYTDLSIEIKAQWRVNTVKTVPIIISTTGVIPRNLHDSLKIIDVHPLTFIALQKAVILNTCRIVRKFLALDQ

SEQ ID NO: 4821 - protein, 1355 aa, Biston betularia
MNRKTLQCPQVPGGSRGKADDSRKEPCVARGEMNLRARLINCQTTNASQTDSDFNPSLPAEDVVQEACAENPVPTKAATRTRIRWTDAMNAFIMRTYFILTMIETDTKSYLAELHKRFSEQYPAIQVSRQRIGDQRRAIVNKNLLPPHKINEVRKEAEALLQSAANISNLTQTTDAQISGQRMRWSNAMNETIIRAYFKITQLDTNKTAYRQPLYRAFIDQYPNLSHISEQRVADQRRVIINNKLISDERLQQIRDEISVELDSMQNIQTTNSININQDIVASTPNTHDNLPNTLTQNITLDIASETISPSDEVLLATRTQTSLLEPNTRNPIRPEIVNNMSQELEQQINETFTRALNIFKITEPISRLSLPKQKSSRKFAAIVHYINDDILPRHITLESTFIDMQTAIYCAAYTAVIHNGGKIKDDSNVANTQSKNTNQKYRDRVPPWQKRLEKRIQDLRANIARLSEFIKGNTSTRLKNAVENIKIRYKIHSQYEGTNSNLSHFLDTLKQKLSALASRLRRYKLTTKRKTQNSMFANNEKQFYRSLKEEQNSQTVETPEPETLKEFWSNIWSMPIEHVEAEWIDDDKQTLKDVSDMEFSEVGLDTLKHVIGKLHNWKATGSDNIHNFWYKKFTYIHPIILHHINNFIKSPELMPEYISLGTTYMLPKDKTDTKNPAKYRPITCLQNIYKIITACINELIYKHTNTHNILAEQQKGCRRYSQGCKEQLTIDAIASKQALGKKRNIFTMYIDYKKAFDSVPHTWLLYILKHYKVHPTIIHFLRNTMTKWNTVLKLRLGDTSLETEPIPIRRGIFQGDSLSPLWFCLALNPLSNLLNNSNTGFKLKYENTYYTLSHLMYMDDIKLYGTNLKEIEHLADITLSFSSDIHMEFGIDKCKILSVRKGKIEENTYQLNNDEQIEPVDVDSGYKYLGYQQSRQIHQKETKATIEQKFKTRLHKILNTHLNAKNTIKAINTYAIPILTYSFGIIHWSKSNLIKLQRMINTHMTKYRKHHPRACFERLTLSNLEGGRGLIDIQNLHNKQITSLRSYFHEQTQRSELHKASVIADIKLTPLNLNDPNAQKNEKITTDTEKLSSWLQKSLHGRHRRDLLDPNVDKIASNAWLKSGDLFPETEGFMLAIQDQIIDTRNYRKHIIRDNTLHSDLCRHCHSNSETIQHITGACRTITQTDYKHRHDQVAAIIHQFLAIKYKFIQEKVPYYKYTPEIIHDSTNYKLYWDRTILTDKTIHFNRPDITLHDKQNKIVYLIDVAIPNTHNVTATYTDKITKYTDLAIEIKTQWKVDTVKTIPIILSTTGVIPYTLFTSLETLNIHRNTSIQLQKAVILNTCRIVRKFLSLNQ

SEQ ID NO: 4822 - protein, 1245 aa, Chrysotoxum bicinctum
METTNMNLNETIPLPEDVGALPGANAGSDSIRAVGGQIPVRTLTGSPEEATHNNNSPSIQNTQHQPPELRALSRNTSTTTQTGLPRQRIKWTPYMNKCVMRCYFIATKLETEMHVYRPQMRELFLQQFPTFSRLTEQNLADRKRAIIRKTLLTPQEIEETKQLAEQHITAEGRAVRHRIESPPHTQQDDDLSMEGGDVLEREAIVEMQDANVEYNTNGVHYNTQNPTTVGERTNTDGGRETNSQIVSTLREHFRAALAIYENSDPLLRDGIPRLYNNNKVNELAEIVNIHILPDYLPTAADIEQVHCLIYVAAVAIVRTMGKKMQTQGRPSPRNTNGSMPPWERRLNNKIRNIRQDLGRLMAYGSGIRSKQILRHIKKIVSPTIIQNLNSDLLADIKDRKTQQLAAYSKRLKRYKESRARKLENQLFERNQRQFYRKIENEGPETYDACELPLMEQVVEFWKGIWSKPKNINLDTAWLTEEEEDSVNYNEMQNSNITSDEVRDAIKETSNWKSAGPDKVQNIWLKKLTSSHIFIAKFFTKLLLEPERIPAFMMTGNTFLIAKGTNTSDPANFRPITCLSTLYKLLTKIFTNRVYRHCTVNNIITCEQKGCSKNSMGCKEQLTIDSVLVHQALQNKRNISMGYIDYKKAFDSLPHPYLLKILDTYKIEVNIVRFMEVAMKKWNVKLHLGQNSSPSIPIKCGIFQGDAFSPLWFCLGMNPLSKVLRKINIGFSLKAETGNLQINHLLYVDDLKLYASNKEKLFRMIEQVKRFSDDIGMEFGIDKCKTIHIKKGKVQDDNDGYPIDENNTIANLTAGENYKYLGFLQLRGLENSEIKKRLRQQFDQRMRKILKSHLNAGNKRTAINTWAIPVLTYSFGIVKWSDTDLDQISTSIRTNLSKHLCHHPRSAIERCSLPNEAGGRGLLDIPNLHYSQVLNLRRYFREQIQTSDMIRTVCLADRNYTPLNLREEDLSIPNNVNSKEELIVKWKAKALHGIHPGQMYQSYIDLMNSNLWLKRGHLFGETEGFIIAIQDKVIATRNYRKYILKENLASDTCRRCNNQAETIDHIIGGCPSVLAGVDYTVRHNQVGRIIHQMLAKKYKLVSKLVPYYKYEAPPVLENSAAKLYWDRAIVTDRTIRANKPDIVLFDKNMNMIHLFDVAIPLNNNLLTTYSTKIEKYTELAEELRMMYQADRVTITPIILSATGLIPKSLIEHLKQHSLESALPTMQKSVILNTCNIVRRFLQTNSN

SEQ ID NO: 4823 - protein, 1150 aa, Chrysotoxum bicinctum
MNKIIMRCYFIATKLETNKHVYRAQMRELFLQHFPNLSRLTEQNIADRRKFITDRHLLTAQEIQYTKQQAQHHITANTQTANDQSESVTQTENIDNLPIESREELEPELDHEENLENLVAQHNINENQHNAQNRSAAGEHGNSENVRTLREHFRAALAVFENSDPLSRPGIPRLYNNKKVNELAELVNVHILPDYLTAATDIEQVHCLIYVSAVAIVRTMGKKLMSLGRISTRDANASIPPWQRRLNNKIDKIRQDLGRVTAYLSGTRSKRVLKHIKNLIFPTLIRNLTADQLSDVKDKKTQQLAAYSKRLKRFKESRARKLDNQLFTRNQRQFYRQIENSQTNGTSELPPMEQVVEFWKDIWSKPKSINLETKWMIEEENESNRYNEMQNTSITSEEVTDAIRETSNWKSAGPDKVHNIWLKKLTSSHILLARFFNQLLAEPELIPSFLTTGNTFLIAKESNTTDPAKFRPITCLSTTYKLLTKILTIRVYQHCDGNNILTGEQKGCSKNSMGCKEQLTIDSVLVHQALQNKRNISMGYIDYKKAFDRLPHPYLLKILKTYKIDARVIHFMEVAMNQWNVKLHLGSNMSPSIPIRCGDFQGDAFSPLWFCLGMNPLSKILKKLSIGFNLKAETGSLLINHLLYVDDLKLYANTKDKLFRMIEQVKSFSDDIGMDFGIDKCKTIHIQKGKVQDNTDGYALDENNIIANLTTGENYKYLGILQLKGIANAEIKKRVRHQFDHRMRKILKSHLNAGNKRKAINTWAIPVLTYSFGTVKWSETDLEQIATAIRTSLSKHLCLHPRSAIERCSLPNEAGGRGLLDIPNLHYSQIMKLRNYFRQQIEASDMIRTVCLADRNYTPLNLREEDFQIPNNVLTKEERIATWKAKTLHGVHPGQMYQNHIDLINSNLWLKQGQLFGETEGFMIAIQDKVIATRNYRKYILKENLPSDTCRRCNSHAETIDHIIGGCSILAGVDYTVRHNQVAKIIHQMLANNHKLISQKVPYYKYEAPPVLENNTAKLYWDRSIITDRTIRANKPDIVLFDKTANVIHLFDIAIPLNNNMLATYGTKVEKYTELAAELRMMYQAERVTIAPIIVSATGLIPTSLIKHLKQHNLESAIQTMQKSVILNTCNIVRRFLQNGLEHGLCPNRA

SEQ ID NO: 4824 - protein, 1145 aa, Coremacera marginata
MNKCVMRSYYIATKLETEMHAYRSQLRELFLHQFPNMSRLTEQNLADRRRAITTRLLLTGPECEETKQQARDYFTRETQTNRIDTENQTYARNENLANDTPDEPGHKDIVDAQNPSAQRTPQDAHSPTQLTIEHRTTATEQNTHSETLSALRNHFRTAFAMYENSDPLLRDGIPKIYNSKKVNELAKMANTHILPDYLAAAANIEQVHCLIYVAAVAIVKTLGRKMLTQGRTPRRSIHAAVPPWERRLHNKINKIRQDLGRLTAYANGTNSNRLLKHIKKIISPRPISQLPLEFMTEIKDYKAQQLAAYSKRIRRYMERRARKQENILFGKNQSQFYRRLENPQTCQTNEVPPMQQATEFWKDIWSKPKSTNLEITWINEEREKSASYTEMLHTSISQEEVKDAIKKTSNWKSPGPDKIHNIWLKKMEITHAHLAKYFTELLTEPTRMPEFLMAGNTYLLSKNANSIDPSNFRPITCLSTTYKLLTKSLTNRVYDHCTVNNIITREQKGCGKNSMGCKEQLTIDSVLVHQALQNKRNISMGYIDYKKAFDSLPHSYLLEILKIYRIDARVIRFMEVAMKKWNVTLHLGHEMSHPIPIRCGIFQGDALSPLWFCLGLNPLSKMLRSLNIGFKLKAENENYLVNHLLYVDDIKLYASNKDKLYRMIDQVKTFSDHIGMEFGIDKCKTIHIQKGKVQDDTNGYQINDGNTIANLVSGESYKYLGFLQLRGIVNGEIKKKLRLQFDQRMSKILKSHLNAGNKRKAINTWAVPLLTYSFGILKWTRTDLDQIATSIRTTLSKHLCLHPRSAIERCSIPTESGGRGLQNIPNLHISQIMALRSYFREQTETSDMIRTVCLADKNYTPLNLAARDFQTPDNVHTNDEMIAAWKNKTLHGVHPSQMFQSHIDVINSNLWLKRGHLFAQTEGFMIAIQDKVIATRNYRKYILKESLTSDTCRLCNNYAETIDHIIGGCQALAGVDYTARHNQVAKIIHQLLAKNNKLTSEKTPYYKYEAPPVLENSYAKLYWDRTIITDRTIRANKPDIVLFDKRAKVVYIFDIAIPLNNNIISTYSTKVQKYTELADELRMMYQVERVTITPIIISATGLIPRNLPAHLKEHNLESALETVQKSVILNTCNIVRRFLQQIQPI

SEQ ID NO: 4825 - protein, 931 aa, Chrysotoxum bicinctum
MGKKLMSLGRISTRDANASIPPWERRLNNKIDKIRQDLGRVTAYLSGTRSKRVLKHIKNLIFPTLIRNLTADQLSDVKDKKTQQLAAYSKRLKRFKESRARKLDNQLFTRNQRQFYRQIENSQTNGTSELPPMEQVVEFWKDIWSKPKSINLETKWMIEEENESNRYNEMQNTSITSEEVTDAIRETSNWKSAGPDKVHNIWLKKLTSSHILLARFFNQLLAEPELIPSFLTTGNTFLIAKESNTTDPAKFRPITCLSTTYKLLTKILTIRVYQHCDGNNILTGEQKGCSKNSMGCKEQLTIDSVLVHQALQNKRNISMGYIDYKKAFDSLPHPYLLQILKTYKIDARVIHFMEVALNQWNVKLHLGSNMSPSIPIRCGIFQGDAFSPLWFCLGMNPLSKILKKLSIGFNLKAETGSLLINHLLYVDDLKLYANTKDKLFRMIEQVKSFSDDIGMDFGIDKCKTIHIQKGKVQDNTDGYALDENNIIANLTTGENYKYLGILQLKGIANAEIKKRVRHQFDHRMRKILKSHLNAGNKRKAINTWAIPVLTYSFGTVKWSETDLEQIATSIRTSLSKHLCLHPRSAIERCSLPNEAGGRGLLDIPNLHYSQVMKLRNYFRQQIEASDMIRTVCLADRNYTPLNLREEDFQIPNNVLTKEERIATWKAKTLHGVHPGQMYQNHIDLINSNLWLKQGQLFGETEGFMIAIQDKVIATRNYRKYILKENLPSDTCRRCNSHAETIDHIIGGCSILAGVDYTVRHNQVAKIIHQMLANNHKLISQKVPYYKYEAPPVLENNTAKLYWDRSIITDRTIRANKPDIVLFDKTANVIHLFDIAIPLNNNMLTTYGTKVEKYTELAAELRMMYQAERVTIAPIIVSATGLIPTSLIKHLKQHNLESAIQTMQKSVILNTCNIVRRFLQNGLEHGLCPNRA

SEQ ID NO: 4826 - protein, 1447 aa, Pammene fasciana
MQLRSRSLRPGPLPEGNRRGASGAVAGCHSMRSNGDEELSRRAPIEQSVTAGHRELNRRTTDVEATADSGIGTNSFICSTPGTRRSNRTRSTQANPDAGHQNVPEIITNVSSPTSSLYSLFQSPSSSHHSDNYHPPHSPSSSSATSLMSVDVVQEANATNPAPTTNNTRTRKRWTEEMNKFIWRTYLIISKLETLQRGYLEPLHTLFLAKFPEMDVSRQRVGDQRRAILNNKLLSQATLDEIRSEVKKDLSVTTRPQSATAPSASVHLVNSQPLQSSPGGRMLWTPDVNEMIMKFYFEVTDLETNMTAYRKKLHERFISYFPHLSHVSEQRIADQRRVIVNNKMLSKATIQAIKNQVRTETTTTNTQAPTDNTIINIATQNSFDDLDAIQQGEEKTQNSDQISSQSPLHTHTLSPTHNTPRSNKHTSHHMTSINEEEIRIQFQSNLQRFKIIDPINRPHIPKLSISRKLTLTVNYLNKDVIPQYLSHDIDFNALQNIIYTTAYTIAVCVGVKMDRLPKTDKKRKPNWQVRLETKIRKYREHIGRLTQYIRGNRSRKIILAVETIKATFHMHATFENPNTEPGQFLDTLKQKLNTAASRLKRYLSCTERKSQNALFSNNESGFYRRISTASQTHQLQSGNNQTPPIDTLRQYWADIWEQPVQHNEDATWLNDDTEVNNAPYIPMMTFEHIPIDTFMRVIKRSHNWKSPGTDNIHNFWYKKITCTHPYIHNYLNEFIKFPETMPSYITHGRTYLLAKDNDTTNPAKYRPITCLQTIYKILTACISETIYSHLSQHNILKEQQKGCRKHSQGCKEQLVIDSVAMKQAMRKKRNIHTMYIDYRKAFDSVPHTWLIYILHRYKVHPSIIDFLQTAMNSWQTTLTVKQEGKTLFTEPIQIKRGIFQGDALSPLWFCMALNPLSELLDKINAGFRIKYDYTHHTLSHLMYVDDIKLFADSITELFQLADITQEFSSDIGMQFGIDKCKVHSVHKGKIQNNTYTLGTGEQIEHMTDRETYKYLGFQQSRQINQKQTKHELIRKFRHRLSIILKSHLNSRNLIKAINTFAIPVLTYSFGVIHWSQSDLKKLQRIINTNLTKHRKHHPKSCTQRLTLPRLDGGRGLIDIQNLHNKQINTLRNYFHTKAEESLLHKFTVKIDNHFTPLNLNDQSTQRNEQIISNQQKTSVWTQKSLHGRHYADLSQTFVHKELSNAWLKRGELFPETEAFMMAIQDQVIATRNYRKHITRDLDRPTDSCRHCNSSPETIQHITGACKAIVQTDYKHRHDQVASIIHQHLAHKHKFIDKQVPYYKYIPTIVHENRQIKLYWDRTVLTDRTIHYNRPDIIFFNKTTKTIYIIDIAIPNTHNIQTTINDKLTKYKDLAIEIKRQWQANIVHIVPIVLSTTGVVPKTLINSLETLQIPAYTIHALQKATILNTCRLTRKFLTSSTISENTTM

SEQ ID NO: 4827 - protein, 1433 aa, Cydia splendana
MQLRSRSLCPGPLPEGNRRGASGAVAGCHSMRSNGDVELSRRAPVEQFVTAGHRELSRRATDVEATADSDHQTTSMPESTNIVSYPSSPSSSIHSLFQSPSSSHHSDNYIPPQSPISSPTSLMSVDVVQEARAINPAPTTNTTRTRKRWTEEMNRFIWRTYLITSKLETLQRGYLEPLHRQFQAMFSEMDVSRQRIGDQRRAILNNKLLSQTTLNEIRSEVEMHLATTTGPLGLQISAGNPFSQTLHSSKYISNTNTVTTGERMTWTPDINEMIMKLYFEVTEVETNMTAYRKKLHEKFISHFPNLSHLSEQRIADQRRVIVNNKMLSAVKIETIKNQIKTELGMTNTLARQNSFPELQTLTDSPIVNITTHNSFDDLDTVQQEEVSNQTELQIPTQYNSPTRTSARNQQHLRQNVTNINEDEIGQQFENNLNIFKSIHPTERPHIPKLKMSRKLMSIVTYLDKHVIPQYISHQLDFNSFQNIIYTSAYTTATYMGVKIDKLASIGKRQKPNKPKWQLRLEFRINKYRADIGRLTQYIRGNRSRRIVAAVETIKTTYYTHATFENPNTLPEHFLDTLKQKLNTAASRLKRYLTCTERKSQNALFANNESGFYRKLSSPAGAQQNQSGNTQIPTMDSLRRYWADIWERPVQHNEDATWINDEEPSTTPAIPMMEFEHIPIDTFVQVIKRTHNWKSPGTDNIHNFWYKKLTCTHPYIHKYLNQFIKSPETMPSYITQGRTYMLPKDNDTVNPAKYRPITCLQTFYKILTACISEIIYSHLSQHDILKEQQKGCRKHSQGCKEQLIIDSVAMKQAMRRKRNIHTMYIDYRKAFDSVPHTWLVYILHRYKIHPSIIDFLQTAMHSWQTTLTLKQEGKTLITEPVSIKRGIFQGDALSPLWFCMALNPLSELLDRTDAGFKLKHDNSHYRLTHLMYVDDIKLFADNVTELFRLADITQEFSTDIGMQFGVDKCKIHSFHRGQIQNNTYTLDTGERVDYMTEQDTYKYLGFQQSRQIHQKQTKLELRRKFRHRLGIILKSHLNSRNTVKAINTFAIPVLTYSFGIINWSQSDLKKLQRTINTTSTKYRKHHPKSCTQRLSLQRREGGKGLIDLTNLHNKQITTLRHYFHTKAEQSTLHSYTVKIDDRYTPLNLRDKNIQRNEQIVTSQQKSSEWAQKSLHGRHHADLAQTFVDRDLSNTWLKKGELFPETEAFMLAIQDQVIATRNYRKHITKDLDRPTDSCRHCNSAPETIQHITGACKAIVQTDYKHRHDQVASIVHQYLAHKYKFIEVQKPYYKYTPSTVHENRQYKLYWDRTIITDKTIHFNRPDITFFDKDNKTIYIIDIAIPNTHNLQSTANEKLTKYKDLAIELRRQWHANTVHIIPIIISTTGVVPKTLNNSLKTLQIPSYFIYTIQKATILNTCRLTRKFLTSSTINDTL

SEQ ID NO: 4828 - protein, 947 aa, Cydia splendana
MFACINKNMSILCHYCHYFTISKSQIRGNNNNNNKFRINKYRADIGRLTQYIRGNRSRRIVAAVETIKTTYHTHATFENPNTLPEHFLDTLKQKLNTAASRLKRYLTCTERKSQNALFANNESGFYRKLSSPAGAQQNQSGNTQIPTMDSLRRYWADIWERPVQHNEDATWINDEEPSTTPAIPMMEFEHIPIDTFVQVIKRTHNWKSPGTDNIHNFWYKKLTCTHPYIHKYLNQFIKSPETMPSYITQGRTYMLPKDNDTVNPAKYRPITCLQTFYKILTACISEIIYSHLSQHDILKEQQKGCRKHSQGCKEQLIIDSVAMKQAMRRKRNIHTMYIDYRKAFDSVPHTWLVYILHRYKIHPSIIDFLQTAMHSWQTTLTLKQEGKTLITEPVSIKRGIFQGDALSPLWFCMALNPLSELLDRTDAGFKLKHDNSHYRLTHLMYVDDIKLFADNVTELFRLADITQEFSTDIGMQFGVDKCKIHSFHRGQIQNNTYTLDTGERVDYMTEQDTYKYLGFQQSRQIHQKQTKLELRRKFRHRLGIILKSHLNSRNTVKAINTFAIPVLTYSFGIINWSQSDLKKLQRTINTTSTKYRKHHPKSCTQRLSLQRREGGKGLIDLTNLHNKQITTLRHYFHTKAEQSTLHSYTVKIDDRYTPLNLRDKNIQRNEQIVTSQQKSSEWAQKSLHGRHHADLAQTFVDRDLSNTWLKKGELFPETEAFMLAIQDQVIATRNYRKHITKDLDRPTDSCRHCNSAPETIQHITGACKAIVQTDYKHRHDQVASIVHQYLAHKYKFIEVQKPYYKYTPSTVHENQQYKLYWDRTIITDKTIHFNRPDITFFDKDNKTIYIIDIAIPNTHNLQSTANEKLTKYKDLAIELRRQWHANTVHIVPIIISTTGVVPKTLNNSLKTLQIPSYFIYTIQKATILNTCRLTRKFLTSSTINDTL

SEQ ID NO: 4829 - protein, 1456 aa, Pammene fasciana
MMQLRSRSLRPGPLPEGNRRGASGAVAGCHSMRSNGDEELSRRASIEQSVTAGHRELSRRATDVEATADSGNDAESLHCSTPATCRSLRTRSSRVNPVAERQGTAKTITTISQASSPISSLHSLFQSPNASFHSDNYCPSQSPPSSPTTSLMSVDVVQEARATNPAPTTSKLRTRKRWTDEMNKFIWRTYLITSKLGTLQRGYLEPLHREFQAMFPEMDASRQRIGDQRRAIFSNKLLPLATLNEIRSEVEKHLNTTTQPQSSTAAAAGIGQSVNSEIAQVPQNIRNSKTAGGRMVWTPDMNEAIMRIYFEITESETNMTAYRKKLHENFISHFPHLSHLSEQRIADQRRVIVNNKLLSSARIKLIKEQVEIGRAAIDLPTVNNSPHESNNVTDTPIVNIATHNSFDGLDAVQQYEGSRNNSQSIMNNRNNRPRVINHCITIDEEYTRTQFTNNLDRFKNIEPTERPYIPKLKMSRKLTSIVNYLNNNVVPQHLSRDLDFNSIQTIVYTTAYTTAICLGIKLDRPSGMSSANKPSKPKWQLRLETKISKYRAAIGRLTQFIRGNRSRRVVSAFETIKNTYQMHATFENPNSEPEHFLDTLKQKLNTSSSRLKRYLACTKRKNQNALFANNESAFYRNISSSPGTHQNQSGNTPTPPIGSLRQYWADIWERPVQHNEDAAWINDDDEDNPHVIPMMEFEHIPIDTFIQVIKRTHNWKSPGTDNIHNFWYKKLTCIQPFIHKYLNQFINSPETMPSYITQGRTFLLPKDNDTTNPAKYRPITCLQTIYKILTACISETIYSHLSQHNILKEQQKGCRKHSQGCKEQLIIDSVAMKQAMRSKRNIHTMYIDYKKAFDSVPHSWLVYILHRYKIHPTIIDFLQTAMSSWQTRLTVKQGTNTLVTEPISIRRGIFQGDALSPLWFCMALNPLSELLDRSDAGFTLKHEYTHYRLSHLMYVDDIKLYADSTTDLFQLADITNDFSTDIGMQFGIDKCKILSIHRGKIQNNTYTLDTGEQIEHMDEQDSYKYLGFQQSRQIHQKQTKLELTRKFRHRLTVILKSHLNSRNTIKAINTFAIPVLTYSFGIINWSQSNLKQLQRTINTNLTKYRKHHPKSCTQRLTLPRQEGGRGLIDLTNLHNKQITTLRRYFHAKTEQSPLHSYTVKIDDRYTPLNLHDDNIQQNEQILTFQQKSSEWAQKSLHGRHYADLAQSFVDKDLSNAWLKRGELFPETEAFMLAIQDQVIATRNYRKHITKDLDRPTDTCRHCNSAPETIQHITGACKAIVQTDYKHRHDHVASIVHQYLAHKYKFTETIKPYYKYTPSTVHENRQYKLYWDRTIITDKTIHFNRPDITFFDKQNKTVYIIDIAIPNTHNLQSTANDKLTKYKDLAIELRRQWNAATAHIVPIIISTTGVIPKTLSNSLKTLQIPSYIIGTLQKATILNTCRITRKFLTSSIISDPM

SEQ ID NO: 4830 - protein, 1447 aa, Pammene fasciana
MQLRSRSLRPGPLPEGNRRGASGAVAGCHSMRSNGDEELSRRAPIEQSVTAGHRELNRRTTDVEATADSGIGTNSFICSTPGTRRSNRTRSTQANPDAGHQNVPEIITNVSSPTSSLYSLFQSPSSSHHSDNYHPSHSPSSPSATSLMSVDVVQEANATNPAPTTNNTRTRKRWTEEMNKFIWRTYLISSKLETLQRGYLEPLHTLFLAKFPEMDVSRQRVGDQRRAILNNKLLSQATLDEIRSEVKKDLSVTTRPQSATAPSASVHLVNSQPLQSSTGGRMLWTPDVNEMIMKFYFEVTDLETNMTAYRKKLHERFISYFPHLSHVSEQRIADQRRVIVNNKMLSKATIQAIKNQVRTETTTTNTQAPTDNTIINIATQNSFDDLDAIQQGEENTQNSDQISSQSPLHTHTLSPTHNTPRSNKHASHHMTSINEEEIRIQFQSNLQRFKIIDPINRPHIPKLNISRKLTLTVNYLNKDVIPQYLSHDIDFNSLQNIIYTTAYTTAVCVGVKMDRLPKTDKKRKPTWQVRLETKIRKYREHIGRLTQYIRGNRSRKIILAVETIKASFHTHATFENPNTEPGQFLDTLKQKLNTAASRLKRYLSCTERKSQNALFSNNESGFYRRISTKSQTHQLQSGNNQTPPIDTLRQYWADIWEQPVQHNEDATWLNDDTEMNNAPYIPMMKFEHIPIDTFMRVIKRSHNWKSPGTDNIHNFWYKKITCTHPYIHNYLNEFIKFPETMPSYITHGSTYLLAKDNDTTNPAKYRPITCLQTIYKILTACISETIYSHLSQHNILKEQQKGCRKHSQGCKEQLVIDSVAMKQAMRKKRNIHTMYIDYRKAFDSVPHTWLIYILHRYKVHPSIIDFLQTAMNSWQTTLTVKQEGKTLFTEPIQIKRGIFQGDALSPLWFCMALNPLSELLDRINAGFRIKYDYTHHTLSHLMYVDDIKLFADSITELFQLADITQEFSSDIGMQFGIDKCKVHSVHKGKIQNNTYTLDTGEQIEHMTDRETYKYLGFQQSRQINQKQTKHELIRKFRHRLSIILKSHLNSRNLIKAINTFAIPVLTYSFGVIHWSQSDLKKLQRIINTNLTKHRKHHPKSCTQRLTLPRLDGGRGLIDIQNLHNKQINTLRNYFHTKAEESLLHKFTVKIDNHFTPLNLNDQSTQRNEQIISNQQKTSVWTQKSLHGRHYADLSQTFVHKELSNAWLKRGELFPETEAFMMAIQDQVIATRNYRKHITKDLDRPTDSCRHCNSSPETIQHITGACKAIVQTDYKHRHDQVASIIHQHLAHKHKFIDKQVPYYKYIPSIVHENRQIKLYWDRTVLTDRTIHYNRPDIIFFNKTTKTIYIIDIAIPNTHNIQTTINDKLTKYKDLAIEIKRQWQANIVHIVPIVLSTTGVVPKTLINSLETLQIPTYTINALQKATILNTCRLTRKFLTSSTISENTTM

SEQ ID NO: 4831 - protein, 1460 aa, Notocelia uddmanniana
MQLRSRSLRPEPLPEGNRRGASGAGTGCHSMRTTGGAELSRRARVNQDTTAGHRELSRRATDVEATADLGGDTEDLLFSFPLTSPSNRSRSVQSDTAAGCKDVPEIVAVISHPPSPTSSLFSLFQSPISSPYPDSYLPPGSFPSSPSSSIMSVDVVREARATNPAPTTNITRTRKRWTEEMNKFIWRTYLISSKLETLKRGYLESLHRQFHEKFTDMNASRQRVGDQRRAIINNKLLTQTTLNEIRTEVEKHLSSANTTDQPNLQVTLASCDQQGNSQRLYCLQQLSNTQSTEGRMSWLPNVNEMIIKLYFEVTAAETNMTAYRKKLHEKFSSHFPHLSHLSEQRIADQRRAIISNKLLSSAKIKAIKDQVIAELDITYSLTSHCTIPKPNSTGNPIINITTHNSFDGLETVQQEAEISSQAETQNLPHDRSRTNAQFGLQNLSRIDESKIRTLFNSNLVKFKNTDPTNRPHIPKLKISRKLKFTVDYIDNVIIPQYLSHELDFKSLQNIIYTAAYTTATYLGIKIDKPAGSGNTKKSYKPNWQLRLESKILKYRREIGRLTQYIRGNRSRKIVSTMETIKATYQTHATFENLNTEPEHFLDTLKQKLNTAASRLKRYVACTERKSQNTLFTNNESGFYRKISSKDGTHQNLPRNTEIPPIDSLRQYWAAIWETPVQHNQNATWINDSRDNTPTMEFEHITIDTFAQVIKRTHNWKSPGTDNIHNFWYKKLTCTHPLIHKFLNQFIRAPDTMPCYITQGRTYLLPKDNDTANPSKYRPITCLQTIYKILTACVSETIYSHLSQNNLMKEQQKGCRKYSQGCKEQLIIDSIAMKHALKRKQDIHSMYIDYRKAFDSIPHSWLIHVLHRYKIHPIIIKFLQAAMRNWQTTLTVRQGYNSLSSEPISIRRGIFQGDALSPLWFCMALNPLSELLEQVSIGFRLRHDNTHHILSHLMYVDDIKLYADNVSELFQLADITQEFSTDIGMQFGIDKCKVHSVHRGQVQNNTYTLQTGEEIEPMTEQETYKYLGFHQSRQIQLKQTKDELTRKFRHRLNVILRSHLNSRNTIKAINTFAIPILTYSFGIINWSQSDLKSLQRIINTNLTKHRKHHPKSCTQRLTLPRQEGGRGLIDVQNLHNKQITTLRHYFQVKSEDSSLHKYAVELDNRYTPLNLKDKTTQPNERIVSTQQKITEWTQKSLHGRHRADLSQSFVDKELSNAWLKRGDLFPATEAFMLAVQDQVIATRNYRKHITKDLDRPTDSCRHCNSAPETIQHITGACKTIVQTDYKHRHDQVASVIHQYLAHKHKFTPKLLPYYKYAPSVVHENNQHKLYWDRTIITDRTIHFNRPDITFFDKTTETIYIIDIAIPNKHNIQSTVTEKLSKYKDLAIELRRQWKAKTVHIVPIVISTTGVVPKTLCSSLQTLQIPAYMIETLQKATILNTCRLTRKFLSSSTISANTTYTQ

SEQ ID NO: 4832 - protein, 1497 aa, Pyrgus malvae
MGGTKLEASCQLGSPFPNKDPSFPIASSSFPPFLSFLPCSSMQLRSRSLRPGPLPEGDRRGAPGAVAGCHSMRTNGDAELSRRAPIEQSVTAEVEALPEGDRRGASGAVAGCHSMRTSGDERLSRRASIEKCVTAENSATHEPPPISLPSSVSSSPSLYHMFQSPSSSPLSFQDYNSLRSSSTTSFMSVDVVQEACAINSVPTTNTTRTRKKWTDEMNRFIWRTYLITSKLETLQRGYLESLHIQFRAMFPEMDVSRQRIGDQRRAILRNRLLTQATLNEIRSDVERYFDSVGNPLQPITLNTQPLSGQLVNSQPSQPSQDPNNGNPTGTAGRLIWPPDVNEVIMRLYFEITEVETNMTAYRKKLHEKFTTHFPHLSHVSEQRIADQRRTIVNNKLLSLAKIQEIKNQVRTEIEASNATVYNSQQEAHTQADSFVINVATQNSFDSLEPYNDEITQNTTQRQSQSTLHTRDRIDEHHRQNEINIEDEEIHTEFQVNLERFKNIDPTNRPHIPKLKTSRKLTLIVNHLNNVIIPHYISQELDFNTLQNIIYTTAYTCATYVGLKLEGPMGISGTRKAMKPKWQVRLENKISRYRANIGRLTQYIRGNRSRKVVSAVETIKTIYHTHATFENPNTEPQHFLDTLKQKLNTASSRLRRYLACTVRKTQNAQFVNNESGFYRNLASNPAQHGKPRSIEIPPLDSIRQYWSDIWERPVQHSQDANWVKDINNTTIPTMEFEHIPIDTFIQVIKRTHNWKSPGTDNIHNFWYKKLTSTHPFIHKYINQFIQSPDTMPSYITHGRTYLLPKDNDTANPAKYRPITCLQTIYKIITACISEIIYSHLAQYDILKEQQKGCRKYSQGCKEQLIIDAVAMKQALRKKRNIHTMYIDYKKAFDSVPHSWLIHILHVYKIHPSITEFLETAMNNWQTTLTIKQDENSISTEPIRIRRGIFQGDALSPLWFCMALNPLSTLLEQADAGFRLKHDHTHHTLSHLMYVDDIKLFADNITELFQLADITQEFSRDIGMQFGIDKCKVHSIHRGHIQNNSYTLETGEQVDPMTEQETYKYLGFHQSRQIHQKQTKLGLTRKFKHRLNVILKSHLNSRNIIKAINTFAIPILTYSFGIISWSQSDLKKFQRIINTNLTKHRKHHPKSCIQRLTLPRQEGGRGLIDVQNLHNKQITTLRHYFHIKSEQSPLHSYIVHIDDSYTPLNLNDRHTQPNEKIISPQQKLSEWSQKSLHGRHHTDLGQPFVDKTLSNSWLKRGELFPETEAFMLAIQDQVIATRNYRKYITKELGRQTDSCRRCNSAPETIQHITGACKAIVQTDYKHRHDQVASIIHQHLAHKYKFINKQVPYYKYIPSIIHENSQHKLYWDRTLLTDRTIHFNRPDITLFDRSSKTIYIIDIAIPNTHNIQSTINEKFAKYTDLAVELKRQWQATTAHIVPIVISATGVIPKTLNNSLETLKIPSYIINTLQKATILNTCRITRKFLSSSTITNNTNNL

SEQ ID NO: 4833 - protein, 1497 aa, Pyrgus malvae
MGGTKLEASCQLGSPFPNKDPSFPIASSSFPPFLSFLPCSSMQLRSRSLRPGPLPEGDRRGAPGAVAGCHSMRTNGDAELSRRAPIEQSVTAEVEALPEGDRRGASGAVAGCHSMRTSGDERLSRRASIEKCVTAENSATHESPPISLPSSVSSSPSLYHMFQSPSSSPLSFQDYNSLRSSSTTSFMSVDVVQEACAINSVPTTNTTRTRKKWTDEMNRFIWRTYLITSKLETLQRGYLESLHIQFRAMFPEMDVSRQRIGDQRRAILRNRLLTQATLNEIRSDVERYFDSVGNPLQPITLNTQPLSGQLVNSQPSQPSQDPNNGNPTGTAGRLIWPPDVNEVIMRLYFEITEVETNMTAYRKKLHEKFTTHFPHLSHVSEQRIADQRRTIVNNKLLSLAKIQEIKNQVRTEIEASNATVYNSQQEAHTQADSFVINVATQNSFDSLEPYNDEITQNTTQRQSQSTLHTRDRIDEHHRQNEINIEDEEIHTEFQVNLERFKNIDPTNRPHIPKLKTSRKLTLIVNHLNNVIIPHYISQELDFNTLQNIIYTTAYTCATYVGLKLEGPMGISGTRKAMKPKWQVRLENKISRYRANIGRLTQYIRGNRSRKVVSAVETIKTIYHTHATFENPNTEPQHFLDTLKQKLNTASSRLRRYLACTVRKTQNAQFVNNESGFYRNLASNPAQHGKPRSIEIPPLDSIRQYWSDIWERPVQHSQDANWVKDINNTTIPTMEFEHIPIDTFIQVIKRTHNWKSPGTDNIHNFWYKKLTSTHPFIHKYINQFIQSPDTMPSYITHGRTYLLPKDNDTANPAKYRPITCLQTIYKIITACISEIIYSHLAQYDILKEQQKGCRKYSQGCKEQLIIDAVAMKQALRKKRNIHTMYIDYKKAFDSVPHSWLIHILHVYKIHPSITEFLETAMNNWQTTLTIKQDENSISTEPIRIRRGIFQGDALSPLWFCMALNPLSTLLEQADAGFRLKHDHTHHTLSHLMYVDDIKLFADNITELFQLADITQEFSRDIGMQFGIDKCKVHSIHRGHIQNNSYTLETGEQVDPMTEQETYKYLGFHQSRQIHQKQTKLGLTRKFKHRLNVILKSHLNSRNIIKAINTFAIPILTYSFGIISWSQSDLKKFQRIINTNLTKHRKHHPKSCIQRLTLPRQEGGRGLIDVQNLHNKQITTLRHYFHIKSEQSPLHSYIVHIDDSYTPLNLNDRHTQPNEKIISPQQKLSEWSQKSLHGRHHTDLGQPFVDKTLSNSWLKRGELFPETEAFMLAIQDQVIATRNYRKYITKELGRQTDSCRRCNSAPETIQHITGACKAIVQTDYKHRHDQVASIIHQHLAHKYKFINKQVPYYKYIPSIIHENSQHKLYWDRTLLTDRTIHFNRPDITLFDRSSKTIYIIDIAIPNTHNIQSTINEKFAKYTDLAVELKRQWQATTAHIVPIVISATGVIPKTLNNSLETLKIPSYIINTLQKATILNTCRITRKFLSSSTITNNTNNL

SEQ ID NO: 4834 - protein, 1409 aa, Carcina quercana
MLLRSGNRLPQTGTGANCNGESRPEPSGLGCPMFSGGDNTSQSAQSRTGADQQGVISTISHSTSPISSSHSLFQSPSSSPCSFLNYPTSRSSPSTSLTSADVVQEARALDPAPTTGSTRMRKKWTEEMNRFIWRTYLIASKLETLKRGYLEQLHRQFQINFPDMDASRQRIGDQRRAIVNNKLLSQVTLNEIRSEVEEHLNRAGLTTQCHSTTTPTQHNQAVNSQTCHSPPHTSYTNITTTGGRLIWPLEVNEMIIQFYFEVTEVETNMTAYRKKLHEKVTTHFPHLSHLSEQRISDQRRVIVNNKLLSSARIQSIKNQVLSEIKSTEPYTNHNSLSETCQRTDSSEGVINIAVHNTFEILEVEEAVTITQENIEAHVHNLSQSRSVRMNEQHIRNNENIDHEEIRIQFVINLKKFKNTDPTNRPHIPKLRTTRKLLSIVDHLNNAVIPHYLSPEQNYNSLQTIIYASAYTTAAYIGLTLDRQTDITNRKKCNKPNWQLRLECRIRKYRAEIGRLTQYIRGNRSRRVVSAVGTIKTNYQTHATFEDLNSEPEHFLDTLKQKLNTASSRLKRYLACTARKTQNSQFTNNESSFYRTLTSNEAAQHHQTLSTVTPPMDLLKQYWTDIWERPVQHNRNATWINDNLPTVPTMEFEHIPVDTFIQIIKRTHNWKSPGTDNIHNFWYKKLTCTHPHIHNHLNQFIQSPDTMPTYMTQGRTYLLPKDNDTTNPAKYRPITCLQTIYKILTACISETIYSHLSQHNILKEQQKGCKKNSQGCKEQLTIDAVAMTQALKKKRNIHSMYIDYRKAFDSVPHSWLIDILKRYKIHPKIVSLLETAMSTWQTTLTIRKEEHILTSEPIHIRRGIFQGDALSPLWFCLALNPLSEILDRANAGFKLEHNNSHHTLSHLMYVDDIKLYADNITELFQLADITQEFSKDICMQFGIDKCKVHSIHRGKVQNNCYTLDTGEQIDSMTKQDTYKYLGFHQSKHIHQKQTKQELIRKFKHRLTIILKSYLNSRNTTKAINTFAIPILTYSFGIINWSQTDLKKLQRTMNTHLTKHRKHHPKSCIQRLTLPRQEGGRGLIDIQNLHNKQITTLRRYFHMKAEHSPLHKYTVDIDDRYSPLNLQHRNTQRNENIISLQQKTSEWGQKVLHGRHHADLGKSFIDKTVSNSWLKWGELFPETEAFMMAIQDQVIATRNYRKHIMKDVEQRNDSCRHCNSAPETIQHITGACKAIVQTDYKHRHDQVASVIHQHLAHKYKFIHNKVPYYKYTPSTVHENKQHKLYWDRTIITDKTIHYNRPDITLVDKNNKTVFIIDIAVPNTHNIQTTINEKLTKYTDLAIELRRQWRAHTVHIVPIVISTTGVVPKTLHNSLDTLQIPTHTIATLQKAVILNTCRLTRKFLTSATINST

SEQ ID NO: 4835 - protein, 1409 aa, Carcina quercana
MLLRSGNRLPQTGTGANRNGESRPEPSGLGCPMFSGGDNTSQSAQSRTGADQQGVISTISHSTSPISSSHSLFQSPSSSPCSFLNYPTSRSSPSTSLTSADVVQEARALDPAPTTGSTRMRKKWTEEMNRFIWRTYLIASKLETLKRGYLEQLHRQFQINFPDMDASRQRIGDQRRAIVNNKLLSQVTLNEIRSEVEEHLNRAGLTTQCHSTTTPTQHNQAVNSQTCHSPPHTSYTNITTTGGRLIWPLEVNEMIIQFYFEVTEVETNMTAYRKKLHEKVTTHFPHLSHLSEQRISDQRRVIVINKLLCSARIQSIKNQVLSEIKSTEPYTNHNSLSETCQRTDSSEDVINIAVHNTFEILEVEEAVTITQENIEAHVHNLSQSRSVRMNEQHIRNNENIDHEEIRIQFEINLKKFKNTDPTNRPHIPKLRTTRKLLSIVDHLNNAVIPHYLSPEQNYNSLQTIIYASAYTTAAYIGLTLDRQTDITNRKKCNKPNWQLRLECRIRKYRAEIGRLTQYIRGNRSRRVVSAVGTIKTNYQTHATFEDLNSEPEHFLDTLKQKLNTASSRLKRYLACTARKTQNSQFTNNESSFYRTLTSNEAAQHHQTLSTVTPPMDLLKQYWTDIWERPVQHNRNATWINDNLPTVPTMEFEHIPVDTFIQIIKRTHNWKSPGTDNIHNFWYKKLTCTHPHIHNHLNQFIQSPDTMPTYMTQGRTYLLPKDNDTTNPAKYRPITCLQTIYKILTACISETIYSHLSQHNILKEQQKGCKKNSQGCKEQLTIDAVAMTQALKKKRNIHSMYIDYRKAFDSVPHSWLIDILKRYKIHPKIVSLLETAMSTWQTTLTIRKEEHILTSEPIHIRRGIFQGDALSPLWFCLALNPLSEILDRANAGFKLEHNNSHHTLSHLMYVDDIKLYADNITELFQLADITQEFSKDICMQFGIDKCKVHSIHRGKVQNNCYTLDTGEQIDSMTEQDTYKYLGFHQSKHIHQKQTKQELIRKFKHRLTIILKSYLNSRNTTKAINTFAIPILTYSFGIINWSQTDLKKLQRTMNTHLTKHRKHHPKSCIQRLTLPRQEGGRGLIDIQNLHNKQITTLRRYFHMKAEHSPLHKYTVDIDDRYSPLNLQHRNTQRNENIISLQQKTSEWGQKVLHGRHHADLGKSFIDKTVSNSWLKWGELFPETEAFMMAIQDQVIATRNYRKHIMKDVEQRNDSCRHCNSAPETIQHITGACKAIVQTDYKHRHDQVASVIHQHLAHKYKFIPNKVPYYKYTPSTVHENKQHKLYWDRTIITDKTIHYNRPDITLVDKNIKTVFIIDIAVPNTHNIQTTINEKLTKYTDLAIELRRQWRAHTVHIVPIVISTTGVVPKTLHNSLDTLQIPTHTIATLQKAVILNTCRLTRKFLTSATINST

SEQ ID NO: 4836 - protein, 804 aa, Apotomis turbidana
MGIPPLDSIRQYWADIWERPVLHNQDAPWIKGIYNTTIPTMEFEHIPIDTFIQVIKRTHNWKSPGTDNIHNFWYKKLTCTHPFIHKYLNQFIQSPDSMPSYITHGRTYLLPKDSDTTNPAKYRPITCLQTIYKIMTACISEIVYKHLSQHDILKEQQKGCRKCSQGCKEQLIIDAVAMKQALRKKRNIHTMYIDYKKAFDSVPHSWLIHILNIYKIHPSITNFLQTAMNNWQTTLTIKQEESSISTEPIQIQRGIFQGDALSPLWFCIALNPLSELLEQSHAGFRLKHDNTHHTLSHLMYVDDIKLFADNITELFQLADITQEFSRDIGMQFGIEKCKVHSIHRGHIQDNRYTLETGEQVDPMTEQETYKYLGFHQSTQIHQKQTKQELKRKFKHRLNIILKSHLNSRNIIKAINTFAIPILTYSFGVINWSQSDLKKFQRIINTNLTKHRKHHPKSCVQRLTLPREEGGRGLIDIQNLHNKQITTLRHYFHSKVEQSPLHSYTVHIDDSYTPLSLNDRNTQVNEKIISQQQKLSEWSQKALHGRHHSDLGQPFVDKTLSNSWLKRGELFPETEAFMLAIQDQVIATRNYRKYITKELGRQTDSCRHCNSAPETIQHITGACKAIVQTDYKHRHDQVASIIHQHLAHKYKLINKQVPYYKYIPSIIHENSQHKLYWDRTLLTDRTIHFNRPDITFFDRTSKSIYIIDIAIPNTHNIQSTINEKLAKYTDLAIELKRQWQATTAHIVPIVISATGVVPKTLNNSLETLKIPSYIIGTLQKATILNTCRITRKFLTSSTITNNTAQ

SEQ ID NO: 4837 - protein, 1021 aa, Carcina quercana
MTEQHIRNNENNYHEEIRIQFEINLKKFKNTDPTNRPHIPKLRTTRKLLSIVDHLNNAVIPHYLSPEQSYNSLQTIIYASAYTTAAYIGLTLDRQTDITNRRKCNKPNWQLRLECRIRKYRAEIGRLTQYIRGNRSRRVVSAVGTIKTNYQTHATFEDLNSEPEHFLDTLKQKLNTASSRLKRYLPCTARKTQNSQFTNNESSFYRTLTSNEAAQYHQTLSTGTPPMDLLKQYWTDIWERPVQHNRNATWINDNLPTVPTMEFEHIPVDTFIQIIKRTHNWKSPGTDNIHNFWYKKLTCTHLHIHNHLNQFIQSPDTMPTYMTQGRTYLLPKDNDTTNPAKYRPITCLQTIYKILTACISETIYSHLSQHNILKEQQKGCKKNSQGCKEQLTIDAVAMTQALKKKRNIHSMYIDYRKAFDSVPHSWLIDILKRYKIHPKIVSLLETAMSTWQTTLTIRKEEHILTSEPIHIRRGIFQGDALSPLWFCLALNPLSEILDRTNAGFKLEHNNSHHTLSHLMYVDDIKLYADNITELFQLADITQEFSKDICMQFGIDKCKVHSIHRGKVQNNCYSLDTGEQIDSMTEQDTYKYLGFHQSKHIHHKQTKQELIRKFKHRLTIILKSYLNSRNTTKAINTFAIPILTYSFGIINWSQTDLKKLQRIVNTHLTKHRKHHPKSCIQRLTLPRQEGGRGLIDIQNLHNKQITTLRRYFHMKAEHSPLHKYTVDIDDRYSPLNLQHRNTQRNENIISLQQKTSEWAQKVLHGRHHADLGKSFIDKTVSNSWLKWGELFPETEAFMMAIQDQVIATRNYRKHIMKDVEQRNDSCRHCNSAPETIQHITGACKAIVQTDYKHRHDQVASVIHQHLAHKYKFIPNRVPYYKYIPSTVHENKQHKLYWDRTIITDKTIHYNRPDITLVDKNNKTVFIIDIAVPNTHNIQTTINEKLTKYTDLAIELRRQWRAHTVHIVPIVISTTGVVPKTLHNSLDTLQIPTHTIATLQKAVILNTCRLTRKFLTSATINNT

SEQ ID NO: 4838 - protein, 1365 aa, Carcina quercana
MLLRSGNRLPQTGTGANRNGESRPEPSGLGCPMFSGGDNTSQSAQSRTGADQQGVISTISHSTSPISSPHSLFQSPSSSPCSFLNYPTSRSSPSTSLTSADVVQEARALDPAPTTGSTRTRKKWTEEMNRFIWRTYLIASKLETLKRGYLEQLHRQFQINFPDIDASRQRIGDQRRAIVNNKLLSQVTLNEIRSEVEEHLNRAGPTTQCHSTTTPTQHNQAVNSQTCHSPPHTSYTNITTTGGRLIWPLEVNEMIIQFYFEVTEVETNMTAYRKKLHEKVTTHFPHLSHLSEQRISDQRRVIVNNKLLSSARIQSIKNQVLSEIKSTEPYTNHNSLNETCQRTDSSEGVINIAVHNTFEILEVEEAVTITQENIEAHVHNLSQSRSVRMNEQHIRNNENIDHEEIRIQFEINLKKFKNTDPTNRPHIPKLRTTRKLLSIVDHLNNAVIPHYLSPEQNYNSLQTIIYASAYTTAAYIGLTLDRQTDITNRKKCNKPNWQLRLECRIRKYRAEIGRLTQYIRGNRSRRVVSAAGTIKTNYQTHATFEDLNSEPEHFLDTLKQKLNTASSRLKRYLACTARKTQNSQFTNNESSFYRTLTSNEAAQHHQTLSTVTPPMDLLKQYWTDIWERPVQHNRNATWINDNLPTVPTMEFEHIPVDTFIQIIKRTHNWKSPGTDNIHNFWYKKLTCTHPHIHNHLNQFIQSPDTMPTYMTQGRTYLLPKDNDTTNPAKYRPITCLQTIYKILTACISETIYSHLSQHNILKEQQKGCKKNSQGCKEQLTIDAVAMTQALKKKRNIHSMYIDYRKAFDSVPHSWLIDILKRYKIHPKIVSLLETAMSTWQTTLTIRKEEHILTSEPIHIRRGIFQGDALSPLWFCLALNPLSEILDRANAGFKLEHNNSHHTLSHLMYVDDIKLYADNITELFQLADITQEFSKDICMQFGIDKCKVHSIHRGKVQNNCYTLDTGEQIDSMTEQDTYKYLGFHQSKHIHQKQTKQELIRKFKHRLTIILKSYLNSRNTTKAINTFAIPILTYSFGIINWSQTDLKKLQRTMNTHLTKHRKHHPKSCIQRLTLPRQEGGRGLIDIQNLHNKQITTLRRYFHMKAEHSPLHKYTVDIDDRYSPLNLQHRNTQRNENIISLQQKTSEWGQKVLHGRHHADLGKSFIDKTVSNSWLKWGELFPETEAFMMAIQDQVIATRNYRKHIMKDVEQRNDSCRHCNSAPETIQHITGACKAIVQTDYKHRHDQVASVIHQHLAHKYKFIPNKVPYYKYTPSTVHENKQHKLYWDRTIITDKTIHYNRPDITLVDKNNKTVFIIDIAVPNTHNIQTTINEKLTKYYRLSHRTETPMARAHSPYSTNSNIHDGRCS

SEQ ID NO: 4839 - protein, 823 aa, Cydia splendana
MKISSNDSTHHNLQQSTDTPPIETIRQYWADIWEKPILHNDNATWINDDSAADNASAISSMEFDHIPIDTFIQVIKRTHNWKSPGTDNIHNFWYKKLTHTHPFLHKFLNQFIQSPHTMPTFITQGRTYLLPKDSDSSNPAKYRPITCLQTIYKILTACISETIYTHLSQNSILKEQQKGCRKYSQGCKEQLIIDAVATKHALKRKKYFHAMYIDYRKAFDSVPHSWLIYILKRYKIHPSLIQFVQTAMNNWQTTLTLKQQGQSTIEPIRIRRGIFQGDALSPLWFCMALNPLSELLDQAKIGFRLKYDDSYHTLSHLMYVDDIKLFADNITELFQLADITQEFSNDIGMQFGVDKCKVYSIHRGQIQSNPYTLDTGDQIDPMSEQDLYKYLGFHQSGQIHQKQTKQELTRKFKHRLAGILKSHLNSRNTIKAINTFVIPVLTYSFGIISWAQSNLKNLQRIINTNLTKHRKHHPKSCTQRLTLPRPVGGRGLIDLQNLHNKQITTLRRYFHSKAEQSQMHTYIVEIDNRYTPLNLQDRTTQSNEQIVSLQQKTSDWAQKALHGRHIADINQEFVDRELSNSWLKRGELFPETEAFMLAIQDQVIATRNYRKHITKELAHQSDSCRHCNSAPETIQHITGACKTIVQTDYKHRHDQVASIIHQYLAHKYKFVEKQLPYYKYKPSIIHENRQHKLYWDRTIITDRTVHFNRPDITLFDKTTKTIFLIDIAIPNTHNIQSTINEKLTKYRDLAIEVRRQWQATTVHIVPIVMSTTGVVPKTLSNSLEILHIPTHVIQILQKATILNTCRITRKFLTSSSITENTTQ

SEQ ID NO: 4840 - protein, 768 aa, Lycaena phlaeas
MEFDSIPLNTFIQVIKRTHNWKSPGTDNIHNFWYKKLTCTHPILYNHLNQFIQLPETMPSYLTQGRTFLLPKDTDTTNPAKYRPITCLQTIYKILTACISETIHKHFTQYNLFKEQQKGCRKKSQGCKEQLIIDKVAMTQALRRKRNIHTMYIDYRKAFDSVPHSWLIHCLTHYKVSPTIVTFLQIIMNNWQTTLSIRQEGNFIDSEPIHIQRGIFQGDALSPLWFCIALNPLSELLDQAATGFRLKYNNTQHILSHLMYVDDIKLFADNITELFQLADITQSFSKDIGMQFGIDKCKIHSIHKGKIQANTYILDNGEQIEPMTEEDTYKYLGFHQSRKIDEKQTKQELIRKFRHRLTIILKSYLNSRNTIKAINSFAIPILTYSFGVINWSQTDLKKLQRNINTNLTKHRKHHPKSCIQRLTLPRHEGGRGLIDIQNLHNKQITTLRHYFHSKSEHSLLHKYTINIDDRYTILNLHDKNIQRCEKITSLQEKTCEWAKKSLHGRHYADLTESHADKLLSNSFLKRGDLFPETEAFVLAIQDQVIATRNYRKYITKDLDQLTQTDVCRHCNSAPETIQHITGACKAIVQTDYKHRHDQVASIIHQHLAYTFKFISKKVAYYKYTPSTVLENRHHKIYWDRTIITDKTIHYNRPDITVFDKTNKTIYIIDIAIPNTHNIQTTINEKLAKYQDLSIELKRQWQANTVHTVPIVISTTGVIPKTLKKSLDILQVPIKIVNIMQKATILNTCRITRKFLTSATITDNSALTI

SEQ ID NO: 4841 - protein, 1395 aa, Lycaena phlaeas
MRLRSGYKLPQAGTGANSDGESDPKSTDRGSPTYSGGDTVSHSAQLNTVADYQEISGNITIITNPSSPNPSSSCHSIFQSPSSSPHSFQNESSSPSTSSTSEDVVQEANATDPTPTIDVSRTRKKWTKEMNIFIWRTYLITSKLESLKRGYLEPLHKEFHTKFPYMNASRQRIGDQRRAIVNNKLLSQETLNEIWSEVEQHINGTSTTQTCSSFSQTLSRTIYNTQNTGNTYTPAPSGRMIWPPEVNEMIIQLYFEVTEMETNMTAYRKKLHEKVITYFPHLSHLSEQHIADQRRAIINNKLLTPDTIQRIKNQTRSNIENYNSYINENHEIQSFEHINTQQAQIVHQDEEIISEHNQLSPDHSRRINEQHIPPIDSNVNIEEILTQFKINLAKFKNTDPTNRPHIPKLRTSRKITTIVNYLNEIVIPQHLTQNQNFESLQTIIYTAAYTTATFIGIKLCRPKDLNSRQTCNKPNWQLRLETKIKKYRADIGRLTQYIRGNRSRKIVTAVETIKNSYQKHSTFENFNTQPEEYLDTLKQKLNSASSRLRRYVACTVRKIQNTQFTKNESGFYRTIVSNEAAQHHNTRTTQSPPINSLRQYWADIWERPVQHNQNGEWLINSPNTAAVPLMEFDSIPLNTFIQVIKRTHNWKSPGTDNIHNFWYKKLTCTHPILYNHLNQFIQLPETMPSYLTQGRTFLLSKDTDTTNPAKYRPITCLQTIYKILTACISETIHKHFTQYNLFKEQQKGCRKKSQGCKEQLIIDKVAMTQALRRKRNIHSMYIDYRKAFDSVPHSWLIHCLTHYKVSPTIVTFLQIIMNNWQTKLSIRQEGNFIDSEPIHIQRGIFQGDALSPLWFCIALNPLSELLDQTAAGFRLKYNNTQHILSHLMYVDDIKLFADNITELFQLADITQSFSKDIGMQFGIDKCKIHSIHKGKIQANTYILDNGEQIEPMTEEDTYKYLGFHQSRKIDEKQTKQELIRKFRHRLTIILKSHLNSRNTIKAINSFAIPILTYSFGVINWSQTDLKKLQRNINTNLTKHRKHHPKSCIQRLTLPRHEGGRGLIDIQNLHNKQITTLRHYFHSKSEHSLLHKYTINIDDRYTILNLHDKNIQRCEKITSLQEKTCEWAKKSLHGRHYADLTESHADKLLSNSFLKRGDLFPETEAFVLAIQDQVIATRNYRKYITKDLDQQTDVCRHCNSAPETIQHITGACKAIVQTDYKHRHDQVASIIHQHLAYTFKFISKKVAYYKYTPSTVLENRHHKIYWDRTIITDKTIHYNRPDITVFDKTNKTIYIIDIAIPNTHNIQTTINEKLAKYQDLSIELKRQWQANTVHTVPIVISTTGVIPKTLKKSLDILQVPFKIINIMQKATILNTCRITRKFLTSATITDNSALTI

SEQ ID NO: 4842 - protein, 1397 aa, Lycaena phlaeas
MRLRSGYKLPQAGTGANSDGESDPKSTDRGSPTYSGGDTVSHSAQLNTVADYQEISGNITIITNPSSPNPSSSCHSIFQSPSSSPHSFHNESSSPSTSSTSEDVVQEASATNPTPTTDVSRTRKKWTKEMNIFIWRTYLITSKLESFKRGYLEPLHKEFHTKFPYMNASRQRIGDQRRAIVNNKLLSQETLNEIWSEVEQHINGTSTTQTCSSFSQTLSRTIYNTQNTGNTYTPAPSGRMIWPPEVNEMIIQLYFEVTEMETNMTAYRKKLHEKVITYFPHLSHLSEQHIADQRRAIINNKLLTSATIQRIKNQTRSNIENYNSYINENHEIQSFEHINTQQAQIVHQDEEIISEHNQLSPDHSRRINEQHIPPIDSNVNIEEILTQFKINLAKFKNTDPTNRPHIPKLRTSRKITSIVNYLNEIVIPQHLTQNQNFESLQTIIYTAAYTTATFIGIKLCRPKDLNSRKTCNKPNWQLRLETKIKKYRADIGRLTQYIRGNRSRKIVTAVETIKNSYQKHSTFENFNTKPEEYLDTLKQKLNSASSRLRRYVACTVRKIQNTQFTNNESGFYRTIVSNEAAQHHNTCTTQSPPINSLRQYWADIWERPVQHNQNGQWLSNSPNTAAVPLMEFDSIPLNTFIQVIKRTHSWKSPGTDNIHNFWYKKLTCTHPILYNHLNQFIQLPETMPSYLTQGRTFLLPKDTDTTNPAKYRPITCLQTIYKILTACISETIHKHFTQYNLFKEQQKGCRKKSQGCKEQLIIDKVAMTQALRRKRNIHSMYIDYRKAFDSVPHSWLIHCLTHYKVSPTIVTFLQIIMNNWQTTLSIRQEGNFIDSEPIHIQRGIFQGDALSPLWFCIALNPLSELLDQAAAGFRLKYNNTQHILSHLMYVDDIKLFADNITELLQLADITQSFSKDIGMQFGIDKCKIHSIHKGKIQANTYILDNGEQIEPMTEEDTYKYLGFHQSRKIDEKQTKQELIRKFRHRLTIILKSHLNSRNTIKAINSFAIPILTYSFGVINWSQTDLKKLQRNINTNLTKHRKHHPKSCIQRLTLPRHEGGRGLIDIQNLHNKQITTLRHYFHSKSEHSLLHKYTINIDDRYTILNLHDKNIQRCEKITSLQEKTCEWAKKSLHGRHYADLTESHADKLLSNSFLKRGDLFPETEAFVLAIQDQVIATRNYRKYITKDLDQLTQTDVCRHCNSAPETIQHITGACKAIVQTDYKHRHDQVASIIHQHLAYTFKFISKKVAYYKYTPSTVLENRHHKIYWDRTIITDKTIHYNRPDITVFDKTNKTIYIIDIAIPNTHNIQTTINEKLAKYQDLSIELKRQWQANTVHTVPIVISTTGVIPKTLKKSLDILQVPIKIVNIMQKATILNTCRITRKFLTSATITDNSALTM

SEQ ID NO: 4843 - protein, 1395 aa, Lycaena phlaeas
MRLRSGYKLPQAGTGANSDGESDPKSTDRGSPTYSGGDTVSHSAQLNTVADYQEISGNITIITNPSSPNPSSSCHSIFQSPSSSPHSFQNESSSPSTSSTSEDVVQEASATDPTPTIDVSRTRKKWTKEMNVFIWRTYLITSKLESLKRGYLEPLHQEFHTKFPYMNASRQRIGDQRRAIVNNKLLSQETLNEIWSEVEQHINGTSTTQICSSFSQTLSRTIYNTQNTGNTYTPAPSGRMIWPPEVNEMIIQLYFEVTEMETNMTAYRKKLHEKVITYFPHLSHLSEQHIADQRRAIINNKLLTPDTIQRIKNQTRSNIENYNSYINENHEIQSFEHINTQQAQIVHQDEEIILEHNQLSPDHSRRINEQHIPPIDSNVNIEEILTQFKINLAKFKNTDPTNRPHIPKLRTSRKITSIVNYLNEIVIPQHLTQNQNFESLQTIIYTAAYTTATFIGIKLCRPNDLSSRQTCNKPNWQLRLETKIKKYRADIGRLTQYIRGNRSRKIVTAVETIKNSYQKHSTFEDFNTQPEEYLDTLKQKLNSASSRLRRYVACTVRKIQNTQFTNNESGFYRTIVSNEAAQHHNTRTTQSPPINSLRQYWADIWERPVQHNQNGEWLSNSPNTAAVPLMEFDSIPLNTFIQVIKLTHNWKSPGTDNIHNFWYKKLTCTHPILYNHLNQFIQLPETMPSYLTQGRTFLLPKDTDTTNPAKYRPITCLQTIYKILTACISETIHKHFTQYNLFKEQQKGCRKKSQGCKEQLIIDKVAMTQALRRKRNIHSMYIDYRKAFDSVPHSWLIHCLTHYKVSPTIVTFLQIIMNNWQTKLSIRQEGNFIDSEPIHIQRGIFQGDALSPLWFCIALNPLSELLDQAGAGFRLKYNNTQHILSHLMYVDDIKLFADNITELFQLADITQSFSKDIGMQFGIDKCKIHSIHKGKIQANTYILDNGEQIEPMTEEDTYKYLGFHQSRKIDEKQTKQELIRKFRHRLTIILKSHLNSRNTIKAINSFAIPILTYSFGVINWSQTDLKKLQRNINTNLTKHRKHHPKSCIQRLTLPRHEGGRGLIDIQNLHNKQITTLRHYFHSKSEHSLLHKYTINIDDRYTILNLHDKNIQRCEKITSLQEKTCEWAKKSLHGRHYADLTESHADKLLSNSFLKRGDLFPETEAFVLAIQDQVIATRNYRKYITKDLDQQTDVCRHCNSAPETIQHITGACKAIVQTDYKHRHDQVASIIHQHLAYTFKFISKKVAYYKYTPSTVLENRHHKIYWDRTIITDKTIHYNRPDITVFDKTNKTIYIIDIAIPNTHNIQTTINEKLAKYQDLSIELKRQWQANTVHTVPIVISTTGVIPKTLKKSLDILQVPFKIINIMQKATILNTCRITRKFLTSATITDNSALTI

SEQ ID NO: 4844 - protein, 1395 aa, Lycaena phlaeas
MRLRSGYKLPQAGTGANSDGESDPKSTDRGSPTYSGGDTVSHSAQLNTVADYQEISGNITIITNPSSPNTSSSCHSIFQSPSSSPHSFQNESSSPSTSSTSEDVVQEASATDPTPTTDISRTRKKWTKEMNIFIWRTYLITSKLESLKRGYLEPLHKEFHTKFPYMNASRQRIGDQRRAIVNNKLLSQETLNEIWSEVEQHINGTSTTLTCSSFSQTLSRTIYNTQNTGNTYTPGPSGRMIWPPEVNEMIIQLYFEVTEMETNMTAYRKKLHEKVITYFPHLSHLSEQHIADQRRAIINNKLLTSATIQRIKNQTRSNIENYNSYINENHEIQSFEHINTQQAQIVHQDEEIISEHNQLSPDHSRRINEQHIPPIDSNVNIEEILTQFKINLAKFKNTDPTNRPHIPKLRTSRKITSIVNYLNEIVIPQHLTQNQNFESLQTIIYTAAYTTATFIGIKLCRPKDLNSRNTCNKPNWQLRLETKIKKYRADIGRLTQYIRGNRSRKIVTAVETIKNSYQKHSTFENFNTQPEEYLDTLKQKLNSASSRLRRYVACTVRKIQNTQFTNNESGFYRTIVSNEAAQHHNSRTTQSPPINSLRQYWADIWERPVQHNQNGEWLSNTTADVPLMEFDSIPLNTFIQVIKRTHNWKSPGTDNIHNFWYKKLTCTHPILYNHLNQFIQLPETMPSYLTQGRTLLLPKDTDTTNPAKYRPITCLQTIYKILTACISETIHKHFTQYNLFKEQQKGCRKKSQGCKEQLIIDKVAMTQALRRKRNIHSMYIDYRKAFDSVPHSWLIHCLTHYKVSPTIVTFLQIIMNNWQTTLSIRQEGNFIDSEPIHIQRGIFQGDALSPLWFCIALNPLSELLDQAAAGFRLKYNNTQHILSHLMYVDDIKLFADNITELFQLADITQSFSKDIGMQFGIDKCKIHSVHKGKIQANTYILDNGEQIESMTKEDTYKYLGFHQSRKIDEKQTKQELIRKFRHRLTIILKSHLNSRNTIKAINSFAIPILTYSFGVINWSQTDLKKLQRNINTNLTKHRKHHPKSCIQRLTLPRHEGGRGLIDIQNLHNKQISTLRHYFHSKSEHSLLHKYTINIDDRYTILNLHDRNIQRCEKITSLQEKTCEWAKKSLHGRHYADLTESHADKLLSNSFLKRGDLFPETEAFVLAIQDQVIATRNYRKYITKDLDQLTQTDVCRHCNSAPETIQHITGACKAIVQTDYKHRHDQVASIIHQHLAYTFKFISKKVAYYKYTPSTVLENRHHKIYWDRTIITDKTIHYNRPDITVFDKTNKTIYIIDIAIPNTHNIQTTINEKLAKYQDLCIELKRQWQANTVHTVPIVISTTGVIPKTLKKSLDILQVPIKIINIMQKATILNTCRITRKFLTSATITDNSALTI

SEQ ID NO: 4845 - protein, 1411 aa, Carcina quercana
MLLRSGNRLPQTGTGANRNGESRPEPSGLGCPMFSGGDNTSQSAQSRTGADQQGVISTISHSTSPISSSHSLFQSPSSSPCSFLNYPTSRSSPSTSLTSADVVQEARALDPAPTTGSTRMRKKWTEEMNRFIWRTYLIASKLETLKRGYLEQLHRQFQINFPDMDASRQRIGDQRRAIVNNKLLSQVTLNEIRSEVEEHLNRAGLTTQCHSTTTPTQHNQAVNSQTCHSPPHTSYTNITTTGGRLIWPLEVNEMIIQFYFEVTEVETNMTAYRKKLHEKVTTHFPHLSHLSEQRISDQRRVIVNNKLLSSARIQSIKNQVLSEIKSTEPYTNHNSLSETCQRTDSSEGVINIAVHNTFEILEVEEAVTITQENIEAHVHNLSQSRSVRMNEQHIRNNENIDHEEIRIQFEINLKKFKNTDPTNRPHIPKLRTTRKLLSIVDHLNNAVIPHYLSPEQNYNSLQTIIYASAYTTAAYIGLTLDRQTDITNRKKCNKPNWQLRLECRIRKYRAEIGRLTQYIRGNRSRRVVSAVGTIKTNYQTHATFEDLNSEPEHFLDTLKQKLNTASSRLKRYLACTARKTQNSQFTNNESSFYRTLTSNEAAQHHQTLSTVTPPMNLLKQYWTDIWERPVQHNRNATWINDNLTTVPTMEFEHIPVDTFIQIIKRTHNWKSPGTDNIHNFWYKKLTCTHPHIHNHLNQFIQSPDTMPTYMTQGRTYLLPKDNDTTNPAKYRPITCLQTIYKILTACISETIYSHLSQHNILKEQQKGCKKNSQGCKEQLTIDAVAMTQALKKKRNIHSMYIDYRKAFDSVPHSWLIDILKRYKIHPKIVSLLETAMSTWQTTLTIRKEEHILTSEPIHIRRGIFQGDALSPLWFCLALNPLSEILDRANAGFKLEHNNSHHTLSHLMYVDDIKLYADNITELFQLADITQEFSKDTSICMQFGIDKCKVHSIHRGKVQNNCYTLDTGEQIDSMTEQDTYKYLGFHQSKHIHQKQTKQELIRKFKHRLTIILKSYLNSRNTTKAINTFAIPILTYSFGIINWSQTDLKKLQRTMNTHLTKHRKHHPKSCIQRLTLPRQEGGRGLIDIQNLHNKQITTLRRYFHMKAEHSPLHKYTVDIDDRYSPLNLQHRNTQRNENIISLQQKTSEWGQKVLHGRHHADLGKSFIDKTVSNSWLKWGELFPETEAFMMAIQDQVIATRNYRKHIMKDVEQRNDSCRHCNSAPETIQHITGACKAIVQTDYKHRHDQVASVIHQHLAHKYKFIPNKVPYYKYTPSTVHENKQHKLYWDRTIITDKTIHYNRPDITLVDKNNKTVFIIDIAVPNTHNIQTTINEKLTKYTDLAIELRRQWRAHTVHIVPIVISTTGVVPKTLHNSLDTLQIPTHTIATLQKAVILNTCRLTRKFLTSATINST

SEQ ID NO: 4846 - protein, 1117 aa, Clupea harengus
MEEGPTRTDTPVTNARTTTNDVRTLRKCGCGWEKVTTLRGLHIHMGKMKCAGRSQKQTCAAQAGQTSGIQGRVKNHSAIGPNVAEAGEKETRDVDDPQEVTPEPPPSNPRTESSQKAKSLNEPRRKIKWPKASETVEWKRLDESLSDLLQNALRGTVEAKLNLFGEIIYEECSDRYGKVTGRKAAEKSKGRREKEIDDLVAGRRQLRRRWRKAEESEREGLKALWDDIRRRLANLRRAERIRRRRKRKEKERANFFKNPFCFARGLLEEKTSGSLEISKEDLEDHIHGQYSDPARNEPLGPPGYVPKPGEPSVLFDASPPKLCEIKRVVWRARSASAPGPNGIPYKLYKNCPSVLKLLWTLMKTAWTKQTIPSQWQRAVAVFIPKEQNSKTIEQFRSIALLNVEGKIFFSVMARRMTSYLMENGYIDTSCQKAGIPGFPGCVEHATMIWEQIQIAKREKKDLHVVWLDLANAYGSVPHNLIAFALDFFYIPQSIRAMVMSYFQDLHMCFMLPNSTTIWQQLEVGIALGCSISPILFITAFEVILIGARQVVGGARLPTGRKLPPLRSYMDDITCLLQTAPCTSRLMKRLDELITWARMKFKAKKSRSLSLRKGVLNDRVTFIIGGENIPRIADQPIRSLGRQYTASLSDKEIGKTTLQQLSAGLAKIDSSQLPGKYKVWCFNFTLYPRVMWPLKLCEVTSSAVSKMDAKTSSFICKWLGLPRGHSSASLYGKNTLQLPLKSITIGYRQEKARLVMELRESTDETVRDMEARVLTGRKWRAEEEVQKAVGRLQHQEMVGRVQTGLAGLGWGDPPILDLVVSDVTKMAEEEYRVKAVAQGQQGRWTTWEGVAGRVVSWADFWKLPQARLSFLIRATYDTLPSPRNLQQWLGTEQACDLCGTINASLQHTLSGCKTALSQGRYGWRHGQVLRKLAEVVERKRQEASAGRQPGSQQRTHFLREGEKGDTVRRRPASTLLLPGVEWRMEVDLGRQLHFPGEICSTTLRPDVVLWARTERSALLVELTVPWEEGMEGAHERKRAKYSDLVAECRESGWSTRLFPVEVGTRGFVGSSMTRLLKELGLRGKELHKATRELSEEAEKASFWLWLRRRDKAWGASNS

SEQ ID NO: 4847 - protein, 766 aa, Clupea harengus
MKTAWTKQTIPSQWQRAVAVFIPKEQNSKTIEQFRSIALLNVEGKIFFSVMARRMTSYLMENGYIDTSCQKAGIPGFPGCVEHATMIWEQIQIAKREKKDLHVVWLDLANAYGSVPHNLIAFALDFFYIPQSIRAMVMSYFQDLHMCFMLPNSTTIWQQLEVGIAMGCSISPILFITAFEVILIGARQVVGGARLPTGRKLPPLRSYMDDITCLLQTAPCTSRLMKRLDELIIWARMKFKAKKSRSLSLRKGVLNDRVTFIIGGENIPRIADQPIRSLGRQYTASLSDKEIGKTTLQQLSAGLAKIDASQLPGKYKVWCFNFTLYPRVMWPLKLCEVTSSAVSKMDAKTSSFIRKWLGLPRGHSSASLYGKNTLQLPLKSITIGYRQEKARLVMELRESTDETVRDMEARVLTGRKWRAEEEVQKAVGRLQHQEMVGRVQTGRAGLGWGDPPILWSRASRKERKDLVVSEVTKMAEEEYRVKAVAQGQQGRWTTWEGVAGRVVSWADFWKLPQARLSFLIRATYDTLPSPRNLQQWLGTEQACDLCGTINASLQHTLSGCKTALSQGRYGWRHDQVLRKLAEVVERKRQEASAGRQPGSQQRTHFLREGEKGDTVRRRPASTLLLPGVEWRMEVDLGRQLHFPGEICSTTLRPDVVLWARTERSALLVELTVPWEEGMEGAHERKRAKYSDLVAECRESGWSTRLFPVEVGTRGFVGSSMTRLLKELGLRGKELHKATRELSEEAEKASFWLWLRRRDKAWGASNS

SEQ ID NO: 4848 - protein, 1127 aa, Clupea harengus
MEEGPTRTDTPVTNARTTTNDVRTLRKCGCGWEKVTTLRGLHIHMGKMKCAGRSQKQTCAAQAGQTSGIQGRVKNHSAIGPNVAEAGERETRDADEPQEVTPEPPPSNPRTESSQKAKSLNEPRRKIKWPKASETVEWKRLDESLSDLLQKALRGTVEAKLNLFGEILYEECSGRYGKVTGRKAAEKSKGRREKEIDDLVAGRRQLRRRWRKAEESEREGLKALWDDIRRRLANLRRAERIRRRRKRKEKERANFFKNPFRFARGLLEEKTSGSLEISKEDLEDHIHGQYSDPARNEPLGPPGYVPKPGEPSVLFDASPPKLCEIKRVVWRARSASAPGPNGIPYKLYKNCPSVLKLLWTLMKTAWTKQTIPSQWQRAVAVFIPKEQNSKTIEQFRSIALLNVEGKIFFSVMARRMTSYLMENGYIDTSCQKAGIPGFPGCVEHATMIWEQIQIAKREKKDLHVVWLDLANAYGSVPHNLIAFALDFFYIPQSIRAMVMSYFQDLHMCFMLPNSTTIWQQLEVGIAMGCSISPILFITAFEVILIGARQVVGGARLPTGRKLPPLRSYMDDITCLLQTAPCTSRLMKRLDELIIWARMKFKAKKSRSLSLRKGVLNDRVTFIIGGENIPRIADQPIRSLGRQYTASLSDKEIGKTTLQQLSAGLAKIDASQLPGKYKVWCFNFTLYPRVMWPLKLCEVTSSAVSKMDAKTSSFIRKWLGLPRGHSSASLYGKNTLQLPLKSITIGYRQEKARLVMELRESTDETVRDMEARVLTGRKWRAEEEVQKAVGRLQHQEMVGRVQTGRAGLGWGDPPILWSRASRKERKDLVVSEVTKMAEEEYRVKAVAQGQQGRWTTWEGVAGRVVSWADFWKLPQARLSFLIRATYDTLPSPRNLQQWLGTEQACDLCGTINASLQHTLSGCKTALSQGRYGWRHDQVLRKLAEVVERKRQEASAGRQPGSQQRTHFLREGEKGDTVRRRPASTLLLPGVEWRMEVDLGRQLHFPGEICSTTLRPDVVLWARTERSALLVELTVPWEEGMEGAHERKRAKYSDLVAECRESGWSTRLFPVEVGTRGFVGSSMTRLLKELGLRGKELHKATRELSEEAEKASFWLWLRRRDKAWGASNS

SEQ ID NO: 4849 - protein, 1047 aa, Pimephales promelas
MLHEVGQEERDGDEPQEANPGAPPSNPRTESSQRARNLKNPLRRNKIKWPKANELAEWRKLDEHLSGLLKKALCGSVVAKLNLFGEILYEECSNRYGEVTIREASTRPKGRREKEIDDLVTSRRQLRKRWRKAEESEKVGLKALWDEIRRRLANLRRAERIRRRRKRKEKERSSFFRNPFRHARGLLEEKTSGTLDISKEELQEYIRTQYSDPARNDPLGSPGYVPRPSEPSALFDASPLKLSEVRQVIQRARSASAPGPNGISYKLYKNCPGVLKLLWTLMRITWIKQTIPSEWQRAVAVSIPKQQNAKTIEQFRSIALLNVEGKIFFSVLARRMTTYLTENNYINTSCQKAGIPGFPGCVEHASMIWEQIQTAKREKRDLHVIWLDLANAYGSVPHLLIAYALEFFYIPDNIRSMITNYFQDMHMCFALKKVTSGWQQLEVGIAMGCSISPILFVAAFEVILIGARQVVGGVRLPAGQRLPPLRSYMDDITCLLRTAPCTSRLLKRLDELITWARMKFKPQKSRSLSLRKGERNDRVTFTISGEDIPRIVDQPIRSLGRLYTSGLSDKNMGKIILRQLSEGLSKIDASQLPGKYKVWCYHFTLYPRVMWPLKLCEVTSSAVSQMEAKANTFIRKWLGLPRCFSAAGLYGWNSLQLPLKSITLGYRQEKARLVMELMDSSDRAVADANVRVETGRKWRAKEEVQKVMGRLQHREVVGMVQTGRAGLGWSEPPILWSKASRKERKELVVAEVTRIEQEELRVRSVAQGQQGRWTTWEGVASRAISWAEFWKLPQARLSFLIRATYDTLPSPKNLHQWLEIEQSCDLCGTINASLQHVLSGCKTALTQGRFRWRHDQVLRKLAEVLEKSRQEANNKSPSESRCRIRFLRQGEPATHTSKRPPSRLLTPGAEWKMEVDLERQLQFPQEICSTTLRPDVVLWAAAVKSVILIELTVPWEEGLEAAYERKKAKYADLVAECRESGWGARLYPVEVGARGFVGRSTSHLLKDLGLRGATLSRSTKELSEEAEKASHWLWLKRRDKAWGVTSN

SEQ ID NO: 4850 - protein, 1129 aa, Pimephales promelas
MKEGPTRTDHTVTNARTSAKEKILRKCGCGWEKTTTLRGLHIHMGKKKCAGGSLMQPCTAPVRAGQTNGIQGRVDNHSANGPNVAEVGQEERDGDEPQEANPGAPPSNPRTESSQRARNLKNPLRRNKIKWPKANELAEWRKLDEHLSGLLKKALCGSVVAKLNLFGEILYEECSNRYGEVTIREASTRPKGRREKEIDDLVTSRRQLRKRWRKAEESEKVGLKALWDEIRRRLANLRRAERIRRRRKRKEKERSSFFRNPFRHARGLLEEKTSGTLDISKEELQEYIRTQYSDPARNDPLGSPGYVPRPSEPSALFDASPLKLSEVRQVIQRARSASAPGPNGISYKLYKNCPGVLKLLWTLMRITWIKQTIPSEWQRAVAVSIPKQQNAKTIEQFRSIALLNVEGKIFFSVLARRMTTYLTENNYINTSCQKAGIPGFPGCVEHASMIWEQIQTAKREKRDLHVIWLDLANAYGSVPHLLIAYALEFFYIPDNIRSMITNYFQDMHMCFALKKVTSGWQQLEVGIAMGCSISPILFVAAFEVILIGARQVVGGVRLPAGQRLPPLRSYMDDITCLLRTAPCTSRLLKRLDELITWARMKFKPQKSRSLSLRKGERNDRVTFTISGEDIPRIVDQPIRSLGRLYTSGLSDKNMGKIILRQLSEGLSKIDASQLPGKYKVWCYHFTLYPRVMWPLKLCEVTSSAVSQMEAKANTFIRKWLGLPRCFSAAGLYGWNSLQLPLKSITLGYRQEKARLVMELMDSSDRAVADANVRVETGRKWRAKEEVQKVMGRLQHREVVGMVQTGRAGLGWSEPPILWSKASRKERKELVVAEVTRIEQEELRVRSVAQGQQGRWTTWEGVASRAISWAEFWKLPQARLSFLIRATYDTLPSPKNLHQWLEIEQSCDLCGTINASLQHVLSGCKTALTQGRFRWRHDQVLRKLAEVLEKSRQEANNKSPSESRCRIRFLRQGEPATHTSKRPPSRLLTPGAEWKMEVDLERQLQFPQEICSTTLRPDVVLWAAAVKSVILIELTVPWEEGLEAAYERKKAKYADLVAECRESGWGARLYPVEVGARGFVGRSTSHLLKDLGLRGATLSRSTKELSEEAEKASHWLWLKRRDKAWGVTSN

SEQ ID NO: 4851 - protein, 1105 aa, Oxygymnocypris stewartii
MCFFFSFQLLHQRFSIPVIAYPRSAHFVCFSYRFKLLAGQTNGIQGRVDNHSVNGPNVAEAGQEERKEEERDVDEPQEVNSVVPLRTESSQKARNLKNPLRRNKIKWPKANEADEWRKLDEHLSGLLQKALRGSVVAKLNLFGEILYEECRNRYGEVTIREAVVRSKGRREKEIDDLVASRRQLRKRWRKAEESEKEGLKALWEEIRRRLANLRRAERIRRRRKRKEKERSSFFRNPFRYARGLLEEKTSGILDVSKEELQEYIRTQYSDPVRNEPLDSPGYVPRPSEPSVLFNVSPPKFSEVMQVIQRARSASAPGPNGIPYKLYKCCPGVLKLLWTLKRITWTKQTIPSEWQRAVAVPIPKQQDAKTIEQFRSIALLNVEGKIFFSVMARRMTTYITENNYIDTSCQKAGIPGFPGCVEHASMIWEQIQTTKRERKDLHVIWLDLANAYGSVPHLLIAYALEFFYIPDNIRTMIMNYFQDMHMCFALKKVTTGWQQLEVGIAMGCSISPILFVAAFEVILIGARQVVGGVRLPAGQRLPPLRSYMDDITCLLRTAPCTSRLLKRLDELITWARMKFKPQKSRSLSLRKGERNDRVTFTISGEDIPRIVDQPIRSLGRLYTSGLSDKDMGKIILRQLSEGLSKIDASQLPGKYKVWCYHFTLYPRVMWPLKLCEVTPSAVSRMEVKANCFIRKWLGLPRCFSAAGLYGWNSLQLPLKSITLGYKQEKARLVMELRDSSDRAVADVNSRVETGRKWRAKEEVQKVIGRLQHKQIVGMVQTGRAGLGWSEPPILWSKASRKERKDLVVAEVTRIEQEELRVRSLAQGQQGRWTTWEGVANRAISWAEIWKLPQARLSFLIRATYDTLPSPKNLHQWLGTEQSCDLCGTINASLQHVLSGCKTALTQGRLRWRHDQVLRKLAEVLEKCRQEANNQSPIESRCRIHFLRQGEPATHISKRPPTKLLTSGAVWKMEVDLGRQLQFPQEICSTTLRPDVVLWSAAVKSVVLIELTVPWEEGLEAAYERKKAKYADLVVECRESGWNVRLYPVEVGARGFVGRSASCMLKDLGLRGATLSRSTKELSEEAEKASHWLWLKRRDKAWGVTSN

SEQ ID NO: 4852 - protein, 1127 aa, Clupea harengus
MEEGPTRTDTPVTNARTTTNDVRTLRKCGCGWEKVTTLRGLHIHMGKMKCAGRSQKQTCAAQAGQTSGIQGRVKNHSAIGPNVAEAGERETRDADDPQEVTPEPPPSNPRTESSQKAKSLNEPRRKIKWPKASETVEWKRLDESLSDLLQKALRGTVEAKLNLFGEILYEECSGRYGKVTGRKAAEKSKGRREKEIDDLVAGRRQLRRRWRKAEESEREGLKALWDDIRRRLANLRRAERIRRRRKRKEKERANFFKNPFRFARGLLEEKTSGSLEISKEDLEDHIHGQYSDPARNEPLGPPGYVPKPGEPSVLFDASPPKLCEIKRVVWRARSASAPGPNGIPYKLYKNCPSVLKLLWTLMKTAWTKQTIPSQWQRAVAVFIPKEQNSKTIEQFRSIALLNVEGKIFFSVMARRMTSYLMENGYIDTSCQKAGIPGFPGCVEHATMIWEQIQIAKREKKDLHVVWLDLANAYGSVPHNLIAFALDFFYIPQSIRAMVMSYFQDLHMCFMLPNSTTIWQQLEVGIAMGCSISPILFITAFEVILIGARQVVGGARLPTGRKLPPLRSYMDDITCLLQTAPCTSRLMKRLDELIIWARMKFKAKKSRSLSLRKGVLNDRVTFIIGGENIPRIADQPIRSLGRQYTASLSDKEIGKTTLQQLSAGLAKIDSSQLPGKYKVWCFNFTLYPRVMWPLKLCEVTSSAVSKMDAKTSSFIRKWLGLPRGHSSASLYGKNTLQLPLKSITIGYRQEKARLVMELRESTDETVRDMEARVLTGRKWRAEEEVQKAVGRLQHQEMVGRVQTGRAGLGWGDPPILWSRASRKERKDLVVSEVTKMAEEEYRVKAVAQGQQGRWTTWEGVAGRVVSWADFWKLPQARLSFLIRATYDTLPSPRNLQQWLGTEQACDLCGTINASLQHTLSGCKTALSQGRYGWRHDQVLRKLAEVVERKRQEASAGRQPGSQQRTHFLREGEKGDTVRRRPASTLLLPGVEWRMEVDLGRQLHFPGEICSTTLRPDVVLWARTERSALLVELTVPWEEGMEGAHERKRAKYSDLVAECRESGWSTRLFPVEVGTRGFVGSSMTRLLKELGLRGKELHKATRELSEEAEKASFWLWLRRRDKAWGASNS

SEQ ID NO: 4853 - protein, 1069 aa, Clupea harengus
MCERDRERERSSWSTNSQCSLRPNVAEAGERETRDADDPQEVTPEPPPSNPRTDSSQKAKSLNEPRRKIKWPKASETVKWKRLDESLSDLLQKALRGTVEAKLNLFGEILYEECSGRYGKVTGRKAAEKSKGRREKEIDDLVAGRRQLRRRWRKAEESEREGLKALWDDIRRRLANLRRAERIRRRRKRKEKERANFFKNPFRFARGLLEEKTSGSLEISKEDLEDHIHGQYSDPARNEPLGPPGYVPKPGEPSVLFDASPPKLCEIKRVVWRARSASAPGPNGIPYKLYKNCPSVLKLLWTLMKTAWTKQTIPSQWQRAVAVFIPKEQNSKTIKQFRSIALLNVEGKIFFSVMARRMTSYLMENGYIDTSCQKAGIPGFPGCVEHATMIWEQIQIAKREKKDLHVVWLDLANAYGSVPHNLIAFALDFFYIPQSIRAMVMSYFQDLHMCFMLPNSTTIWQQLEVGIAMGCSISPILFITAFEVILIGARQVVGGARLPTGRKLPPLRSYMDDITCLLQTAPCTSRLMKRLDELIIWARMKFKAKKSRSLSLWKGVLNDRVTFIIGGENIPRIADQPIRSLGRQYTASLSDKEIGKTTLQQLSAGLAKIDSSQLPGKYKVWCFNFTLYPRVMWPLKLCEVTSSAVSKMDAKTSSFIRKWLGLPRGHSSASLYGKNTLQLPLKSITIGYRQEKARLVMELRESTDETVRDMEARVVTGRKWRAEEEVQKAVGRLQHQEMVGRVQTGRAGLGWGDPHILWSRASRKEMKDLVVSEVTNMAEEEYRVKAVALGQQGRWTTWEGVAGRVVSWADFWKLPQARLSFLIRATYDTLPSPRNLQQWLGTEQACDLCGTINASLQHTLSGCKTALSQGRYGWRHDQVLRKLAEVVERKRQEASAGRQPGSQQRTHFLREGEKGDTVRRRPASTLLLPGVEWRMEVDLGRQLHFPGEICSTTLRPDVVLWARTERSALLVELTVPWEEGMEGAHERKRAKYSDLVAECRESGWSTRLFPVEVGTRGFVGSSMTRLLKELGLRGKELHKATRELSEEAEKASFWFWLRRRDKAWGASNS

SEQ ID NO: 4854 - protein, 955 aa, Pimephales promelas
MGSKAGLLKKALCGSVVAKLNLFGEILYEECSNRYGEVTIREAATRSKGRREKEIDDLVTSRRQLRKRWRKAEESEKVGLKALWDEIRRRLANLRRAERIRRRRRRKEKERSSFFRNPFRHARGLLEEKTSGTLDISKEELQEYIRTQYSDPARNDPLGSPGYVPRPSEPSALFDASPLKLSEVRQVIQRARSASAPGPNGISYKLYKNCPGVLKLLWTLMRITWMKQTIPSEWQRAVAVSIPKQQNAKTIEQFRSIALLNVEGKIFFSVMARRMTTYLTENNYINTSCQKAGIPGFPGCVEHASMIWEQIQTAKREKKDLHVIWLDLANAYGSVPHLLIAYALEFFYIPDNIRSMITNYFQDMHMCFALKKVTSGWQQLEVGIAMGCSISPILFVAAFEVILIGARQVVAGVRLPAGQRLPPLRSYMDDITCLLRTAPCTSRLLKRLDELIAWARMKFKPQKSRSLSLRKGERNDRVTFTISGEDIPRIVDQPIRSLGRLYTSALSDKDMGKIILWQLSEGLSKIDESQLPGKYKVWCYHFTLYPRVMWPLKLCEVTSSAVGQMEAKASTFIRKWLGLPRCFSAAGLYGWNSLQLPLKSITLGYRQEKARLVMELMDSSDRAVADANVRVETGRKWRAKEEVQKVMGRLQHREVVAMVQTGRAGLGWSEPPILWSKASRKERKELVVAEVTRIEQEELRVRSVAQGQQGRWTTWEGVASRAISWAEFWKLPQARLSFLIRATYDTLPSPKNLHQWLGIEQSCDLCGTINASLQHVLSGYKTALTQGRFRWRHDQVLRKLAEVLEKSRQETNNKSPSESRCRIRLLRQGEPATHTSKRPPSRLLTPGAEWKMEVDLERQLQFPQEICSTTLRPDVVLWAAAVKSVILIELTVPWEEGIFTLDMNVCQHIYSLLLLFIYFYSYGIQIQIYCMTCHHNYRVFFFFNVFFFFVLDCVS

SEQ ID NO: 4855 - protein, 1084 aa, Clupea harengus
MEEGPTRTDTPVTNARTTTNDVRTLRKCGCGWEKVTTLRGLHIHMGKMKCAGRSQKQTCAAQAGQTSGIQGRVKNHSAIGPNVAEAGEKETRDVDDPQEVTPEPPPSNPRTESSQKAKSLNEPRRKIKWPKASETVEWKRLDESLSDLLQKALRGTVEAKLNLFGEILYEECSGRYGKVTGRKAAEKSKGRREKEIDDLVAGRRQLRRRWRKAEESEREGLKALWDDIRRRLANLRRAERIRRRRKRKEKERANFFKNPFRFARGLLEEKTSGSLEISKEDLEDHIHGQYSDPARNEPLGPPGYVPKPGEPSVLFDASPPKLCEIKRVVWRARSASAPGPNGIPYKLYKNCPSVLKLLWTLMKTAWTKQTIPSQWQRAVAVFIPKEQNSKTIEQFRSIALLNVEGKIFFSVMARRMTSYLMENGYIDTSCQKAGIPGFPGCVEHATMIWEQIQIAKREKKDLHVVWLDLANAYGSVPHNLIAFALDFFYIPQSIRAMVMSYFQDLHMCFMLPNSTTIWQQLEVGIAMGCSISPILFITAFEVILIGARQVVGGARLPTGRKLPPLRSYMDDITCLLQTAPCTSRLMKRLDELITWARMKFKAKKSRSLSLRKGVLNDRVTFIIGGENIPRIADQPIRSLGRQYTASLSDKEIGKTTLQQLSAGLAKIDSSQLPGKYKVWCFNFTLYPRVMWPLKLCEVTSSAVSKMDAKTSSFIRKWLGLPRGHSSASLYGKNTLQLPLKSITIGYRQEKARLVMELRESTDETVRDMEARVLTGRKWRAEEEVQKAVGRLQHQEMVGRVQTGRAGLGWGDPPILWSRASRKERKDLVVSEVTKMAEEEYRVKAVAQGQQGRWTTWEGVAGRVVSWADFWKLPQARLSFLIRATYDTLPSPRNLQQWLGTEQACDLCGTINASLQHTLSGCKTALSQGRYGWRHDQVLRKLAEVVERKRQEASAGRQPGSQQRTHFLREGEKGDTVRRRPASTLLLPGVEWRMEVDLGRQLHFPGEICSTTLRPDVVLWARTERSALLVELTVPWEEGMEGAHERKRAKYLVAECRESGWSTRLQWRLARGGLWEAQRLAYLKS

SEQ ID NO: 4856 - protein, 1154 aa, Sinocyclocheilus maitianheensis
MLIICEETKKQRKQPEGPPRGGMKEGPTRTDHTVTDVRISAKEKIPRRCGCGWEKTTTLRGLHIHMGKKKCSGGSLMQPCTALVWAGQTNGIQGRVDNHSANGPNVAEAEKEERKEEEERDVDEPQEVNSVAPPRTEFSQRARNLKNPLRRNKIKWPKANEAEEWRKLDEYLSGLLQKALCGSVVAKLNMFGEILYEECSNRYGEVTIREPLIRSKGRREKEIDDLVVSRRQLRRRWRKAEESEKEGLKALWDEIRRRLANLRRVERIRRRRKRKEKERSSFFRNPFRYARGLLEEKTSGILDVSKEELQEYIRTQYSDPARNKPLDSPGYVPRPSEPSALFDASPPKFSEIRQVIQRARSASAPGPNGIPYKLYKSCPGVLKLLWTLMRITWTKQTIPSEWQRAVAVSIPKQQNAKTIEQFRSIALLNVEGKIFFSVMARRMTTYLTENNYINTSCQKAGIPGFPGCVEHASMIWEQIQTTKREKKDLHVIWLDLANAYGSVPHLLIAYALEFFYIPDNIRTMIMNYYQDMHMCFALKKVITGWQQLEVGIAMGCSISPILFVAAFEVILIGARQVVGGVRLPAGQRLPPLRSYMDDITCLLRTAPCTTRLLKRLDELITWARMKFKPQKSRSLSLRKGERNDRVTFTISGEDIPRIVDQPIRSLGRLYTSGLSDKDMGKFILRQLSEGLSKINASQLPGKYKVWCYHFTLYPRVMWPLKLCEVTSSAVSRMEAKANSFIRKWLGLPRCFSAAGLYGWNSLQLPLKSITLGYRQEKARLVMELRDSSDRAVADANARVETGRKWRAKEEVQKVMGRLQHQQIVGMVQTGRAGLGWSEPPILWSKASRKERKDLVVAEVTRIEQEELRVRSVAQGQQGRWTTWEGVASRAISWAELWKLPQARLSFLIRATYDTLPSPKNLHQWLGTEQSCDLCGTINASLQHVLSGCKTALTQGRLRWRHDQVLRKLAEVLEKSRQEANNQSPLESRCKIHFLRQGEPAMHTSKRPPAKLLTPGAGWKMEVDLGRQLQFPQEICSTTLRPDVVLWSAAVKSVILIELTVPWEERLEAAYERKKAKYADLVAECREGGWSVRLYPVEVGARGFVGRSISCLLKDLGLRGATLSRSTKELSEEAEKASHWLWLKRRDKAWGVTSN

SEQ ID NO: 4857 - protein, 1124 aa, Oxygymnocypris stewartii
MKEGPTRTDHTVTDARISVEEKIPRKCGCGWEKTTTLRGLHIHMGKKKCGGGRLMQTCTAPVRAGQTNGIQGRVDNHSVNGPNVAEAGQEERKEEERDVDEPQEVNSVVPLRTESSQKARNLKNPLRRNKIKWPKANEADEWRKLDEHLSGLLQKALRESVVAKLNLFGEILYEECRNRYGDVTIREAVVRSKGRREKEIDDLVASRRQLRKHWRKAEESEKEGLKALWDEIRRRLANLRRAERIRRRRKRKEKERSSFFRNPFRYARGLLEEKTSGILDVSKEELQEYIRTQYSDPVRNGPLDSPGYVPRPSEPSVLFNVSPPKFSEVRQVIQRARSASAPGPNGIPYKLYKSCPGVLKLLWTLMRITWTKQTIPSEWQRAVAVPIPKQQDAKTIEQFRSIALLNVEGKIFFSVMARRMTTYITENNYIDTSCQKAGIPGFPGCVEHASMIWEQIQTTKRERKDLHVIWLDLANAYGSVPHLLIAYALEFFYIPDNIRTMIMNYFQDMHMCFALKKVTTGWQQLEVGIAMGCSISPILFVAAFEVILIGARQVVGGVRLPAGQRLPPLRSYMDDITCLLRTAPCTSRLLKRLDELITWARMKFKPQKSRSLSLRKGERNDRVTFTISGEDIPRIVDQPIRSLGRLYTSGLSDKDMGKIILRQLSEGLSKIDASQLPGKYKVWCYHFTLYPRVMWPLKLCEVTSSAVSRMEVKANCFIRKWLGLPRCFSAAGLYGWNSLQLPLKSITLGYKQEKARLVMELRDSSDRAVADVNSRVETGRKWRAKEEVQKVIGRLQHKQIVGMVQTGRAGLGWSEPPILWSKASRKERKDLVVAEVTRIEQEELRVRSLAQGQQGRWTTWEGVANRAISWAEIWKLPQARLSFLIRATYDTLPSPKNLHQWLGTEQSCDLCGTINASLQHVLSGCKTALTQGRLRWRHDQVLRKLAEVLEKCRQEANNQSPIESRCRIHFLRQGEPATHISKRPPTKLLTSGAVWKMEVDLGRQLQFPQEICSTTLRPDVVLWSAAVKSVVLIELTVPWEEGLEAAYERKKAKYADLVAECRESGWNVRLYPVEVGARGFVGRSASCMLKDLGLRGATLSRSTKELSEEAEKASHWLWLKRSNI

SEQ ID NO: 4858 - protein, 1089 aa, Sinocyclocheilus maitianheensis
MGKKKCSGGSLMQPCTALVWAGQTNGIQGRVDNHSANGPNVAEAEKEERKEEEERDVDEPQEVNSVAPPRTEFSQRARNLKNPLRRNKIKWPKANEAEEWRKLDEYLSGLLQKALCGSVVAKLNMFGEILYEECSNRYGEVTIREPLIRSKGRREKEIDDLVVSRRQLRRRWRKAEESEKEGLKALWDEIRRRLANLRRVERIRRRRKRKEKERSSFFRNPFRYARGLLEEKTSGILDVSKEELQEYIRTQYSDPARNKPLDSPGYVPRPSEPSALFDASPPKFSEIRQVIQRARSASAPGPNGIPYKLYKSCPGVLKLLWTLMRITWTKQTIPSEWQRAVAVSIPKQQNAKTIEQFRSIALLNVEGKIFFSVMARRMTTYLTENNYINTSCQKAGIPGFPGCVEHASMIWEQIQTTKREKKDLHVIWLDLANAYGSVPHLLIAYALEFFYIPDNIRTMIMNYYQDMHMCFALKKVITGWQQLEVGIAMGCSISPILFVAAFEVILIGARQVVGGVRLPAGQRLPPLRSYMDDITCLLRTAPCTTRLLKRLDELITWARMKFKPQKSRSLSLRKGERNDRVTFTISGEDIPRIVDQPIRSLGRLYTSGLSDKDMGKFILRQLSEGLSKINASQLPGKYKVWCYHFTLYPRVMWPLKLCEVTSSAVSRMEAKANSFIRKWLGLPRCFSAAGLYGWNSLQLPLKSITLGYRQEKARLVMELRDSSDRAVADANARVETGRKWRAKEEVQKVMGRLQHQQIVGMVQTGRAGLGWSEPPILWSKASRKERKDLVVAEVTRIEQEELRVRSVAQGQQGRWTTWEGVASRAISWAELWKLPQARLSFLIRATYDTLPSPKNLHQWLGTEQSCDLCGTINASLQHVLSGCKTALTQGRLRWRHDQVLRKLAEVLEKSRQEANNQSPLESRCKIHFLRQGEPAMHTSKRPPAKLLTPGAGWKMEVDLGRQLQFPQEICSTTLRPDVVLWSAAVKSVILIELTVPWEERLEAAYERKKAKYADLVAECREGGWSVRLYPVEVGARGFVGRSISCLLKDLGLRGATLSRSTKELSEEAEKASHWLWLKRRDKAWGVTSN

SEQ ID NO: 4859 - protein, 1129 aa, Pimephales promelas
MKEGPTRTDHTVTNARTSAKEKILRKCGCGWEKTTTLRGLHIHMGKKKCAGGSLMQPCTAPVRAGQTNGIQGRVDNHSANGPNVAEVGQEERDGDEPQEANPGAPPSNPRTESSQRARNLKNPLRRNKIKWPKANELAEWRKLDEHLSGLLKKALCGSVVAKLNLFGEILYEECSNRYGEVTIREASTRPKGRREKEIDDLVTSRRQLRKRWRKAEESEKVGLKALWDEIRRRLANLRRAERIRRRRKRKEKERSSFFRNPFRHARGLLEEKTSGTLDISKEELQEYIRTQYSDPARNDPLGSPGYVPRPSEPSALFDASPLKLSEVRQVIQRVRSASAPGPNGISYKLYKNCPGVLKLLWTLMRITWIKQTIPSEWQRAVAVSIPKQQNAKTIEQFRSIALLNVEGKIFFSVLARRMTTYLTENNYINTSCQKAGIPGFPGCVEHASMIWEQIQTAKREKRDLHVIWLDLANAYGSVPHLLIAYALEFFYIPDNIRSMITNYFQDMHMCFALKKVTSGWQQLEVGIAMGCSISPILFVAAFEVILIGARQVVGGVRLPAGQRLPPLRSYMDDITCLLRTAPCTSRLLKRLDELITWARMKFKPQKSRSLSLRKGERNDRVTFTISGEDIPRIVDQPIRSLGRLYTSGLSDKNMGKIILRQLSEGLSKIDASQLPGKYKVWCYHFTLYPRVMWPLKLCEVTSSAVSQMEAKANTFIRKWLGLPRCFSAAGLYGWNSLQLPLKSITLGYRQEKARLVMELMDSSDRAVADANVRVETGRKWRAKEEVQKVMGRLQHREVVGMVQTGRAGLGWSEPPILWSKASRKERKELVVAEVTRIEQEELRVRSVAQGQQGRWTTWEGVASRAISWAEFWKLPQARLSFLIRATYDTLPSPKNLHQWLEIEQSCDLCGTINASLQHVLSGCKTALTQGRFRWRHDQVLRKLAEVLEKSRQEANNKSPSESRCRIRFLRQGEPATHTSKRPPSRLLTPGAEWKMEVDLERQLQFPQEICSTTLRPDVVLWAAAVKSVILIELTVPWEEGLEAAYERKKAKYADLVAECRESGWGARLYPVEVGARGFVGRSTSHLLKDLGLRGATLSRSTKELSEEAEKASHWLWLKRRDKAWGVTSN

SEQ ID NO: 4860 - protein, 1132 aa, Sinocyclocheilus maitianheensis
MKEGPTRTDHTVTDVRISAKEKIPRRCGCGWEKTTTLRGLHIHMGKKKCSGGSLMQPCTALVWAGQTNGIQGRVDNHSANGPNVAEAEKEERKEEEERDVDEPQEVNSVAPPRTEFSQRARNLKNPLRRNKIKWPKANEAEEWRKLDEYLSGLLQKALCGSVVAKLNMFGEILYEECSNRYGEVTIREPLIRSKGRREKEIDDLVVSRRQLRRRWRKAEESEKEGLKALWDEIRRRLANLRRVERIRRRRKRKEKERSSFFRNPFRYARGLLEEKTSGILDVSKEELQEYIRTQYSDPARNKPLDSPGYVPRPSEPSALFDASPPKFSEIRQVIQRARSASAPGPNGIPYKLYKSCPGVLKLLWTLMRITWTKQTIPSEWQRAVAVSIPKQQNAKTIEQFRSIALLNVEGKIFFSVMARRMTTYLTENNYINTSCQKAGIPGFPGCVEHASMIWEQIQTTKREKKDLHVIWLDLANAYGSVPHLLIAYALEFFYIPDNIRTMIMNYYQDMHMCFALKKVITGWQQLEVGIAMGCSISPILFVAAFEVILIGARQVVGGVRLPAGQRLPPLRSYMDDITCLLRTAPCTTRLLKRLDELITWARMKFKPQKSRSLSLRKGERNDRVTFTISGEDIPRIVDQPIRSLGRLYTSGLSDKDMGKFILRQLSEGLSKINASQLPGKYKVWCYHFTLYPRVMWPLKLCEVTSSAVSRMEAKANSFIRKWLGLPRCFSAAGLYGWNSLQLPLKSITLGYRQEKARLVMELRDSSDRAVADANARVETGRKWRAKEEVQKVMGRLQHQQIVGMVQTGRAGLGWSEPPILWSKASRKERKDLVVAEVTRIEQEELRVRSVAQGQQGRWTTWEGVASRAISWAELWKLPQARLSFLIRATYDTLPSPKNLHQWLGTEQSCDLCGTINASLQHVLSGCKTALTQGRLRWRHDQVLRKLAEVLEKSRQEANNQSPLESRCKIHFLRQGEPAMHTSKRPPAKLLTPGAGWKMEVDLGRQLQFPQEICSTTLRPDVVLWSAAVKSVILIELTVPWEERLEAAYERKKAKYADLVAECREGGWSVRLYPVEVGARGFVGRSISCLLKDLGLRGATLSRSTKELSEEAEKASHWLWLKRRDKAWGVTSN

SEQ ID NO: 4861 - protein, 1116 aa, Sinocyclocheilus maitianheensis
MKEGPTRTDHTVTDVRISAKEKIPRRCGCGWEKTTTLRGLHIHMGKKKCSGGSLMQPCTALVWAGQTNGIQGRVDNHSANGPNVAEAEKEERKEEEERDVDEPQEVNSVAPPRTEFSQRARNLKNPLRRNKIKWPKANEAEEWRKLDEYLSGLLQKALCGSVVAKLNMFGEILYEECSNRYGEVTIREPLIRSKGRREKEIDDLVVSRRQLRRRWRKAEESEKEGLKALWDEIRRRLANLRRVERIRRRRKRKEKERSSFFRNPFRYARGLLEEKTSGILDVSKEELQEYIRTQYSDPARNKPLDSPGYVPRPSEPSALFDASPPKFSEIRQVIQRARSASAPGPNGIPYKLYKSCPGVLKLLWTLMRITWTKQTIPSEWQRAVAVSIPKQQNAKTIEQFRSIALLNVEGKIFFSVMARRMTTYLTENNYINTSCQKAGIPGFPGCVEHASMIWEQIQTTKREKKDLHVIWLDLANAYGSVPHLLIAYALEFFYIPDNIRTMIMNYYQDMHMCFALKKVITGWQQLEVGIAMGCSISPILFVAAFEVILIGARQVVGGVRLPAGQRLPPLRSYMDDITCLLRTAPCTTRLLKRLDELITWARMKFKPQKSRSLSLRKGERNDRVTFTISGEDIPRIVDQPIRSLGRLYTSGLSDKDMGKFILRQLSEGLSKINASQLPGKYKVWCYHFTLYPRVMWPLKLCEVTSSAVSRMEAKANSFIRKWLGLPRCFSAAGLYGWNSLQLPLKSITLGYRQEKARLVMELRDSSDRAVADANARVETGRKWRAKEEVQKVMGRLQHQQIVGMVQTGRAGLGWSEPPILWSKASRKERKDLVVAEVTRIEQEELRVRSVAQGQQGRWTTWEGVASRAISWAELWKLPQARLSFLIRATYDTLPSPKNLHQWLGTEQSCDLCGTINASLQHVLSGCKTALTQGRLRWRHDQVLRKLAEVLEKSRQEANNQSPLESRCKIHFLRQGEPAMHTSKRPPAKLLTPGAGWKMEVDLGRQLQFPQEICSTTLRPDVVLWSAAVKSVILIELTVPWEERLEAAYERKKAKYADLVAECREGGWSVRLYPVEVGARGFVGRSISCLLKDLGLRGATLSRSTKELSEEAEKASH

SEQ ID NO: 4862 - protein, 1132 aa, Sinocyclocheilus maitianheensis
MKEGPTRTDHTVTDVRISAKEKIPRRCGCGWEKTTTLRGLHIHMGKKKCSGGSLMQPCTALVWAGQTNGIQGRVDNHSANGPNVAEAEQEERKEEEERDVDEPQEVNSVAPPRTEFSQRARNLKNPLRRNKIKWPKANEAEEWRKLDEYLSWLLQKALRGSVVAKLNMFGEILYEECSNRYGEVTIREALIRSKGRREKEIDDLVVSRRQLRRRWRKAEESEKEGLKALWDEIRRRLANLRRVERIRRRRKRKEKERSSFFRNPFRYARGLLEEKTSGILDVSKEELQEYIRTQYSDPARNKPLDSPGYVPRPSEPSALFDASPPKFSEIRQVIQRARSASAPGPNGIPYKLYKSCPGVLKLLWTLMRITWTKQTIPSEWQRAVAVSIPKQQNAKTIEQFRSIALLNVEGKIFFSVMARRMTTYLTENNYINTSCQKAGIPGFPGCVEHASMIWEQIQTTKREKKDLHVIWLDLANAYGSVPHLLIAYALEFFYIPDNIRTMIMNYYQDMHMCFALKKVITGWQQLEVGIAMGCSISPILFVAAFEVILIGARQVVGGVRLPAGQRLPPLRSYMDDITCLLRTAPCTTRLLKRLDELITWARMKFKPQKSRSLSLRKGERNDRVTFTISGEDIPRIVDQPIRSLGRLYTSGLSDKDMGKFILRQLSEGLSKINASQLPGKYKVWCYHFTLYPRVMWPLKLCEVTSSAVSRMEAKANSFIRKWLGLPRCFSAAGLYGWNSLQLPLKSITLGYRQEKARLVMELRDSSDRAVADANARVETGRKWRAKEEVQKVMGRLQHQQIVGMVQTGRAGLGWSEPPILWSKASRKERKDLVVAEVTRIEQEELRVRSVAQGQQGRWTTWEGVASRAISWAELWKLPQARLSFLIRATYDTLPSPKNLHQWLGTEQSCDLCGTINASLQHVLSGCKTALTQGRLRWRHDQVLRKLAEVLEKSRQEANNQSPLESRCKIHFLRQGEPAMHTSKRPPAKLLTPGAGWKMEVDLGRQLQFPQEICSTTLRPDVVLWSAAVKSVILIKLTVLWEERLEAAYARKKAKYADLVAECREGGWSVRLYPVEVGARGFVGRSISCLLKDLGLRGATLSRSTKELSEEAEKASHWLWLIRRDKAWGVTSN

SEQ ID NO: 4863 - protein, 1127 aa, Clupea harengus
MEEGPTRTDTPVTNARTTTNDVRTLRKCGCGWEKVTTLRGLHIHMGKMKCAGRSQKQTCAAQAGQTSGIQGRVKNHSAIGPNVAEAGEKETRDEDVPQEVTPEPPPSNPRTESSQKAKSLNEPRRKIKWPKASETVEWKRLDESLSDLLQKALRGTVEAKLNLFGEILYEECSGRYGKVTGRKAAEKSKGRREKEIDDLVAGRRQLRRRWRKAEESEGEGLKALWNDIRRRLANLRRAERIRQRRKRKEKERANFFKNPFRFARGLLEEKTSGSLEISKEDLEDHIHGQYSDPARNEPLGPPGYVPKPGEPSVLFDASPAKLCEIKRVVWRARSASAPGPNGIPYKLYKNCPSVLKLLWTLMKTAWTKQTIPSQWQRAVAVFIPKEQNSKTIKLFRSIALLNVEGKIFFSVMARRMTSYLMENGYIDTSCQKAGIPGFPGCVEHATMIWEQIQIAKREKKDLHVVWLDLAIAYGSVPHNLIAFALDFFYIPQSIRAMVMSYFQDLHMCFMLPNSTTIWQQLEVGIAMGCSISPILFITAFEVILIGARQVVGGARLPTGRKLPPLRSYMDDITCLLQTAPCTSRLMKRLDELITWARMKFKAKKSRSLSLRKGVLNDRVTFIIVGENIPRIADQPIRSLGRQYTASLSDKEIGKTTWQQLSAGLAKIDSSQLPGKYKVWCFNFTLYPRVMWPLKLCEVTSSAVSKMDAKTSSFIRKWLGLPRGHPSASLYGKNTLQLPLKSITIGYRQEKARLVMELRESTDETVRDMEARVLTGRKWRAEEEVQKAVGRLQHQEMVGRVQTGRAGLGWGDPPILWSRTSRKERKDLVVSEVTKMAEEEYRVKAVAQGQQGRWTTWEGVAGRVVSWADFWKLPQARLSFLIRATYDTLPSPRNLQQWLGTEQACDLCGTINASLQHTLSGCKTALSQGRYGWRHDQVLRKLTEVVERKRQEASAGRQPGSQQRTHFLREGEKGDTVRRRPASTLLLPGVEWRMEVDLGRQLHFPGEICSTTLRPDVVLWARTERSALLVELTVPWEEGMEGAHERKRAKYSDLVAECRESGWSTRLFPVEVGTRGFVGSSMTRLLKELGLRGKELHKANRELSEEAEKASFWLWLRRRDKAWGASNS

SEQ ID NO: 4864 - protein, 1247 aa, Callosobruchus maculatus
MNDGKGEAKTPDQKAAARIGVGRRLIDESQRDDSDCAILPCASSSVRLGSARIRDSRSYQISGPQISGGTETGRQSTEVLGRSTLGSLETPVLAATFLDPGSVPEDTPDKIVFKHPARRYECSLCARAGEALQSFISAKDAKEHVTTKHPGTNSYWECPTCDRTSTTTAGILNHSRVCPYRTNTLENTLVGFSCGSCSAKFPTQSGLSQHERHVHPIVRNQKRIATAAAPRERAIGGRTRAKIWTDEEEQRLRALNEVYREKYYINTLLMPHFPGKTSKQISDKRCLLGLTKPVKGQATSERARAIPRPLDVETEKLHMELTINKILRPQVNAPKSDEGEERKWRQCMLASATRTFAKHRQSLAKDAAIDSLAIRVDSIANELRNAEDLANASEPYKLELDTIVDELTAILAKGNSARCNNQSGNVVNARRRPRGNRDRRQRQQYATVQSLWAKDPKLLATLVAEDRLADIDRQRQPELPKGDQVKDLYDQLWGVVGTTSFPYDWEETVEARAGVIDINPIQVGIVESRYKRLKPRTAAGPDTVNKKDIRPTARILLTILYNVLLGIGFYPTAWKHNRTTLIPKDGKDLTVAANWRPITVSSILARLFSGVLDESLRRNVELNRAQKGFTRDDGAAQNVSLFRQALKSMKEGKGGTCSILDISKAFDTVPHDALVPALRRLGVAPYIADYVQNAYRDCKTVIPSNDDPVQIGLKRGVKQGDPLSPLLWNAVVDPLLTYLDPREDKGINLGGRKVSVLAFADDLILLSDTVEDAERDIKLVAEYFSALGMNLSIAKCSAFNIKPLHKTWAVANPYLNVDGQEVSFVEPDEALRYLGVSFTPWKGGISDNYNVKGFVSAANRVAGLAYLKPEQKLKLLFDYVYPRYRYGMVLNPPSKTVLAEADQQIRNVVRKFFHLPESTTSHLIYTRKREGGLGVPRMEVDIQFAVVKSVVKMRTSTDVIVKNIGKASLRAAEAEKAAKFLRVAMPTTIKEVDKLKQAAISREFDSWRMQPSQGDGIEEFKGRLSNEWLCADGYLSSGRMIDALRMRTNTYGNRTTLKRAGHAHLSPLCRVCEGRPESLSHIIGGCPALKPRVIKRHDEIGNLVIAEVSKKRRNAELFRESTIQATDGMLKPDLIVVDQERAQVVDFTVRYEGTGTLEEAHMEKAIKYSELRSPLQTIFGDRDFEVIPIVIGARGALPRATIRGLTQLGIYTKSLCKTLSMIALRSSIEMANDFLDGGVSLRRVAGV

SEQ ID NO: 4865 - protein, 2454 aa, Caenorhabditis becei
MYVSCGIEPTARRTNVFLGGRRPAPSPRPQLTCTNNATSPPRCTVLLRPNSLIVEMIRIPPWSLIGPFTRTKSCAATDAFLFPERGWSWEYSVPGQLISQKLVIWPKRCQVESVQDQLIGQKAVIWLKHKEDKECVLDHLISQKAVIWLKHNVNKERVLDLLISQEAVIRLKHNVNRWRSGGNCSFAVALLTPKVVSSDLNGDEFTRILVDFREKHTEIAWKKRKYARNCKIPKKICFFPNFVENPVKKCCFGSKVCIYVSFGVDNDDFRPEFAEIHDESAKNLKNPVCYRFSGGERREESASVSASPRPAHSLARAENQFRESNFAVFQVSGGNPEGKAENLGKKGRNQYDGSLENKIFRERAISGRKIAISPENVDFRSESSANRMESGFSEIKLYFVTDFPLFSKEFSGKTDRRRSAGEQRGGQRESLSLAHSLVAADFIDFSAHILCVALISEGISKNEERTPGKMSEIGRNYALESMGNKEKCRFQAKRAVSNGIGEFCRDFAGKVMETRGIVEISLEKHLESEISQILSVFSQEKAPKRPGVEECEKGRGLSAPPRVACSLGRREGCQKGSYDSAWISTVFQPEFCERSREEVSHYDDTQEKARRSAKKTLKPSVKRRKTSCSAESRVTPGCQHPCGSQSERFPGPGSSGIKVEGPFKRSEASRCCISRIGPTVVNLTMGCVVSEAHALAHRERPSVRAPMRGGGDEYGELSEERKKEFEELKRQMKTDKLIRIKVMSDPDANPIVCRLLCPFDKRSACPVPTCTLTSVVGIGAPDRKYMTKHIEDEHGKKVTWLYMCTICGLQTPESKWKGATRWMNSHLEQVHQTKAEARFKMGKSTLAKLTARVNEVAPSLMVKGPSGKKGPYSGKPLGQESQKTPEKVATLQSKPQTRSVTKQLCSLKKTDLVEEEEDDEVSVVVTNPPKPARTQTPQKKPGTRSLLEYMKRKSEKPKTAVFPPEEPVVDKKRTVVQRTPEKVKMLESKPQTRSVTKLLSSLKKSAQKEEEEAPDRKTTLSKPDLSPVVEKEEEPPKKSARRSLAALWKLPAADSPLGREVPPDSPVVDLKKLSGAERVKMARELSMKRARKSIQRRESLSKRDSLSRRDSISKLLLKPVREEKQAEDLITEKVPPDKPEVAAVKNVAEKPELNKTFTIVDDDEELVLIRKRFNTWSLDHETTREAWLDSVTVKKYLDILTAPTKQYCVLDPFAWSDWKEFGAVHLLKRINDGRKYFFPICEGGHWIMLILEGKKVWYANSLAYEPRGKVEEFLGFLGKERQYFDSPVPLQKDRVNCGIHVCLVARSIVTGSYWYSEEEVRAFRTEMKQTLVEKGYELFSEPFFEYTGEKQPVKQNVPGAETPEKATEDSMLEPSFQAENESQNDSQFWADETVAEWNPVEQAAETPPPAETEVPDRSAIPRLMELVIQTPPQRVPPRKRERPKGVKGQKDQKGKEKKIPEGKPDELVMRVRDWLRRELDQYALDGKSFQRLEWITDVLTAAIQKASVGDEKAIELIEKRSPPPEVEEGDMCTQTEVKKKPKFRPKDEESGKPPIVIGTELRAAYRENRAKTYNRIVGKVSKQCTIPIDTLEEFFRGTTSKTNVAKEVLKEKSTRIPKLNIGDWIVQEFSTSEVSEALKKTKDTAPGVDGLRYHHLQWFDPNSELLAEVYNECREHKKIPKQWKEAETILLYKGGDESKPENWRPISLMPTIYKLYSSLWNRRIRSVKGVMSSCQRGFQEREGCNESISILRAAIDVAKGKKGNLSVAWLDLTNAFGSVPHELISHTLEEYGFPDEVTEIVRDMYKDASIRVKSRFEKSEKIMIQSGVKQGDPISPTLFNMCLENVIRKHLETAYGHRCIATRIKVLAFADDMAILSNSKKQLQEELDNMDSDCTPLNLIFKPAKCASLVIEKGVLNGTAEVMLKGEPIRSLKEKDTYKYLGVPMGIETKGSAMELILSVSTELDRVNQSELAQYQKLDCVKCFVLPKLTYMYSNMIPKKAELQLLANKVSNCVKSMHHVPASGSPREYFQLPISKGGIGLPCPMITALITFLVTIMKKLWSDDRYIKTMYSDFLEEVVKTDTGKTQPTLEEQAAYLSGDGKVSSKNGFGYCTFSRIREVCKTLSKDGGAPLHKMRIVVENKKFAILVQATKSSKEKVFTEHQEKKVLQLLKQEVNVALQERFCVDKSVKSQVVRVVQQYPECNNFVRKGWKISYAAHKFVHRARLNLLNCNNNNHKKTTVAEKACRRCGREAESQGHILQSCTFGLPKLITERHDAVVHRAIELIGKGKYKNWKLRCDEEVTSANRLRPDIFLESPDGKQIIAADMAIRYEYGVEAMEEIWEHKTEKYEEGLGHLRKMGKTLTVLPIVLGALGTWWKPTSESLLKLGIDKKQLKEEIPKLCAMTLEYSKNIYYNHIYGKFYQRAPIFGEKKPKPKTRKGEKSWEQTPPDSPKA

SEQ ID NO: 4866 - protein, 901 aa, Bombus vancouverensis
MGVALWWRRALYLEPLKSSVARAATYNTIRMLWRNYIQGTVELRSGIDSFIEDILVPFLNKTSETATISNKEKGNQNCSGKENSRKQQQFKNSFNERLNMNNRRHRKRFSYAICQNMFRECPKRLADIAVMGDLNLLQLPQMSPSGHEIKNLYETLWGTLGPNLEIENYNQINEINISRTLTPVTPEEVRTKINKISQKSAAGLDGLRKKHLQQKGLEVVLALLYNIILVTSYYPKPWKLNRATLIPKYGQNLASVKNWRPITVSSLLSRIFSALVDIRLRKITEQDIRKKDFTSENDCKNNVMLLNGAIKLSKVLDGGIVSVLDISEAFDTIPHTAITRSMAKKGIPAGICDLIENMYTDVVTYIKASNSQVEIHVKRGLKQGDPLSPLLLNFCIGLLSEDLQKKTLGLKVNAESNSRIAILVFGNNIVLLGANRSEAQSQLDLTHEYLRKLGIVVSIPKCLTFEIRTSRDTWYMVDPDLSIQGNKISAADPDTVFKYLDVKIETWRGLTGGIIVPDIIDIVKRVRKMPLKPQQKVELIASYIMPRFIYGFLICPPSDSVLRFLDSELRQQIKLILHLVPSTASGFFYTAKSNGGLGLPRYEHVIKLSILRNAIRMTESADPAISKLCLNSAERKKLERIAHSLRINWPTSLKDIEKAKRRLKKENWEDWNGLKSQGQGASAFYQDKIGNCWLKEHDLLKPSRFIGAIKLRTNTYGNRVTLARANKNIDIRCRRCHSRPETLGHILGFCGSTKPKRIKRHDDIKNLLAERLATRESNAVLVEPQLQVGENSIKPDIVIKNEDKLIVVDVTIRFENRENLQQACNEKMKKYGKCLAELKKKYKCIEGGILPVVIGCRGAIPSFTKKNLQELKSSIKDMKTMSLMVLRSSLEIANAFLDYDT

SEQ ID NO: 4867 - protein, 1197 aa, Bombus ignitus
MDYSANNYLASDTESPVSGNSVADQFAQEGTFVNDVAINMDNANNEMAICVPLESDALCPFCVRKGLRFAFNTLKSFNEHINSHHLENKISWCCRYCLKSYSKLHGWYCHYGKCKGSVDTGPPKAFQCELCNDRFGTQRGLSTHERHDHPRLRNEKRHAMSMSRGTTQVRNRSRGAIWTREETDLLKILELRFRDFKQINAEIAKIITSKTAKQISDKRRDLRKTTESGISKVRKGDKIENDNNNNDILNMETEAGNQEKIKMNREEVHRRSLENEGERKEKMVKKDEVEEGDTVLSEGWLTKSIEEANSPENMTQLVIEMYNTIRMLWRNYIQGTVELRSGIDSFIEDVIVPFLKKTNETATISNKEKGNQNCSGKGNSRKQQQFKNSFNKRLNKNIRYHRKRFSYTICQNMFRECPKRLADIAVKGDLNLLQLPQTPPSEHEIKNLYEALWGTLGPNLEIENDNQINEINISRILTPVTPEEVRTKINKTLQKSAAGLDGLRKKHLQQKGLEIVLALLYNIILVTSYYPKPWKLNRATLIPKYEQNLASVKNWRPITVSPLLSRIFSALLNIRLRKIIKQNIRQKDFTSENDRKSNVMLLNEAIKLSKVLDGGIVSVLDISEVSDTIPHTAITRSLAKKGIPAGICDLIKNMYTDVVTYIKTSNSQVEIHVKRGLKQGDPLSPLLLSSCFGLLSEDLQKKTLGLKVNAESNSRIAILAFANNIVLLGANRSEAQSQLDLTYEYLRKLGIMVSIPKCLTFEIRTSRDTWYMVDPDLSIQGNKISAADPDTVFKYFDVKIEPWRGLTGSTIVPDIIDIVKRVRKMLLKPQQKVELIASYIMPRFIHGLLICPPSDSVLKFLDSELRQQIKLILHLVPSTASGFFYAAKSNGGLGLPRYEHLIKLSVLRNAVRMTESADPEVSKLCLDSAKRKKLERIAHSLRINWPASLKDIEKANRRLKKENWEDWNGLKSQGQGTSVFYQDKIGNCWLKEHDLLKPSHFIGAIKLRTNNYGNRVTLARANRDIDIQCRRCHSRPETLSHILGFCGSTKPKRIKRHDDIKNLLAEILATREGNAVLVEPQLQVGENSIKPDIVIKNGDKLIVVDVTIRFENRENLLLACNEKIKKYGQCLAELKKKYKCKEGGILPVVIGSRGAIPSFTKKNLRKLKISIKDMKTMSLMVLRSSLEMVNAFLDHDT

SEQ ID NO: 4868 - protein, 1197 aa, Bombus pyrosoma
MDYSANKYLASDTESPVPGNSAADQFAQKGTFVNDVAMNMDNAKDEMAICVPLESDALCPFCVREGLRFAFSTLKSLNEHINSCHLENKISWCCRYCLKSYSKLHGWYCHYGKCKGSVDTGPPKAFQCELCNDRFDTQRGLSTHERHDHPRLRNEKRHAMSTSRDTTQVRNRPRRAIWTTEEIDQLKILELRFRNFRQINAEIAKIITTKTAKQISDKRRDLRKTAESGISKVKEGDETENDNNNNDILKTETEVGNQEEIKMNREEVHRRSLENEGERKEKMVTEDEVEEGDAVLSEGWLTKSIEEANSPGNMTQLVIEMYNTIRMLWRSYIQGTAELRSGIDSFIEDVLVPFLNKTNETATISNKEKGNQNCSGKGNSRRQQQFKNSFNKRLNKNNRSHKKRFSYAICQNMFRECPKRLADIAVKGDLNLLKLPQTPPSGHEIKNLYEALWGTLGPNLEIESDNQINEINTSRILIPVTPEEVRTKINKTSQKSAAGLDGLRKKHLQQKGLEVVLALLYNIILVTSYYPKPWKLNRATLIPKYGQNLASVKNWHPITVSSLLSRIFSALLDIRLRKIIERNIRQKDFTSENDCKSNVMLLNEAIKLSKVLDGGIVSVLDISEAFDTIPHKAITRSMAKKGIPAGICDLIENMYTDVVTYIKASNSQVEIHVKRGLKQGDPLSPLLLNFCIGLLSEDLQKKTLGLKVNAESNSRIAILAFANNIVLLGASRSEAQSQLNLTYEYLRKLGIVMSIPKCLTFEIRTSQDTWYMVDPNLSIQGNKISAADPDTVFKYLDVKIEPWRGLTGGIIVPDIIDIVKRVRKMSLKPQQKVELIVSYIMPRFIDELLICPPSDSVLRFLDSELRQQIKLILHLVPSTASGFFYVAKSNGGLGLQRYEHVIKLSVLRNAVRMTESADPAVSKLCVDNAERKKLERMAHSLRINWPTSLKDIEKAKRRLKKENWEDWNGLKSQGQGASAFYQDKIGNCWLIEHDLLKPSRFISAIKLRTNTYGNKMTLARANKDIDIRCRRCHSQPETLGHILGFCGSTKPKRIKRHDDIKNLLAERLATRESNAVLVEPQLQVGENSIKPDIVIKNEDKLIVVDVTIRFENREALLQACNEKIKKYGKCLAELKEKYKCKEGLILPVVIGCRGAIPSFTKKNLQELKISIKDMKTMSLMVLRSSLEIANAFLDYDT

SEQ ID NO: 4869 - protein, 1196 aa, Bombus difficillimus
MDYSANNYLASGTESPVPGNSVVDQFAQKGTFVNDVAMNMDNANDEMAICVPLESDALCPFCVRADLRLAFNTLKSLNEHINSHHLENKISWCCRRCLKSYSKLHGWYCHYGKCKGSVDTGLSKAFQCELCNNKFDTQRGLSTHERHDHPRLRNEKRHAMSTSRDTTQVRNRPRGAIWTTEETDLLKILELRFRNIKQINVEIAKIITSKTAKQISDKRRDLRKTAESGIGKVREGDETENDNNNNNILSMEAEVGNQEEIKMNREEAHRRSLENEGERKEKMVKEDEAEGDAVLSEGWLTKSIEEANSPGNMTQLVIEMYNTIRMLWRNYIQGTVELCSGIDSFIEDVLVPFLNKTNETATISNKEKGNQSCSGKGNSRKQQQFKNSFNKRLNKNNRSHRKCFSYVIYQNMFRKCPKRLADIAVKADLNLLQLPQTPPSGHEIKNLYEALWGTLNPNLEIENDNQINEINTSRILTPVTPEEVRTKINKTSQKSAAGLDGLRKKHLQQKGLEVVLALLYNIILVTSYYPKPWKLNRATLIPKYGQNLASVKNWRPITVSSLLSRIFSALVDIRLKKIIEQNIRQKDFISENVCKSNVMLLNEAIKLSKVLHGGIISVLDISEAFDTIPHTAITRSMVKKGIPAGICDLIENMYTDVVTYIKASNSQVEIHVKRGLKQGDPLSSLLFNFGIGLLSEDLQKKTLGLKVNAESNSRIAILAFANNIVLLGANRSEAQSQLDLTHEYLRKLGIVVSISKCLTFEIRTSRDTWYMVDPDLSIQGNKISAADPDTVFKYLDAKIAPWRGLTSGIIVSDIIDIVKRVRKMPLKPQQKVELIASYIMPRFIYGLQICPPSDSVLRLLDREMRQQIKLILHLVPSTTSGFFYAAKSNGGLGLPRYEHMIKLSVLRNAVRMIESADPAVSKLCLDSAERKKLERIAHSLRINWPPSLEDIKKAKRRLKKENWEDWNDLKSQGQGASAFYQDKIGNCWLTEHDLLKPSRFIGAIKLRTNTYRNRVTLARANKNMDVRCRRCHNRPETLGHILGFCGSTKPKRIKRHDDIKNLLAERLATRESNAVLVEPQLQVGENSIKPDIVIKNEDKLIVVDVTIRFENRENLLQACNEKIKKYGKFLPELKKKYKCKQGKILPVVIGCRGAIPSFTKKNLQELKISIKDMKTMSLMVLRSSLEIVNAFLDYDT

SEQ ID NO: 4870 - protein, 1197 aa, Bombus breviceps
MDYSANNYLASDTESPVPGNSVADQFAQKETFVNDVAMNMGNAKDEMTICVPLESDALCPFCVREGLRFAFNTLKSLNEHINSRHLENKISWCCRYCLKSYSKLHGWYCHYGKCKGSVDTGPPKAFQCELCNNRFYTQRGLSTHERHDHPRLRNEKRHAMSTSRDTTQVRNCPRRVIWTTEETDLLKILEIRFRNFKQINAEIAKIITSKTAKQISDKRRDLRKTAESRKGKVKEGEETENDNNNNDILNTETEVGNQEEIKMNREEVHRRSLENEGERKEKMFKEDKVEEGDAFLSEEWLTKSIEEANSLGNMTQLVIEMYNTIRMLWRNYIQGTIELRSGIDSFIEDVLVPFLNKTNETVTISNKEKGNQNCSGKGNSCKQQQFKNSFNKRLNKNNRNHKKCFSYAICQNMFRECPKRLADIAVKGDLNLLQLPQTPPPGHEIKNFYEALWGTLGPNLEIENDDQINEINISSILTPVTPEEVRIKINKTSQKSAAGLDGLRKKHLQQKGLEVVLALLYNIILVTSYYPKPWKLNRATLIPKYGQNLASVKNWRPITVSSLLSRIFSALLDIRLRKIIEGNIRQKDFTSENDCKNNVMLLNEAIKLSKVLAGGIVSVLDISEAFDTIPHTAITRSMAKKGIPAGICVLIENMYTDVVTYIKASNSQVEIHVKRGLKQGDPLSPLLLNFCIGLLSEDLQKKTLGLKVNAESNSRIAILAFANNIVLLGANRSEAQSQLDITHEYLRKLGIVVSIPKCLTFEIRTSRDTWYIVDPDLSIQGSKISAADPDTVFKYLDVKIEPWRGLTGGIIVPDIIDIVKRVRKMPLKPQQKVELIVSYVMPRFIYGLLICPPSDSVLKFLDSELRQQMKLILHLVPSTASGFFYAAKSNGGLGLPRYEHVIKLSVLRNAVRMTESADLAISKLCLDSAECKKLERMAHSLRINWPTSLKDIEKAKRRLKKENWEDWNGLKSQGQGASAFYQDKIGNCWLKEHDLLKPSRFIGAIKLRTNTYGNRVTLARANKNIDVRCRRCHSRPETLGHILGFCGSTKPKRIKRHDDIKNLLAERLATRESNAVLVEPQLQVGENWIKPDIVIKNEDKLIVVDVTIRFENRENLLQAYNEKIKKYGKCLAELKKKYKCKEGRILPVVIGCRGAIPSFTKKNLHELKISIKDMKTMSLMVLRSSLEIANAFLDYDT

SEQ ID NO: 4871 - protein, 1033 aa, Bombus opulentus
MCTSRDTKVRNRPRGAIWTTEETDLLKILELRFCNFKQINVEIAKIITSKTAKQISDKRRDLRKIAESGIGKVREGDETENDNNNNNILNMETEVGNQEGIKMNREEVHRRLLENEGERKEKMVKEDGVEEGDAVLSEEWLTKSIEETNSPGNMTQLVIEMYNTIRMLWRNYIQGTVELRSGIDSFIEDVLVPFLKKTNETATISNKEKGNQNYSGKGNSRKLQQFNKRLNKNNRSHKKRFSYVICQNMFKKYPKRLADIAVKGDLNLLQLPKTSPSGHEIKNLYEALWGTLGPNLEIENDNQINEISTSRILTPVTPEEVRTKINKILQKSAAGLDGLRKEHLQQKGLEVVLAILYNIILVTSYYPKLWKLNCATLIPKYGQNLANVKNWRPIIVSSLLSRIFSALVDIRLRKIIEQCIRQKDFTSENDYKSNVMLLNKAIKLSKVLDGGIVSVLDISEAFDTISHTAIKRSMAKKGIPVGICDLIENMYTDVVIYIKASNRQVEIHVKRGLKQGDLLSPSLFNFCIGLLSEDLQKKTLGLKVNAESNSRIAILAFANNIVLLGANRSEAQSQLDLTHEYLWKLGIVVSIPKCLTFEIRTSRDTWYMIDPDLSIQGNKISAADPGTVFKYLDAKIEPWRGLTDGITVPDIINIVKRVRKMPLKPQQKVDLIATYIMPRFIYRFLICPPSDSVLRFLDSELRQQMKLILHLVPSTASGFFYTAKSNGDLGLLRYEHMIKLSVLRNVVRMTESADPAVSKSCLDSAERKKLERMAHSLRINWPTSLEDIEKAKSRLNKENWEDWNNLKSQGQGASAFYQDKIGNCWLTEHDLLKPSRFIGAIKLRTNTYGNRVALARVNKNIDVRCRMCHSRPETLGHILGFCRSTKPKRIKRHDDIKNLLAERLATRESNVVFVEPQLQVGENSIKPDIVIKNEDKLIVVDVTIRFENRENLLQGRNEKIKKYGKYLAELKKKYKCKEGRILPVVIGCRGAIPSFTKKNLQKLKISIKDMKTMSLMVLRSSLEIANAFLDYDT

SEQ ID NO: 4872 - protein, 1197 aa, Bombus vosnesenskii
MDYSANNDLASDTDSPVPGNSVADQFAEKETFVNDVAINMDNANNEMTICVPLKGDALCPFCVREGLRFAFNTLKSLNEHINSHHLESKISWCCRLCLKSYSKLHGWYCHYGKCKGSVDTGPPKAFQCELCNDRFDTQRGLSTHERHDHPRLRNEKRHAMSTSRDTTQVRNRPRGAIWTTEETDLLKILELRFRNFKQINAEIAKIITSKTAKQISDKRRDLRKTAESGIGKVRVGDETENDNNNNNILNTETEVGNQEEIKMNREEVHRRSLENEGERKEKMVKEDEMEEGDAVLSEEWLTKSIEEANSPGNMTQLVIEIYNTIRMLWRNYIQGTVELRSGIDSFIEDILVPFLNKTSETATISNKEKGNQNCSGKENSRKQQQFKNRFNERLNMNNRRHRKRFSYAICQNMFRECPKRLADIAVKGDLNLLQLPQMSPSGHEIKNLYEALWGTLGPNLEIENDNQINEINISRTLTPVTPEEVRTKINKISQKSAGGLDGLRKKHLQQKGLEVVLALLYNIILVTSYYPKPWKLNRATLIPKYGQNLASVKNWRPITVSSLLSRIFSALVDIRLRKITEQDIRKKDFTSENDCKNNVMLLNGAIKLSKVLDGGIVSVLDISEAFDTIPHTAITRSMAKKGIPAGICDLIENMYTDVVTYIKASNSQVEIHVKRGLKQGDPLSPLLLNFCIGLLSEDLQKKTLGLKVNAESNSRIAILVFGNNIVLLGANRSEAQSQLDLTHEYLRKLGIVVSIPKCLTFEIRTSRDTWYMVDPDLSIQGNKISAADPDTVFKYLDVKIEPWRGLTGGIIVPDIIDIVKRVRKMPLKPQQKVELIASYIMPRFIYGFLICPPSDSVLRFLDSELRQQIKLILHLVPSTASGFFYTAKSNGGLGLPRYEHVIKLSILRNAIRMTESADPAISKLCLNSAERKKLERMAHSLRINWPTSLKDIEKAKRRLKKENWEDWNGLKSQGQGASAFYQDKIGNCWLKEHDLLKPSRFIGAIKLRTNTYGNRVTLARANKNIDIRCRRCHSRPETLGHILGFCGSTKPKRIKRHDDIKNLLAERLATRESNAVLVEPQLQVGENSIKPDIVIKNEDKLIVVDVTIRFENRENLQQACNEKMKKYGKCLAELKKKYKCKEGGILPVVIGCRGAIPSFTKKNLQELKISIKDMKTMSLMVLRSSLEIANAFLDYDT

SEQ ID NO: 4873 - protein, 1183 aa, Bombus haemorrhoidalis
MNYSANNYLASDTESPVPGNSVADQFAQKETFVNDVAMNIYNANDEMAICVPLESDALCPFCVREGLRFTFNTLKSLNEHINSHHLENKISWCCRSCLKSYSKLHGWYCHYGKCKGSVDTEPAKAFQCELCNDRFDTQRGLSTHERHDHPRLRNEKRHAMSTLRDTTQVRNRPRGAIWTTEETDLLKILELRFCNFKQINAEIAKIITSKTAKQISDKRRDLCKTAKLGIGKVREGDDETENDNNNNNILNMETELGNQEKIKMNREKVHRRSLENEGQRKEKMVKENEVEEGDAVLSEGWLTKSIEEANSLGNMTQLVIEMYDTIRMLWRNYIQGTVELRSGIDSFIEDVLVPFLNNNNETAIISNKEKGNQNCNEKGNSRKQQQFKNSFSYAICQNMFRECPRRLADIAVKGDLNLLQLPQRPPSGYEVKNLYKALWGTLGPNLEIENDNKIKEVNTSKILTPVTPEEVCTKINKTSQKSAAGLDGLRKKHLQQKGLEVVLALLYNIILVTSYYPKPWKLNRTTLIPKYGQNLASVKNWRPITVGSLLSRIFSALVDIRLRKIIGQNIRQKDFISENDCKSNVTLLNKAIKLSKVLDGGIVSVLDISEAFDTIPHTAITRSMAKEGIPAEICDLIENMYTDVVTYIKASNSRVEIHVKRGLKQGDPLSSLLFNFCIGILSEDLQKKTLGLKVSAENNSRIAILAFANNIVLLGSNRSEAQSQIDLTHEHLRKLGIVVSIPKCLTFEIRTSRGTWYMVDPDLSIQGNKISAADPDTVFKYLDAKIEPWRGLTGGIIVPDIIDTVRRVRKMPLKPQQKVELIASYIMPRFIRGLLICSPSDSVLRFLDSELRQQIKLILHLVSSTASGFFYATKSNGGLGLPRYEHVIKLSALRNAVRMTQSADSAVSKLCLDSVERKKLERMAHSLRINWPTSLEDIEKTKRRLKKENWEDWNDLKSQGQGVSAFYQDKIGNCWLEEHDLLKPSRFIGAIKLRTNTYGNRVSLARANRNIDVRCRRCLSRPETLGHILGFCESTKRKRIKRHDDIKNLLAERLATRESNTVFVEPQLQVGENSIKPDIVIKNEEKLIVVDVTIRFENGENLLQACNEKIKKYGKCLAELKKKYNCKEGGILPVVIGCRGAIPPFTKKNLQKLKINIKDMKTMSLMVLRSSLEIANAFLDYNT

SEQ ID NO: 4874 - protein, 1197 aa, Bombus hypnorum
MDYSTNNDLASDTESPVPGNSVADQFAQKEIFVNDVAMNMDNANNEMTICVPLESDALCPFCVREGLRFTFNTLKSLNEHINSHHLENKISWCCRFCLKNYSKLHGWYCHYGKCKGSVDTGPPKAFQCELCNDRFDTQRGLSTHERHDHPRLRNEKRHATSTSRDTTQVRNRPRGAIWTTEETDLLKILELRFRNFKQINAEIAKIITSKTAKQISDKRRDLRKTAESGIGKVRVGDETENDNNNNDILNTETEVGNQEKIKMNREEAHRRSLENEGERKEKMVKEDEMEEGDAVLSEGWLTKSIDEANSPGNMTQLVMEIYNTIRMLWRNYIQGTVELRSGIDSFIEDVLVPFLNKTNETATISNKEKGNQNCSGKENGRKQQQFKNSFNKRLNKNNRSHRKRFSYVICQNMFRECPKRLADIAVKGDLNSLQLLQTPPSGHEIKNLYEALWGTLGPNLEIENDNQINEINISRILTPVTPEEVRTKINKTSQKSAAGLDGLRKKHLQQKGLEVVLALLYNIILVTSYYPKPWKLNRATLIPMYGQNLASVKNWRPITVSSLLSRIFSALVDIRLRKITEQDIRKKYFTSENDCKSNVMLLNEAIKLSKVLDGGIVSVLDISEAFDTIPHTAITRSMAKKGIPAGICDLIENMYTDVVTYIKASNSQVEIHVKRGLKQGDPLSPLLLNFCIGLLSEDLQKKTLGLKVNAESNSRIAILAFANNIVLLGANRSEAQSQLDLTHEYLRKLGIVVCIPKCLTFEIRTSRDTWYMVDPDLSIQGNKISAADPDTVFKYLDVKIEPWRGLTGGIIVPDIIDIVKRVRKMPLKPQQKVELIASYIMPRFIYGFLICPPSDSVLRFLDSELRQQIKLILHLVPSTASGFFYAAKSNGGLGLPRYEHVIKLSVLRNAVRMTESADPAISKLCLNSAECKKLERMAHSLRINWPTSLKDIEKAKRRLKKENWEDWNSLKSQGQGASAFYQDKIGNCWLKEHDLLKPSRFTGAIKLRTNTYGNRVTLARANKNMDIRCRRCHSRPETLGHILGFCGSTKPKRIKRHDDIKNLLAERLATRESNAVFVEPQLQVGENLIKPDIVIKNEDKLIVVDVTIRFENRENLLQACNEKIKKYGKCLAELKKKYKCKEGGILPVVIGCRGAIPSFTKKNLQELKISIKDMKTMSLMVLRSSLEIANAFLDYDT

SEQ ID NO: 4875 - protein, 1194 aa, Bombus bifarius
MDYSANNVLASDTESPVPGNSVADQFAEKETFVNDVAINMDNANNEMTICVPLKGDALCPFCVREGLRFAFNTLKSLNEHINSHHLENKISWCCRLCLKSYSKLHGWYCHYGKCKGSVDTGPPKAFQCELCNDRFDTQRGLSTHERHDHPHLRNEKRHAMSTSRDTTQVRNRPRGAIWTTEETDSLKILELRFRNFKQINAEIAKIITSKTAKQISDKRRDLRKTAESGIGKVRVGDETENDNNNNNILNTETEVGNQEEIKMNREEVHRRSLENEGERKEKMVKEDEMEEGDAVLSEEWLTKSIEEANSPGNMTQLVIEIYNTIRMLWRNYIQGTVELRSGIDSFIEDILVPFLNKTSETATISNKEKGNQNCSGKENSRKQQQFKNSFNERLNMNNRRHRKRFSYAICQNMFRECPKRLADIAVMGDLNLLQLPQMSPSGHEIKNLYETLWGTLGPNLEIENDNQINEINISRTLTPVTPEEVRTKINKISQKSAAGLDGLRKKHLQQKGLEVVLALLYNIILVTSYYPKPWKLNRATLIPKYGQNLASVKNWRPITVSSLLSRIFSALVDIRLRKITEQDIRKKDFTSEKNNVMLLNGAIKLSKILDGGIVSVLDISEAFDTIPHTAITRSMAKKGIPAGICDLIENMYTDVVTYIKASNSQVEIHVKRGLKQGDPLSPLLLNFCIGLLSEDLQKKTLGLKVNAESNSRIAILVFGNNIVLLGANRSEAQSQLDLTHEYLRKLGIVVSIPKCLTFEIRTSRDTWYMVDPDLSIQGNKISAADPDTVFKYLDVKIETWRGLTGGIIVPDIIDIVKRVRKMPLKPQQKVELIASYIMPRFIYGFLICPPSDSVLRFLDSELRQQIKLILHLVPSTASGFFYTAKSNGGLGLPRYEHVIKLSILRNAIRMTESADPAISKLCLNSAERKKLERIAHSLRINWPTSLKDIEKAKRRLKKENWEDWNGLKSQGQGASAFYQDKIGNCWLKEHDLLKPSRFIGAIKLRTNTYGNRVTLARANKNIDIRCRRCHSRPETLGHILGFCGSTKPKRIKRHDDIKNLLAERLATRESNAVLVEPQLQVGENSIKPDIVIKNEDKLIVVDVTIRFENRENLQQACNEKMKKYGKCLAELKKKYKCIEGGILPVVIGCRGAIPSFTKKNLQELKSSIKDMKTMSLMVLRSSLEIANAFLDYDT

SEQ ID NO: 4876 - protein, 1197 aa, Bombus impatiens
MDYSANNDLASDTESPVPGNSVADQFAEKETFVNDVAINMDNANNEMTICVPLKGDALCPFCVREGLRFAFNTLKSLNEHINSHHLENKISWCCRLCLKSYSKLHGWYCHYGKCKGSVDTGPPKAFQCELCNDKFDTQRGLSTHERHDHPRLRNEKRHAMSTSRNTTQVRNRPRGAIWTTEETDLLKILELRFRNFKQINAEIAKIITSKTAKQISDKRRDLRKTAESGIGKVRVGDETENDNNNNNILNTETEVGNQEEIKMNREEVHRRSLENEGERKEKMVKEDEMEEGDAVLSEEWLTKSIEEANSPGNMTQLVIEIYNTIRMLWRNYIQGTVELRSGIDSFIEDILVPFLNKTSETATISNKEKGNQNCSGKENSRKQQQFKNSFNERLNKNNRRHRKRFSYAICQNMFRECPKRLADIAVKGDLNLLQLPQMSPPGHEIKNLYEALWGTLGPNLEIENDNQINEINISRTLTPVTPEEVRTKINKISQKSAAGLDGLRKKHLQQKGLEVVLALLYNIILVTSYYPKPWKLNRATLIPKYGQNLASVKNWRPITVSSLLSRIFSALVDIRLRKITEQDIRKKDFTSKNDCKNNVMLLNGAIKLSKVLDGGIVSVLDISEAFDTIPHTAITRSMAKKGIPAGICDLIENMYTDVVTYIKASNSQVEIHVKRGLKQGDPLSPLLLNFCIGLLSEDLQKKTLGLKVNAESNSRIAILVFGNNIVLLGANRSEAQSQLDLTHEYLRKLGIVVSIPKCLTFEIRTSRDTWYMVDPDLSIQGNKISAADPDTVFKYLDVKIEPWRGLTGGIIVPDIIDIVKRVRKMPLKPQQKVELIASYIMPRFIYGFLICPPSDSVLRFLDSELRQQIKLILHLVPSTASGFFYTAKSNGGLGLPRYEHVIKLSILRNAIRMTESADPAISKLCLNSAERKKLERMAHSLRINWPTSLKDIEKAKRRLKKENWEDWNGLKSQGQGASAFYQDKIGNCWLKEHDLLKPSRFIGAIKLRTNTYGNRVTLARANKNIDIRCRRCHSRPETLGHILGFCESTKPKRIKRHDDIKNLLAERLATREGNAVLVEPQLQVGENSIKPDIVIKNEDKLIVVDVTIRFENRENLLQACNEKMKKYGKCLAELKKKYKCKEGRILPVVIGCRGAIPSFTKKNLQELKISIKDMKTMSLMVLRSSLEIANAFLDYDT

SEQ ID NO: 4877 - protein, 1198 aa, Bombus soroeensis
MMDYNANNYLALDTESLVPGNSVAYQFAQKRTFVNDMAMNMDNANDEMAICVPLESDALCPFCVREGLRFAFNTLKSLNEHINSHHLENKISWCCRRCLKSYSKLHGWYCHYGKCKGSVDTESPKAFQCELCNDRFDTQRGLSTHERHDHPRLRNEKRHAMSTSRDTTQVRNRPRGAIWTTEETDLLKILEVRFRNFKQINAEMAKFITSKTAKQISDKRRDLRKIAESGIGKVREGDETENDNNNNDILKTETEVGNQEEIKMNREEMHRRSLENEGERKEKMVKEDKVEEGDAVLSEEWLTKSIEEANSPGNMTQLVIEMYNTIRTLWRNYIQGTVELRSGIDSFIEDVLVPFLNKTSETAIISNKEKGNQNCSGKGNSPKQQQFKNSFNKRLNKNNRSHRKRASYAICQDMFRECPKRLADIAVKGDLNLLHLPQTPPSEHEIKNLYEALWGTFGPNLEIKNDNQINEISISRIFTPVTPEEVRTKINKTSQKSAAGLDGLRKKHLQQKGLEVVLALLYNIILVTSYYPKPWKSNRVTLIPKYGQNLASVKNWRPITVSSLLSRIFSALLDIRLRKIIEQNIRQNDFTSQNDCKSNVMLLNEAIKLSKILDGGIVSVLDISEVFDIIPYTAITRSMAKKGIPAGICDLIENMYTDVVSYIKASNSQVEIHVKRGLKQGDPLSPLLFNFCVGLLSEDLQKKTLGLKVNAESNSRIAILAFANNIVLLGANRSEAQSQLDLTHEHLRKLGIVVSIPKCLTFEIRTTRDTWYMVDPDLSIQGNKISAADPDTVFKYLDAKIEPWRGLTGGIIVPDIIGIVKKVQKMPLKPQQKVELITSYIMPRFIYGLLICPPSDTVLRLLDSELRQQIKLILHLVPSTASGFFYAAKSNGGLGLPRYEHVIKLSVLRNAVRMAEPADPAVSKLCLDSAERKKLERMAHSLRINWPTSLEDIEKAKRRLKKENWEDWNNLKSQGQGASAFYKDKIGNCWLKEHDLLKPSRFIGAIKLRTNTYGNRVTLARANKGIDVRCRRCHSRPETLGHILGFCKSTKPKRIKRHDDIKNLLAKRLATRESNAVLVEPQLQVGENWIKPDIVIKNKDKLIVVDVTIRFENRENLLQACNEKIKKYGRCLAELKKKYKCKEGGILPVVIGSRGAIPSFTKKNLQELKISIKDMKTMSLIVLRSSLEIANAFLDNDI

SEQ ID NO: 4878 - protein, 1187 aa, Beroe forskalii
MEEKNNETAGRTASSDKTSKSSASGSAARAAVTPAPSRACLFCGKAFKLRGLAGHTRRCESNPEWLNEKIHSSRWDFSGRSPVNCARCDLHMKATCYIGHFPDCIATNGCFRCGNQVPVADYVEHFQVCVRTIDPAEPPTPQVVIPEVQKVTCPYCPAALQAKFSFKPGRGLSMHVKKKHPKEWNDYQLNRMELYPSQYIWREGDDELICQAIEEYQSSAPAVKKAFGINQFIQFRSFPHCTLDSITCHRKTSSFKEYAKDRAKRIADQQAVAESRAEESLPNEDGGHFEEVEILSEKEKSAIAAKPFGSEILEIHQHLVNRRWDTACSAAKLVFEELTCKFGKPNIPVHKVKQGADPRPPGKKPTRKSKKRANRRRLKPSKEKRRESYAKVQKRWSKKRVDVIKSILDGKLEQVQGEKPTMEKQHDYWKSLFERPSPEDPGKVPGESSVQYELSAPLTKEEVANGLGTAKEASTGPDGVPLSALKELGSLSLWVLYCALWMKSETPKGWRVSRTVLIDKTADECGKNPEDFRPISISSYFYRIYARSISSRLTRAVPISKRQRGFIRQDGVRDNIELFDNLVKDAKRTLTPLSVAFMDIRKAFDSVGHASIQRALEWAGVPGRVRRVIEELYTDCYTEVGGGRIRVNRGVKQGDPLSSFLFNIVLEMALSRVPPGLGINYLGHQLFYMAFADDMILLARNAHVLQRIVDMVSSELGLAGLEFNHAKCKVLSLVTDPRNKASMIDTDVEIAVNGDRIPPLGVLDTYRYLGIDVGVKGVPKFEPQKELKDLLQRLTKAPLKPHQRLYALRVHTMPRFQHKLIFSKVTRNALSQMDSLVRKHVREWLKLPDDVTKAALYADVGSGGLGLICLERRVPLLKYSRIERLRDSDDELVRLLIDQEQVNKRVMQWKDRCKMSGKTYRSKEELRDLYRTQLNSTVDGKGIRGDTRLGRLSMRSLVGPCIPLTPTRYIHAINVRLGTLQTSERKARGRVCNENGVLCDKERACHARKAVATLGHISQVCPVVHGLRVRRHDRVRDRVANQLQSRKKSVEKVLVEKTIKLQDGTVLRPDIIVLTDTSIEVIDVQIKADMGIRRDLETDQTAKRAKYDRGDVQTSIERELSVVGMGRLYTVTALTITFRGQLPRHTVDLATRLKFKTLLPELVADVLADTGSMFVVWHRTTGNAGKP

SEQ ID NO: 4879 - protein, 1473 aa, Apodemia walkeri
MSQQEYNLRPLPGGRRGTSGASAGCSSMRTDGDGGLNRRVPLEQYTTAEKGGLNRRVPHKNYVTAEDHHQSSLSPPFYSITSSPTSYLEPPQSSSTSSHTTYNKTMESTRYNLRPRPGSHQGAIGASAKFPRLRTASYKEQKRIAAVEGEPEDITAETLSHLSTPTYSVRTLPSMTSTNQSFKTFSTSPTTSTLSVNVAREADLAVNPTPIIGGTSRRKKWSNEMNEFIFRTYLHLTTMETDMKSYLQPLHIKFIERYPEMQVSRQRIGDQRRAIVNKKLLSQETIDRISAEVKEEIQNTYTRIQSNKESQHQGDIQNAVQSEKRMKWTKEHNEFIISTYYRITKLETNKIAYRKLLHQQFINEFPNLIHITEQRIADQRRIIIKNKYLSAERLQSLKTDVEAEIQGTEINLSHTEILTSSNADTHMLLNSGSILAEYINTNNRDELIETEISNNIENNPLIDETFTRALEVFSKIDPVKRVYIPKQKFTKTLRNSIQYINNVLLPGYLSEDTTFVRFQSLLYCAAWTIAKINGTKLNEPGEDERIRQKTREIKPKWQIRLENKVSIFRTHIGRLTQYINGNRNSKLIKHVDFILKHYKIHSTHEEPNIHLSHFLDTLKQKLKVVSSRLKRYKACTLRKVQNSQFLRNEKQFYRNFKNSPRTVNTSNAQNSIPPVEELTQFWKNIWEKPERYNTKSKWIETEENNLKICDMDFNVVPIEVFHDVIRKLNNWKSPGSDYIHNFWYKKLTYIHTYLYNFINKFLRDPQTMPDYITMGTTYMLLKDCNDSLNPSKYRPITCLQTIYKIITGCLTETIYEHLEKNNVLTEQQKGCRKFSHGCKEQLIIDSVILKQIKQKKSNLYSMYIDYKKAYDSVPHDWLIKVLKIYKINPVIILFLQTIMTKWTTQLKLNTIITAPIKIQRGIFQGDALSPLWFCLALNPLSNLLNLSNVGYKFKINTDISNEQEITLNHLLYMDDIKLYAKTQKDLDLLTNITEEFSTDIRMEFGIDKCRINSIKGGQTYLHNYRLNTGETIEPLDANEAYKYLGYNQSKDIHFKETKQQLTNQFKHRITSILRTQLNSKNTIKAINTYAVPVLTYSFGILNWTKTQLKGIQRMINTTMTKSRKHHPRSCIQRQTLPRSEGGRGLIDIMNLHNKQISTLRKYFHCKSDTSNLHRAVVHNDLKLTPLNLHDRSPQTNENIKDNKSKIDEWAQKVLHGRHSHDLNQPTVDKKASNEWLKRGNLFPETEGFIIAVQDQVIETRNYQKYIIKKRDLHSDLCRRCCSASETIQHITGSCKSIANTDYKFRHDQVAHIVHQLLAYKHKLIDHTQPLVPYYKYKPQVVIENTSHLLYFDRAILTDKTIHYNRPDITLINKHDKTAYIIDIAVPNTHNLQNTISEKLTKYIDLKEEISRMWKLQKVTIIPIVLSSTGVIPKQLHQALATLNLPQYTYINLQKVAILNTCRIVRKFLDSELN

SEQ ID NO: 4880 - protein, 857 aa, Emesis temesa
MRLEKKVNTLRAHIGRLTQYINGNRNSKLVKHVDFILKHYQMHSIHEEPNVHLSHFLDTLKQKLKVVSSRLKRYKACTLRKVQNSQFARNEKQFYRNLKNSSSNLNSSDTQNSTPPPEELRQFWKNVWEKPTKYNKQSKWIDNEEKTLEICDMEFNVVPVEIFNDVIKKLKNWKSPGSDCIHNFWYKKLTYIHPFLYNFINTFLNDPQTMPTYIATGTTYMLLKDCNDPLNPAKYRPITCLQTIYKIITGCLTEIIYKHLEKNSVLTEQQKGCRKFSQGCKEQLVIDSVILKQTKQKKSDLYSMYIDYKKAYDSVPHDWLIKVLEIYKVNPTIISFLQTIMTKWTTQLKLKSILTAPIKIQRGIFQGDALSPLWFCLALNPLSKLLNESNVGYQFKISNIVTHKQDFILSHLLYMDDIKLYATTQKDLDFLTNITEEFSTDIRMEFGIDKCRINSIKRGQIFLHNYRLNTGETIEPLDANEVYKYLGYNQSKEIHFKETKQELSNQFRHRLNSILKTQLNSKNTIKAINTYAIPILTYSFGILNWTKTQLKAVQRMINTTMTKSRKHHPRSCIQRQTLPRCEGGRGLIDVINLHNKQISTLRKYFHSKSDTSKLHHSVVLNDLKLTPLNLHNTSPQSNEFLKDNKSKILEWSQKALHGRHNHDLNQSSIDKKASNEWLKRGELFPETEGFIIAIQDQVIETRNYRKHIIKIRDLRTDLCRRCCSASETIQHITGACKSIVNTDYKFRHDQVAYIVHQLLAHKHNLIDRTQRSVPYYKYKPHIVIENTTHLLYFDRAILTDKTIHYNRPDITLIDKHDKTAYIIDIAVPNTHNLQNTISEKLSKYIDLKEEILRMWNL

SEQ ID NO: 4881 - protein, 1440 aa, Apodemia mormo
MRTVGDEGLNRRVPLEQYTTAENGELNRRAPHERYATAEDRHLSSPSSITSSPSSYVELQRSSLISSTTSHTPYNKTIKCTRYNLRPGCRDRRGVGVLSWRTACGEELSKLSLVTVEPKDFTAESSSHLSSPTSSLQTLPSIASTNPSFKTFSRSSSSLSINVAREVDFTADPMPIIGGTSRRKKWSTEMNEFILRTYLHLTTMQTDTKSYLQPLHIKFIEKYPEMQVSRQRIGDQRRAIINKKLLPQETIDRITAEVKDEIQNTYTRIQSDKETQNKGNIHNAIQTGRRMKWTKEHNEFIIRTYYKITKLETNKIAYRKLLHQQFINEFPNLSHITEQRIADQRRIIIKNKYLTAERLQSLKTDVEAEIQEHEMSLNQTQILTSGDTNTHIMPINSESISTENININVTTESIVTELPNNIENNPLIVETFTRALEVFSNIDPVKRVYIPKQKYSKKLRNSIQYINNVILPGYLNEDTTFLGFQNLLYCAAWTVAKINGTKLNDSGEDYGPRQNRNEMKPKWQIRLENKVNIFRAHIGRLTQYINGNRNSKLVKHVNFILKHYQIHSTHEEPNIHLSHFLDTLKQKLKVVSSRLKRYKFCTLRKVQNSQFIRNERQFYRNLKNSSSNLINSDIQNSTPPAEELAQYWRNIWEKPTRCNTEAKWIEIEENSLKICDMDFDVVPVEVFHQVVKKLNNWKSPGSDCIHNFWYKKLTYTHTYLYNFINKFLKDPHSMPAYITTGTTYMLLKDHNDPLNPSKYRPITCLQTIYKIITGCLTETIYNHLEKNNILTEQQKGCRKFSQGCKEQLVIDSVILKQTKQKKSNLYSMYIDYKKAYDSVPHDWLIKVLKIYKINPVIVLFLQTIMTKWTTQLKLKTMITGPIKIQRGIFQGDALSPLWFCLALNPLSKLLNRSNVGYKFHINTDVTNKQDTTLNHLLYMDDIKLYATTQEDLDLLTNITEEYSEDIKMEFGIDKCRINSIKRGQTYLHNYCLNTGETIEPLDVNETYKYLGYNQSKEIHFKETKQELINQFKQRLTSILKTQLNSKNTIKAINTYAIPILTYSFGILNWTKTQLKAIQRMINTTMTKSRKHHPRSCIQRQTLPRCEGGRGLIDVINLHNKQISTLRQYFHSKSETTGLHHSVALNDLKLTPLNLHDRSPQTNEDIKDNKIKIYEWSQKALHGRHNYDLNQPTVDKKASNEWLKRGELFPETEGFMIAVQDQVIETRNYQKYIIKKSNLQTDLCRRCCSASETIQHITGSCKSIVNTDYKFRHDQVAHIVHQLLAYKHKLINYTQPSVPYYKYKPQIVIENNTHLLYFDRAILTDKTIHYNRPDITLINKHDKTAYIIDIAVPNTHNMQNTISEKLTKYIDLKEEISRMWKLQKVTIIPIVLSSTGVIPKQLHQALATLQLPQYTYINLQKVVILNTCRIVRKFLESELSQ

SEQ ID NO: 4882 - protein, 1441 aa, Calephelis perditalis
MRLRSSNKVPQVGTRNGESHPELTSLGSPMYSGEGTESLQLAQSSTAASRVNTISSSPSSPGASARCSSMRTVSGEELSRRALAELELESITADRSPHDQSPTHSSTSYTSIPSSTQTTQTFSPSLSSSTCSTLSDNVAMDTELSVDQTPITGRISQRKKWSIEMNEFILRHYLHLTKMETDTKAYLQPLHTKFIEQFPEMQISRQRVGDQRRAIINNKLLTKQTIDRIYVEVQNELQNIHTSTQSSKTQKRLVTDGTRHRLKWTNELNEFIIRSYYKITKLEKNKTAYRKLLHQEIVSQFPELNVTEQRVADQKRLILLHKYIHEDRLKTIREEVEMELHIHTDLHDTVLTQKTVSNDTETELQNTDRVSECNDTLSINNCHEDIGLSLVHHHPLLDSPQTNPIYVSSMQTSSYENRQPEYHTNPEIDETFEKALEMFGETDPMKRVYIPKQKYSNKLNKIIQYIDNIILRKHLNENTKFMKFQTILYCAAWTTAKVNGSRVRSPGQTHEINQKENKPNWQTRLERKINKLRSHIGRLTQYINGNRNRKLIKHVDFIFENYKLHSIHEEPNTHLTHFLDTLKQKLKVVSSRLKRYKACTLRKKQNQQFNSNEKNFYRNLKSDTSNTTLNSDKETVLPQPDILKKFWQNIWSKPVTHNTDATWIQAEERNIDLDLMEFDHIPVEIFQETIKKLHSWKSPGSDFIHNFWYKKFTYIHSFLYNFINEFIREPQCMPSYITTGITYMLPKDRNDLLNPAKYRPITCLQTIYKIVTGCLGNCIYKHVEKNKILTEHQKGCRKLSQGCKEQLIIDSVILNQVKQKKSDLYTMYIDYKKAYDSVPHDWLIKVLKLYKIHTSVITFLQTIMARWTVQLKIKTHDQSVMSDPIKIERGIFQGDTLSPLWFCLALNPLSNLLNKTGLGYSFENNDVTDIDGQNFKLNHLLYMDDIKLYASTPEDLNNLVNITEDFSKDINMEFGIDKCKINSVKTGKNYLHNYSLETGETIESLEENETYKYLGYNQSKQIHVKETKQIIRHQFKHRLQAVLKTQLNSRNMIKAINTFAIPVLTYSFGILKWTKTELKTLQRMINTTMTFNRKHHPRSCVQRQILPRSEGGRGIIDISNLHNRQILSLRKFFHSRTETSRLHAVIVLNDKNLTPLNLQNKHPQNNEQILDNQVKINEWSQKTLHGRHRYDITQPTNDKYASNMWLKRGELFAETEGFIIAIQDQVIDTRNYQKYISKIRSSQTDLCRRCCSAPETIQHITGSCKSIVNSDYKHRHDQVAYIIHQLLAYKYKFLDTTQPSVPYYKYTPQTVFENKKYILYFDRAILTDKTTHYNRPDITLVNKYEKTGCIIDIAIPNTHNLRNTITEKLSKYLDLKEEISRMWNLSKVSIVPIVLSSTGVIPKQLHDALLTLELPANTYVAMQKAVILNTCRIVRKFLDIN

SEQ ID NO: 4883 - protein, 1368 aa, Symmachia rubina
MEMSTENRRYNLRPLPGDRRGTPGASAGCLSLRTASGEELNRRALTGVEPEYTTAGTTSHPSSPTCSSHIFTSITSSDQSFNTLPSSSSTSSTLSVNVAKGTDFTVEPTPITGGTSRRRKWSSEMNEFILRTYLHLTIMETDTKSYLQPLHIKFIEQFPDMQVSRQRVGDQRRAIIYKKLLPQNTIDRITIEVKNEIQNKYTRIQSTSQTSNQDNLTVNITGRRTKWTNEHNEHIIRSYYRITRLEINKTSYRKQLHQDFINKFPNLSHITEQRVADQRRLILQNNYIAEDRLLSIKRDIELELHTPSQPTVTLSISNIENQSIDIDNRLENTNEEESIMIDHFQNEVTYNPAIDVTFTQALEIFSSSDPVKRVYIPKQKHTKKLMETIQYINSVTLPNYLNRDTPFLRFQTLLYCAAWTIAKINGSKLKTLEEECNVQSNKEVKPKWQIRLERKVDMLRAHIGRLTQYINGNRNKKLIKHVDFILKHYKTHTIHEEQNVHLPHFLDTLKQKLKVVSSRLKRYKNCTLRKVQNSQFSGNEKQFYRNLKNDTNSQNTSETQNSVPSPEELRHFWQNIWEKPEKYNTDAKWIECEEINLDISNMEFSVVPVEIFQEVIKKLNNWKSPGSDFIHNYWYKKLNYIHPFLYNYINKFLHEPQSVPPYITAGTTFMLPKDRSDHLNPAKYRPITCLQTMYKIITSCLAQIIYKHIDANQILTEQQKGCRKFSHGCKEQLVIDSVLLQQTKQKKSDLYSIYIDYKKAYDSVPHDWLIKVLHIYKINPTIITFLQNTMSKWSTQLKLRTIHTTVITGPIKIQRGIFQGDALSPLWFCLALNPLSNLLNASNLGYSLKINVNDTHTQDFKLNHLLYMDDIKIYATSKEDLDTLTNITEVYSTDIRMEFGIDKCRINCIKSGQNYLHNYSLSTGDTIEPLHANEVYKYLGYNQSKQIHFKETKQTLTHQFKHRLNLILKTHLNSKNIVKAINTYAVPVLTYSFGILNWTKTELKSIQRIINTTMTKSRKHHPRACIQRQTLPRIEGGRGLIDITNLHNKQISTLRKYFHTKSDTSKLHSLIVINDSKLTPLNLQDKSPQNNEKLIDDKIKIEEWSQKTLHGRHKQDLGQPTVDKNASNEWLKRGELYPETEGFIIAIQDQVIETRNYQKHIMKIRNLQTDLCRRCCSASETIQHITGACKSIVNTDYKHRHDQVASIIHQLLALQYNLIERTQPPVPYYKYKPQVILENVTHLLYFDRAILTDKTTHFNRPDITVINKREKTAYIIDISVPNTHNLQNTISEKLSKYLDLKEEISRMWNLRKVTIIPIVISSTGVIPKQLHQALSTINLPQFTYINLQKAVILNTCRIVRKFFNTELS

SEQ ID NO: 4884 - protein, 1377 aa, Sarota myrtea
MMKTMERTRYNLRPLPGGRRGTPGAGAGCLSLRTASGEELNRRTLVGVEPEHTTADTSFQLSSSSSKIFSSITSSNQSFKTSLSSSSSTLSVNVARETDFTADPMPITGGTSQRKKWSTEMNEFILRTYLHLTIMETDTKSYLQPLHIKFIERFPEMQVSRQRVGDQRRAIVNKKLLPQSTIDKITTEVSEEIKNTCTKIQANQQTLRDQANSRANGIGKRKKWTNEHNEFIIRTYYKITKLETNKTSYRAQLHQEFIDKFPDFAHVTEQRIADQRRIIFQNKYITDDKLLRIKRDVETEQQILHIESLSTQTPEPDISNTQSVHTSENVLAENRIEDILIVNIGEDLITTDCPESLVINPVIDETFIQALEIFSETEPTNRVYIPKQRYSKNLTKIVEYINNVTLPKHLNTDTTFLRFQTVLYCAAWTVAKVNGTKLKKLEDCGLQQNTKKTTPKWQIRLERKITKLRAHIGRLTQYINGNRNKRVAEHVDFIVKNYKMHSVHEEPNVHLSEFLDTLKQKLKVVSSRLKRYKACTLRKVQNTQFKGNEKQFYRDLKHRSSDQNKLDIQNSVPPPEELRQFWQNIWEKPVRHNTDAKWIENEENNLDIYEMELCTVSAEIFHNVIKKLHNWKSPGSDLLHNFWYKKFTYIHPFLYSFINEFLENPNSLPSYITSGITYMLPKDINDTINPAKYRPITCLQTIYKILTGCLAETIYQHVEKHKILAEQQKGCRKFSQGCKEQLVIDSVILNQTKQKKSDLYSMYIDYKKAYDSVPHDWLIKVLQIYKIHPTIVNFLQTIMTKWTTQLKLKTHDTSFVTAPIQIQRGTFQGDALSPLWFCLALNPLSNLLNASNVGYEFKNGTNDTSRQELKLNHLLYMDDIKLYTTTQEDLNTLANTTEIFSTDIKMEFGIDKCKINSVKDGQNYSHSYRLYTGERIEPLDNNEVYKYLGYNQSQQIHFKETKQTLTNQFKQRLHTILKTQLNSNNIVKAINTYAIPILTYSFGVLNWTKSELKALQRNINTSMTKHRKHHPRACIQRQTLPRADGGRGLIDIVNLHSKQISKLRNYFHNKSETSEMHLMIVLNDTKLTPLNLQNKLPQNNEKIVDNETKVAEWSRKALHGRHKYDLSQPNVDKNASNEWLRRGELFPETEGFLIAIQDQVIETRNYQKHIMKIRNFTSDLCRRCCSASESIQHITGSCKSIVNTDYKFRHDQVANIIHQLLAFKHKLITRTQPPIPYYKYTPQVVLENTTHVMYFDRAILTDKTTHYNRPDITLLNKNEKTAHIIDIAVPNTHNLQSTISEKLSKYTDLKDEISRMWNLRKVTIVPIVLSSTGVIPKQLHQALSTLELPQYTYINLQKAVILNTCRIVRKFLSTESH

SEQ ID NO: 4885 - protein, 1406 aa, Apodemia mejicanus
MQSNENHYNLRPLPGGRRGASGAGAGCFSMRDTGGETLSRRASVTQHATADRRELNRRAYDVEITADSTTISPIIQASISPSSTASKQPYSPSTVSSYQLSSPTPSSQILTSSPSNQSFQSLTLSSTNSTLTVDVAREEVHATDPTPITVRTSRRKKWSSEMNEFILRTYLHLTHMETDTRSYLQPLHIKFIERFPEMQVSRQRVGDQRRAIIRKRLIPQSTIDQIYTEVKSDIENTYTRMKKNEVQKNQQQINRKRIKWTNEHNEFIMRSYYRITKLETNKTAYRKHLHQETINKFTELKGVTEQRIADQRRLIIRNKYINGDRLTDIRNEVQNEFHIPEDAVEPTPTISPNDTFIQTAVIEHGLLDINTDSSDNTPIIENSNDTSTNQVIDEIFKKSLEMFSEIYPTKRVYIPKQRYSKTLNKTIQYINNTILPKYLNENTTFLKFQTVIYCAAWTTAKINGSKLKNPDETEYTQENSRDFKPKWQVRLEKKVDKLRGHIGRLTQYINGNRHKKLVKHIDFILNNYKLHSVHEEPNTQLIHFLDTLKQKLKVVSSRLKRYIACTLRKRQNKQFNINERQFYRNLKNTSATCSINLDKGNTTHLSEKLRRFWQNIWENSTDYNTEASWISKQEHFLQIDNMEFEEVPVEIFQNVLKNLHNWKSPGSDFIHNFWLKKFTYIQPFLHNFINYFIKTPHSIPEYITAGTTYMMPKDIKDQLNPAKYRPITCLQTIYKIITGCLTQCIYKHVERNKIIAEEQKGCRLFSQGCKEQLIIDSVILNQTKQKRSDLYSIYIDYKKAYDSVPHDWLIKILEIYKINSHIITFLQTVMKTWTTQIKLKSGGITMITEPIKIQRGIFQGDSLSPLWFCLALNPLSYLLNSTNLGYVFKNNITDTDRQDLKLNHLMYMDDIKLYATKQEDLDSLIYITEMFSNDIRMEFGIDKCKINSIQAGQNCIHSYSLSTGEIITALDANETYKYLGYNQSKYIHVKETKQTLQNQFKHRLQSILKTQLNSRNCIKAVNSYAIPILTYSFGILNWTKTELKTLQRIINTTMTKNRKHHPRSCTQRQTLPRTEGGRGLIDIVNLHNRQISTLRKYFYSKADISLLHSKVVANDIKFTPLNLQNKFIQNNERIVDNKTKIDEWSRKTLHGRHRQDLNQPTNDKDASNKWLKRGELFPETEGFIIAIQDQVIETRNYQKYIMKISLETEQCRRCYSASETIQHITGSCKSIVNTDYKYRHDQVAYIIHQLLAYKYKLLDNTLAPVPYYKYIPQTVLENSTHVLYFDRAILTDKTTHYNRPDITLINKDEKIAHIIDIAVPNTHNLQNTIVEKHSKYLDLKEEILRMWGLQKVYVVPIVLSSTGVIPKQLHQALSTLDLPSYTYINLQKSVILNTCRIVRKFLDVQK

SEQ ID NO: 4886 - protein, 846 aa, Apodemia hypoglauca
MACTLRKKQNKQFNINERQFYRNIKNTTADSSNYLDKVNTLHFPEELRRFWKNIWENSVNYNMEANWIAKEENFLQIDNMEFDEVPVEIFQNVVRNLHNWKSPGSDFIHNFWLKKFTYIHPFLYKFINYFIKTPQSIPEYITAGTTYMMPKDINDQHNPAKYRPITCLQTIYKIITGCLTQCIYKHIESNKIIVEEQKGCRAFSQGCKEQLIIDSVILNQTKQKKGDLYSSYIDYKKAYDSVPHDWLIRVLEIYKINSHIITFLQTIMKTWTTQLKLKSGGITMITDPIKIQRGIFQGDSLSPLWFCLALNPLSHLLNSTNIGYSFKFTDHITDNNRQDLKLNHLLYMDDIKLYATKQADLDSLVYITEMFSNDIKMEFGIDKCKFNSMKAGQNHTHSYILSTGEIISALDDNETYKYLGYNQSKLIHVKETKQTLQNQFKHRLQSILKTQLNSRNIIKAINSYAIPILTYSFGILNWTKTELKTLQRIINTTMTKNRKHHPRSCTQRQTLPRSEGGRGLIDIVNLHNRQIYTLRKYFHNKAETSLLHSKVVVNDIKFTPLNLQIRHPQNNEQIVDNKIKIDDWSRKTLHGRHRQDLLQPLNDKDASNMWLKRGELFPETEGFIIAIQDQVLETRNYQKHIMKISIETDQCRRCCSASETIQHITGSCKSIVNTDYKHRHDQVASIIHQLLAYKYKLLDNTLPLVSYYKYTPQIVLENSTHLLYFDRAILTDKTTHYNRPDITLINKTEKIAHIIDIAVPNTHNLQNTIAEKLSKYLDLKEEIARMWSLQRVTIVPIVLSSTGVIPKQLLQALLTLDLPSYTYINLQKAVILNTCRIVRKFLDVQK

SEQ ID NO: 4887 - protein, 1365 aa, Apodemia murphyi
MENRRYNLRPLPGGRRGAPGAGAGCLSLRTASDEVLNRRALVGNEPEDITAETYHFSSSTPSSQIFTTSSSTNQSFQSLSLSSTNSTLPEDVAREEVFATDPTPITVRTSKRKKWSIEMNKFILRTYLHLTLMETDTRSYLQPLHLKFIEQFPEMQVSRQRVGDQRRAIIRKKLIPQSTIDQIYMEVKSEIENTYTRMETNEIQKQHQEINRKRLKWTNEHNEFIMRSYYRITKLGTNRTTYRRHLHQEFINKFTELKDVTEQRVADQRRLIVSNKYINEDRLNNIRIEVENELQIPEIDIELMPTIHTNETLIQTADSEHGLLEINTNSSDNTPLTEKSNDMSSNPEIDEIFENSLNLFSEIYPTKRVYIPKQRQSKMLNTILQYINNTILPKYLNENTTFLKFQTVIYCAAWTTAKLNGSKLKNVEESEYPQEFQKDFKPKWQTRLEKKVSKLRGHIGRLTQYINGNRNRKLVKHVNFILNNYKLHSVHEEPNTQLNHFLDTLKQKLKVVSSRLKRYMACTLRKKQNKQFNINERQFYRNIKNTTANSSINLDKVNTMQFPEELRQFWKNIWENSVNYNMEANWIAKEENYLQIDNMEYDEVPVEIFQNVIRNLHNWKSPGSDFIHNFWLKKFTYIHPFLYKFINYFIKTPQSIPEYITAGTTYMMPKDISDQHNPAKYRPITCLQTIYKIITGCLTQCIYKHVESNKIIVEEQKGCRSFSQGCKEQLIIDSVILNQTKQKKGDLYSGYIDYKKAYDSVPHDWLIRVLEIYKINSHIITFLQTIMKTWTTQLKLKLGGITTITDPIKIQRGIFQGDSLSPLWFCLALNPLSHLLNSTNIGYSFKFTDHITDNNRQDLKLNHLLYMDDIKLYATKQADLDSLVYITEMFSNDIKMEFGIDKCKINCIKAGQNYSHSYSLNTGEIISALDVNETYKYLGYNQSKLIHVKETKQTLQNQFKHRLQSILKTQLNSRNIIKAINSYAIPILTYSFGILNWTKTELKTFQRIINTTMTKNRKHHPRSCMQRQTLPRSEGGRGLIDIVNLHNRQIYTLRKYFHSKADTSLLHSIVVLNDIKFTPLNLHNRHPQNNEQIVDNKIKIDDWSRKTLHGRHRQDLIQPLNDKDASNMWLKRGELFPETEGFIIAIQDQVLETRNYQKHIMKISLESDQCRRCCSASETIQHITGSCKSIVNTDYKHRHDQVASIIHQLLAHKHKLLDNTLPPVSYYKYTPQIVLENSTHLLYFDRAILTDKTTHYNRPDITLINKTEKIAHIIDIAVPNTHNLQNTIAEKLSKYLDLKEEISRMWSLQRVTIVPIVLSSTGVIPKQLHQALLTLDLPSYTYINLQKAVILNTCRIVRKFLDVQK

SEQ ID NO: 4888 - protein, 1300 aa, Apodemia chisosensis
MSSSPTNQSFQSLSLSSTHSTLPVDVAREEVFATDPSPITARTSQRKKWSTEMNEFILRTYLHLTIMETDTRSYLQPLHIKFIEQFPEMQVSRQRVGDQRRAIIRKKLIPQSTIDQIYMEVKSDIENTYTRMETNEIQRHHQEINRKRLTWTNEHNEFIMQSYYRITRLETNKTAYRKHLHQEFINKFTELKNVTEQRVADQRRLIIRNKYINEDRLNNIRIEVENEFQTPEIDIEPMQTINAHDTFIPTAEYIEHGLLDINTENSDNRSLAENRNDMSSNQEIDETFEKSLELFSEIYPTKRVYIPKQRYSKTLIKIMQYINNTILPKYLNENTTFLKFQTVIYCAAWTTAKLNGSKLKNPEETAFSQENQRDFKPKWQIRLEKKVDKLRGHIGRLTQYINGNRNRKLVKHIDFILNNYKLHSVHEEPNTQLIHFLDTLKQKLKVVSSRLKRYIACTLRKRQNKQFNMNERQFYRNLKNTTANRSINLDKVNTIHLPEELRRFWQNIWENSVDYNMEASWIAKEENDLQIDNMEFDEVPVEIFQNVIKNLHNWKSPGSDFIHNFWLKKFTYIQPFLYNFINNFIKTPQSIPEYITTGTTYMMPKDINDQHNPAKYRPITCLQTIYKIITGCLTQCIYKHIESNKIIAEEQKGCRLSSQGCKEQLIIDSVILNQTKQKKGDLYSGYIDYKKAYDSVPHDWLIRVLEIYKINSHIITFLQTVMKTWTTQLKLKSDGITMITDPIKIQRGIFQGDSLSPLWFCLALNPLSHLLNSTNIGYSFKTIDHNTDTDRQDFKLNHLMYMDDIKLYATKQEDLDSLVYITEMFSNDIRMDFGIDKCKINCFKAGQNHTHSYSLSTGEIISALDFNETYKYLGYNQSKYIHVKETKQTLENQFKHRLQSILKTQLNSRNIIKAINSYAIPILTYSFGILNWTKTELKTLQRIINTTMTKNRKHHPRSCTQRQTLPRSEGGRGIIDIVNLHNRQISTLRKYFHNKADTSLLHSIVGVNDIKFTPLNLQNRLPQNNEQITDNKTKIDEWSRKTLHGRHRQDLNQPTNDKDASNKWLKRGELFPETEGFIIAVQDQVLETRNYQKYIMKISLESDQCRRCCSASETIQHITGSCKSIVNTDYKHRHDQVASIIHQLLAYKYKLLDNTSPPVSYYKYTPQVVLENNTHVLYFDRAILTDKTTHYNRPDITLINKKEKIAHIIDIAVPNTHNLQNTITEKLSKYLDLKEEILRMWSLQKVTVVPIVLSSTGVIPKQLHQALLTLDLPTYTYINLQKAVILNTCRIVRKFLDVQK

SEQ ID NO: 4889 - protein, 1366 aa, Apodemia zela
MENRRYNLRPLPGGRRGAPGAGAGCFSLRTASDEELNRRALVGVEPEDITAETSYHFSSPTTSSHIFTSSSPTNQSFQSLSLSSTNSTMTVDVAREEVFATDPSPITVRTSQRKKWSTEMNEFILRTYLHLTIMETDTKSYLQPLHIKFTEQFPEMQVTRQRVGDQRRAIIRKKLIPQSTIDQIYTEVKSDMENTYARMETNEIQKHHQTINRKRLKWTNEHNEFIMRSYYKITKLETNRTVYRKHLHQEFINKFTELKHVTEQRVADQRRLIIKNKYIDEDRLNNIRIEVENEFQIPENIIEPMTTINSNDTFTQTAEIEHGLLAINTDSSDITPLTENRNDTSSIQEIDETFEKSLELFSEIYPTKRVYIPKQRHSKTLSKLIQYINNTILPKHLNENTTFLKFQTVIYCAAWTTAKLNGSKLKNPGVSEYSQENPREFKPKWQIRLEKKVDKLRGHIGRLTQYINGNRNRKLVKHIDFILNNYKLHSIHEEPNTQLIHFLDTLKQKLKVVSSRLKRYIACTLRKRQNKQFNMNERQFYRNLKNSTTNCSINSDRVNTIHLPEELRRFWQNIWENSVDYNIEASWIAKEENYLQIDNMEFDEVPVEIFQNVIKSLHNWKSPGSDFIHNFWLKKFTYIQPLLYNFINNFIKTPQIIPEYITAGTTYMMPKDINDQHNPAKYRPITCLQTIYKIITGCLTQCIYKHIERNKIIAEEQKGCRSFSQGCKEQLIIDSVILNQTKKKKGDLNSVYIDYKKAYDSVPHDWLIRVLEIYKINSQIITFLQAVMKTWTTQLKLKSDGITVITDPIKIQRGIFQGDSLSPLWFCLALNPLSHLLNSTNIGYSFQTTNHITDTDRQDFKLNHLLYMDDIKLYATKQEDLDSLVHITEMFSNDIRMEFGIDKCKINSIKAGQNHTHSYCLSTGEIISALDFNETYKYLGYNQSKHIHVKETKQTLQNQFKHRLQSILKTQLNSRKMIKAINSYAIPILTYSFGILNWSKTELKTLQRIINTTMTKNRKHHPRSCTQRQTLPRSEGGRGLIDIVNLHNRQISTLRKYFHHKADTSLLHSIVVANDIKYTPLNLLNRLPQNNEQIADNKTKIDEWSRKTLHGRHRQDLNQPTNDKDASNEWLKRGELFPETEGFIIAIQDQVLETRNYQKHIMKITLETDQCRRCCSASETIQHITGSCKSIVNTDYKHRHDQVASIIHQLLAYKYKLLDNTFPPVPYYKYTPQVVLENSTHVLYFDRAILTDKTTHYNRPDITLINKTEKRAHIIDIAVPNTHNLQNTIAEKLSKYLDLKEEILRMWSLQKVTVVPVVLSSTGVIPKQLHQALSTLDLPSYTYINLQKAVILNTCRIVRKFLDVQK

SEQ ID NO: 4890 - protein, 766 aa, Theope publius
MKFDEVPVEVFQTVIQKLHNWKAPGSDFIHNFWFKKFTYLHPFLHNFINEFIKTPQSIPLYITSGITYMLPKDQNDLLNPAKYRPITCLQTIYKIITGCITQSIYNHIDKNNLLTEQQKGCRRFSKGCKEQLIIDSVILNQTKQKKSDLYSIYIDYKKAYDSVPHDWLLKILEIYKIDPKITFFLQTLMNQWTTRLTLKVSGKTINTDPIKIQRGIFQGDSLSPLWFCLALNPLSNLLNSLNTGYTFKVQNNNVDGHKIKLNHLLYMDDIKLYAASKKDLESLTNITELFSKDIKMEFGIDKCKINSVKAGQVFLHSYYLDNGDIIEPLDVNQTYKYLGYNQSKQIHIKETKQTLQSQFKHRLQSIMKTYLNSKNITKAINTYAVPILTYSFGILNWTKTELKKLQRIINTTMTKNRKHHPRSCIQRLVLPRIKGGRGLIDIINLHNKQITTLRKYFYEKSGTSMLHSVVVLNDIKLTPLNLHNRLPQNNEKVTDDHTKIDEWSRKTLHGRHKHDLDQPTIDKVASNTWLKQGRLFPETEGFMIAIQDQVIETRNYKKYIIKNSSQSDTCRRCCSASETIQHITGSCKSIVNTDYKFRHDQVAHIIHQFLAQKYKLINLTQTPIPYYKYIPQVVLENAAHVLYFDRAILTDKTVHYNRPDITLSNKIDKTAYIIDIAIPNTHNPINTITEKLSKYVDLKDEVLRMWNLQKVTIVPIVLSSTGVTPKEIHQPLSTLDISPYMYINLQKAVILTTCRIVRKLLNLETN

SEQ ID NO: 4891 - protein, 1069 aa, Passova gellias
MAEPDSPPIIIEGDGFVILLPIASDCSIQCPLCTRCGRFKGVRKIENFYRHCKDNHAAMGIMYRCAQCGFVAPEGKRYPRKIVSQHCGSCVPNVVPAPSNTDRERRLAIREAIRGQTPRVPVMSIAPTIPPPMVVPTPVSPVQDVENNELIGHTELSGKNNPPTVPETTPPTSIVEQVTGLERTLVERNTANAETARASTPMSDEVVTGAENPPGERQARLRPKPEQRVLVDSLNIVNDPEQLNELAQRVALFLHHTADGSADCPRPNPPPRRCNNTRRDQDRVAEATRLQRLYRKNRKKAIRYILQGPGETCNIDLTTVDAHFRTLASRRESQAEWPDVFNPEPPTNPSNTRLCEPLKRKEVLQKLRSRKNTAPGPDGLTYAALVRADPGAYVLTSLFNAVWRVESIPDCWKTSNTILIHKKGDKNNVANWRPIAMSDTCPKLFACLLAERIGKWATVNGRFSDSQKGFRQYEGCFEHNFMLQEAIRDAKLRGRELVVAWLDLSNAFALVPHSSIDRALEGHDFPAKIRNIVAALNKNNRTRIRVGNGFTEPIAMDAGVRQGCPLSPNLFNLTLEVVLRQLAGTGEGYNIGEVRLCSLAYADDIVVLADSADGMSRLLRVVEEAAHVVGLEFNSAKCATLHIVSGDKSSVQRTNFTIGGQAVRSLGPDEAYEHLGIPTGFQIKQTPVNTIRELVQDALTIDRSLLAPWQKLDAVATFVLPCMDFLMQGANVEKEYLHEADRTIKRLAKTWLHLPQRASAEIVFLPPSQGGGGLLPLADLHDLSTVAHAYKMLYASDRSVSEVARCTLKDTVAARQRKPPNGEDLARYLSCDQGLPRSSGRASFWSATRRAVYRLNKKISLRWNWCPMSDSLTIQMAHGAPVTPAGRAVLYRRLRQQLTEHYARELINKPDQGKVMEVSRRANSSNHFLRTGGYTRFCDWRFIHRARLGLLPLNAIKRWQTGVDKRCRECGHDLETIPHVLSHCQKHSAARQIRHNHLQDRLVKACRCPGVISVNRTVDGARGDMAALRPDIVIRDEPRKSITIVDVTVPFENRWQAIEAAKKEIWCPR

SEQ ID NO: 4892 - protein, 1142 aa, Pyrrhopyge sergius
MGEALPSPVVVERDSFVVLLPIAPECNIQCPLCTGCGRFKGIRKIENFYRHCKDSHMSMSVLYRCRNCGYVAPEGKRYPRKVVSQHCSACVPTVASAPTGTDRQRRGAIRRILRGQAMHTSSAAQPLEAPVTPEAHGRDIPLLPLEIQVDQGEVYSDQADLSNVPTGDRASTLAAEAAVEAEQTVEPMGLIFEAPLQPAAAFHAGITSDRRYKHNQPTPEQKILIDNLEAVDDPDQLNELSQRVAQYLQQFAENAVGSREPRPNPPPPRPTSTRRDPDRIAEATRLQRLYRRNRKAAIRQILQGPGQTCNIDLRTVETYFHTLASRREGLEEWPDVFSTESPTENSNTRLCEPFRREEVLQRLRGRKNTAPGPDGLTYADLNKADPGAFVMTSLFNAVWRLESTPDCWKNSNTILIHKGGDGGNIANWRPIAMSDTCPKLFASLVASRIKRWASVNRRFSDVQKGFREYEGCYEHNFVLHEAIRDAKAKGRELVIAWLDLTNAFSLVPHSSIVRALDGHRVPAKIKNIVMGLNSNCRTKVRIGNGFTEPILLEAGVRQGCPLSPDIFNLTLEVVLRQIAGTGEGYAIEGNKLCSLAYADDIAILADSPEAMKRLLLTAEEAARVVGLEYNPSKCAVLHIVGRERRGNQISEFRIGGRPIQTLGPHEAYEYLGIPTGLEIKQTPVNTIREIMADIFTINESLLAPWQKLDAVGAFLLPRMDFIMQGANIEKEYLHEADKTVKKIAKSWLNLPQRASAELVFLPPSQGGGGLLPLADLHDLYAVAHAYKMLYAPDPVVGSIAKRTLCGTVSDRMREPASNEDLARYLSCDSEMPRSSGKATFWSVVRKATFRLNKKISLQWIWCRESNSLNIQLANGAPITPATRLTLYHRLRLQLIEHYCKRLMVKSDQGKVLDVTRSATCSNHFLRSGSFTRFCDCRFIHRARLGLLPLNATKRWRSGVDKRCRRCGYHLETIPHVLNHCTIHSAARQQRHNNLQNRLVKAARSPGDITVNNSVNGTRGEAAALRPDIVIRNESSKTVTIVDVAVTFENRREAMVAAKREKILKYESIACQLREQGYRVTVDAFMVGSLGGWSAGNERILLKHLKINRRYAALMRRLMVSDTIRWSRDIYVEHVTGHRQYGE

SEQ ID NO: 4893 - protein, 1154 aa, Myscelus amystis
MAEPDSPPIINEGDGFVILLPIASDCDIQCPLCTRCGRFRGTRKIENFNRHCRDNHAEMGIVYRCSRCGFMAPEGKRYPRKIVSQHCSSCVPNIVPATSNTDRERRLAIREALRERTPQVPDTAIAPVASTLADVPSPTTSIQYAAGNAAIAQTEPPGTYRSPTVRESTPPLAALEPVMTDQVTGLVGAAMEGSTANAETYRSPAATPDEDAGVENPPGGNYRRSGPTPEQKALVDSLNTVNEPEQLNELAQRVALFLQRPADDAATRPDPRPNLPPRRSNNTRRDPDRVAEATRLQRLYRRNRKKAIRYILQGPGEICDLNITAVDAHFRTLASRRESQAQWPDIFNPEPPKDPSNARLCEPLWRKEVLQRLRSRKNTAPGPDGLTYAALIKADPGAYVLTSLFNAAWRVESIPSCWKNSNTILIHKKGDRNNVANWRPIALSDTCPKLFASLLAGRVEKWATANGRFSDSQKGFRQYEGCYEHNFVLQEAIRDARLKGRELIVAWLDLSNAFALVPHSSIARALDGHGFPAKIKNIVAALNTGNSTRIRVGSGYTEPIAIDAGVRQGCPLSPSLFNLTLEVVLRQLVRTGEGYNIGGERVCNLAYADDIAVLADSADGMCRLLKAAEEAAHTVGLEFNPAKCAALHIVGGERSRVQQTKFQIGGHTIHSLGPDEAFTHLGIPTGFQIKQTPVSTIRELLADARAIDRSLLAPWQKLDAVGTFILPCMDFIMQGASLEKEYLREADRVLKRLAKSWLHLPQRASAEAIFLPPSQGGGGLLPLADLHDIGTVAHAYRMLYAPDRSVREIAKRTLQDTVAARSRMPPSGEDLARYLCCDLSLPRSSGRASFWSATRRAVYRLNKKISIRWIWCPVSDSLEILMASGAPIKPTERATLYRRLRQQLVEHYAQELLRKPDQGKVMEVSRRANCSNHFLRTGSYTRFCDWRFIHRARLGLLPLNATKRWQATADKRCRRCGHDLETIPHVLNHCHKHSAARQLRHNNLQDRLVKAIRCRGVIGVNNIVEGARGESAALRPDIVIRDEPGKLITIVDVAVPFENRWQAMEAAKTEKKQKYGALADQLREQGYRVVVDAFVVGSLGAWDPSNERVLSRLRVNRRYAALMRRLMVSDTIRWSRDIYVEHVSGHRQYEQPQS

SEQ ID NO: 4894 - protein, 1170 aa, Heliconius hortense
MGDPVIIIEDPCIVVLSPVPENTEISCPLCLGRRGHYVGARRVENFIRHCKEHHQGRTVKYRCAGCGYEPPEQSRYQRKLVNHHATTCESLAASVLPPSSGAADQQRRQNIRRNLRARPEAAPPEEVVPVPAVDVPTPPNRPVEGPSAPQPATLGSPGPVVLFESPTVTQGLVISAPPLDVVPPVAGTATPTSTVSHRSQPEQTPNSEVSSHPPLRAAPVVSQGAPFRPRDEPPATRGPSAEQQRLISTIEAAANQHQLDDASRAVVHFLQKRIKRAPTRHGPPRQARRAQEPSSRVQEAARLQGLYRSNRKRALQSILDDSAATCGISKQEVFQHFSALAQERDGEHDWPNVFNLPSPVEDSNSALMSPFSAKEVYDKLRSRSDTTPGPDGVRYSQIRKTDRGAYVITALYNAVWRLQMIPDSWKDSTTSLIFKKGDVCSVDNWRPIAVGDTCPKLFAALLAERLKIWARVNGRFSPSQKGFLDYEGCFEHNFVLQQAIHRAKEDKRELVMVWLDFSSAFSSLPHSSIARALREHQVPRHVRNIIERLYTGSRTRIRTIDGLTDSINMQAGVKQGCPLSPDIFNLTLEVVLRHATSIGVGFKVDDDMVLSVLAYADDLVLLADSEEGMRRHLEATQGAARAIGLSFNPDKCASLHIGPDGVRNTRYSVQDALIAVLGPEDTYTHLGMPTGYQIHQTPCSTLAGMITDLRKIDESLLAPWQKLDAAGTFILPRLDFAMQGAEISREHLREADKVVKKLAKMWMALPQRASPELAFVSPSTGGGGLLPLGDLYEAYTQAHAFRMLHATDPLVSGLAAKSLRDTVSVRLRKAPSNIDMARYLSGDLDIPRSSAKTSFWARVRNAARRLNNRIGCRWIWSQQQQELQLRLRDGTTIGANGRSEAYRRLRREFMTTYTDSLLRKPDQGKVFAVTSQTASSNHFLRTGRNTRFCDWRFIHRARLDVLPLNGTKRWLVGNDKRCRKCGHAQETLPHVLNHCGVHAAARQKRHHNIVHRLVKAANGPSGRRRDGAIITSDRVVEGTRGREATLRPDIVVRNPAAKAITIVDVCVPFENRPEALDAARSEKLRKYAALADQLRQDGYRVDVAAFVVGALGAWDGRNEKTMDILGINKYYARMMRRFMVSDTIRWSRDIYVEHVSGIRQYAEAEVPAPQ

SEQ ID NO: 4895 - protein, 727 aa, Mimoniades versicolor
MSPFSSKEVYTKLRSRSDTAPGPDGVRYSHLMKTDRGAYVITALYNAVWRLQIIPDAWKDSTTTLIYKKGDVSDVNNWRPIAVGDTCPKLFAALLAERLMSWAQTNGRFSPSQKGFLNFEGCFEHNFVLQEAIHLAREEKRELVISWLDFSNAFSSLPHSSIIRAIREHQVPCGLRRIIECLYAGSRTRIRTSEGLTDSISMEAGVKQGCPLSPGIFNLTLEVVLRHASSIGAGFRLDDDTLVSVLAYADDLVLLAGSGEDMQRLLKATQEAARAIGLSFNPGKCASLHIGPNGVQDTAFHVQGVPILALGPDDAYTHLGIPTGFRIHQASSTTLQGMMSDLRKIDESLLAPWQKLDAARTFILPRLDFIMQGANVSRECLAEADKLIKKLAKKWLALPQRASPELAFVPPSAGGGGLLPLGDLYEAYTQAHAFRMLHASDPLVCGLATKSLKRTVSDRLRKDPSNIDIARYLSGDLDIPRSSIGTSFWARVRGAAWRVNKKIGCRWIWSQPQQELQLRLRDGTIIGADGKGMAYRLLRQDFMASYANSLQKKPDQGKVFAVTSRSAFSNHFLQTGRNTRFCDWRFIHRARLDVLPLNGTKRWLLANDKRCRRCGHAQETLPHVVNHCGVHAAARQKRHNNIVDRLVKAANGPSGHRNGITINTNKAVEGARGQEATLRPDIVLRNTVVKRITIVDVCVPFENRPAAMDAARAEKLRKYAALADQLR

SEQ ID NO: 4896 - protein, 1119 aa, Heliconius clysonymus
MGRRGHYVGARRVENFIRHCKEHHQGRTVKYRCAGCGYEPPEQSRYQRKLVNHHATTCEGLAASVLPPPSGAADQQRRQNIRRNLRARPEAAPPEEVVPVPAVDVPTPPTRPAEGPSAPQPATLGSPGPVVHFESPTVTQGLVISAPPLAVVSPVAGAATPTSTASHRSQPEQTPNSEVSSHLPLRAAPVVSQGAPFRPRDEPPATRGPSAEQQRLINTIEATANQHQLDDASRAVVHFLQKRIKRAPARHGPPRQVRRTQEPSNRVQEATRLQGLYRSNRKRALQSILDASAATCGISRQEVFQHFSALAQERDGEHDWPNVFNLPSPVEDSNSALMSPFSAKGVYAKLRSRSDTAPGPDGVRYSQIRKADRGAYVITALYNAVWRLQMIPDSWKDSTTSLIFKKGDVSSVDNWRPIAVGNTCPKLFAALLAERLKIWARVNGRFSPSQKGFLDYEGCFEHNFVLQQAIHRAKEDKRELVMVWLDFSSAFSSLPHSSIARALREHQVPRHLRNIIERLYTGSRTRIRTIDGLTDSINMEAGVKQGCPLSPDIFNLTLEVVLRHATSIGVGFKVDDDMVLSVLAYADDLVLLADSEEGMRRHLEATQEAARAIGLSFNPDKCASLHIGPDGVRNTRYSVQDALIAVLGPEDTYTHLGMPTGYQIHQTPCSTLAGMITDLRKIDESLLAPWQKLDAAGTFILPRLDFAMQGAEISREHLTEADKVVKKLAKMWMALPQRASPELAFVSPSTGGGGLLPLGDLYEAYTQAHAFRMLHARDPLVSGLAAKSLRDTVSVRLRKAPSNIDMARYLSGDLDIPRSSAKTSFWARVRNAARRVNKRIGCRWIWSQQQQELQLRLRDGTTIGANGRSEAYRRLRGEFMATYTDSLLRKPDQGKVFAVTSQTASSNHFLRTGRNTRFCDWRFIHRARLDVLPLNGTKRWLVGNDKRCRKCGHAQETLPHVLNHCGVHAAARQKRHHNIVHRLVKAANGPSGRRRDGAIITSDRIVEGARGREATLRPDIVVRNPAAKAITIVDVCVPFENRPAALEAARSEKLRKYAALADQLRQDGYRVDVAAFVVGALGAWDGRNEKTMDILGINKYYARMMRRFMVSDTIRWSRD

SEQ ID NO: 4897 - protein, 811 aa, Heliconius xanthocles
MEDSNSTLTSSFSPREVLAKLRSRSDTAPGPDGIRYSQIRKSDRGAHVITALYNAIWKLQMIPDPWKDSTTSLIFKKGDVNSLDSWRPIAVGDTCPKLFAALLADRLKTWARVNGRFSPSQKGFLDYEGCFEHNFVLQQAIHRAKEEKRELVVVWLDFSSAFSSLPHSSIARALQEHQLPRRLRTVIERLYIGSRTRIRTIDGPTDVINMEAGVKQGCPLSPDLFNLTLEVVLRHASSTGVGFKLDDELLLSVLAYADDLVLLAGSEEDMGRHLEAAQDAARAIGLSFNPDKCASLHIGPDGVRNIIYSVQNTPIAALGPEDTYTHLGIPTGYQVHQAPCSTLAGMVTDLRKIDESLLAPWQKLDAAGSFILPRLDFAMQGAEVSREHLAEADRYVKRLAKKWMALPQRASPELAFVSPSMGGGGLLPLSDLYEAYTQAHALRMLHARDSMVSGLAVKSLRDTVSARLRKAPSNVDMARYLSGDLDIPRSSAKTSFWARVRNGARRVNKRIGCRWIWSRQQQELQLLLHNGTTIGACGRRDAYRRLRGEFMATYTDSLLRKPDQGKAFSVTSQAASSNHFLRTGRNTRFCDWRFIHRARLDVLPLNATKRWLVGNDKRCRKCGHAQETLPHVLNHCGVHASARQKRHHNVVHRLVKAAKGPSGGRRDGAVITSDRVVEGTRGHEASLRPDIVLRNTAANTITIVDVCVPFENRPTAIEAARSEKLRKYATLADQLRQDGYHVNVAAFIVGALGAWDARNERAMDLLGINRYYARMMRRFMVSDTIRWSRDIYVEHVSGIRQYAEAEARPCQ

SEQ ID NO: 4898 - protein, 1123 aa, Heliconius melpomene
MGDPVILCEDSYIVVRSPVPENTEISCPLCMGRRGHYAGARRVENFIRHCKEHHQGRTVKYRCTGCGYEPPDQSKYPRKLVNHHATTCEGLAATVLPPPSGVADQQRRQNIRRNLRTRPEASLTVEVEPAPAVDEPTPPLAAAPASPASHSSQPEQTPNSGVSSHHSLRAAAVVSRAASPCSRDEPLVARGPTAEQQRLIDTIEAAANQHQLDDASQAVVRFLQKRVERAAARHRPQRQARRTEQPSNRVQEATRLQALYRSNRKRALQSVLEDSTATCRIGKQEVLQHFSALARKRDGELDWPNVFDLPAPAEDSNDILMSPFSAKEVSAKLRSRSDTAPGPDGVRYSQIRRTDRGAYVITALYNAVWRLQMIPDPWKDSTTSLIFKKGDVNNIDNWRPIAVGDTCPKLFAALLADRLKTWARVNGRFSPSQKGFLDYEGCFEHNFVLQQAIHRAKEEKRELVVVWLDFSAAFSSLPHSSITRALREHQVPRSVCDVIERLYIGSRTNIRTIDGLTDIVNMEAGVKQGCPLSPDIFNLTLEVVLRHATSSGVGFKLDDEMLLSVLAYADDLVLLANSEEGMKRHLEATREAAWAIGLSFNPDKCASLHIGPDGVRNIRYSVQDAQIAALGPDDIYSHLGIPTGYQVHQTPCSTLAGMITDLRKIDESLLAPWQKLDAAGTFILPRLDLAMQGAEISREHLAEADRVVRKLAKGWMALPQRASPELAFLSPSNGEGGLLPLSDLYEAYTQAHAFRMLHAKDPLVSGLAAKSLRDTVSARLRKTPSNIDMARYLSGDLDIPRSSAKTSFWARVRNAAGRMNKRIGCRWIWSQQQQELQLHLRDGTTIGARERSEAYRRLRGEFMATYTHSLLRKPDQGKVFAVTSQTASSNHFLRTGRNTRFCDWRFIHRARLDVLPLNSTKRWLVGNDKRCRKCGHAQETLPHVLNHCGVHAAASQKRHHNIVHRLVKAANGPSGHRRDGAVITSDRVVEGTRGRESTLRPDIVLRNAATKEITIVDVCVPFENRPAAIEAARSEKLRKYAALADQLRQDGYRVKVAAFVVGALGAWDGRNEKTLDLLGINKYYAGMMRRFMVSDTIRWSRDIYVEHVSGIRQYAEAEVPPRQ

SEQ ID NO: 4899 - protein, 1123 aa, Heliconius numata
MGDPVILCEDSYIVVRSPVPENTEISCPLCMGRRGHYAGARRVENFIRHCKEHHQGRTVKYRCTGCGYEPPDQSKYPRKLVNHHATTCEGLAATVLPPPSGVADQQRRQNIRRNLRTRPEASLTVEVEPAPAVDEPTPPLAAAPASPASHSSQPEQTPNSGVSSHHSLRAAAVVSRAASPCSRDEPLVARGPTAEQQRLIDTIEAAANQHQLDDASQAVVRFLQKRVERAAARHRPQRQARRTEQPSNRVQEATRLQALYRNNRKRALQSVLEDSTATCRIGKQEVLQHFSALARKRDGELDWPNVFDLPAPAEDSNDILMSPFSAKEVSAKLRSRSDTAPGPDGVRYSQIRRTDRGAYVITALYNAVWRLQMIPDPWKDSTTSLIFKKGDVNNIDNWRPIAVGDTCPKLFAALLADRLKTWARVNGRFSPSQKGFLDYEGCFEHNFVLQQAIHRAKEEKRELVVVWLDFSAAFSSLPHSSITRALREHQVPRSVCDVIERLYIGSRTNIRTIDGLTDIVNMEAGVKQGCPLSPDIFNLTLEVVLRHATSSGVGFKLDDEMLLSVLAYADDLVLLADSEEGMKRHLEATREAARAIGLSFNPDKCASLHIGPDGVRNIRYSVQDAQIAALGPDDTYSHLGIPTGYQVHQTPCSTLAGMITDLRKIDESLLAPWQKLDAAGTFILPRLDFAMQGAEISREHLAEADRIVRKLAKGWMALPQRASPELAFLSPSNGGGGLLPLSDLYEAYTQAHAFRMLHAKDPLVSGLAAKSLRDTVSARLRKTPSNIDMARYLSGDLDIPRSSAKTSFWARVRNAAGRMNKRIGCRWIWSQQQQELQLHLRDGTTIGARERSEAYRRLRGEFMATYTHSLLRKPDQGKVFAVTSQTASSNHFLRTGRNTRFCDWRFIHRARLDVLPLNSTKRWLVGNDKRCRKCGHAQETLPHVLNHCGVHAAARQKRHHNIVHRLVKAANGPSGHRRDGAVITSDRVVEGTRGRESTLRPDIVLRNAATKEITIVDVCVPFENRPAAIEAARSEKLRKYAALADQLRQDGYRVKVAAFVVGALGAWDGRNEKTLDLLGINKYYAGMMRRFMVSDTIRWSRDIYVEHVSGIRQYAEAEVPPRQ

SEQ ID NO: 4900 - protein, 783 aa, Heliconius atthis
MSPFSAKEVSAKLRSRSDTAPGPDGVRYSQIRRTDRGAYVITALYNAVWRLQMIPDPWKDSTTSLIFKKGDVNNIDNWRPIAVGDTCPKLFAALLADRLKTWARVNGRFSPSQKGFLDYEGCFEHNFVLQQAIHRAKEEKRELVVVWLDFSAAFSSLPHSSITRALREHQVPRSVCDVIERLYIGSRTNIRTIDGLTDIVNMEAGVKQGCPLSPDIFNLTLEVVLRHATSSGVGFKLDDEMLLSVLAYADDLVLLADSEEGMKRHLEATREAARAIGLSFNPDKCASLHIGPDGVRNIRYSVQDAQIAALGPDDTYSHLGIPTGYQVHQTPCSTLAGMITDLRKIDESLLAPWQKLDAAGTFILPRLDFAMQGAEISREHLAEADRVVRKLAKGWMSLPQRASPELAFLSPTNGGGGLLPLSDLYEAYTQAHAFRMLHAKDPLVSGLAAKSLRDTVSARLRKTPSNIDMARYLSGDLDIPRSSAKTSFWARVRNAAGRMNKRIGCRWIWSQQQQELQLHLRDGTTIGARERSEAYRRLRGEFMATYTHSLLRKPDQGKVFAVTSQTASSNHFLRTGRNTRFCDWRFIHRARLDVLPLNSTKRWLVGNDKRCRKCGHAQETLPHVLNHCGVHAAARQKRHHNIVHRLVKAANGPSGHRRDGAVITSDRVVEGTRGRESTLRPDIVLRNAATKEITIVDVCVPFENRPAAIEAARSEKLRKYASLADQLRQDGYLVKVAAFVVGALGAWDGRNEKTLDLLGINKYYAGMMRRFMVSDTIRWSRDI

SEQ ID NO: 4901 - protein, 1301 aa, Metaphire vulgaris
MRLLPTPTTIITCLKVTVHDVEQAINSFPKGSAGGPDGFRPQHLVELVKNKESAAELLRALTDFTNVILSGKCPQQVIPILFGGNLIALSKKTGGLRPIAIGYIWRRLVAKCANRYAVSKLAPDLIPIQIGVGCSGGCEAAVHAARTFITNMHHDQLFVKLDFANAFNSVRRDVMLRSVYEHIPELYPFIHQSYAYPSILQFGPFAIRSEMGPQQGDPLGPLLFCLPLQPTLRSLHSQLKIGYLNDLTLGGSQEAVMNDLSKIIELEASLGISLNRRKCEIYGESSVVSDAFSDFRRVEFGSLELLGAPLFKGSALDESLRKQCATLEDAIKRLCCLPTQHAIILLRSSFGAPKLTHLLRCSPCSEHPLLEVIDKIMRTGIQNILNVDLDNTQWLQATLPIREGGLGFRAVSTLAPYAYLASAASTERTKSSILGPLDTQDPLISQLIIQIKAPSSIIESLPTSQKAWEGPAIESTRKQIWDSYTDPFNRARLTAVAAPHAGDWLHALPLASCGLFLDNEAIRVAVGLRLGLNICAPHKCQCGEIVDPRGQHGFVCRLSAGRSIRHCTLNDIIWQALQKAGVPSTKEPLGLLRSDGKRPDGATLIPWASGKYVAWDVTSVHTCAKSYLHLTSNSLGAAAENAATRKHHKYSGLPVSYKFIPIAFETMGPLNAEGSEFIAEIGRRIACVTGDPREAFYLFQRLSACTQRFNNVAFKGTFSSKTKNLPELHSFKIMTDVETNDVEIEELNEEASELFIVDDKTARQKKKNQEEYKSKNATKAEQVLYENENENDIAGVNEPEMPKETENESPPEKSEATEEWTEDEKDEKSRFGKNIKKKMNRKKTPKAGKPEQTVLPSIPIIDLLPDGGPVGAIQEHDVGADSNMTKDIFTSEEARARDRVQNDTYKEVRIAAESHRQTRKYTQMIFNPGPKLIDLCETLEGITRKLIKEDGLRAGLAFLTDVSINNCAAQYTPDNGYMTVFQHDDLMRVDFGIHFNGRVIDCAFTVAFNSRYDSLLAAMKDATNTRIRERRIDVRISDVGEAIREVIESYEVELDGKMYPVKSTHNLSDHSIAPFRIQAGKTVPIVKGGDTTRAEEGEFLAIETFGSTGKAHVHVVKETSHYMKNYEAGHVPTLVTKSMQLLGVIDKHFGTLALCRRWLDRLDQTKFLMVLKNLWDPGIVDPYPPLCDIKGRCTVQYEHTLHLQLTRKEAGKTAKHSKKPPAASKKKPQSLAERTVAEAKAAFVDIDLSEGRSLRKRAAAPPSIAPKTSTKAVTKRQTAAPKKAKGSQDTKDSKTSAVKSE

SEQ ID NO: 4902 - protein, 1539 aa, Metaphire vulgaris
MESVIIENNDLPRTTRKASGVCSHCFVQRQLHIRDGTVHEHGPRNSRCPGSHLPPLTAAVDTSQVYQITDRRNLPTIHTSSTMSDSLNHPDPQVRVIKYIPKSALFACSSKLTDILGSIAAHPENQELWRALLGFATTFLRQPSRAGRNRKLSQIIKSRLNQSSIIQEIDTAKPTKPHCFKPKPKSPDERLIAAVTAKLEDGNIRAATRILCDNDQPIEPNADSFAALLEKHPSNTYQEEMRLLPTPTTITTCLKVTVHDVEQAINSFPKGSAGGPDGFRPQHLVELVKNKESAAELLRALTDFTNVILSGKCPQQVTPILFGGNLIALSKKTGGLRPIAIGYIWRRLVAKCANRYAVNKLAPDLIPIQVGVGCSGGCEAAVHAARTFVTNMHHDQLFVKLDFANAFNSVRRDVMLRSVYEHIPELYPFIHQSYAYPSILQFGPFAIRSEMGPQQGDPLGPLLFCLPLQPTLRSLQSQLKIGYLDDLTLGGSQEAVMNDLSKIIELEASLGISLNRCKCEIYGESSVVSDAFGDFRRVEFGSLELLGAPLFKGSALDESLRKQCATLEDAIKRLCCLPTQHAIILLRSSFGAPKLTHLLRCSPCSEHPLLEVIDKIMRTGIQNILNVDLDNTQWLQATLPIREGGLGFRAVSTLAPYAYLASAASTERTKSAILGPLDTQDPLVSQLIINIKAPSSIIESLPTSQKAWEEPAIESTRKQIWDSYTDPFNRARLTAVAAPHAGDWLHALPLASCGLFLDNEAIRVAVGLRLGLNICAPHKCQCGEIVDPRGQHGFVCRLSAGRSIRHCTLNDIIWQALQKAGVPSTKEPLGLLRSDGKRPDGATLIPWASGKYVAWDVTSVHTCAKSYLHLTSNSLGAAAENAATRKHHKYSGLPVSYKFIPIAFETMGPLNAEGSEFIAEIGRRIACVTGDPREAFYLFQRLSACTQRFNNVAFKGTFSSKTKNLPELHSFKIMTDVERNDVEIEELNEEASELFIVDDKTARQKKKNQEEYKSKNATKAEQVLYENENDLAGVNDSEMPKETENESLAEKSEATEEWTEDEKDEKSRFGENIKKKMNRKKTPKAGKPEQTVPPSIPIIDLLPDGGPVGEIQEYDVGADSNMAKDIITSEEARARDRVQNDTYKEVRIAAEAHRQTKKYMQTIFNPGPKLIDLCETLEGFTRKLIKEDGLRACLAFLTDVSINNCAAQYTPNNGDMTVFQHDDLMKVDFGIHFNGRVIDCAFTVAFNSRCDPLLAAMKAATNTGIRERRIDVRISDVGEAIREVIESNEVELNGKMYPARSIHNLSDHSIAPFRIQAGKTVPIVKGGDTTRAEEGEFLAIETFGSTGKAHVHVVMETSHYMKNYEAGHVPTRVTKSMQLLGVIDKHFSTLAFCRRWLDRLDQTKFLMVLKNLWDPGIVDPYPPLCDIKGCCIVQYEHTLHLRPTCKEAGETAKQSKKPPAASKKKPQSLVEKTVAEAKAAFVDIDLSEGRSLRKRAAAPPSNAPKTSTKAVTKRQAAAPKKAKGPQDTKDSKTSAVKSE

SEQ ID NO: 4903 - protein, 1539 aa, Metaphire vulgaris
MESVIIENNDLPRTTRKASGVCSHCFVQRQLHIRDGTVHQHGPRNNRCPGSHLPPLTAAVDPSQVYQITDRRNQLTIPESSTISDSPNHPDPNVRVIKHIPKSALFACSSKLTDFLGSISAHPENQELWRALLGFATTFLRQPSRSGRNRKLSQIIKSRLNQSSIIQEIDTAKLTKPHCFKPKPKSPDERLIAAVTAKLEDGNIRAATRILCDNDHPIEPNADSFAALLEKHPSNTYQEEMRHLPTPTAITTCLKVTVHDVEQAINSFPKGSAGGPDGFRPQHLVELVKNKESAAELLRALTDFTNVILSGKCPQQVIHILFGGNLIALSKKSGGLRPIAIGYIWRRLVAKCANRYAVSKLAPDLVPIQIGVGCPGGCEAAVHAARTFITNMRHDQLFVKLDFANAFNSVRRDVMLRSVYEHVPELYPFIHQSYAYPSILQFGPFSIRSEMGPQQGDPLGPLLFCLPLQPTLRSLQSQLKIGYLDDLTLGGSQKAVMNDLSKIIELETSLGISLNRRKCEIYGESSVVSDAFNDFRRVEFGSLELLGAPLFKGSALDESLRKQCATLEDAIKRLCCLPTQHAIILLRSSFGAPKLTHLLRCSPCSEHPLLEVIDKIMRTGIQNILNVDLDDTQWLQATLPIREGGLGFRAVSTLAPYAYLASAASTERTKSAILGPLDTQDPLVSQLIIKIKAPSSIIESLPTSQKAWEGPAIEQARKQIWDSYTDPFNRARLTAVAAPHAGDWLHALPLASCGLFLDNEAIRVAVGLRLGLNICAPHKCQCGEIVDPRGQHGFVCRLSAGRSIRHCTLNDIIWQALQKAGVPSTKEPLGLLRSDGKRPDGATLIPWASGKYVAWDVTSVHTCAKSYLHLTSNSLGAAAENAATRKHHKYSGLPVSYKFIPIAFETMGPLNAEGSEFIAEIGRRIACVTGDPREPFYLFQRLSACTQRFNNVAFKGTFSSKTKNLPELHSFKIMTDVETNVEIEELNEEANELFIVDDKTARQKKKKQEEYKSKNAPKAEQVLYENENDIAGVNEPEMPKETENESPPEKSEATEEWTKDEEDEKSRFGENIKKKMNRKKTPKAGKPEQTVPPSIPIIDLLPDGSPVGEIQDHDVGADSNMAKDIFTSEEARARDRVQNDTYKEVRIAAEVHRQTRKYMQTIFNPGPKLIDLCETLEGITRKLIKEDGLRAGLAFLMDVSINNCAAHHNPNNGDMTVFQHDDLMKVDFGIHFNGRVIDCAFTVAFNSRHDPLLAAMKDATNTGIRERRIYVRISDVGEAIREVIESNEVELDGKMYPVKSIHNLSDHSMAPFRIQVGKTVPIVKGGDTTRAEEGEFLAIETFGSTGKVHVHVVMETSHYMKNYEAGHVPTRVTKSMQLLGVIDKHFGTLAFCRRWLDRLDQTKFLMVLKNLCDMGIVDPYPPLCDIKGGCYTAQYEPTLHLRPTCKEAGKTAKHSKKPPAASKKKPQSLVEKTVAEAKAAFVDIDLSEGRSLRKRTAAPPSNAPKTSTKAVTKRQAAGPKKAKGSQDTKDSKTSAVKSE

SEQ ID NO: 4904 - protein, 1351 aa, Lethrus apterus
MCPAMDPALHHDPPQNPYVCRCGKSYASRSGFNQHKRQCTSQVPSYSCDFCHRSFLTNIGLRQHQRKSHPAEYNAEMEAAASGARERWSRLEVKRLAKAEAKFTGKFINVHLSSLSNRTIDAVKGRRKRQSYKLMVAGFRRELEDHPAEDSSPPSSPNKEPPPPPSASPPAANRKSLPIASRLRSAAVSTQQPVDVPHTLASTPSSHSSLASAHSSDTPSSDSAASSSSSSSSSSGTLYCPSSPTGSSSTDNVSLLKPGASRSIPPLPSIAANRVPVVRLERLNLAPHLIAKPVNAAPQADLAVPSTSSGYRGAGLTLYRPRLPDSSDAAPSSPSSPSSPELPTTVPPPTSAGRPRKSSFRTSNYAVPSTSSGYRGAGLTLYRPRLPDSSDSAPSSPSSPLLPITVPPPTSAGRPSKSSFRTSKQTHLPPRRPSSPAPDTHPPARQPPCPAPVVNIQRVEVVPPVWDPETDQKFITYFYNILTSEDSDNADTTLATSMLSRSGMSEEVDNYLTTLLPRHHLNCVAGARQSDHYKNRRHAKSVPPGGADPRGRSRRGGHYVRHADRAAAYKAAQNLYRVDKTRLANSVLEGIPLTGPELQYPSIDSVRDTYTQIFGMPSRRDLHTFKKPTYKAPPLFYPVTTEEVSAAVLNSKSDSAGPDGVRLSHVKAIPLLKLSTLFNSMLFSSHIPQVLKKCRTVLIPKGGDCRDVHNWRPITISSLLLRVCNRVLGARLASIPLNNHQRGFRPIDGCLANNLCLQSIIRLCRNKIRPHHIATLDLRKAFDMLSHDSIFRALRRLEVDSGMIEFIRNSYVGAATNIQVGRVRSGDIAILRGVKQGDPLSPYLFNLVLDELIDELPREEGLEIGDQKVSCLAYADDLVLLGPSYSSMKELLSICVKFFKRRGLELNVAKCTSLSINPLPRKKKLYTVTRPCHYINDQPIKQIVPSDLFKYLGQSYSFCGAVAPDIDTIRRMIGRILVAPLKPHQKLCILKSHLIPRILYSLQNPKICKKTLLGVDRIIRVAVRKILHLNKSCSMAFLHADVRGGGLGILPMVHTIPRILTGRINRLGSSDDPLARATMSSAPVTRLLASLQLCLGELPPSRTVVRNEWRAKLDASFSGNGLIQGSSSAASGAWISNPPQHWTGKEFVQAVQLRGNLLPVMSLPSNPPELRGCRGGCRRAESLSHILQRCPASHWPRIWRHNKVAEVIHNLASKKGWTVIDEPNIRLEDGSLKKPDLLLLKGDTIVLSDVAISWEGPASLVSAYNIKLRYYSDPRVIRRLSVLYPQHTLLVAPFILGARGTWCHLNRTLVNAINLSPYECSSLVNTSILGSLKTYRHFMNSVWRGARPDDL

SEQ ID NO: 4905 - protein, 859 aa, Eumacrocentrus americanus
MVEALFQELEPFDSREYHSATLENICRSVNIWDRDTIFQEVSLFCRQVFPPKPPAAKGLAPPRRQNISRRKARREEYARVQAAWKRNPCNCLRGLLKDKSSENAPPQDAMVPFWEHVMTRGDNITPGVSAGRQIIADLWSPVIASEIERAYPAMGTAPGPDGLTPRDLRGVPMALLVRLFNLFMVCGKLPTCLLESRTTLIPKKDGAGDPGDFRPITVSSVLTRTFHKVLANRALRLVKLDSRQRAFQPIDGCSENIFLLDFALRHHRAQFKPLFIASLDVAKAFDSVTHAAIADCLRSHGVPELMVRYVADVYSRSTTRLSCGSWVSHLIHPECGVKQGDPLSPMIFNMVMDRLFAELEGQVGMRVGACTINCLAFADDLILLATTAVGLQLLVDLTARYLGQCGLRVNAAKCFTVSLKNVPGEKKSVVDASQVFTCGGRALPALRRSEEWRYLGVPFTAEGRLSVRPSDRLQESLTILTRAPLKPQQRLFALRVVVLPSLYHLLVLGKVTIGLLRQLDTMVRRSVRRWLALPHDVPNAYVHAEYKDGGLSVPSLRWLMPLQRWNRLKALRVVDGGVVPEAAEAFRQSERDAALQRLIADRPAPLNSLRKIKRWWAHQLHRSNDGLPLRGSRAVPSQHRWVVEGTRFLSGRDYVNLHRLRINAQPLRVRTSRGQVKDRSCRAGCNDAETLHHVLQVCHRTHGARVQRHDACVNYLARKLRASHDVVVEPHFRTEQGLRKPDLLIKQDATAFVVDAQVVGERGDRDLLHDRKSEKYWGLEGAIKRRFNVENVVFSSLTLSSRGVWSARSASHLVNLRLLSVSDLKILSTRVLVGGLNILGVFHGSTAGRRRHAERAGVG

SEQ ID NO: 4906 - protein, 965 aa, Autochton pseudocellus
MSLSSTHGLTAGSCSQHSNGVEANFVQCQLCSQPRFFKGKRGLSIHTGKVHSNVCNQDTSLPSNTSNAPHSSTSSSFSYTLSRLKGSVAIVKRIPRGARITVATSLSDSIRNVLTTNSIKSWELLLTFAYFKLHAKKDGHSSLTKIIKTNCSNPISLVDVLKYPIFSTSNLQKKIEQKVSDGDLRGASTLLFSSDTIAPDSPDTVSALKDKHPSPLTPLHLPDSSNCDDVICLQVSSKEVLAALMSFKSGSAGGLDGLSPQHLKDLVCNSTGDTGRALLEDITKLVNFMLAGKVNDNISSILYGANLCALKKKDGGIRPIAVGSTFRRLASKVCCKHISSTVSSQCSPVQLGFGSKGGCEAAVHATRTFLLNNGGEVLLKLDLKNAFNSIDRSALLEAIKTSTPSIFNYLWQCYSSPSKLMYKSNEILSSVGCQQGDPLGPAIFSLAIHPIISRLNSKFNVWYLDDGTLGGEVDTVISDLKDIIQNFLAIGLNINFSKCELFINESFDSFEKSNIIKKFIEIAPGIKILNKNSLQLLGAPVFFESVTPLINQHIQKFNEVSHRLFEIKSHMAMFIIRNCLFVPKFTYICRCSPIFKSSGILNSIDFVIKNTLDRILNCHLSEDSWSQASLPIRYGGLGIRKISSVSLPAFLASSHSTQNLIDKILHKSLINYEVAYVNDAKTAWSMVCPGQNYPELKNVQRLWDEPICKLSFNKLLGNTKQLTDRARLLAVSEKESGFWLQALPSYNLGTFLDNTSLSICVCLRLGLKTNEPHRCLCGENVTQYGHHGLSCRRSAGRLSRHACVNDVIRRALVTVNVPATLEPNGIARDDGKRPDGMTLVPWKQGRSLIWDATCVDTLAPSHISVTSTRAGGAAETAESAKRRKYAALGEGHIFVPFAVETLGPWGPEARRFYKELSSRLVDVSGDPRAGAYFGQRISLAIQRGNAASILGSLPRGSDLDSLFYL

SEQ ID NO: 4907 - protein, 964 aa, Chioides vintra
MSLNNPQDLTAGSCSQSSNSVGATFVQCQLCSQPRFFKGNKGLNIHIGKVHCNLSSQDDKSNSPNINAPHSTTDSYFSHTLSRLKGSVATVKRIPRGARITVATSLSESIRNVLRTNSVQSWELLLTFAYFKLHAKKDGRSSLTKIIKSNCYNQISLVDVLKQPRFYTSNLSKKIEQKVSDGDLKGAATLLFSNDTIAPDSFETISALKDKHPSPLPSFHLPDSPTADNVCLQVSSKDVLAALMSFKGGSAGGLDGLSPQHLKDLVCNSTGDIGRTLLEDITQLINFMLAGKVNNKITGILYGANLCALKKKDGGIRPIAVGCTIRRLASKVCCRHISSIVSSECSPVQLGFGSKGGCEAAVHATRTFLLNNGGEVLLKLDIKNAFNSIDRGALLQAIKTFTPSIFNYLWQCYSTPSKLMYKNNGIDSSVGCQQGDPLGPAIFSLAIHPIISRLNSKFNVWYLDDGTLGGEVNTVLSDLKDIIEKFSDIGLNINYSKCELYINDTFNNLQDSDIITKFNEIAPGIKILNKNTLQLLGAPIFQESVTTVIDERIKKFNDISHRLYEINSHMALCIIRNCLFVPKFTYVCRCSPIFKFTNVLNSIDSLIKNTLDKILNCNLSENAWSQASLPIRYGGLGIRKISSISLPAFLASSHSTQVLINKIINLSVNNYEIAYVNEAKTAWTLACPGQNFPVDKNIQRLWDEPICKLTYKNLLDNAQNLSERARLLAVSEKESGYWLQALPSYNLGTFLDNLSFSICICLRLGMRTNEPHRCLCGENVNQFGHHGLSCRRSAGRLSRHACVNDIIRRALVTVNVPAILEPNGIARDDGKRPDGMTLVPWKQGRSLVWDATCVDTLAPSHISVTSTHAGGAAEAAESAKRRKYAALGESYIFVPFAVETLGPWGPEARHFFKEMSSRLVDVSGDPRAGAYLGQRISLAIQRGNAASILGSLPRGSDLDSLFYL

SEQ ID NO: 4908 - protein, 965 aa, Salatis canalis
MSLSNTQNLSAGTCSQNSNGAITNFVQCQLCSQPRFFKGRRGLNIHIGKTHSNVPNQFSNLNVLPSNSSNTVLCSSVFSYTLSRLKGSVATVKRIPRGARVTVAASLSESIKKVLSSNSLESWESLLTFSFFKLHARKDGRSSLTKIIKSNCTNPRSLIDVLTNNNFSQSNIYRKIEQKVGDGDLKGAAALLFSNDTIAPDSSDTILALKDKHPSPLPTLHLPVEPKPDDLCLQVSNKEILAALMSFKSGSAGGLDGLSPQHLKDLISNSTGETGRVLLEDITQLINFMLAGKVNPDITGILYGANLCALKKKDGGIRPIAVGSTFRRLASKVCCRHISSTVSTQCSPVQLGFGSKGGCEAAVHATRTFLLNDGGEVLLKLDLKNAFNSIDRGALLQAVKTSTPSIFQYLWQCYSTSSKLMFKTNEILSSVGCQQGDPLGPAIFSLAIHPIISSLNSKFNVWYLDDGTLGGDVNTVFSDLKVIIEKFLAIGLNINFTKCELYVNESFGNMEKNNIIRKFSEIAPGIKILSKETLQLLGAPVFVDSVTPLINQQIQKFNEISDRLFNIKSHMALFIIRNCLFVPKLTYICRCSPIFKFTNALHTVDSLIKNTLNTILNCQLSDSAWSLASLPIRYGGLGIRKISSVSLPAFLASSHSTQNLIQKILHNSFNNIEIAYVNEAKTAWLLACPGQNYPVSKNIQRLWDEPICKLTFNKLLDSTQDITERARLLAISERESGFWLQALPSYNLGTFLDNLSISLCVCLRLGIKTNEPHRCPCGESVNQYGHHGLSCRRSAGRWSRHASVNDVIRRALVTVNVPATLEPNGIARDDGKRPDGMTLVPWKHGRSLVWDATCVDTLAPSHIAATSTRAGAAAETAESAKRRKYAALGEGYIFAPFAVETLGPWGPEARHLYKELSSRLVDVSGDPRAGAYFGQRISLAIQRGNAASLLGTLPRSSDLDPLFYL

SEQ ID NO: 4909 - protein, 970 aa, Cephise aelius
MSISNQPNLIAGSCSQITHGVSNTNLVQCHLCSQPHFFKGKRGLNIHIGKAHADVHTIRQSSQVNNSIPSSLQFPNTSNNSYFSHTLSRLKGSVATVKRIPRGARITVASSLSDTIQKVLSSNSFESWELLLTFAYFKLHARKDGHSSLTKLIKANCTNPISLVDALKQPNFRPSNIHRKIEQKVSDGDLKGAATLLFSVDTIAPDCLDTVSALKDKHPSPLPTLHLPDAPKSDEFCLQVCSKEVLAALMSFKGGSAGGLDGLSPQHLKDLVCNSTGNAGRTLLEDITRLVNFMLAGKINPDITNILYGANLCALKKKDGGIRPIAVGTTFRRLASKVCCKHIAATVSTNCSPVQLGFGSKGGCEAAVHASRTFLLNEGGEVLLKLDLKNAFNSIDRGALLQAIKFSTPSIYNYLWQCYSSPSKLMYKSNEILSSVGCQQGDPLGPAMFSLAIHPIISRLNSKFNVWYLDDGTIGDEVNTVISDLTVILQHFSAIGLNVNFSKCELFINESFGILEKSNIIKKFNEISPGIKILSKNTLQILGAPVFLESITPAIDEHILKFNEISQRLFQINSHMALFIIRNCLFVPRFTYICRCSPIFKFTSILKSIDSLIKNTLDIVLNCKLSGNSWSQACLPIRYGGLGIRKISSVSLPAFLASSHSTKILIDKILQKSFINYEVAYVSEAESAWSLACPGQDYPVSKNIQRLWDEPICKLSFTKLVDSTQDLTERARLLAVSEKESGFWLQALPSFNLGTFLDNLSFSVCICLRLGLRTNEPHRCPCGENVNQYGHHGLSCHRSAGRLSRHANVNDVIRRALTTVNVPATLEPNGITRDDGKRPDGMTLIPWKQGRSLVWDATCTDTLAPSHISVTSTRAGGAAEAAESAKRRKYAALGDAYIFVPFAIETLGPWGPEARHFYKELSSRLVDVSGDPRAGTYFGQRISLAVQRGNAASILGTLPRGSDLESLFYI

SEQ ID NO: 4910 - protein, 937 aa, Astraptes hopfferi
MSLNNPQDLTAGSCSQFRNGVDAIFVQCQLCSQPRFFKGNRGLNIHIGKVHTNARSQVNNSVTSNLDAPHSSTNTSFLYTLGRLKGSVATVKRIPRGARITVATSLSETIRNVLSTNSIKNWELLLTFAYFKLHARRDGRSSLTSIIKTNCTNPVSLVDVLKQTNLSTSTLRKKVEQKVSDGDLKGAATLLFSNDTIAPDSSDTVLALKDKHPSPLPSLHLPDSPKSDEIYLQVSSKEVLEALMSFKGGSAGGLDGLSPQHLKDLVCNSTGDIGRALLEDITQLVNLMLAGKVNNNITSILYGANLCALKKKDGGIRPIAVGCTFRRLASKVCCRHISSTVSSQCAPVQLGFGSKGGCEAAVHATRTFLLNNGGEVLLKLDLKNAFNSIDRGALLQEVKTSTPSIFNYLWQCYSTPSKLMYKCNEIDSSVGCQQGDPLGPAIFSLAIHPIISRLNSKFNVWYLDDGTIGGEVTTVISDLKDIIQKFIAIGLEINYSKCELYINENFDSFEKTNITKKFTEIAPGIKILDKDSLQLLGAPVFLESVTPLINHYIQKFNEVSHRLFEIKSHMAMFIIRNCLFVPKFTYVCRCSPIFKSPNILNSVDCLIKNTLERVLNSHLSEKSWSQASLPIRYGGLGIRKISSVSLPAFLASSHGTQNLIDKILYKSLVNFEVAYVNDAKSAWTLACPGQNFPESKNIQRLWDEPICKLSHKNLLDQTLDHAERARLLAVSEKESGFWLQALPSFNLGTFLDNLSFSICVCLRLGIKTNEPHRCLCGENVTQFGHHGLSCRRSAGRLSRHACVNDIIRRALVTVNVPATLEPNGIARDDGKRPDGMTLVPWKQGRSLVWDATCVDTLAPSHISVTSMRAGGAAETAESAKRRKYAALGEGYIFVPFAVETLGPWGPEARRFYKELSSRLVDVSGDQRAGAYFGQRIS

SEQ ID NO: 4911 - protein, 963 aa, Epargyreus clarus
MLAGHIPSAGTCSQTSNVALVQCNLCSQPRFFKGTRGLNIHIGKIHRDVSCRDDCSIPQHPPSIPNSCPISSSQSFSDTLSFFKNNVAVVKRIPRGARVTVATSLSHTIRNVISQNSIESWEHLLTFAYFKLHAKKDGSKSLTKIIKSNCNSPTSFDILSKQIFSFRNIYRKIENKVNDGDIKGAAALLFSNDTIAPDSQDTILALREKHPSAPLSLQLPDPPLANDNSLQVNSKEVLSAIMSFRNGSAGGLDGLSPQHIKDLTCGSTGEAGRALLEDITRLINFMLEGKINNNITATLYGANICALQKKGGGIRPIAVGCTIRRLASKVCCKCIAHTINEKCVPIQLGFGSKGGCEAAVHATRTFLQNNGGEVLLKLDVKNAFNSVNRGTLLQEIKNNVPSIYKYIWQCYSSPSKLMYRNHSILSSVGCQQGDPLGPAIFSLAIHPIISQLNSKLNIWYLDDGTLGGEVSSVLNDLEYLITNLKEIGLDLNFSKCELFINSDKSPEEKNEILEKFNVLAPNIKNLDKSSLHLLGAPVFEDSINSFTQNQVTKFNNVSGRLFNINSHMALFIIRNCLFAPKFIYFLRCSPFFRFINILNEIDSIIHKTLATLFNCQISARAWTQASLPIRYGGLGVRKISSVSLPAFLSSTHSTQDLVSKILSKSLMNCDVAYMSEAKSAWVMACPNQNFPKLLNVQKLWDEPLCKLTYELLLNTSDDITERARLLAVSERESGYWLQALPSSHIGTLLDNSTLSLCLCLRLGLKINEPHRCVCGEGVDQSGHHGLSCQRSAGRMSRHACINDVIRRALVTINVPATLEPNGIVRDDGKRPDGLTLVPWKQGRSLVWDGTCVDTMAPSHIRATSMRAGAAAESAEAVKRRKYAAISQNYIFVPFAVETMGPWGPEAKQFYKELSSRLIETSGDPRAGAYLGQQISLAIQRGNAASVLGTLPRGSDLAHLFYLL

SEQ ID NO: 4912 - protein, 721 aa, Chioides vintra
MSFKNGSAGGLDGLTPQHLKDLTCGATGEAGRALLEDITILINFMLEGKVNNNITAILYGANICALKKKDGGIRPIAVGCTFRRLASKVCCKHIANIITEKCSPIQLGFGSKGGCEAAVHATRTFLLNKGGDVLLKLDVKNAFNSVDRGTLLQEIKNNVPSIYKYIWQCYSSPSKLMYRNHSILSSVGCQQGDPLGPAIFSLAIHPIISNLNSKLNIWYLDDGTLGGEVSSVLDDLKYLIKKFKEIGLDINFSKSELYINSEKTQEEKDQIIEKFNVLAPNIKILGKDSLHLLGAPVFVDSISSFAQNQIQNFHMVSDRLFKINSHMALFIIRNCLFAPKFIYFLRCSPFFKFSNILNDIDSIIVNTLSSVFNCQLSDRAWTQASLPIRYGGLGVRKISSVSLPAFLSSTHSTQQLVLEILSKTSIKSEIAYMSEAKSAWSMACPSQNLPKLTNIQKLWDEPLCKLTYDSLLNSSVDVAERARLLAVSERESGFWLQALPSSNIGTLLDNTTLSLCICLRLGLKINEPHRCICGEGVGQSGHHGLSCQRSAGRMSRHASINDVIRRALVTINVPATLEPKGIVRDDGKRPDGLTLVPWKQGRSLVWDATCVDTMAPSHIPTTSMRAGAAAESAEAVKRRKYASISQSYMFVPFAVETMGPWGPEAKHFYKELSSRLIEVSGDPRAGAYLGQQIGLSIQRGNAASVLGTLPRGSDLAHLFYL

SEQ ID NO: 4913 - protein, 905 aa, Cecropterus evenus
MPNIPISSAGTCSQAGNLVQCNLCSQPRYFKGARGLNIHIGRIHRDVSSQNVNLPPQLQPSLPNSLSTNPTSKSFSDTLSFFKNNVAIVKRIPRGARVTVATSLSQSIRNVISQNSIESWEHLLTFVYFKLHAKKNGNASLTKIIKNNCNNPTSFDIFSKQNFSFRNIYKKIENKVNEGDIKGASTLLFSNDTIAPDCLDTLSALQDKHPSAPLTLQLPDPPLPNSSFLQTNSKEVLSAIMSFKNGSAGGLDGLSPQHIKDLTSGATGEAGRALLEDITCLINLMLEGKINENITTILYGANICALKKKDGGIRPIAVGCTFRRIASKVCCKSVASTIYEKCSPVQLGFGSKSGCEAAVHATRTFLLNNGGEVLLKLDVKNAFNSLDRGTMLQEIKKNIPSIYKYIWQCYSTPTKLMYRNHSIWSSVGCQQGDPLGPAIFSLAIHPIISQLNSKLNIWYLDDGTLGGKVNSVLDDLELLTRKFKEIGLDFNFSKCELFINSSKSQEEKLEILNKFNILAPNIKNVDKDNLYLLGAPVFVDSLHLFTQDQIKKFHSVSDRLFKINTHMAMFIIRHCLFAPKFIYFLRCSPFFMFNNLLNDIDSIIHNTLSALFNCQISDRAWTQASLPIRYGGLGIRKITSVSLPAFLSSTHSTQQLVTKILSKTLINYNVSYMSEAKSAWSLACPNQNFPKFLNIQKLWDEPLCKLTHESLINSSVNSTERARLLAVSERESSFWLQALPSSNIGTLLDNTTLSICLCLRLGLKINEPHRCVCGVGVDQAGHHGLSCQRSAGRMSRHASINDVIRRALVTINVPATLEPNGIVRDDGKRPDGLTLVPWKQGKSLVWDGTCVDTLAPSHIHATSMRAGAAAESAEAVKRRKYAAIAQGYMFVPFAVETMGPWGPEA

SEQ ID NO: 4914 - protein, 962 aa, Ebrietas anacreon
MPVDTVPDVCVCSQTSNNVSQNLVQCKLCSQPRFFKGRRGLNIHVGKVHGSVSCRNECSSSSVNSLPHPSTPPKSFLETLSVLKGNVAIVKRIPRGARITVATCLSNAIRKVLSSNTVESWEHLFTFSYFNLHTKQNRSGHNSLTQTIKQNCRNPTPLDVLFQKNKHSFSSIYKKIERKVSDGDLGGASSLLFSNDIIAPDSTDTLLALQEKHPQAPITLDVPDPPSNADTLQVTIKQVISALMSFRNGSAGGFDGLTPQHLKDLTASQTGEAGRALLEDITLLVNLMLSGRVNENICEILYGANICALKKKDGGIRPIAVGCTFRRLASKVCCKHIAKDVAAYCAPVQLGFGSRGGCEAAVHATRTFLNNTEDKVLLKLDVKNAFNSLDRGTLLQETKKIIPHIYPYIWQCYRSPSKLMYNSHFLTSSVGCQQGDPLGPAIFSLGIHPVISQLNSKLNIWYLDDGTLGGEAESVLDDFKNLIELFHYLGLEINFSKCELYIDTNICTKEKVSILEKFQNLAPNIKTVEKDSLHLLGAPVFLDSIPSFAEHQIQKFHSVSERLHKINSHMALFIIRFCLFAPKFTYVLRCSPFFKTPNILDTFDTIIQNTLSSILNIQFLDRAWTQATLPIRFGGLGVRKISSVSLPAFISSTHSTQRLASNILSKAITNLDIAYMSEAVSAWCMACPNQNLPSEKHIQKLWDEPLCKLTLNSLLNSSENLVERARLLAVSERESGFWLQALPSSNIGTLLCNVTLSLSISLRLGLKTNETHRCICGVDADQLGHHGLSCQRSAGRMSRHACINDVIRRALTTVNVPAVLEPNGIVRDDGKRPDGLTLVPWKRGRSLVWDGTCVDTLAPSHVQATSMGAGAAAKTAEANKCRKYAGLAEGYLFLPFAVETLGPWGPAAKQFYKELSSRLVTTTGDPRAGTYFAQQISLAIQRGNAASILGTFSGYSNVSHLV

SEQ ID NO: 4915 - protein, 965 aa, Nicephellus nicephorus
MSINLNPSAGTCSQASNAVCSNLIRCNLCSQPRFFKGKRGLNIHVGKIHGNVSCQDDCSMPQSQPFLSSSCPSTAAKSFTDTLSFLKNNVAIVKRIPRGARITVATSLSKTIRNAISQNSIDSWEHLLTFVYFKLHANKNGNRSLTNIIKSNCSHPTSFDIFTKKKFPFSNIYRKIECKVNDGDIKGASALLFSNDTIAPDSPETLLALKDKHPSASVTLRLPDPPHPNDSYVQVNTKDIITAIMSFKCGSAGGLDGLSPQHLKDLTCGSTGEAGRALLDDITLLINFMLQGQVNENMTEVIYGANICALKKKDGGIRPIAVGCTFRRLASKVCCKHISNVISDKCSPVQLGFGSKGGCEAAVHATRTFLLNKGGEVLLKLDVKNAFNSVDRGTLLQEIKNNVPSIYNYVWQCYSSPSKLIYRSHSLLSSVGCQQGDPLGPAMFSLAIHPIISKLKSKLNVWYLDDGTLGGEVSSVLEDLEYLIENLKKIGLHINFSKCELFINYEKSEQEKQYILQKFNDLAPNIKNLDRNSLHLLGAPIYSDSIPSFTQKQIQNFHNISDRLFKINSHMALFIIRNCLFAPKFTYVLRCSPFFKFPNILNSIDSIIHNTLSSLFNSQLSDRAWTQASLPIRYGGLGVRKISSVSLPAFLSSTHSTQQLISKILSRSLTNFDIAYMSEAESAWCMACPKQNFPKFKSIQNLWDEPLCKLTYKNLLDSSFNNTERARLLAVSERESGFWLQALPSSNIGTLLDNSTLSISVCLRLGLKTNEPHRCICGDVVGQDGHHGLSCQRSAGRMSRHASINDVIRRALVTINVPATLEPNGIVRDDGKRPDGLTLVPWKHGRSLVWDATCVDTVAPSHIQATSMRACAAAESAETVKRRKYAAIAKGYMFVPFAVETMGPWGPEAKLLYKDLSSRLIEASGDPRAGAYLGQQISLAIQRGNAASVLGTLPQGSDMAHLFYL

SEQ ID NO: 4916 - protein, 942 aa, Hyalothyrus neleus
MSVSPDPFSGICSQTSNVATDNNNLTQCKLCSQPRFFKGKKGLNIHIGKIHANVSSQDIFSSQQSSSSFLNSIAPPIAFESKSFTETLSFLKNNVAIVKRIPRGARIAVATSLSKAIQKAISSNSVDSWEHLLTFAFFKLHAKKTGQDSLTKIIKSNCTQPTSFDILKRQNFIPRNIYKRIEKKISDGDIKGASTLLFSRDSIAPDSSETLSALQDKHPSIPIPNLPDPPLDNDVSLQVSIKEILSAIMSFKCGSAGGLDGLSPQHLKDLTCRSTGEAGRALLEDITLLVNFMLTGKVNKNIIDILYGANICAMKKKDGGIRPIAVGCTFRRLASKVCCRHIASSVAKICSPIQLGFGSKGGCEAAVHATRTFLCNNGGDVLLKVDVKNAFNSLDRGTLLQQIKTISPSIYKYIWQCYSSPSKLMYRTHSLLSSVGCQQGDPLGPAIFSLAIHPIISQLNSKLNVWYLDDGTLGGEVSSVLKDFDFLIKNFNNIGLSINFSKCELYVNSQKSKEEIDIIRNKFNELAPNLKICNRDSLFLLGAPVFSESIPSFAQNQIDHFHEISDRLFHINSHMALFIIRNCLFAPKFTYALRCSPFFKFNNILISIDSIIHKTLSSLINSQIPDNAWTQASLPIRYGGLGIRKISSISLPAFLSSIHSTQNLISKILSKSLINFEIEHMSEAKNAWCLACPNHNFPESKSTQKLWDEPLCKLSHQFLINSAKDNTERARLLAVSERESGFWLHALPSNNIGTLLDNTTLSLCVCLRLGLKINEPHRCICGEDVSQFGHHGLSCQRSAGRMSRHACINDVIRRALVTINVPAILEPKGIVRDDGKRPDGMTLVPWKQGRSLVWDATCVDTLAPSHLQATSMHVGAAAVSAKALERRKYAAIPEGCMFFCPLQLRRCDHGVQKRGFSIKNYPHVWLGSLVTQPDLGFTSTNK

SEQ ID NO: 4917 - protein, 963 aa, Epargyreus clarus
MLAGHIPSAGTCSQTSNVVLVQCNLCSQPRFFKGTRGLNIHIGKIHRDVSRRDDCSTPQHPPSIPNSCPISSSKSFSDTLSFFKNNVAVVKRIPRGARVTVATSLSHTIRNVISQNSIESWEHLLTFAYFKLHAKKDGSKSLTKIIKSNCNSPTSFDILSKQIFSFRNIYRKIENKVNDGDIKGASALLFSNDSIAPDSQDTILALREKHPSAPLTLQLPDPPLANDNSLQVNSKEVLSAIMSFRNGSAGGLDGLSPQHIKDLTCGSSGEAGRALLEDITRLINFMLEGKINNNITATLYGANICALQKKGGGIRPIAVGCTIRRLASKVCCKCIAHTINEKCVPIQLGFGSKGGCEAAVHATRTFLQNNGGEVLLKLDVKNAFNSVNRGTLLQEIKNNVPSIYKYIWQCYSSPSKLMYRNHCILSSVGCQQGDPLGPAMFSLAIHPIISQLNSKLNIWYLDDGTLGGEVSSVLNDLEYLITNLKEIGLDLNFSKCELFINSDKSPEEKNKILDKFNVLAPNIKNLDKNSLHLLGAPVFEDSINSFTQNQIKKFNNVSDRLFNINSHMALFIIRNCLFAPKFLYFLRCSPFFRYINILNEIDSIIHKTLSTLFNCQISDRAWTQASLPIRYGGLGVRKISSVSLPAFLSSTHSTQDLVSKILSKSLMNCDVAYMSEAKSAWVMACPNQNFPKLLNVQKLWDEPLCKLTYELLLNTSDDITERARLLAVSERESGYWLQALPSSHIGTLLDNSTLSLCLCLRLGLKINEPHRCVCGEGVDQSGHHGLSCQRSAGRMSRHACINDVIRRALVTINVPATLEPNGIVRDDGKRPDGLTLVPWKQGRSLVWDGTCVDTMAPSHIRATSMRAGAAAESAEAVKRRKYAAISQNYIFVPFAVETMGPWGPEAKQFYKELSSRLIETSGDPRAGAYLGQQISLAIQRGNAASVLGTLPRGSDLAHLFYLL

SEQ ID NO: 4918 - protein, 961 aa, Cycloglypha thrasibulus
MSIDTISVTRACSQPCNDVSTRLVKCNLCSQPRFFKGRRGLNIHIGKKHTNVSCRDECSTPSITLVNNSEPSAPSKSFLETVSFLKGNVAIVKRIPRGARVSVASCLSNAIQKVLSSNSIESWEHLLTFSFFKLHARPNRHNSLTKIIKENCSNPTPLDIFQKQNFNYSSIYKKIERKVSDGDLRGASSLLFSNDTLAPDCSDTLSALKEKHPQTLITPHILGPPCNDESLQVTTKDVLSALMSFRNGSAGGFDGLSPQHLKDLTTRQTGEAGRMLLENITLLVNLMLSGRVNQDMCEILYGANICALKKKDGGIRPIAVGCTFRRLASKICCKHIADDVGAHCAPVQLGFGSKGGCEAAVHATRTFLLNKECEVLLKLDVRNAFNSLDRGTLLQETKNVVPHIYPYIWQCYNSPSKLIYNNNFLSSSVGCQQGDPLGPAIFSLGIHPVISQLNSKLNVWYLDDGTLGGEVESVLNNFKILIEKFAAIGLEINFSKCELYIDTQNCSVSKSSILDSFNNLSPNIKIVEKDSLHLLGAPVFSESIPHFAEHHIQNFYNVSEKLHKINSHMALYIIRFCLFVPKFTYVLRCSPFFKFSQIINTLDSIIRNTLSSILNIQLLDRAWSQASLPIRYGGLGVRKISCVSLPAFISSAYSTQQLVSKILSKVSSNSDVAYLSEAVSAWHLACPNQNLPSDKHIQKLWDEPLCKLTLKSLVDTSVSNVERARLIAVSERESGLWLQALPSSNIGTLLNNITLSLCTSLRLGLKTNEPHRCVCGVDADQFGHHGLSCQRSAGRMSRHACINDVIRRALTSVNVPAILEPNGIVRDDGKRPDGLTIVPWKQGRSLVWDGTCVDTLAPSHVQSTSMRAGAAAENAEAIKRRKYAGLADGYIFLPFAVETLGPWGPEARQFYKELSSRLVVSSGDPRAGAYFAQQVSLAIQRGNAASILGTFSRHSDVSHLF

SEQ ID NO: 4919 - protein, 965 aa, Autochton zarex
MPVVPFSSAGTCSQSSNGVNQNLVQCNICTQPRFFKGNRGLNIHIGKIHRDVSCRNDSSTPQSQLPFPNSYPVSLNKTFSETLSFFKNNVTIVKRIPRGARITVATNLSQSIRNAISQNSIESWEHLLTFAYFKLHAKKIGNTSLTKIIKQNCNNPTSFDIFSKQNFSSRNLYKRIENKVNEGDIKGASALLFSNDSIAPDCLDTLSALKDKHPSASLTLKLPDPPLPNDSFLQVNTKEVLSAIMSFKNGSAGGLDGLSPQHIKDLTCGATGEAGRALLGDITCLVNFMLEGKINSDITASLYGANIIALQKKDGGIRPIAVGCTFRRLASKICCKSIANAVHEKCSPEQLGFGSKGGCEAAVHATRTFLLNEGGEVLLKLDVKNAFNSLDRGTMLQEIKKNVPSIYKYIWQCYSSPSKLMYQNHSIWSSVGCQQGDPLGPAIFSLAIHPIISQLNSKLNVWYLDDGTLGGEVSSVLDDLKLVSRKFKEIGLDLNFSKCELFINSNKSQEEKAEIINKFNVLAPKIKILDKDSLHLLGAPIFVDSFQSFTQNQIEKFHSVSDRLFKINSHMSLFIIRHCLFAPKFIYFLRCSPFFKFTNLLNDIDSIIHNTLSVLFNCQISDRAWTQASLPIRYGGLGIRKISSVSLPAFLSSTHSTQQLVTKILSKTFINCDVAYMSEAKSAWSLACPNQNFPNFLGIQKLWDEPLCKLTQELLLNSSVDIAERARLLAVSERESGFWLQALPSSNIGTLLDNTTLSLCLCLRLGLKINEPHRCVCGESVNRDGHHGLSCQRSAGRMSRHASINDVIRRALVTINVPATLEPNGIVRDDGKRPDGLTLVPWKQGKPLVWDGTCVDTLAPSHIQATSMRAGAAAESAEAVKRRKYAAISQGYMFVPFAVETMGPWGPDAKHFYKELSSRLIDASGDPRAGAYLGQQISLAIQRGNAASVLGTLPRGSDLTHLFYL

SEQ ID NO: 4920 - protein, 967 aa, Erynnis tages
MPFNKIPDAGVSSQSSNEDSLNLIECDLCSQPRFFKGRRGLNIHLAKKHSNVSSQDVCSIPAVPAAVNSQQNSHITPSKPFIETLSFLKGNVAIVKRIPRGARVSVATCLSNAIHKVICTNSIENWEHLLTFSYFKFHASRKNSQQSLTKIIKENCTNPTPFDIFKKNNFTSSSIQKKIEQKVSDGDLRGASSLLFSNDSIAPDSTDTLLALEEKHPQVSVTLHHPDPPHSNDDCLQVTKKEVLSALMSFRNGSAGGYDGLSPQHLKDLTSTQTGEAGRALLENITLLVNFMLSGKVNQNICEILYGANICALKKKDGGIRPIAVGCTFRRLASKVCCKHIAKYIATNCAPVQLGFGSKGGCEAAVHATRTFLTNNGGEVLLKLDVKNAFNSLDRGTLLQETKNIVPCIFPYIWQSYGSISKLIYNTHFLSSSVGCQQGDPLGPAIFSLGIHPVISRLNSKLNIWYLDDGTLGGDADCVLNDFKNLIENFKSIGLEINFSKCELYVDCNQCSKDKSSILEKFNNLAPNIKIVNKDSLHLLGAPVFLDSIPSFAEHHIQKFHNVSERLHKLNSHMAFFIIRFCLFAPKFTYVLRCSPFFKIPQILNSLDLTIRHTLSSILNIQLLDRAWSQASLPIRYGGLGVRKISSVSLPAFISSTHSSQLLISKILSKSFPVLPDISYMSEAVTAWRMACPNQNFPVEKHIQKLWDEPLCKLTYNSLLLSSGNTSERARLLAVSERESGFWLQALPSSNIGTLLDNVTLSLCTSLRLGLKTNEPHRCICGFDADQFGHHGLSCQRSAGRMSRHACINDVIRRALVTVNVPAILEPNGIVRDDGKRPDGLTLVPWKQGRSLVWDGTCVDTLAPSHVQATSMRVGAAAESAEALKRRKYARLAEGYTFLPFAVETLGPWGPEARHFYKDLSSRLVVALGDPKAGAYFGQRISLAVQRGNAASILGTLPHRSDVFHLS

SEQ ID NO: 4921 - protein, 967 aa, Erynnis tages
MPFNKIPDAGVSSQSSNEDSLNLIECDLCSQPRFFKGRRGLNIHLAKKHSNVSSQDVCSIPAVPAAVNSQQNSHITPSKPFIETLSFLKGNVAIVKRIPRGARVSVATCLSNAIHKVICTNSIENWEHLLTFSYFKLHASRKNSQQSLTKIIKENCTNPTPFDIFKKNNFTSSSIQKKIEQKVSDGDLRGASSLLFSNDSIAPDSTDTLLALEEKHPQVSVTLHHPDPPHSNDDCLQVTKKEVLSALMSFRNGSAGGYDGLSPQHLKDLTSTQTGEAGRALLENITLLVNFMLSGKVNQNICEILYGANICALKKKDGGIRPIAVGCTFRRLASKVCCKHIAKYIATNCAPVQLGFGSKGGCEAAVHATRTFLTNNGGEVLLKLDVKNAFNSLDRGTLLQETKNIVPCIFPYIWQSYGSISKLIYNTHFLSSSVGCQQGDPLGPAIFSLGIHPVISRLNSKLNIWYLDDGTLGGDADCVLNDFKNLIENFKSIGLEINFSKCELYVDCNQCSKDKSSILEKFNNLAPNIKIVNKDSLHLLGAPVFLDSIPSFAEHHIQKFHNVSERLHKLNSHMAFFIIRFCLFAPKFTYVLRCSPFFKIPQILNSLDLTIRHTLSSILNIQLLDRAWSQASLPIRYGGLGVRKISSVSLPAFISSTHSSQLLISKILSKSFPVLPDISYMSEAVTAWRMACPNQNFPVEKHIQKLWDEPLCKLTYNSLLLSSGNTSERARLLAVSERESGFWLQALPSSNIGTLLDNVTLSLCTSLRLGLKTNEPHRCICGFDADQFGHHGLSCQRSAGRMSRHACINDVIRRALVTVNVPAILEPNGIVRDDGKRPDGLTLVPWKQGRSLVWDGTCVDTLAPSHVRGTSMRVGAAAESAEALKRRKYARLAEGYTFLPFAVETLGPWGPEARHFYKDLSSRLVVALGDPKAGAYFGQRISLAVQRGNAASILGTLPHRSDVFHLS

SEQ ID NO: 4922 - protein, 926 aa, Pyrgus malvae
MSANPSVFNNVSAEACSQTSNDVSSAHLIQCDLCSQPRYFKGRRGLNIHIGKIHRNVSSQVDCSVSRDPNPQNSPHQCFSETLSFLKNNVTVIKRIPRGARIAVALCLSKCIKKVVSENTTESWEHLFTFSFFKLHAKKDENKSLTKIIISNCIYPTPLDIFSKKKFITSTIYKKNEQKVSDGDLKGASNLLFSSDIVAPDSSETFLALKDKHPLGSPTLHLPDPPTSEESLNVSSKEVYQALMSFKSGSASGFDGLSPQHLKDLVCVATGEAGKDLLEDITALINLMLSGKINENFCKILFGANICALKKKDGGIRPIAVGCTFRRLASKVCCKHIVNKVVQNCAPIQLGFGSKGGCEAAVHATRTFLSNDGGEVLLKLDVKNAFNTLDRGTMLRQTKEIIPTIYRYVWQSYSSPSNLLYRSQHLSSSVGCQQGDPLGPALFSLGIQPIISQLNSKLNIWYLDDGSIGGEVNSVLDDLQNLISKFNSIGLEINFSKCELFINSNKSVLEKADIINKFNDLAPNIKIVDKDSLHLLGAPIFLESFESFSQIHIQRFQDVSERLFKIHSHMALFIIRHCLFAPKFMYFLRCSPFFKFPTILHSFDTMIHSTLSSILNIHISERAWNQASLPIRFGGLGVRKISSVSLPAYISSAHGTQPLVTKILSKTLIQADVAYLGEAVSAWCLACPNQNLPCNKYIQKLWDEPICKLTQKTLLESSCNVTDRARLLAVSEYESGFWLQALPSLNIGTLLSNISLSLCVSLRLGLKTNESHRCICGSEADQFGHHGLSCTRSAGRLSRHANINDLIRRALVTVNVPAIIEPNGIARDDGKRPDGMSLIPWKQGRSLVWDGTCVDTLAPSHVQATSTRVGAAAETAEKAKQRKYAALGDEYLFIPFAVETLRPWGSAASRCGRRLKICRRRRADKF

SEQ ID NO: 4923 - protein, 968 aa, Nerula fibrena
MSVNLPIVNDLNAEACSQSSNDVAWTNLNLIKCDLCPRYFKGKRGLNIHIGKIHRNVSSQVECSVQSEPAIPSSSSNFPYKSFCETLSFLKNNVPILKRIPRGARVAVALCLSKCIKNAVSNNTIESWEQLLTFSFFKLHAKKDGNKSLTQIVKSNCFNPTSLDIFNKKKFHQSSIYRKIEQKVSDGDVKGASNLLFSNDIVAPDSTETFSALKDKHPPGPKSLHLPDPPISDEFLQVTTKEVFTALMSFKSGSAGGFDGLSPQHLKDLVCASSGEAGRALLEDITSLINLILAGKVNNKFWEILFGANMCALKKKDGGIRPIAVGCTFRRLASKLCCKHIAKDVVKYCAPVQLGFGSKGGCEAAVHATRTFLLNNGGEVLLKLDVKNAFNTLDRGALLLQSKEVIPSIYSYIWQCYSSPTKLLYRSHSLSSSVGCQQGDPLGPALFSLGIQPIISQLNSKLNIWYLDDGTIGGDVCSVLDDFQNLISKFKDIGLEINFPKCELFINTNKSNVEKDLIIQKFNDLAPNIKIVEKDSLHLLGAPVFLDSFPSFSENQMQKFHNISDRLSKINSHMALFIIRHCLFAPKFMYFLRCSPFFKLTNILHSFDTIVHNTLSSILNIHLSERSWNQASLPIRFGGLGIRKISSISLPAFISSTHGTQSLIKNILSKSLIQFDIAYMSEAVSAWCLACPSQNLPTKKYIQKLWDEPICKLSQKHLLDTSCNIADRARLLAVSERESGFWLQALPSINIGTLLNNITLSLCVSLRLGLKTNEPHRCICGLEADQFGHHGLSCQRSAGRLPRHANINDVIRRALATVNVPAIIEPNGIVRDDGKRPDGMTLVPWKQGRSLVWDGTCVDTLAPSHVQATSMRVGAAAETAENLKRRKYATLREDYIFTPFAVETLGPWGAEARQFYKELSSRLVIASGDPRAGAYLGQQISLAIQRGNAASILGTLPQCGDLNNIFYL

SEQ ID NO: 4924 - protein, 915 aa, Camptopleura auxo
MPVDIIPDVRVCSQPCNDVPLNFVQCNLCSQPRFFKGRRGLNIHVGKVHGSVSCRHESSGPSADSLFHPSTPTKSFLETISFLKGNVAIVKRIPRGARVTVATCLSNAINKVLSSNSAESWEHLFTFCYFNLHTKQYKSGRSSLTKFIKENCNNPTPLHIFEKKNFTSSTIFRKVERKVSDGDLSGASSLLFSNDTIAPDSTDTLLALKDKHPQASTTLLPDPPPTNESLQVTIKDVLSALMSFRNGSAGGFDGLTPQHLKDLTASQTGEAGRALLRDITLLVNLLLSGRVNENICEILYGANICALKKKDGGIRPIAVGCTFRRLASKVCCKHIAKDVAAYCAPIQLGFGSRGGCEAAVHATRTFLKNTEGKVLLKLDVKNAFNSLDRGTLLQETKNIIPHIYPYIWQCYRSPSKLIYNSHFLTSSVGCQQGDPLGPAIFSLGIHPVISQLNSKLNIWYLDDGTLGGEAESVLDDFKNVIEKFSSLGLEINFSKCELYIDPNICSKEKALILEKFNNLAPNIKTVEKDSLHLLGAPVFLDSIPSFAEHQIQKFHSVSERLHKINSHMALFIIRFCLFAPKFTYALRCSPFFETPHILNNFDSIIRNTLSSILNIQLLDRAWSQASLPIRFGGLGVRKISSVSLPAFISSTHSTQRLVSNILSKTFTNPDIAYMSEAVSAWCMACPNQNLPCDKHIQKLWDEPLCKLTLDSLINSSGNLVERARLLAVSEHESGSWLQALPSSNIGTLLSNVTLSLCTSLRLGLKTNEAHRCICGVDADQFGHHGLSCQRSAGRISRHACINDVIRRALATVNVPAILEPNGIVRDDGKRPDGMTLVPWKQGRSLVWDGTCVDTLAPSHVQSTSMRVGAAAETAEANKRRKYAGLAETYLFLPFAVETLGPWGSEARQFFFFFFI

SEQ ID NO: 4925 - protein, 975 aa, Polygonus savigny
MYVTPTPSDLGAGACSQTSNGAVNSNFVQCHLCSQPNFFKELRGLKIHIGKKHSNASHQIPNIPSAQNQTDLFVPQNSPNTLSYFSYTLSRLKGSVAIVKRIPRGARFAVATSLSNTIKKVVSSNSLESWESLLTFAYFKLHAKRDGRSSLTTTIKSNCTNNISLLDVLKEPFSKPLNINKKIEHKVSDGDLKGAAALLFSNDTLAPDSPSTVSALEEKHPSPLSTIHLPSAPKSDDIYLQVCSKDVLAALMSFKGGSAGGLDGLSPQHLKDLVCNATGDTGKALLEDITRLVNLMLAGKVNSEITNILYGANLCALKKKDGGIRPIAVGCTFRRLASKVCCKHIYSTVSTHCSPIQLGFGSKGGCEAAVHATRTFLLNNKGEGEVLLKLDIKNAFNSIDRGALLQAIKTSTPSIFNYLWQCYGSPSKLIYKTNEILSSVGCQQGDPLGPAMFSLAIHPIISRLNSKFNVWYLDDGTLGGEVNTVISDIKDIVEKFSAIGLSINFTKCELYINDLCGNLEKSDIVSKFNEIAPGIKILSKDSLQLLGAPIFSESMKSIIDQQINKFNEICDRLYQIKSHMAFFIIQNCLFVPKFTYICRCSPIFKFPHIFNSVDIIIKNTLENILNCTFSGNSWSQASLPIRYGGLGIRKISDISLPAFLASSHSAKNLINRILQNSLCNNYEIAYMSEAKTAWSVACSGQNFPKSQNIQRLWDDPICKLSYVKLLDNTQNLTDRARLLAVSEKESGFWLQALPSFNLGTLFDNLSFSLCICLRLGLKTNEPHRCHCGEDVNQLGHHGLSCRRSAGRLSRHASINDVIRRALVTVNVPATLEPNGIARDDGKRPDGLTLVPWKQGRSLVWDATCVDTLAPSHISVTSMRAGGAAEQAESTKRRKYAALGDGYIFVPFAVETLGPWGPEARGFYKELASRLVDISGDPRAGAYFGQRICLAIQRGNAASLLGSLPQGSDLDPIFYL

SEQ ID NO: 4926 - protein, 922 aa, Muschampia gigas
MFNTSNLSADACSQNNNSKLSNFVQCQQCSQPKFFKGIKGLNIHVGKVHNSKTSQISNTVSNKNVHNQQNSSKIENSILAYTLSRLKGSVAVIKRIPKGARITVANSLSLVIREILSNNSFESWKQLLTFSYFKLHAKKDGCSSLTKIIKSNCLKRITLIDVVKYNQFSPSELRRKIEQKVSDGDLKGAATLLFNNDTIAPDSPDTISALEEKHPSPLATFLLPEAPKDDDESLQISVKEVLHALMSFKGGSASGLDGLSPQHLKDLVCHSTGDAGKTLLEDITNLVNFMLAGKVNNEVNSILYGANLCALKKKDGGIRPIAVGCTLRRLVSKICCRHISSKVSTECCPVQLGFGTKGGCEAAVHAARTFLLNNGGEVLLKLDLKNAFNSVDRGALLQEIKKLTPSIYPYLWQCYSSPSKLMYKSHEITSSVGCQQGDPLGPAIFSLVIQPIISRLNSKFNVWYLDDGTLGGDVNTVLVDLKEVIQKFSSIGLDINFSKCELFANESFSSLEKNEIYHKFNVLAPGIKILNKNSLTLLGAPLFLNSVEAVIHKQLNKFNESSDKLFEINSHMAFFIIRNCLFVPKFTYLIRTSPIFHFTNLLNMIDSLIKNTLNIVINCQLSERSWTQASLPIRYGGLGIRKISSVSLPAFLASTHSTQTLINKILEKTSINEDVAYVREAKLAWSLACPNQNFPNSKDIQKLWDEPICSDTFNFLLNSSSNNMERARLLAVSEKESGYWLQALPSYNLGTFLDNISFSLSVCLRLGLKTNEPHRCPCGENVSQFGIHGLSCRRSAGRFSRHACINDVIRRALVTVNVPAILEPNGIARDDGKRPDGLTLIPWKHGRSLVWDATCVDTLAPSHVPATSMHAGAAARTAESTKKRKYVALGESYIFVPFAVETMGPWGPEARSFYKEISSRLV

SEQ ID NO: 4927 - protein, 969 aa, Muschampia leuzeae
MSNSSNLSADACSQNNNSKLSNFVQCQQCFQPRFFKGIKGLNIHVGKVHNSKTIDNSQNSNTVINKNIPNQQNSTKIENSILAYTLSRLKGSVAVIKRIPKGARITVANSLSLVIRQIISNNSFESWKQLLTFSYFKLHARKDGCSSLTKIIKSNCLKTITLIDIVKCNQFSPSELRRKIEQKVSDGDLKGAATLLFNSDTIAPDSHDTISALEEKHPSPLATFLLPEAPKDDDISLQITVKEVLHALMSFKGGSASGLDGLSPQHLKDLVCHSTGDAGKTLLEDITNLVNFMLAGKVNKEINSILYGANLCALKKKDGGIRPIAVGCTLRRLVSKICCRHISSKVSTECCPVQLGFGTKGGCEAAVHAARTFLLNDGGEVLLKLDLKNAFNSVDRGALLQEIKKLTPSIYPYLWQCYSSPSKLMYKSHEIISSVGCQQGDPLGPAIFSLVIQPIISRLNSKFNVWYLDDGTLGGNVNTVLFDLKEVIQKFSSIGLDINFSKCELFANESFNSLEKNEIYHKFNVLAPGIKILNKDSLTLLGAPLFLDSVEAVILKQLNKFNESSHKLFEINSHMAFFIIRNCLFVPKFTYLIRTSPIFHFTNLLTNIDSLIKNTLNMVLNCQLTERSWTQGSLPIRYGGLGIRKISSVSLPAFLASTHSTQTLINKILENTSVNENIAYVREAKLAWSLACPNQNFPNSKDIQKLWDEPICSNTFAVLLNSSSNDTERARLLAASDKESGYWLQALPSYNLGTFLDNISFSLSVCLRLGLKTNEPHRCPCGEHVSQFGIHGLSCRRSAGRLSRHACINDVIRRALVTVNVPAILEPNGIARDDGKRPDGLTLIPWKHGRSLIWDATCVDTLAPSHVPATSAHAGAAARAAEATKKRKYVVLGESYIFVPFAVETMGPWGPEARSFYKEISSRLVDVTGDPRAGSYFAQRISLAIQRGNVASLLGTLPRDSGLESLFYI

SEQ ID NO: 4928 - protein, 948 aa, Muschampia plurimacula
MSNTSNLSADACSQNNNSKLSNFIQCHQCSQPRFFKGNKGLNIHIGKVHNSKTSLNSNIVINKNEPSQLNSSKINSSILSYTLSRLKGSVAVIKRIPKGARITVANSLSLVIREILSNNSFESWKHLLTFSYFKLHAKKDGCSSLTKIIKLNCIKTISLIDVVKCNQFSPSDLRRKIEQKVSDGDLKGAATLLFNSDTIAPDSPDTISALEEKHPSPLATFLLPEAPKDDDVSLQISVKEVLHALMSFKGGSASGLDGLSPQHLKDLVCHSTGDAGKTLLEDITKLVNFMLAGKVNNEISSILYGANLCALKKKDGGIRPIAVGCTLRRLVSKICCRHISSKVSTECCPVQLGFGTKGGCEAAVHAARTFLLNNGGEVLLKLDLKNAFNSVDRGALLQEIKNLTPSIYPYLWQCYSSPSKLMYKSHELISSVGCQQGDPLGPAIFSLVIQPIISSLNSKFNVWYLDDGTLGGDVNTVLSDLKEVIQKFSSIGLDINFSKCELFANDSFNNFEKNEIYHKFNVLAPGIKILNKDSLTLLGAPLFLDSVEAVIHKQLNKFNESSDKLFEINSHMAFFIIRNCLFVPKFTYLIRTSPIFYFTNLLTMIDSVIKNTLNIVLNCQLSERSWTQASLPIRYGGLGIRKISSVSLPAFLASTHSTQTLINNILEKTSINENVAYVSEAKLAWSLACPNQNFPNSKDIQKLWDEPICSNTFNFLLNSSSNDTERARLLAVSDKESGYWLQALPSYNLGTFLDNITFSLSVCLRLGLKTNEPHRCLCGENVSQFGLHGLSCRRSAGRLSRHACINDVIRRALVTVNVPAILEPNGIARDDGKRPDGLTLIPWKHGRSLVWDATCVDTLAPSHVSATSVHAGAAARTAESVKRRKYVVLGESYIFVPFAVETMGPWGPEARCFYKEISSRLVNVTGDPRAGSYFAQRISLAIQRGNVA

SEQ ID NO: 4929 - protein, 969 aa, Epargyreus clarus
MSLNNPQDLTAGSCSQSSNSVGACFVQCQLCSQPRFFKGNRGLNIHTGKVHSNSSCKVNSSNNNNNPSNINVPHSSTDSSFSYTLSRLKGSVAAVKRIPRGARITVATSLSESIRNVLNTNSIQSWELLLTFAYFKLHAKKDGHSSLTKIIKSNCANQISLVDVLKQPRFSTTNLKKKIEQKVSDGDLKGAATLLFSNDTIAPDSFETISALKDKHPSPLPSFHLPDSPNSDDICLQVSSKEVLAALMSFKGGSAGGLDGLTPQHLKDLMCKSTGNIGRALLENITQLINFMLAGKVNNKITGILYGANLCALKKKDGGIRPIAVGCTFRLLASKVCCRHISPIVSSECSPVQLGFGSKGGCEAAVHATRTFLLNNGGEVLLKLDIKNAFNSIDRGALLKAIKSFAPKIFNYLWQCYSTPSKLMYKNNEIDSSVGCQQGDPLGPAIFSLAIHPIISHLNSKFNVWYLDDGTLGGKVNSVISDLKEIIEKFSDIGLNINFSKCELYINDTFNNSQNSDIFIKFSEIAPGIKILNKNTLQLLGAPVFLESVTTLIDQHIQKFNDISYRLYEINSHMAFFIIRNCLFVPRFTYLCRCSPIFKFTSILNSVDSLIRNTLVKILNCNLSEYAWSQASLPIRYGGLGIRKISSVSLPAFLASSHSTQSLIDKILHKMAFNNLEIAYVNEAETAWTLACPGQNFPDDKTVQRLWDEPICKSYHTKLLDNSQNLSERARLLAVSEKESGFWLQALPSYNLGTFFDNISFSICVCLRLGMKTNEPHRCLCGENVSQFGHHGLSCRRSAGRLSRHACVNDIIRRALVTINVPACLEPNGITRDDGKRPDGMTLVPWKQGRSLVWDATCVDTLAPSHISVTSTHAGGAAEAAESVKRRKYAALGDSYIFVPFAVETLGPWGPEARQFFKEMSSRLVDVSGDPRAGAYFGQRLSLAIQRGNAASILGTLPGGSDLDSLFYI

SEQ ID NO: 4930 - protein, 971 aa, Epargyreus clarus
MSLNNPQDLTAGSCSQSSNSVGACFVQCQLCSQPRFFKGNRGLNIHTGKVHSNSSCKDNSSNNNNNNNPSNINVPHSSTDSSFSYTLSRLKGSVAAVKRIPRGARITVATSLSESIRNVLNTNSIQSWELLLTFAYFKLHAKKDGHSSLTKIIKSNCANQISLVDVLKQPRFSTINLKKKIEQKVSDGDLKGAATLLFSNDPIAPDSFETISALKDKHPSPLPSFHLPDSPNSDDICLQVSSKEVLAALMSFKGGSAGGLDGLTPQHLKDLMCKSTGNIGRALLEDITQLINFMLAGKVNNKITGILYGANLCALKKKDGGIRPIAVGCTFRRLASKVCCRHISPIVSSECSPVQLGFGSKGGCEAAVHATRTFLLNNGGEVLLKLDIKNAFNSIDRGALLKAIKSFASKIFNYLWQCYSTPSKLMYKNNEIVSSVGCQQGDPLGPAIFSLAIHPIISHLNSKFNVWYLDDGTLGGEVNSVISDLKEIIEKFSDIGLNINFSKCELYINDTFNNSQNSDIFIKFSEIAPGIKILNKNTLQLLGAPVFLESVTTLIDQHIQKFNDISYRLYEINSHMAFFIIRNCLFVPRFTYLCRCSPIFKFTSILNSLDSLIRNTLVKILNCNLSEYAWSQASLPIRYGGLGIRKISSVSLPAFLASSHSTQSLIDKILHKMSFSNPEIAYVNEAETAWTLACPWQNFPDDKTIQRLWDEPICKYYQKKLLDNSQNLSERARLLAVSEKESGFWLQALPSYNLGTFFDNISFSICVCLRLGMKTNEPHRCLCGENVSQFGHHGLSCRRSAGRLSRHACVNDIIRRALVTINVPACLEPNGIARDDGKRPDGMTLVPWKQGRSLVWDATCVDTLAPSHISVTSTHAGGAAEAAESVKRRKYAALGDGYIFVPFAVETLGPWGPEARRFYKEMSSRLVDISGDPRAGAYFGQRISLAIQRGNAASILGTLPGGSDLDSLFYI

SEQ ID NO: 4931 - protein, 967 aa, Ectomis pervivax
MSVRPRPQDLSAGSCSQNSNSVANANYVQCQLCSHPHYFKSERGLNIHIGKTHWNASRQVHAQSNQSSNILPQTSTDTSTSFSHSLSRLKGSVATVKRIPRGARITVATSLSNTIQKVLSTNSLESWELLLSFAYLKLHARKDGHSSLTKIIKSNCIDPISHINISRESNFKPLNICKKIEQKVSDGDLKGAAALLFSADTVAPDSLDTVLALKEKHPLPLTTFHLPDAPKSDDNYLQACSKEVLAALMSFKGGSAGGLDGISPQHLKDLVCNSTGDTGRALLENITRLVNFMLAGKVNPAITNILYGANLCALKKKDGGIRPIAVGCTFRRLASKVCCRHISTTVSTHCSPVQLGFGSKGGCEAAVHATRTFLLNNGGEVLLKLDIKNAFNSIDRGALLREIKDITPSIFNYLWQCYSSPSKLMYRTNEIFSSVGCQQGDPLGPAMFSLAIHPIISRLKSKFNVWYLDDGTLGGEVNTMISDLKDIIENFSSIGLSINFSKCELYINDLLGNLEKSDIIRKFNEIAPGIKISSKDSLQLLGAPIFIESVTPLIKQQTIKFNEICDRLYQIKSHMAFFIIQNCLFVPKFTYMCRCSPIYKFENELSSVDILIKTTLNTVLNCSLSENSWSQASLPIRYGGLGVRKISSISLPAFLASSHSTSSLVSRILQNSNVEIAYMSEAKTVWSLACPGQNFPESKNIQRLWDEPICKLSYMTLLENTRDLTERARLLAVSERESGFWLQALPSFNVGTFLDNLSFSLCVCLRLGIKINEPHRCVCGENVNQLGHHGLSCRRSAGRLSRHASINDVIRRALVTVNVPATLEPNGIARDDGKRPDGMTLVPWKQGRSLVWDATCVDTLAPSHISATSSRAGGAAEEAETAKRRKYAALGEGYIFVPFAVETLGPWGPEARRFYKELSSRLVDISGDPRAGTYFGQRLSLAIQRGNAASLLGTLPQGSDLDSLFYL

SEQ ID NO: 4932 - protein, 966 aa, Chioides vintra
MSVNNPEDLTAGSCSQLSNGVETNLVQCHLCSLPRFFKGNRGLHIHIGKVHSNVSSQAVNSNPSKSNHNVPHSSTESSFSFTLSRLKGSVATVKRIPRGARITVATSLSHSIRNVLSSNSIESWEVLLTFAYFKLHVKKDGHSSLTKIIKANCTNPISLVDVIKQPGFQSSKIQKKIEQKVSDGDLKGAATLLFSNDTIAPDSSDTVSALKDKHPSPLPSFHLPEPPKTDDLYLQVSSKEVLAALMSFKGGSAGGLDGLSPQHLKDMVCNATGATGRALLEDITQLVNFMLAGKVNDNITSILYGANLCALKKKDGGIRPIAVGSTFRRLASKVCCRHISHTVSSQCSPVQLGFGSKGGCEAAVHATRSFLLNNGGEVLLKLDLKNAFNSVDRGALLQAIKSSTPSIFNYLWQCYSSPSKLMYKSNEIVSSVGCQQGDPLGPAIFSLVIHPIISLLNSKFNVWYLDDGTLGGEVDTVVSDLKDLIQNFSAIGLNINFSKCELFLNESFDDFARSDIINKFNEIAPGIKIISKSTLQLLGAPVFLESVTPLINEKIQKFNEICHRLYEINSHMALFIIRNCLFVPKFTYVCRCSPIFKFTNLLNSLDSLIRNTLDRVINCHLSENAWSQASLPIRYGGLGIRKISSVSLPAFLASSHSTQELIDKILHTSLKKYEVAYVNEAKSAWSLACPGQNFPVDKSIQRLWDEPICKLSHKKLLECSQNLTERARLLAVSEKESGFWLQALPSCNLGTFFDNLSFSICICLRLGLKTNEPHRCLCGESVSQFGHHGLSCRRSAGRLSRHACVNDIIRRALVTVNVPATLEPNGIARDDGKRPDGMTLVPWKQGRSLVWDATCVDTLAPSHISVTSARASGAAEAAESAKRRKYAALGEGYIFVPFAVETLGPWGPEARRFFKEMSSRLVDVSGDPRAGAYFGQRISLAIQRGNAASILGSLPRGSDLDSLFYI

SEQ ID NO: 4933 - protein, 964 aa, Chioides albofasciatus
MSVNNPEDLTAGSCSQLSNGVETNFVQCELCSQPRYFKGNRGLHIHIGKVHSNVSSQAVNSNPSNQNVSHTSTESSFSHTLSRLKGSVATVKRIPRGARIAVATSLSHSIRNVLSSNSIESWEVLLTFAYFKLHVKKDGHSSLTKIIKANCTNPISLVDVIKQPVFQSSKIQKKIEQKVSDGDLKGAATLLFSNDTIAPDSSDTVSALKDKHPSPLPSFHLPEPPKSDNLYLQVSSKEVLAALMSFKGGSAGGLDGLSPQHLKDMVCNATGATGRALLEDITQLVNFMLAGKVNDKITSILYGANLCALKKKDGGIRPIAVGSTFRRLASKVCCRHISPTVSSQCSPVQLGFGSKGGCEAAVHATRTFLLNNGGEVLLKLDLKNAFNSVDRGALLQAIKSSTPSIFNYLWQCYSSPSKLMYKSNEIVSSVGCQQGDPLGPAIFSLVIHPIISLLNSKFNVWYLDDGTLGGEVDTVVSDLKDLIQNFLAIGLNINFSKCELFVNESFDDFARSDIINKFNEIAPGIKIISKSTLQLLGAPVFLESVTPLINEKIQKFNEICHRLYEINSHMALFIIRNCLFVPKFTYVCRCSPIFKFSDLLNSLDSLIRNTLDRVINCHLSENAWSQASLPIRYGGLGIRKISSVSLPAFLASSHSTQELIDKILHTSQNKYEVSYVNEAKSAWSLACPGQNFPVDKSIQRLWDEPICKLSHKKLLECSQNLTERARLLAVSEKESGFWLQALPSCNLGTFFDNMSFSICICLRLGLKTNEPHRCLCGESVSQFGHHGLSCRRSAGRLSRHACVNDIIRRALVTVNVPATLEPNGIARDDGKRPDGMTLVPWKQGRSLVWDATCVDTLAPSHISVTSARAGGAAEAAESAKRRKYAALGEGYIFVPFAVETLGPWGPEARRFFKEMSSRLVDVSGDPRAGAYFGQRISLAIQRGNAASILGSLPRDSDLDSLFYI

SEQ ID NO: 4934 - protein, 966 aa, Udranomia orcinus
MSMSVNSIPALTAGSCSQISNSVDAGLVQCQLCPQPKYFKGNRGLNIHIGKVHNNNFVNIQSNSTEPPVNSTNIFSSLSYILSRLKNSLAIVKRIPRGARITVATSLSEVIREVISSNSFDSWKQLLTFAFFKLHAERDGHSSLTKLIKTNCSHVISLSDVVKTKQKFSPSSLKKKIEQKICDGDLKGAAAYLFSNDTIAPDSPDTVSALVDKHPSPLPTLHLPDAPNSLDVNTCLQVSSKEVLASLMSFRGGSAGGIDGLTPQHLKDLVGSSTGNAGKLLLEDITLLINYMLAGKVNPNVTEILYGANLCALNKKDGGIRPIAVGCTFRRLASKICCKHISPVVSARCAPVQLGFGSRGGCEAAVHATRTFVLNNGGEVLLKLDIKNAFNSIDRGALLREIKTVSPSIFNYLWQCYGSTSKLMYKYHEIISSVGCQQGDPLGPAMFSLAIHPIISQLSSKFNVWYLDDGTLGGDADTILSDLKEIIRHFSTIGLEINFSKCEIFIMDDSSKQNIIKKINEVAPGCKFLSKDSLHLLGAPVLLESVTSFINSLTQKFYEISDRLALISSHMAFVIIRNCLFVPKFTYVLRSSPIFKFTNILNSLDSLIKNTVNRVINCQLSDRSWTQASLPIRYGGLGIRKISCVSVPAFLASSYSTRRLVDNILAKTDVVNYEVAYVSEAINAWSLACPSQNLPESKNIQRLWDDPLCKLSHSYLLESAQDNTERARLLAVSERESGYWLQALPSHNLGTCLDNVSFSVSICLRLGTKTNEAHRCFCGHNVDQYGHHGLSCQRSAGRMSRHASLNDIIRRALVTVNVPATLEPNGLTRDDGKRPDGMSLIPWKQGKSLVWDATCVDTLAPSHLPATSTHAGAAAASAESVKKRKYAVLGEGYLFIPFAVETLGPWGSEARIFCKEISSRLVEVTGDPRAGAYFCQRLSLAIQRGNAASLLGTLPRGSDLHSLFYL

SEQ ID NO: 4935 - protein, 968 aa, Ortholexis melichroptera
MYSHTSLIAGTCSQTSSEVTCNFLKCQLCSEPRYFRGQRGLNIHSSKIHKISQKSSSVTNQPIHPTHSTQPDQPYISQNSIFSYKLSGLKNSLPILKRIPRGARIAVATCLSQTIRKVLSSNSPESWEHLLTFAFFKLHAKKDGRSSLTKIIKTNCNSSISLVDVVQNKIKSIPNIYKKIENKISDGDLKGAASLLFSKDSIAPDSPDTISALINKHSSSSSTLLPDAPVPDLCNLEISSKEVLAALMSFRGGSASGLDGLSPQHLKDLVGGSTGDTGRALLEDITLLVNFMLAGKVNPQITSILYGANLCALKKKDGGIRPIAVGCTFRRLTSKVCSRHIASTVSMQCSPVQLGFGSKGGCEAAVHAARSFILNNGGEVLLKLDLSNAFNSVDRGALLQQIKEHAPSIYNYVWQCYSTPSKLMYKNYEINSSVGCQQGDPLGPAMFSLAIQPLISELNSKLNLWYLDDGTLGDDVDTVINDLKYMIQKFSSIGLFINFSKCELFINDSFGNSDKPNIIKQFNDIAPGIKILNKKSLHLLGAPVFLDSVEEIINKQVIKFNEISDRLLHLNSHMALFIIRHCLFVPKFTYILRCSPIFKFSNHLDSIDLLIKNTLNSVINCQLSDRAWTQASLPIRYGGLGIRKISSVALPAFLASTHSTETLVKKIMAKSFSNIEITYMSEAKTAWSLACPNQNFPSSKIIQGLWDKPICEKLHQSVLDSAQNDVDRARLLALSERESGLWLQALPSYNTGTFLDNVTFSLSVCLRLGLKINEPHRCLCGEDVDQFGHHGLSCRRSAGRLSRHASVNDVIRRALVTVNVPATLEPNGIARDDGKRPDGLTLVPWKQGRSLVWDATCVDTLAPSHVPATSARAGAAAESAEAAKRRKYAVLGESYIFIPFAVETLGPWGPEARQLHKELSKRLVDTSGDPRAGAYFGQRISLAIQRGNAASLLGTLPRGSDLDSLFYL

SEQ ID NO: 4936 - protein, 968 aa, Cycloglypha thrasibulus
MPDSSVLSAGTCSQSSNVSLSQPSLVQCHLCSQPRFFKGTRGLSIHTGKAHKNVIDNNINIPSQPSIASNQWSAQPSSLLTYTLSRLKGTVSTVKRIPRGARITVATCLSKVIRNVVSHNSMESWKELLTFAYFKLHAKKDGRSSLTKIIKSNCSQSISLVDVIDLKTFSPTNINRKIEQKVSDGDLKGAATLLFSCDTIAPDSSETISALKDKHPSPLTAFCLPDHSPSNDCYLQISKKEVLAALMSFKGGSAAGLDGLSPQHLKDLTCNSTGDAGRALLEDITRLANLMLEGSVNKNVTDVLYGANLCALKKKDGGIRPIAVGCTFRRLVSKICCRHINSAVSTECSPTQLGFGIKGGCEAAVHAARTFLMNNGGEVLLKLDVKNAFNSVDRGALLHEIKKVTPSIYKYVWQCYGFPSKLMYKSHEILSSVGCQQGDPLGPAIFSLAIQPIISSLNSKFNVWYLDDGTLGGEASSVFNDFKTVIHKFSSIGLAINPNKCELFINETCDDLKKSEIYETFVKFAPGIKILTKDSLELLGAPVFLDSVPLNIDRQIEKFSQISDRLFNINAHMAFFIIRNCLFVPKFTYILRCSPAFKFLDILNSVDTIIKNTLSVVLNCQLSDRAWTQASLPIRHGGLGIRKISSVSLPAFLASVHKTQPLINNILSKSSINNLEVAFLSEAKSLWSLACPTQNWPSSENIQKLWDEPICIKTFQNLLDTSLDNTDRARLMAVSDRESGFWLQALPSYTLGTFLDNISFSLSVCLRLGLKVNEPHRCPCGEDVNILGHHGLSCRRSAGRLSRHACLNDVIRRALVTINVPASLEPNGIARDDGKRPDGMTLVPWKQGRSLVWDATCVDTLAPSHVPATSTRAGAAAEAAENAKRRKYAGLDQAYIFVPFAVETLGPWGTEARKFFKELSSRLVESSGDPRAGNFFGQRISIAVQRGNVASLLGTLPQDSGLDSLFYL

SEQ ID NO: 4937 - protein, 958 aa, Gesta gesta
MSSFPILSSGNCSQNSNDSHSNINFLQCHQCSQPRFFKGKKGLNIHTGKVHNVSNKNNVSFVNPPANNSQDSLHSSQFSGDSLLSYTLSRLKGSVATVKRIPQGARVTVATCLSKLIREVISLNSLESWKQLMTFSYFKLHAKRDGRSSLTKIIKSNCNNQISLVHVIEHQHFSPADICKKIEQKVSDGDLKGAATLLFSCDTIAPDSAETISALKEKHPSPLANLSFPDPPCNDDACLQVSKKDVLAAVMSFKGGSAAGLDGISPQHLKDLICNSTGNAGRALLEDITNLVNFMLEGRVHHSVAEILYGANLCAFNKKDGGIRPIAVGCTFRRLASKTCCRHINDIVSSHCSPIQLGCGVKGGCEAAVHAARTFLMNNGGEVLLKLDVKNAFNSVDRGALLHEIKKVTPSIYKYLWQCYGSPSKLMYKSHEIISSVGCQQGDPLGPAIFSLAIQPIISCLNSKFNVWYLDDGTIGGEVSSVFGDLNYIIQKFSSIGLVINPSKCELFINDSIGGLEKSEIIKKFSSVTPGIKIQTKDSLQLLGAPVFLDSVTPIINQKIQKFQQISDRLYNINFHMAFFIIRNCLFVPKFTYILRCSPVFKFFDVLNSVDTLIQKTLSVLLNCQLSDRAWAQASLPIRYGGLGIRKISSVSTPAFLASAHKTRPLIDSILKKSSFNNSEVAFLNDAKSAWSLACPNQNFPISLHVQRLWDEPICLKKFENLLTSSGDRTDRARLLALSDKESGFWLQALPSYTLGTFLDNCTFSLSVCLRLGLKVNEPHRCPCGENVNSLGHHGLSCRRSAGRISRHACLNDVIRRALVTINVPARLEPNGIARSDGKRPDGMTLIPWKQGKSLVWDATCVDTLAPSHVPATSTRAGAAAEAAENAKRRKYAALGESYIFVPFAVETLGPWGPEARRFFKDLSSRLVNVTGNPRAGSFFGQRISIAIQRGNAASILG

SEQ ID NO: 4938 - protein, 973 aa, Erynnis tages
MSSQSILSAGNCSQISNVSHRSTILMQCNQCSQPRFFKGTKGLNIHIGKVHKNISHNSLNIQNSQSSSQVHNIPSQCSDNQSSILSYTLSRLKGSVATVKRIPRGARITVATCLSSVIREVVSKNSVDSWKHLLTFAYFKLHAKRDGRSSLTNIIKSNCYNSLTLLDVISHRTFSQSDIRRKIEQKVNDGDLKGAATLLFSCDTIAPDSPETISALKDKHPSPLTTIHLPDPPCNDDACLQVSKKDVLAALMSFKGGSAAGLDGLSPQHLKDLVCNSTGEAGVSLLEDITKLVNLMLEGRVHHEITNILYGANLCALKKKDGGIRPIAVGCTFRRLVSKTCCRHINATVSSECSPVQLGFGIKGGCEAAVHAARTFLSNNGGEVLLKLDVKNAFNSVDRGALLQEIKKITPSIYKYLWQCYGFPSKLMYKSNEIFSSVGCQQGDPLGPAIFSLAIQPIISGLNSKFNIWYLDDGTIGGEVSSVLSDLHTIIQKFSSIGLDINPSKCELYINEALDDFEKSKIVQKFSDVTPGIKILTKDSLQLLGAPVFLESITPVIDRQIQKFNQVSDRLYSINSHMAFFIIRNCLFVPKFTYILRCSPTFKFFTVLNSVDSLIKNTLSNILNCQLSDRAWTQASLPIRFGGLGIRKISSVSTPAFLASVHRTQPLVDDILSKSFVNNIEVAFLSEARAAWCLACPSEPFPSSKHIQRLWDEPICSKMFDNILESSADQSERARLLAVSERESGFWLQALPSFSLGTFLDNTSFSISICLRLGLKVNEPHRCPCGENVNALGHHGLSCRRSAGRLSRHACLNDVIRRALVTINVPACLEPNGIVRDDGKRPDGMTLVPWKQGRSLVWDATCVDTLAPSHIPATASRAGAAAEAAESAKRRKYAVLGESYMFVPFGVETLGPWGPEAKKFFKDLSYRLSHVTGDPRAGSFFGQRISIAIQRGNAASILGTLPQDSGLESLFYL

SEQ ID NO: 4939 - protein, 971 aa, Timochares trifasciata
MPNAPDFAAGTSSQTSNGSITNTNIVQCHLCSQPRFFKGKKGLNIHIGKVHNYVSNHSNLDSQLNSPDLDSLIQCTDHSSSLLSYTLSRLKGSVATVKRIPRGARITVATTLSKTIHEVLLYNSVDSWKQLMTFAYFKLHAKRGGRSSLTKIIKSNCMNTISLIDVIENKQFSRTDIKKKIEQKVSDGDLKGAATLLFSCDIIAPDSPETIIALKDKHPSPSTTIHFPDPPCSGDDNLHVSKKEVLAALMSFKGGSAAGLDGLTPQHLKDLVSNSTGDAGRALLEDITELVNFMLEGRVHQSVTDILYGANLCALSKKDGGIRPIAVGCTLRRLVSKICCKYINSVVSSKCSPIQLGCGIKGGCEAAVHAARTFLINNGGEVLLKLDVKNAFNSVDRGALLHEIKKVTPSIYKYLWQCYGFPSKLMYKSNEIVSSVGCQQGDPLGPAIFSLAIQPIISSLNSKFNVWYLDDGTLGGEVSSVINDFHTIIQKFSSIGLFINPAKCELYINDSLEDCKKLQIFEQFTKISPGIKVLSRNSLELLGAPIFLDSVPQIIDRQIQKFTQISDRLCNINAHMAFFIIRNCLFVPKFTYILRSCPAFKFLDILNSVDTLIKNTLSVVLNSQLSDRAWTQASLPIRYGGLGIRKISNVSIPAFLASAHKTQPLINEILKKSLVNNPEVAFSSEAKSSWSLACPRQNFPSSGNIQRLWDEPICMKTFQNLLETSLDNTDRARLLAASDRESGFWLQALPSYNLGTFLDNTSFSLSVSLRLGLKVNEPHRCPCGEDVNIFGHHGLSCRRSAGRLSRHACLNDVIRRALVTINVPASLEPNGIARDDGKRPDGMTLVPWKKGKSLLWDATCVDTLAPSHIPATSMRAGAAAEAAENAKRRKYAGLGEAYIFVPFAVETLGPWGAEARNFFKELSSRLVESTGDPRAGNFFGQRISIAVQRGNVASLLGTLPQDSGLDSLYYL

SEQ ID NO: 4940 - protein, 979 aa, Sostrata bifasciata
MTNPSVLSAGICSQTSNLSLDHPNFLRCHLCSQPRLFKGKKGLNIHIAKVHKEPNNVSINNNPNTSNSVSNSDIPNNPNISNQCTDSFSSLLSYTLSQLKGSVATVKRIPRGARITVATCLSKIIREVVSMNSLDSWKHLMTFAYFKLHAKRDGRSSLTNVIKSNCNKPITLVDVIYNKKFTQSDIRKKIEQKVSDGDLKGAATLLFSCDTIAPDSPETILALKEKHPSQLTTIRLPDPPDSTACLQVSKKEVLAAVMSFKGGSAAGLDGLSPQHLKDLISNSTGDAGKVLLEDITKLVNFMLEGRVHHKVTDILYGASLCALNKKDGGIRPIAVGCTLRRLVSKTCCRHIKSTVSSECSPIQLGFGIKGGCEAAVHAARTFLLNDGGEVLLKLDVKNAFNSVDRCALLHEIKRVTPSIYNHLWQCYGFSSKLMYKSHEILSSVGCQQGDPLGPAIFSLALQPIISTLNSKFNVWYLDDGTLGGEVSTALDDFNTIIQNFSLIGLNINLSKCELYINDRFTNLEKSEIISKFLKVAPGIKILTKDSLQLLGAPVFLDSVTSIFDQQINKFNQISDRLFNINSHMAFFIIRNCLFVPKFTYILRCSPAFKFLDLLNSIDTLIKNTLSVVLNCQLSDRAWTQASLPIRYGGLGIRKISSISLPAFLASAHKTLPLINDILSKSFINNSEVAFLSEAKSSWSLVCPSQNFPISENIQKLWDEPICLKIFDSLLESSPDETERARLLAVSDRESGFWLQALPSYTLGTFLDNTSFCISVCLRLGLKVNEPHRCPCGENANIFGHHGLSCRRSAGRLSRHACLNDIIRRALVTINVPASLEPNGIARDDGKRPDGMTLVPWKQGKSLVWDATCVDTLAPSHTPATSKGAGAAAKAAENAKRRKYAVLGEGYIFVPFAVETLGPWGPEAKNFFKDISARLIIATGDPRAGSFFGQRISIAVQRGNVASVLGTLPQDSGLDSLFYL

SEQ ID NO: 4941 - protein, 973 aa, Gorgythion begga
MQDPSALSAGTCSQSSNVSLGHHSLMQCHHCSQPRYFKGTKGLNIHIGKVHKNVSTILPNHHPNVPSSSSVHSIQCTDLSSLLNYTLSRLKGSVATVKRIPRGARITVATCLSKLIRDVVTLNSMESWKQLMTFAYFKLHAKRDGRNSLTKIIKSNCSHSISLIDIICNKSFSTTDIKKKIEQKVSDGDLKGAANLLFSCDTIAPDSPETISALKEKHPSPLTAFCPPDPPSTDNDGFLQVSTKEVLAALMSFKGGSAAGLDGLSPQHLKDLTCCGSTGDAGRALLEDITKLVNLMLEGRVNQDVIDVLYGANLCALKKKDGGIRPIAVGCTFRRLVSKICCRHIKSAVASECSPIQLGFGIEGGCEAAVHAARTFLINNGGEVLLKLDVKNAFNSVDRSALLHEIKKVTPSIYKYLWQCYGLPSKLMYKSHEILSSVGCQQGDPLGPAIFSLAIQPIISSLNSKFNVWYLDDGTLGGEASSVLNDFHTIIDKFSTIGLVVNPLKCELYIRDSLDDFKRLEVIEKFTKIAPGIKILNKDSLELLGAPVFLDAVPSIFDRQIQNFFQISDRLYNINSHMSFFIIRNCLFVPKFTYILRCSPAFKFLDILNSVDNIIKSSLSIILNCQFPDRAWAQASLPIRYGGLGIRKISSVSVPAFLASAHKTQPLVYKILSKSFLNNYEIAYLSEAKSTWSLACPTQNFPSSESIQRLWDEPICMENLQNLLDTSLDNTDRARLLAASDRESGFWLQALPSYSLGTFLDNISFSISVCLRLGLKVNEQHRCPCGEVVNSLGHHGLSCRRSAGRLSRHASLNDVIRRALVTINVPASLEPNGIARDDGKRPDGMTLIPWSKGKSLVWDATCVDTLAPSHVPATSTRAGAAAEAAENAKRRKYAGLGEAYIFVPFAVETLGPWGAEARKLFKEISTRLMASTGDPRAGNFFGQRISIAVQRGNVASILGTLPQDSGLDSLFYL

SEQ ID NO: 4942 - protein, 967 aa, Cycloglypha thrasibulus
MQDPSVLSAGTCGQSSNVSHSSFLQCHQCSQPRFFKGTKGLNIHIGKVHRNDSINNNFNVPSQASFGLNQCTDNSSSLLTYTLSHLKGSVATVKRIPRGARITVAACLSKVIRDVVTINSMESWKQLMTFAYFKLHAKKDGRSSLTKIIKSNCSQPISLVDVIGNKTFSPTDIKRKIEQKVSDGDLKGAATLLFSCDTIAPDSSDTISALKEKHPSPLTAFCLPDPPLNDDGSLHVSKKEVLAALMSFKGGSAAGLDGLSPQHLKDLTSKSTGDAGVTLLEDITRLANLMLEGKVNQDVLDILYGANLCALKKKDGGLRPIAVGCTFRRLVSKICCRHIHSAVTSECSPIQLGFGIKGGCEAAVHAARTFLKNNGGEVLLKLDVKNAFNSVDRGALLHEIKKVTPSIYKYIWQCYGYPSKLMYKSNEILSSVGCQQGDPLGPAIFSLAIQPIISCLNSKFNVWYLDDGTLGGEANTVINDLQNIIDKFASIGLFINPKKCELYINDSFDDLKRSDIIEKFFKFTPGIKILSKNSLELLGAPVFLDSVPANIDRQIQKFSKISDRLHNINSHMAFFIIRNCLFVPKFTYILRCSPAFKFLNVLNSVDSIIKSTLSDILNCQLSDRAWAQASLPIRYGGLGIRKISSVSLPAFLASAHKTQPLINKILSKSFVNNPEVAFLCEAKSTWSMACPTQNYPTSENIQRLWDEPICIQTFQNLLSTSLNNTDRARLMAVSDRESGFWLQALPSYTLGTFLDNTSFSVSVCLRLGLKVNEPHRCPCGEDVDILGHHGLSCRRSAGRLSRHACLNDVIRRALVTINVPASLEPNGIARDDGKRPDGMTLIPWKKGKSLVWDATCVDTLAPSHIPATSARAGAAAEAAETAKRRKYAGLAEAYIFVPFAVETLGPWGAEARKFFKTLSARLVESTGDPRAGHFFGQRISIAVQRGNVASLLGTLPQDSGLDSLFYL

SEQ ID NO: 4943 - protein, 971 aa, Ebrietas anacreon
MQDPSVLSSGTCGQSSNVSLTYPSYLQCHQCSQPRFFKGTKGLNIHIGKVHKIDTINNNFNITNNSQVSTPLYQCTDNSSSLLTYTLSRLKGSVATVKRIPKGARITVAACLSKIIRDVVTINSIESWKQLMTFAYFKLHAKKDGRSSLTKIIKLNCSQHISLVDVICNKTFSPIDIKRKIEQKVSDGDLKGAATLLFSCDTIAPDSSDTISALKEKHPSPLTAFCLPDPPLNDDSSLQVSKKEVLAALMSFKGGSAAGLDGLSPQHLKDLTSKSTGDAGVTLLEDITRLANLMLEGKVNKDVIEVLYGANLCALKKKDGGLRPIAVGCTFRRLVSKICCRHINSAVTSECSPIQLGFGIKGGCEAAVHAARTFLKNNGGEVLLKLDVKNAFNSVDRGALLHEIKKVTPSIYKYLWQCYGYPSKLMYKSHEILSSVGCQQGDPLGPAIFSLAIQPIISCLNSKFNVWYLDDGTLGGEANTVINDLQNIIDKFSSIGLFINATKCELYINDSFDNLKRSEIIEKFFEITPGIKILTKNSLELLGAPVFLDSVPANIDRQIQKFSQISDRLSNINSHMAFFIIRNCLFVPKFTYILRCSPAFKFLNVLNSVDSIIKSTLSDILNCQLSDRAWAQASLPIRYGGLGIRKISSVSLPAFLASAHKTQPLINEILSKSFVNIPEVAFLSEAKSTWSMACPTQNYPTSENIQRLWDEPICIQTFQSLLSTSLNNTDRARLMAVSDRESGFWLQALPSYTLGTFLDNTSFSLSVCLRLGLKVNEPHRCPCGEDVDILGHHGLSCRRSAGRLSRHACLNDVIRRALVTINVPASLEPNGIARDDGKRPDGMTLIPWKTGKSLVWDATCVDTLAPSHIPATSARAGAAAEAAETAKRRKYAGLEEAYIFVPFAVETLGPWGAEARKFFKTLSARLVESTGDPRAGHFFGQRISIAVQRGNVASLLGTLPQDSGLDSLFYL

SEQ ID NO: 4944 - protein, 968 aa, Cycloglypha thrasibulus
MLDPSALSAGTCSQSSNVSLSKPSLVQCHLCSQPRFFKGKTGLSIHTGKVHKNVIYNNTNIPSQPSIASNQCTGQSSYLLTYSLSRLKGSVPTVKRIPRGARITVATCLSKVIRDVVTHNSIESWKELMTFAYFKLHVKKDGRSSLTKIIKSNCSQSISLVDVINPKTFTPADINRKIEQKVSDGDLKGAANLLFSCDTIAPDSSETISALKEKHPSPLTAFCLPDPPTNDDGSLQVSKKEVLAALMSFKGGSAAGLDGLSPQHLKDLTSKSTGDAGGALLEDITRLANLMLEGRVHKDVTDILYGANLCALKKKDGGLRPIAVGCTLRRLVSKICCRHINSIVASECSPIQLGFGIKGGCEAAVHAARTFLSNNGGEVLLKLDVKNAFNSVDRGALLHEIKKVTPSIYKYLWQCYAYPSKLMYKSHEILSSVGCQQGDPLGPAIFSLAIQPIISCLNSKFNVWYLDDGTLGGEASSVFRDFQIIIDKFSSIGLAINPEKCELFINDSCDDLKRYEISEKFIKFAPGIRILSKDSLELLGAPVFLDSVPLNIDRQIQKFSQISDRLFNINSHIAFFIIRHCLFVPKFTYILRCSPAFKFLDILNSVDNIIKNTLSVVLNCQLSDRAWTQASLPIRYGGLGIRKISSVSLPAFLASVHKTQPLINDILNKSFINNLEVAFLGEAKSVWSLACPTQNFPSSENIQRLWDEPICMNIFQSLLETSIDNTDRARLMAVSDRESGFWLQALPSYTLGTFLDNISFSLSVCLRLGLKVNEPHRCPCGEDVNILGHHGLSCRRSAGRLSRHACLNDVIRRALVTINVPASLEPNGIARDDGKRPDGMTLVPWKQGRSLVWDATCVDTLAPSHLPATSTRAGAAAEAAENAKRRKYAGLDQAYIFVPFAVETLGPWGTEARKFFKELSSRLVESSGDPRAGNFFGQRISIAVQRGNVASLLGTLPQDSGLDSLFYL

SEQ ID NO: 4945 - protein, 973 aa, Erynnis tages
MSSQSILSAGNCSQISNVSHRSTILMQCNQCSQPRFFKGTKGLNIHIGKVHKDISHNSLNIQNSQSSSQVHNIPSQCSDNQSSILSYTLSRLKGSVATVKRIPRGARITVATCLSSVIREVVSKNSVDSWKHLLTFAYFKLHAKRDGRSSLTNIIKSNCYNSLTLLDVISHRTFSQSDIRRKIEQKVNDGDLKGAATLLFSCDTIAPDSPETISALKDKHPSPLTTIHLPDPPCNDDACLQVSKKEVLAALMSFKGGSAAGLDGLSPQHLKDLVCNSTGEAGVSLLEDITKLVNLMLEGRVHHEITNILYGANLCALKKKDGGIRPIAVGCTFRRLVSKTCCRHINATVSSECSPVQLGFGIKGGCEAAVHAARTFLSNNGGEVLLKLDVKNAFNSVDRGALLQEIKKITPSIYKYLWQCYGFPSKLMYKSNEIFSSVGCQQGDPLGPAIFSLAIQPIISGLNSKFNIWYLDDGTIGGEVSSVLSDLHTIIQKFSSIGLDINPSKCELYINEALDDFEKSKIVQKFSDVTPGIKILTKDSLQLLGAPVFLESITPVIDRQIQKFNQVSDRLYSINSHMAFFIIRNCLFVPKFTYILRCSPTFKFFTVLNSVDSLIKNTLSNILNCQLSDRAWTQASLPIRFGGLGIRKISSVSTPAFLASVHRTQPLVDDILSKSFVNNIEVAFLSEARAAWCLACPSEHFPTSKHIQRLWDEPICSKMFDNILESSTDQSERARLLAVSERESGFWLQALPSFSLGTFLDNTSFSISICLRLGLKVNEPHRCPCGENVNALGHHGLSCRRSAGRLSRHACLNDVIRRALVTINVPACLEPNGIVRDDGKRPDGMTLVPWKQGRSLVWDATCVDTLAPSHIPATASRAGAAAEAAESAKRRKYAVLGESYMFVPFGVETLGPWGPEARKFFKDLCYRLSHVTGDPRAGSFFGQRISIAIQRGNAASILGTLPQDSGLESLFYL

SEQ ID NO: 4946 - protein, 1307 aa, Urbanus sp.
MRRHKKIQKKEIQTTQSPTVVDTINIPASSSLHEQTQPDRLETVHINAVRRSNRRTQNRYRSKSPTTSDIIEPYSPSTVSYTPSIASIDEEARDLVTPNLDATRERNTLLPASTKAGKPRVRMSWNDDVNLFIMRTYYYITKLETDKTVYRKRLFDKFKLSYPDVKVTEQRVSDQMRAILRNKLLSDAVIKQIKAEVSEQLRNEDDPNNITSCNIIEEMESPQRPLYSVPQTPQYVITENSNPTYTPHVSRSHIISSDISTQTQIMPITNTILSETDQPNLSYVSITDTQDLLEKFQTALVSFSGSDPLTRPKLPRLKANKKLYALVNTFNKHILPTSFSLDSDLTQIHTLIYCSGLVISKEMGYKIEPEYNYTLKKKENIRKPAWEKRLENDIIKLRADIGRLTQFIKGNRSRKIVETVKIIFENAKTHSIHEPENIRAQEYLDTLKQKLTLKSHRLARYKKALQRKTDNKLFSSNQKGFYRSMTENGISKNPSEVPSAVELKTYWAGIWDKHADYNRSAEWIEKETLHWSQIEEMSFPEITEEDMKLVIKKLKNWKATGLDGVHNFRLKYFTSLHGIFTKLTNDLIHDTVPLPHFLTTGITYMLPKSSNTSDPSQYRPITCLPTVYKLITSCITKKIVHHLEKHNIIAEEQKGCRQNHRGCKEQLIIDSTILKHAQKNNRNLNITYIDYKKAFDSVPHSWLVRVLHIYKIHPVIISFLEKAMANWTTTLTMTTSMSKLTTDAIRIRNGIFQGDSLSPVWFCMALNPISRLLTQNNSGYRLTRDTPISHLMYMDDIKLFAKNEKEMKELLKVTTQFSKDISMSFGIDKCKTLHIKKGKIAGGDYNIDEEVVITAMDNDDLYKYLGILQARAINHTKIRQVLGAEYVRRVKQICKRQLYSRNLTKAINTYATPILTYSFGIIKWTQTDIKNLEIKTRTILTKYNYLHPKSAIERMTLKREQGGRGFIDLMILWQNQLKNLREFFYNKSETSPIHLATINADNNFTPLNLSHKEIQFRTSAELTSQKIETWKRKELHGRHLHDLEQPHIDTIASNKWLQLGYLFPETEGFTIAIQDQVINTRNYKKYILKENIETDKCRKCHRQPETIQHITGACTSLLQTDYTHRHNQVVHFIHQKLALKFKLIDENLKPYYEYTPKPVLENGEKKMYYDRAILTDRTVHHNRPDITLLDKKSKTAFLIDITIPNTHNIQKSITEKLSKYVELKEELLRIWNLQTVYIVPLVLSSTGVIPKHLLHSLKILDLPPQTYYTMQKAAILNTCRIVRKFLSNSDDEMTDMTDRLTTDRPAL

SEQ ID NO: 4947 - protein, 940 aa, Cecropterus albociliatus
MGYKIEPEFNCTQRKRENMRKPKWEMRLENDIMKLRADIGRLTQYIKGNRSRKIVETVKVIFENARIHSIHEPENTRATEYLDTLKQKLTLKSHRLARYKKALQRKTDNTLFSANEKGFYRSMNERTTSKVNPHEIPSAIDLRTYWAELWDKQTEYNSSADWIDNETQHWNQIVEMTFPEVTVNDMALVIKRLKNWKATGLDGVHNFWLKYFTSLHSILTKLTNDVIHNTVQLPLFLTTGITHMLPKSSNTSDPSQYRPITCLPTIYKLITSCITKKIVHHLEKYNIIAEEQKGCRQNHRGCKEQLIIDSVILKHAYKKNRNLNISYIDYKKAFDSVPHSWLIRVLHIYKIHPVIISFLENAMANWKTTLSLTTSFANLTTEEIRIRNGIFQGDSLSPVWFCMAINPISRLLSQNNLGYRLTRDTAISHLMYMDDIKLFAKSEKEMKELLKVTTKFSSDINMTFGLDKCKTLHIKRGKLTGGDYNINDDLVITAMNTDDLYKYLGILQARTINHKRIRQELSAEYIRRVKQICKRQLYSRNLTKAINTYATPILTYSFGIIKWTQTDIKNLEIKMRTVLTKYNYLHPKSAIERMTLKREQGGRGFIDLLILWQNQLRNLREFFYTKSETSPIHLATVNTDDNYTPVNLSEKEVQFKTYVEHTRQKVQLWKRKELHGRHLHDLQQPHIDMKASNKWLEFGYLFPETEGFTIAIQDQVINTRNYKKYILKESIETDKCRKCHRQPETIQHITGACTSLLQTDYTHRHNQIVHFIHQKLALKFKLITGKPKPYYEYTPKPVLETDETKMYYDRAILTDRTIHHNRPDITLLNKTSKTAFLIDVTIPNTHNIQNSITEKLSKYIELKEELVRIWNLQTVYIVPLVLSTTGVIPKHLLNSLKILDLPPRTFYTMQKAAILNTCRIVHNLLSNIDDEMTNITDKPA

SEQ ID NO: 4948 - protein, 1292 aa, Blastobasis lacticolella
MRRIKKKNINVTQLSTVVNTESVRNSSLTSPQTPHDCLEQSETLTIRRSRRITNNRYRSPSPAISDVSEPYSPSTISYTPSLASVDEEHIDVDIPNLDVAREVHTFLPASTKAGKPRVRMRWSNDVNLFIMRTYYFITKLETDKTMYRKRLFDRFKIEYPDINVTEQRIADQMRAILRNKLLSDTIITQIKLEVSTLLKEDEERVNSSALYISHPLSSVDSTPQQHLLSSLTLTDTLSTEYENELHISLNSPILSSQTQTERSVYTSAAERDPTYINDTIITNTNTQELLKQLQNTLIEFTDTDPLTRPKLPRLRVNKKLNGLLRVFNTVILPKLISKDSDLTQIHTLIYCSALVISQEMGYEVKRNITEGRRHRENFGKPTWKTRLERDIEILRKNIGRLTQYIKGNRSRKVTDTVESVFRNTKIHSTHEPANNRPQEYLDTLKQKLALKSHRLGRYNKALQRKTNNNLFNTNEKGFYRSLHNSGSDNQNSTEIPSAEDLRHYWAEIWDKSTEFNRSAKWVNDEAQHWDHIEEMVLTDVTEDDICTVTSKMKNWKAAGLDGVQNFWLKHLTVLHSSLAKVVTELIHGTTPLPPFLTTGITLMLPKSLNTADPSQYRPITCLPTTYKLITSCITNKVVNHLEMHNIIAEEQKGCRQNHRGCKEQLIIDSTVLKHAHKHNRNLNISYIDYKKAFDSVPHSWLIRVLQIYKIHPSIIAFLEHAMANWRTTLTLSVKTAKLITEQIQIRNGIFQGDSLSPLWFCMALNPLSQLLSKSKHGYKLTRDTSITHLMYMDDIKLYGKTDHGMKELLEITAEFSKDINMNFGLDKCKTLHIKKGKIIEGDYNISDDICITAMDNDEMYKYLGIQQTKSINHTQIKKDLTSEYIRRVNKVCKKQLNARNLTKAINTYATPILTYSFGIIKWTQTDIKNLEIKTRTTLTKHKYLHPKSAIERISTKRELGGRGLIDLNILWQNQLKNLRDFFYSKISDSVVHLATTLTDDNYTPLNLKHKEKEFIPVTEQVKNKLNSWRSKELHGRHVHDLEKPHVDPIASNIFLKQGYLFPETEGFIIAIQDQVINTRNYKKYILKENIESDKCRKCLQQPETIQHITGACTSLLQTDYTHRHNQIVHYIHQKLALKYQLITGKPKPYYEYTPMPVLENADAKMYYDRAILTDHTIHYNRPDITLLNKITKTAYLIDVTIPNTHNLQTAITGKINKYTELKEEVLRIWNLQSVYIVPLVLSTTGVIPKHLLHSLSTLDLPTQFFHTMQKAAILNTCRIVRKFLSDPESSGS

SEQ ID NO: 4949 - protein, 1301 aa, Cecropterus bathyllus
MRRYKITNNKIQTTQSPTVVDIINTPDSSSLHEQTQNERLQSNHTRAVRRSSRRTQNRYRSKSPTTSEIIEPYSPSTVSYTPSLASIDEDVRELVTPNLDVARDRNALLPASTKAGKPRVRMRWDDNVNLFIMRTYYYITKLETDKTMYRKRLYDKFKLNYPDVKVTEQRISDQMRAILRNKLLSDTVIEHIKAEISEQLRNEDEHNNQTSCSSSQLIQSPQRTSHSGPQTSHTTTTSTRSTYTSHVLRSNIITSDISTQTQITPITNTTLLEPDQVDLSYVPSTNNAQDLFEKFQATLISFSGTDPLTRPKLPRLKPNKKLYALVNTFNNHILPSSYSLDSDLTQIHTLIYCSGFVISKEMGYKIETEFNCIGKKVNIRKPTWEMRLENDIMKLRADIGRLTQYIKGNRSRKIIETVKVIFENAKIHSIHEPENTRATEYLDTLKQKLTLKSHRLARYKKALQRKTDNKLFSANEKGFYRSMNQKAMSKFNPSEIPSATDLRTYWAEIWDKRADYNSSADWINNETQNWNHIEEMSFPNVTEKDMALVIKKLKNWKATGLDGVHNFWLKYFTSLHGILTKLTNDLIHNTVQLPHFLTTGLTYMIPKSSNTSDPSQYRPITCLPTIYKLITSCITMKIVHHLEKHNIIAEEQKGCRQNHRGCKEQLIIDSIILKHAHKHNRNLNITYIDYKKAFDSVPHSWLIRVLHIYKIHPQIIAFLENAMANWNTTLTLSTSSTKVTTEGIRIRNGIFQGDSLSPVWFCMALNPISRLLSQNNLGYRLTRDTSISHLMYMDDIKLFAKIEKEMKELLKLTSKFSSDISMTFGLDKCKTLHIKRGKITGGDYSIDEDLVISAMNSDDLYKYLGILQARTINHKRIRQELSAEYIGRVKQICKRQLYSRNLTKAINTFAIPILTYSFGIIKSTQTDIKNLEIKTRTVLTKYNYLHPKSAIERMTLKREQGGRGFIDLMILWQNQLRNLREFFYNKSETSPIHLAAVNSDDNYTPINLTEKELQLETSADHTRQKIQCWKRKELHGRHIHDLEQPHIDMKASNKWLEFGYLSPETEGFTIAIQDQVINTRNYKKYILKESIETDKCRKCHRQPETIQHITGACTSLLQTDYTHQHNQIVHFIHQKLAIKFKLITDKPKPYYEYTPKPVLETSETKMYYDRAILTDRTIHHNRPDITLLNKTSKTAYLIDITIPNTHNIQNSITEKLSKYIELKEELLRIWNLQTVYIVPLVLSTTGVIPKHLLNSLKILDLPPRTYYTMQKAAILNTCRIVRKFLANIDDEITNKTYRPAL

SEQ ID NO: 4950 - protein, 1298 aa, Urbanus esmeraldus
MRRHKKTNKEIQTTQSPTVVDTINTPASSSLHEQTQPDRLETIHAVRRSSRRTQNRYRSKSPTTSDIIEPYSPSTVSYTPSIASIDEEARDLVIPNLDVTRDRNTLLPASTKAGKPRVRMSWNDDVNLFIMRTYYYITKLETDKTIYRKRLFDKFKLNYPDVKVTEQRISDQMRTILRNKLLSDAVIKQIKAEVSEQLRNEDDPNNITCNITQAMESPQRPSYSVPHTLQYAITANPNPTYTPHVSRSQIISSDISTQTQITPITNTILSEIDQPNPSYVPLTDTKDLLEKFQTALVSFSGSDPLTRPKLPRLKANKKLFALVNTFNNHILPTSYSLDSDLTQIHTLIYCSGLVISKEMGYKIEPEFNYTLKKNENIRKPAWEKRLENDIIKLRADIGRLTQFIKGNRSRKIVETVKVIFENVKIHSIHEPENIRGQEYLDTLKQKLTLKSHRLARYKKALQRKTDNKLFSSNEKGFYRSMTENGKSKSSSEVPSEIDLKTYWAGIWDKQTDYNRSAEWIEKETLHWNQIEEMSFPEITEEDMKLVIKKLKNWKATGLDGVHNFWLKYFTSLHGILTKLTNDLIRDTIQLPHFLTTGITYMLPKSSNTSDPSQYRPITCLPTVYKLITSCITKKIVHHLEKHNIIAEEQKGCRQGHRGCKEQLIIDSTILKHAHKNNRNLNITYIDYKKAFDSVPHSWLVRVLHVYKIHPAIISFLEKAMANWTTTLTMTTSESRLTTEEIRIRNGIFQGDSLSPVWFCMALNPISRLLSENNSGYRLTRDTPISHLMYMDDIKLFAKTEKEMKEMLKVTTQFSKDISMSFGLDKCKTLHIKKGKITGGDYNIDEEVVITAMDNDDLYKYLGILQARAINHTKIRQELSAEYVRRVKQICKRQLYSRNLTKAINTYATPILTYSFGIIKWTQTDIKNLEIKTRTLLTKYNYLHPKSAIERMTLKREQGGRGFIDLMILWQNQLKNLRQFFYNKSETSPIHLATIDTDNNFTPLNLNHKEIQFRTSAEVTKQKIDTWKRKELHGRHMHDLEQPHIDTIASNKWLQLGYLFPETEGFTIAIQDQVINTRNYKKYILKENIETDKCRKCHRQPETIQHITGACTSLLQTDYTHRHNQVVHFIHQKLALKFKLINENLKPYYEYTPKPVLENGEKKMYYDRAILTDRTIHHNRPDITLLDKNSKTAFLIDITIPNTHNIQKSITEKLSKYVELKEELLRIWNLQTVYIVPLVLSSTGVIPKHLFHSLKILDLPPQTYYTMQKAAILNTCRIVRKFLSNSDDEMTHMTDRPAL

SEQ ID NO: 4951 - protein, 1176 aa, Autochton pseudocellus
MHTYYYITKLETDKTMYRKRLYDKFKLNYPDVKVTEQRISDQMRAILRNKLLSDTVIKQIKDEISEQLRNEDDHTNLTSSSTSQLIQSHITPHIIPQSTSHSVLQTSHTLTINSKPTYTPRLSRSHIITSDISTQTQITPITNTILLGADQADLSYGLSSSAQDLLEKLQAALVSFSGTDPLTRPKLPRLKANNKLYALVNIFNNNILPTLYSLDSDLTHIHTLIYCSALVIGKEMGYKIEPEFNCTQRKKENIRKPSWEIRLENDIMKLRADIGRLTQYIKGNRSRKIVETVKVIFENARIHSIHEPENTRATEYLDTLKQKLTLKSHRLARYKKALQRKIDNKLFSTNEKGFYRSINERVTNKFNPSEIPSARELRTYWAEIWDKRTDYNSSADWIENETQYWNQIEEMTFPEVTDNDMALVIKRLKNWKATGLDGLHNFWLKYFTSLHGILAKLTNDVIHNSAQLPLFLTTGITYMLPKSSNTSDPSQYRPITCLPTIYKLITSCITKKIVHHLEKYNIIAEEQKGCRQNHRGCKEQLIIDSIILKHANKNNRNLNISYIDYKKAFDSVPHSWLIRVLHIYKIHPAIISFLENAMANWKTTLTLTTSLAKLSTEEIRIRNGIFQGDSLSPVWFCMALNPISRLLSHNNLGYRLTRDTSISHLMYMDDIKLFAKTEKEMKELLKVTTKFSKDISMTFGFDKCKTLHIKKGKITGGDYKIDEDIVITAMNNDDLYKYLGILQARTINHKRIRQELSAEYIGRVKQICKRQLYSRNLTKAINTYATPILTYSFGIIKWTQTDIRNLEIKTRTVLTKYNYLHPKSAIERMTLKREQGGRGFIDLVMLWQNQLRNLREFFYNKSETSPIHLAAVDSDDNYTPINLTEKEIQFKTSADHTRQKVQLWKRKELHGRHIHDLEQPHIDMKASNKWLEFGYLFPETEGFTIAIQDQVINTRNYKKYILKESIETDKCRKCHRQPETIQHITGACTSLLQTDYTHRHNQIVHFIHQKLAIKFKLLTEKPKPYYEYTPKPVLENNETKMYYDRAILTDRTIHHNRPDITLLNKNSKIAFLIDITIPNTHNIQNSITEKLSKYIELKEELLRIWKLQTVYIVPLVLSTTGVIPKHLLNSLKILDLPPRTYYTMQKAAILNTCRIVRKFLTNIDDEMTNKTDRPAL

SEQ ID NO: 4952 - protein, 933 aa, Blastobasis lacticolella
MGYEVKRNITEGRRHRENFGKPTWKTRLERDIEILRKNIGRLTQYIKGNRSRKVTDTVESVFRNTKIHSTHEPANNRPQEYLDTLKQKLALKSHRLGRYNKALQRKTNNNLFNTNEKGFYRSLHNSGSDNQNSTEIPSAEDLRHYWAEIWDKSTEFNRSAKWVNDEAQHWDHIEEMVLTDVTEDDICVVTSKMKNWKAAGLDGVQNFWLKHLTVLHSSLAKVVTELIHGTTPLPPFLTTGITLMLPKSLNTADPSQYRPITCLPTIYKLITSCITNKIVNHLEMHNIIAEEQKGCRQNHRGCKEQLIIDSTVLKHAHKHNRNLNISYIDYKKAFDSVPHSWLIRVLQIYKIHPSIIAFLEHAMANWRTTLTLSVKTAKLITEQIQIRNGIFQGDSLSPLWFCMALNPLSQLLSKSKHGYKLTRDTSITHLMYMDDIKLYGKTDHGMKELLEITAEFSKDINMNFGLDKCKTLHIKKGKIIEGDYNISEDICITAMDNDEMYKYLGIQQTKSINHTQIKKDLTSEYIRRVNKVCKKQLNARNLTKAINTYATPILTYSFGIIKWTQTDIKNLEIKTRTTLTKHKYLHPKSAIERISTKKELGGRGFIDLNILWQNQLKNLRDFFYSKISNSVVHLATTLTDDNYTPLNLKHKEKEFIPVTEQVKNKLNSWRSKELHGRHVHDLEKPHVDPIASNIFLKQGYLFPETEGFIIAIQDQVINTRNYKKYILKENIESDKCRKCLQQPETIQHITGACTSLLQTDYTHRHNQIVHYIHQKLALKYQLITGKPKPYYEYTPMPVLENADAKMYYDRAILTDHTIHYNRPDITLLNKITKTAYLIDVTIPNTHNLQTAITGKINKYTELKEEVLRIWNLQSVYIVPLVLSTTGVIPKHLLHSLSTLDLPTQFFHTMQKAAILNTCRIVRKFLSDPESSGS

SEQ ID NO: 4953 - protein, 1302 aa, Astraptes apastus
MRRYKKTCKEIQTTQLSTVVDTINTPASSSLHGQIQIERLETVRTNAVRRSNRRTQNRYRSKSPTTSDIIEPYSPSTVSYTPSIASIDEEARELITPNLDATRDRNTLLPASTKAGKPRVRMRWDDDVNLFIMRTYYYITKLETDKTIYRKRLYDQFKLNYPDVKVTEQRISDQMRAILRNKLLSDAVIKQIKAEISEQLKNEDEHNNITSCNTTQLMESSLRPSYSVPQTSQYTITSNSHPIYTPNVSRSHIISSDISTQTQITPITDTILSETDQPNLSCVPLTDVQDLLEKFQTALVSFSGSDPLTRPKLPRLKANKKLYALVNTFNNHILPTSYSLDSDLTQIHTLIYCSGLVISKEMGYKIDPEFNYTLKKKGNVRKPAWEMRLERDIIKLRADIGRLTQFIKGNRSRKIVETVKVVFENAKIHSIHEPENTRAQEYLDTLKQKLSLKSHRLARYKKALQRKTDNKLFSSNEKGFYRSMNESVVSKFKSTEVPSAIDLKTYWAGIWDKQTNYNGSAEWIEKERQHWNHIEEMSFPEITEEDMILVIRKLKNWKAPGLDGVHNFWLKYFTSLHRILTKLTNDLIHGTIQLPLFLTTGVTYMLPKSSNTLDPSQYRPITCLPTVYKLVTSCITKKIVHHLEKQNIIAEEQKGCRQNHRGCKEQLIIDSTILKHAQKNNRNLNITYIDYKKAFDSVPHSWLVRVLHIYKIHPAIISFLEKAMANWKTTLTLTTSMCKLKTEEIHIRNGIFQGDSLSPVWFCMALNPISRLLSQNNSGYRLTRDTSISHLMYMDDIKLFAKTDKEMKELLKITTEFSKDISMTFGLDKCKTLHIKKGKITGGNYDINEGIVITAIGNEDLYKYLGILQARAVNHTKIRQELGIEYIRRVKQVCKKQLYSRNLTKAINTYATPILTYSFGVIKWTQTDIKNLEIKTRTVLTKYNYLHPKSAIERMTLKREQGGRGFIDLMILWQNQLKNLREFFYKKSETSPIHLATIDTDNNFTPLNLNHKEIQFQTSAEVTSQKIQTWKRKELHGRHLHDLEQPHIDSIASNKWLHLGYLFPETEGFTIAIQDQVINTRNYKKYILKENIATDKCRKCQRQPETIQHITGACTSLLQTDYTHRHNQVVHFIHQKLALKFKLITEKPKPYYEYTPKPVLENGEKKMYFDRAILTDRTIHHNRPDITLLDKNSKTAFLIDITIPNTHNIQKSINEKLSKYVELKEELIRIWKLQTVYIVPLVLSSTGVIPKHLLHSLKILDLPPQTYFTMQKAAILNTCRIVRKFLSNIDDEMTDVTDRPGL

SEQ ID NO: 4954 - protein, 1302 aa, Autochton potrillo
MRRYTKQNNEIQTTQSPTVVDTVNTPVSSLFQEQTQNERSEVNHTKTVRRSSRRTQNRYRSISPTTSDITEPYSPSTVSYTPSLASIDEESRELVTPNLDVARHRNTLLPASTKAGKPRVRMRWDDNVNLFIMRTYYYITKLETDKTMYRKRLYDRFKLSYPDVKVTEQRISDQMRAIIRNKLLSDAVIKQIKAEVSEQLRNEDEYTNQTVCNTTQLTQSPHCPLHAAPRSSQHALITNPDPTYTSHVSRSHIICSDISTQTQMTSIMNTILPEMDQSNLNYVPPTNTQDLLEKLQTALVSFSGTDPLTRPKLPRLKSSKKLYSLIKTFNNNILPSSYSLHSDLTQIHTIIYCSGLVISKEMGFKIEHDFTHVQKNKGDIRKPAWETRLESDIIKLRADIGRLTQYIKGNRSKKIVETVKIIFENAKRHSIHEPENTKAQEYLDTLKQKLTLKSHRLARYRKALQRKTDNKLFSTNEKGFYRSMNESGKNKLNTSEVLSVTDLRSHWAEIWDNRTDYNSSADWINKEIQQWNGIEEMSFPEVTEKDMTVAMKKMKNWKAPGLDGVHNFWLKYFTSLHGILTKLINDLIHNTIQLPPFLTTGITYMLPKSSNTLDPSQYRPITCLPTIYKLITSCITNKIVHHLEKHNIIAEEQKGCRQNHRGCKEQLIIDSTILKHAHKYNKNLNITYIDYKKAFDSVPHSWLIRVLHIYKIHPTIISFLENAMANWKTTLTLTTSLAKLTTEEIRIRNGIFQGDSLSPVWFCMALNPISRLLKLNNSGYRLTRNTSISHLMYMDDIKLFAKSEKEMKELLQVTTEFSKDISMTFGLDKCKTLHIKKGKITGGDYKIDEELVITAMNNDDLYKYLGILQASAINHTRIRQELGAEYIRRVKQVCKRQLYSKNLTKAINTYATPILTYSFGIIKWTQTDIKNLEMKTRTVLTKYNYLHPKSAIERMTLKREEGGRGFIDLLILWQNQLKNLREFFYKKMETSPIHLATVDTDDNYTPLNLNHREIQFKTSVEHTKQKIQTWKRKELHGRHLHDLEQPHTDVTASNKWLTLGYLFPETEGFTIAIQDQVINTRNYKKYILKEKIDTDKCRKCHRQPETIQHITGACTSLLQTDYTHRHNQIVHFIHQKLALKFKLITDKPKPYYEYTPKSVLETDETKMYYDRAILTDRTIHHNRPDITLLNKKSKTAFLIDVTIPNTHNIQKSITEKLSKYIELKEELLRIWNLQTVYIVPLVLSTTGVIPKQLLHSLKLLDLPPQTYYTMQKAAILNTCRIVRKFLTNVDDEVTDITDRFTP

SEQ ID NO: 4955 - protein, 1295 aa, Cecropterus dorantes
MRKYKITQNKTQTTQSPTVVDIVNNPNSSSVHERQNEGLQSIHTTTLRRSSRRTQNRYRSNSPTTSELTEPYSPSTTSYTPSLASLDEDARNLVTPNLDVARDRNTLLPASTKAGKPRVRMRWDNNVNLFIMRTYYYITKLETDKTMYRKRLHDQFKLNYPDVKVTEQRISDQMRAIVRNKLLSDTVINQIKDEISEQLRNEDDHTNLTSSSISQLPQNPSHTRTSHTLTTNSRPPYTPRLSRSHIITSNVSTQTQIAPITNTILLETDQADLSYCLSIHAQDLLEKLQAAIVSFSGTDPLNRPKLPRLKPNKKLYALVNIFNNNILPTLFSLHSDLTQIHTLIYCSALVISKEMGYKIEPEFNWTHRKKEDIRKPSWEIRLQNDIMKLRADIGRLTQYIKGNRSRKIVETVKVIFENARIHSTHEPENTRATEYLDTLKQKLTLKSHRLARYKKALQRKTDNKLFSANEKGFYRSINERVTSKFTLSEIPSARDLRTYWAEIWDKRTDYNSSADWIDNETQYWNQIEEMTFPEVTDNDIALVIKRLKNWKATGLDGVHNFWLKYFTSLHGILTKLTNDVIHNTVQLPLFLTTGITYMLPKSSHTSDPSQYRPITCLPTIYKLITSCITKKIVHHLEKYNIIAEEQKGCRKNHRGCKEQLIIDSIILKHAHKYNRNLNISYIDYKKAFDSVPHSWLIRVLQIYKIHPAIISFLENAMANWKTSLTLTTNAAKLTTEEIRIRNGIFQGDSLSPVWFCMALNPISRLLSQNNSGYRLTRDTSISHLMYMDDIKLFAKTEKEMKELLKVTTTFSTDISMSFGIDKCKTLHIKRGKITGGDYNIDEHLVITAMNNDDLYKYLGILQARTINHKIIRQELSAEYIGRVKQICKRQLYSRNLTKAINTYATPILTYSFGIIKWTQTDIKNLEIKTRTVLSKYNYLHPKSAIERMTLKREQGGRGFIDLVILWQNQLRNLREFFYNKSKTSLIHLAAVDSDNNYTPINLAEKEIQFKTSADHTKQKLQLWKRKELHGRHIHDLEQPHIDMKASNKWLEFGYLFPETEGFTIAIQDQVINTRNYKKYILKENIETDKCRKCHRQPETIQHITGACTSLLQTDYTHRHNQIVHFIHQKLAIKFKLITEKSKPYYEYTPKPVLETNETKMYYDRAILTDRTIHHNRPDITLLHKTSKIAFLIDITIPNTHNIQNSITEKLSKYTELKEELLRIWSLQTVYIVPLVLSTTGVIPKHLLNSLKMLDLPPRTYYTMQKAAILNTCRIVRKFLSNSDDEITNKTDRPAL

SEQ ID NO: 4956 - protein, 1307 aa, Epargyreus clarus
MRRSKIKQNKNQKNDIETTQSPTVVDIIDTPHSSSSNEQSQNERLESIHINPVRRSSRRTQNRYRSSSPATSDIIEPYSPSTVSYTPSLASIDEEDRDLETPNLDVARERNTLLPASTKAGRPRVRMRWNDDVNLFIMRTYYYITKLETDKTIYRKRLFDRFKLNYPDVKVTEQRISDQMRAILRNKLLSDAVIKQIKTEVSEQLKNEAESSNLTTCNTSQFIQSSQSPSHTVPQTSQYALTTNSRPTYTPHVSRSHRILQDNSTQTHITPITHPILPDIDQSELSCDPPTDTQDLLEKLQTALVTFSGTDPLTRPKLPRLKANKKLYALVNTFNNNILPISYSLDSDLTQIHTLIYCSGFVISKEMGYKIETEFNYTQKKKQCIRKPAWEMRLENDIKELRANIGRLTQYIKGNRSKKIVEIVKVIYENAKIHTIHEPENTRGQEYLDTLKQKLTLKSHRLARYKKAFQRKTDNKLFSVNEKGFYRSMNESDKSKVSPSEIPSANDLRTYWASIWEKRTDYNSSAGWIDEETEKWNQIEEMSFPEITETDMTVIIKKLKNWKATGLDGVHNFWLKYFTSLHGILTKLTNDLIHNTVQLPHFLTTGITYMIPKSSNTSDPSQYRPITCLPTIYKLITSCITKKIVHHLEKHNIIAEEQKGCRQNHRGCKEQLIIDSTILKHAHKNSRNLNITYIDYKKAFDSVPHSWLIRVLHIYKIHPAIISFLENAMANWKTTLTLTASVERLTIEKICIRNGIFQGDSLSPVWFCMALNPISRLLSQNNLGYRLTRDTSISHLMYMDDIKLFAKTEKEMKELLKVTTEFSKDISMTFGLDKCKTMHIKKGKITGGNYNIDEDVVITAMDKDDLYKYLGILQAKVINHTKIRQELGSEYIRRVKQVCKRQLYSRNLTKAINTYAIPILTYSFGIIKWTQTDIKNLEIKTRTVLTKYNYLHPKSAIERMTLKREQGGRGFIDLIILWQKQLKNLREFFYNKMETSAIHLATIDTDDNYTPLNLKHREIQFKTPAEHIRQKEQTWKRKELHGRHLYDLEQPHIDIIASNKWLKLGYLFPETEGFIIAIQDQVINTRNYKKYILKENIQTDTCRKCHRQPETIQHITGACTSLLQTDYTHRHNQIVHFIHQKLALKFNLITEKPKPYYEYMPKPVIENTEIKMYYDRAILTDRTIHHNRPDITLLDKKSKTAFLIDVTIPNTHNIQKSITEKLSKYIELKEELLRIWNLQTVYIVPLVLSTTGVIPKHLLNSLKILNLPPQTYYTMQKAAILNTCRIVRKFLTNNDNETTDLTDLPTL

SEQ ID NO: 4957 - protein, 945 aa, Urbanus velinus
MGYKIEPEFNFTHKKKEFIRKPAWEKRLENDISKLRADIGRLTQFIKGNRSRKIVETVKVIFENTRTHSIHERENIRAQEYLDTLKQKLTLKSHRLARYKKALQRKTDNKLFSSNEKGFYRSMTENGISKNPSEVPSALELKTYWAGIWDKHADYNRSAEWIEKETLHWSQIEEMSFPEITEEDMKLVIKKLKNWKATGLDGVHNFWLKYFTSLHGILTKLTNDLIHDTVQLPRFLTTGITYMLPKSSNTSDPSQYRPITCLPTVYKLITSCITKKIVHHLEKHNIITEEQKGCRQNHRGCKEQLIIDSTILKHAHKNNRNLNITYIDYKKAFDSVPHSWLVRVLHIYKIHPVIISFLEKAMANWTTTLTMTTSKSKLTTDEIRIRNGIFQGDSLSPVWFCMALNPISRLISQNNSGYRLTRDTPISHLMYMDDIKLFAKTEKEMNELLKVTTQFSKDISMSFGLDKCKTLHLKKGKITGGDYNIDEEVVITAMDNDDLYKYLGILQARAINHTKIRQELSAEYVRRVKQICKRQLYSRNLTKAINTYATPILTYTFGIIKWTQTDIKNLEIKTRTILTKYNYLHPKSAIERMTLKREQGGRGFIDLMILWQNQLKNLREFFYNKSETSPIHLATIDADNNFTPLNLNHKEIQFRTPVELTSQKIETWKRKELHGRHLHDLEQPHIDKIASNKWLQLGYLFPETEGFTIAIQDQVINTRNYKKYILKENIENDKCRKCHRQPETIQHITGACTSLLQTDYTHRHNQVVHFIHQKLALKFKLINENIKPYYEYTPNPVLENGEKKMYYDRAILTDRTIHHNRPDITLLDKNSKTAFLIDVTIPNTHNIQKSITEKLSKYVELKEELLRIWNLQTVYIVPLVLSSTGVIPKHLLHSLKILDLPPQTYYTMQKAAILNTCRIVRKFLSNSDDEITDMTDRLTTDTPAL

SEQ ID NO: 4958 - protein, 940 aa, Lobotractus valeriana
MGYKIETEFNCIREKGNIRKPTWEMRLENDIIKLRADIGRLTQYIKGNRSRKIIETVKVIFENAKIHSIHEPENTRATDYLDTLKQKLTLKSHRLARYRKALQRKTDNKLFSANEKGFYRSMNQGVMSKLKPSEIPSATDLRTYWAEIWDKRTDYNSSADWIDNETQHWNLIEEMSFPNVTEKDMALVIKKLKNWKATGLDGVHNFWLKYFTSLHGILTKLTNDLIHNTVQLPHFLTTGLTYMIPKSSNTSDPSQYRPITCLPTVYKVITSCITMKIVHHLEKHNIIAEEQKGCRQNHRGCKEQLIIDSIILKHAHRHNRNLNITYIDYKKAFNSVPHSWLIRVLHIYKIHPQIIAFLENAMANWKTTLTLTTSSTKVSTEEIRIRNGIFQGDSLSPVWFCMALNPISRLLSQNNLGYRLTRYTSISHLMYMDDIKLFAKTEKEMKELLLVTKEFSKDINMTFGLDKCKTLHIKKGKITGGDYNIDEEVVITAMDNDDLYKYLGILQARAINHTKIRQELGAEYFRRVKQVCKRQLYSRNLTKAINTYATPILTYSFGIIKWTQTDINNLEIKTRTILTKYNYLHPKSAIERMTLKREQGGRGFIDLMVLWKNQLKNLREFFYNKSETSPIHLATVYTDDNYTPLNLTNKEIEFKTSSEHIKEKVQSWKTKELHGRHLHDLEQPHIDMIASNKWLKLGNLFPETEGFTIAIQDQVINTRNYKKYILKENIESDKCRKCHRQPETIQHITGACTSLLQTDYTHRHNQIVHFIHQKLALKFKLITEKPKPYYEYTPKPVLETGETKMYYDRAILTDRTIHHNRPDITLLDKNSKIAFLIDVTIPNTHNIQKSITDKLTKHIELKEELLRIWNLQTVYVVPLVVSTTGVIPKHLLQSLKILGLPPQTYYTIQKAAILNTCRIVRKFLSNIDDEMTDVTDRPAL

SEQ ID NO: 4959 - protein, 1293 aa, Blastobasis adustella
MRRIKKKNVNATQLSTVVDTECIRNPLLTSPQTPHDCLEQSETLPVRRSLRITNNRYRSPSPAISEVIEPYSPSTISYTPSLASVDEEQIVVEIPNLDVAREVNAFLPASTKAGKPRVRMRWSNDVNLFIMRTYYFITKLETDKTMYRKRLFDRFKIEYPDINVTEQRISDQMRAILRNKLLSDTIITQIKLEVSTLLKEDEERVNSSAPHISHPPSYIDSTPQQQLLSSFTLTDTISTQYENELHISLNSPILSPRTQTERSIYTTAAESDPTDINNTTITNTNTQELLKQLQNTLIEFTGTDPLKRPKLPRLKVNKKLNGLLQIINAVILPKLISQDSDLIQIHTLIYCTALVICQEMGYKVERNITKGRTSRENIGKPAWKIRLEKDIEILRKSIGRLTQYIKGNRSSKVTNTVETIFRNTKVHSTHEPANVRPQEYLDTLKQKLALKSHRLGRYNKALQRKTNNNLYNTNEKGFYRSLHNSGSDNQNSTEVPSAEDMKHYWAEIWDKSSEFNRSAKWVDDEAQHWDHIEEMTFSDVTEDDICIVTSKMKNWKAAGLDGIQNFWLKHLTVLHSILAKVVTKLIRGTTPLPPFLTTGITLMLPKSPNTADPSQYRPITCLPTTYKLITSCITNKIVNHLEMHNIIAEEQKGCRQSHRGCKEQLIIDSTVLKHAHKHNRNLNISYIDYKKAFDSVPHSWLIRVLQIYKIHPSIIAFLEHAMANWRTTLTLSVKTAKLITEQIQIRNGIFQGDSLSPLWFCMALNPLSKLLSKSKHGYKLTCDTSITHLMYMDDIKLYGKTDHGMKELLEITTEFSKDINMNFGLDKCRTLHIKKGKIIEGDYNINEDICITAMDNDEMYKYLGIQQTKSINHTQIKKDLTLEYIRRIKKVCKKQLNARNLTKAINTYATPILTYSFGIIKWTQTDINNLEIKTRSTLTQHKYLHPKSAIERVSTKRELGGRGFIDLNILWQNQQKNLRDFFYSKISNSVLHLATTLTDDKYTPLNLKLKEKEFMPVTEQVKNKLNSWRSKELHGRHVHDLEKPHVDPIASNNFLKQGYLFPETEGFIIAIQDQVINTRNYKKYILKENIESDKCRKCLQQPETIQHITGACTSLLQTDYTHRHNQIVHYIHQKLALKYQLITGNQKPYYEYTPRPVLENAATKMYYDRAILTDRTIHYNRPDITLLNKITKTAYLIDVTIPNTHNLQTAITGKINKYTELKEEVLRVWNLQSVYIVPLVLSTTGVIPKHLLHSLTTLDLPTQVFHTMQKAAILNTCRIVRKFLSGDPESTGS

SEQ ID NO: 4960 - protein, 1296 aa, Astraptes hopfferi
MRRYKKTCKEIQTTQSPTVVDSLNTPASSSLYEQTKRLEPNHTNAIRRSNRRTQNRYRSKSPTTSDIIEPYSPSTISYTPSLNSIDEESRDLVTPNLDATRDRNTLLPASTKAGKPRVRMRWNDDVNLFIMRTYYYITKLETDKTVYRKRLYDKFKLNYPDVKVTEQRISDQMRAILRNKLLSDALIKQIKADVSEQLKNEDEYDDPASYNTSHLMQSPHHPSFSDPQTSQSSFNINPRPTYSPHVSRTHIISSDISTQTQVMPIMTTILSEIDQSNLSYIPPTDTQDLTCKLEAALASYSGTDPLTRPKLPRLKANKKLHALVNTFNKNILPTSYSLDSDLTQIHTIIYCSALVISKEMGYKIEPEINNMHRKKENIRKPAWEMRLDNDIMKLRADIGRLTQFIKGNRSRKIVESVKVIFENAKIHTIHEPENTRAQEYLDTLKQKLSLKSHRIARYKKTLQRKTDNKLFSANEKGFYRSVNDSGMRKLNPSTAPSAINLRTYWADIWDKRTDYNNSADWIDEEAQRWNEIEEMSFPEVTDIDMTLVIKKLKNWKATGLDGVHNFWLKYFTSLHGILAKLTNDLIHNTIQLPHFLTTGITYMVPKSSNTLDPSQYRPITCLPTIYKLITSCITKKIVLHLEKHNIISEEQKGCRQNHRGCKEQLIIDSTILKHAQKNNRNLNITYIDYKKAFDSVPHSWLIRVLHIYKIHPAIISFLENAMANWRTTLTLTTSLTKVTTDEIRIRNGIFQGDSLSPVWFCMALNPISHLLSQNNSGYRLTRNTSISHLMYMDDIKLFAKTEKEMKGLLKVTTKFSKDISMTFGLDKCKTLHIKKGKIIGGDYNIDEEVVITAMDNEDLYKYLGILQARVINHTKIRQELGAEYIRRVKQLCKRQLYSRNLTKAINTYATPILTYSFGIIKWTQTDIKNLEIKTRTTLTKYNSLHPKSAIERMTLKRQQGGRGFTDIMILWQNQLQNLREFFYSKSETSPIHLATINTDDNFTPLNLNHKEIPFETSAEHTRQKVQSWRRKELHGRHLHDLEQPHIDIVASNKWLQLGYLFPETEGFTIAIQDQVINTRNYKKYILKESIETDKCRKCHRQPETIQHITGACTSLLQTDYTHRHNQIVHFIHQKLAIKFKLITEKPKPYYEYTPTPVLEDRETKIYYDRAILTDRTIHHNRPDITLLNKNSKTAFLIDVTIPNTHNIQKAITEKLSKYVELKEELLRIWNLQTVYIVPLVLSSTGVIPKNLLHSLKILDLPPQTYYTMQKAAILNTCRIVRKFLSNIDDEMTDITD

SEQ ID NO: 4961 - protein, 1297 aa, Udranomia kikkawai
MKKSKNPKNLNQPTQFPTVVDIENNQASSSLQPSMSYDGSNSTNTVRRSSRRIQNRVNSNLSSSSDIPEPYSPSTTSYTPSLDSIDEDFRIVVTPNLDVARGVQTLLPASTKAGKPRVRMRWDNEVNIFIMRTYYYITKLEKDKTMYRKRLFNEFKLAYPDVNVTEQRISDQMRTILKNKRLSDTVINQIKFEVSQQLNKDEQSLNSRSSPQILPGPSRLGSPTPNPTTTSCIFNSSSTLTQRQNILSDNSTQTQTIPTTYTTLSETDLDDLNNVTRPNVQYLDEKLQTTLTSFLGTDPLTRPKLPRLRPNKKLFALVKTFNTDILPTLFSLDSDITHIHTLIYCSALVISREMGYKIETQQDNTHGRNRRIRKPAWELRLESDIQKLRVDIGRLTQYIKGNRSRKLINAIQIIFKNAKIHSIHEIENTRAHEYLDTLKQKLTLKSHRLSRYKKSLQRKTDNKLFNINEKGFYRSLTTSEINTSNTSEEISTSDLKKYWADIWDRPTDYNRNADWIKKETEQWQEIEEMSYVEVTEEDMSTVTKKLKNWKATGLDGIHNYWLKYFTTLHGILAKLTNDLIHGIIQLPLFLTTGITYMIPKTPKVSDPSQYRPITCLPTIYKLVTSCITKKIVNHLEKHNIIAEEQKGCRQNHRGCKEQLIIDSTILKHAHKNNRNLDITYIDYKKAYDSVPHSWLVRILHIYKIHPTIISFLKHAMANWKTMLTLTTRATRLTTEEIRIRNGMFQGDSLSPVWFCMALNPLSRLLSQSKRGYHLTRETAITHLLYMDDIKLYSKSESDMKELLSLTTEFSKDINMTFGLEKCKTLHIKRGKIIGGDYNIEEGAIIEAMDKDELYKYLGVLQAKVINHKQIRQDLSIEYFRRVKQVCKKQLNSRNLTKAINTYATPVLTYSFGVIKWTQTDIKNIEIRTRTILTKFNYLHPKSAIERMTIKRDQGGRGFTDVMILWKNQIRNLRNFFYIKSENSPIHSAILETDDNFTPLNLKEKEIEIKSSKEQVKEKIETWKRKELHGRHLHDLEQPHIDLTASNNWLKQGNLFPETEGFTIAIQDQVINTRNYKKYILKETIVTDKCRKCLRQPETIQHITGACTSLLQTDYTHRHNQIVHYIHQKLAFKFELIADKPKPYYEYKPEPVLENTETKMYYDRAILTDRTIHHNRPDITLLNKNTKTAFLIDVTIPNTHNIHKAITEKINKYTELKEEIHRLWKLQKVYIVPLVLSTTGVIPKHLLHSLRLLDLSPHTYQIMQKAAILNTCRIVRKFLSTNEPEVPTEGHITENPPT

SEQ ID NO: 4962 - protein, 941 aa, Autochton longipennis
MGYKTEHESNCTQRKKDYIRKPAWEIRLENDILKLRADIGRLTQYIKGNRSRKIVEAVKVIFENAKIHSIHEPENTRATEYLDTLKQKLTLKSHRLARYKKALQRKIDNKLFSANEKRFYRSFNEGDTSKFNPSQIPSAIDLRNYWAEIWDKRADYNCSAEWIDNETQHWNQLEEMTFPVVTENDMALVIKRLKNWKATGLDGVHNFWLKYFTSLHGILTKITNDLIHNTVQLPLFLTTGITYMLPKSSNTLDPSQYRPITCLPTIYKLITSCVTRKIVHHLEKHNIIAEEQKGCRQNHRGCKEQLIIDSVILKHAQRNCRNLNITYIDYKKAFDSVPHSWLIRVLHIYKIHPAIISFIENAMANWKTKLTLTTSLAKLTTEEIRIRNGIFQGDSLSPVWFCMALNPISHLLSQNNSGYRLTRDTSISHLMYMDDIKLFAKTEKEMKELLKVTTKFSKDISMTFGLDKCKTLHIKKGKITGGDYNIDENVVVTAMNNDDLYKYLGILQARAINHKGIRQELSAEYIRRVKQVCKRQLYSRNLTKAINTYATPILTYSFGIIKWTQTDIKNLEIKTRTVLTKYNYLHPKSAIERMTLKRAQGGRGFIDLMILWQDQLKNLREFFYNKSETSPIHLATVDTDDNYTPLNLIQKEVQYKASAEHTREKVQSWKRKELHGRHLHDLEQPHIDMKASNKWLEFGYLFPETEGFTIAIQDQVINTRNYKKYILKESIETDKCRKCHRQPETIQHITGACTSLLQTDYTHRHNQIVHFIHQKLALKFKLITEKPKPYYEYIPKPVLETDDTKMYYDRAILTDRTIHHNRPDITLLNKNSKIAFLIDITIPNTHNILKSITEKLSKYTELKEELLRIWNLQTVYVVPLVLSTTGVIPRHLLNSLKILDLPPHTYYTMQKAAILNTCRIVRKFLSNMDDEMTDMTDRPVL

SEQ ID NO: 4963 - protein, 1302 aa, Astraptes brevicauda
MKRYKKTCKEIQTTQLSTVVDTINTPASSSLHEQTQIERLETVHTNAVRRSNRRTQNRYRSKSPTTSDITEPYSLSTVSYTPSVASIDEEARELITPNLDATRDRNTLLPPSTKAGKPRVRMRWDDDVNLFIMRTYYYITKLETDKTIYRKRLYDQFKLNYPDVKVTEQRISDQMRAILRNKLLSDAVINQIKAEISEQLRNEDEHHNVTSCNATQFTESPQRPSHSIPQTSQYTITLNPHPTYTPNVSRSHIISSDISTQTQITPITNTIPSETDQPNLSCVPLTDVQDLLEKLQTALVLFSGSDPLTRPKLPRLKANKKLHALVNTFNNHILPTSYSLDSDLTQIHTLIYCSGLVISKEMGYKIEPEFNYTLRKKGNVRKPAWEIRLEKDIMKLRSDIGRLTQFIKGNRSRKIVETVKVVFENAKVHSIHEPENTRAQEYLDTLKQKLSLKSHRLARYKKALQRKTDNKLFSSNEKGFYRSMNESVVSKFNSSEVPSAIDLKTYWAGIWDKQTDYNGSAEWIEKERQHWNHIEEMSFPEITEEDMILVIRKLKNWKATGLDGIHNFWLKHFTSLHSILTKLTNDLIHGTIQLPLFLTTGVTYMLPKSSSTLDPSQYRPITCLPTVYKLVTSCITKKIVHHLEKQNIIAEEQKGCRQNHRGCKEQLIIDSTILKHAQKNNRNLNITYIDYKKAFDSVPHSWLVHVLHIYKIHPAIISFLEKAMANWKTTLTLTTSRCKLITEEIRIRNGIFQGDSLSPVWFCMALNPISRLLSQNNSGYRLTSDTSISHLMYMDDIKLFAKTDKEMKELLKIITEFSTDISMTFGLDKCKTLHIKKGKITGGDYNINEGVVITAMDNEDLYKYLGILQARAINHTRIRQELSIEYIRRVKQVCKRQLYSRNLTKAINTYATPILTYSFGVIKWTQTDIKNLEIKTRTVLTKYNYLHPKSAIERMTLKREQGGRGFIDLMILWQNQLKNLREFFYKKSETSPIHLATIDTDNNFTPLNLNHKEIQFQTSAEVTRQKIQTWKRKELHGRHLHDLEQPHIDSIASNKWLQLGYLFPETEGFIIAIQDQVINTRNYKKYILKENIATDKCRKCQRQPETIQHITGACTSLLQTDYTHRHNQVVHFIHQKLALKFKLITEKPKPYYEYTPKPVLENCEKKMYFDRAILTDRTIHHNRPDITLLDKNSKTAFLIDITIPNTHNIQKSINEKLSKYVELKEELLRIWKLQTVYIVPLVLSSTGVIPKHLLHSLKILDLPPQTYFTMQKAVILNTCRTVRKFLSNIDDEMTDVTDRPAL

SEQ ID NO: 4964 - protein, 1295 aa, Jera tricuspidata
MKRYKNPKNQYLTTQSPTVVDMENTRNSSSLQPHILTESLESTHTNLVRRSSRRTQNKYRSNSPSMADIIEPYSPSTVSYTPSLASIDEEPTNIVTPNLDVVREGNTLLPASTKAGKPRVRMRWNYDVNLFIMRTYYYLTKLETDKTIYRKRLFDKFKANYPDVNVTEQRISDQMRAILRNKLLPETVINQIKGEVSEQLKKDDESSYLTSCNSLQLVHLPQHSSSPFLPTLQCSLTSSPILTHAQHEVQSRIITSDMSTQTYITSSTNTTLPETDQIELNDTPHTDTRELLEKLQTSLALFLGTDPLKRPKLPRLKANKKLYTLVHTFNTDILPILFSLDSDITQIHTLIYCSGLVISREMGYKIEPKLHNIQRRSEDIGKPAWEIRLENDIKKLRADIGRLTQYMKGNRSSKIVGTVQLIFKNAKVHSTHEPENTRAQDYLDTLKQKLYLKSHRLARYKKALQRKTDNKLFITDEKGFYRSMNSSRLNNLNTSEVPNAADLRRYWAEIWDRRTNYNSTANWINEETQHWDQIEEMSCPEVTEEDMSMVTKKLKNWKATGLDGIHNFWLKYFTSLHGILSKLTNDLIHGTIQLPLFLTTGLTHMLPKTLNSSDPSQYRPITCLPTIYKLITSCITKKIVHHLERYDIIAEEQKGCRKDHRGCKEQLIIDSTILKHAHKNNRNLNITYIDYKKAFDSVPHSWLIRVLHIYKIHPAIISFLERAMANWRTTLTLTTKLSKLTTEEIRIRNGIFQGDSLSPVWFCMALNPLSRLLSQNNRGYHLTRDTSIAHLMYMDDIKLYAKSEKDMKELLKITTQFSKDINMTFGFDKCKTLHIKKGKITGGDYNIDEDVSITAMDDDDLYKYLGILQAKSINHTQLREDLRTEYIRRVKQVCKRKLYSRNLTKAINTYATPVLTYSFGIIKWTQTDIRNLEIKTRTSLTKCNYLHPKSATERMTISREQGGRGFIDLMILWQNQLKNLREFFYRKTETSKIHSAIAEIDDNFTPLHLKKKEILFKTTTEHTEEKLQSWNRKELHGRHLHDLKQPHIDLLASNKWLKQGYLFPETEGFTIAIQDQVINTRNYKKYILKETIETDTCRKCLRQPETIQHITGACTSLLQTDYTHRHNQIVHFIHQKLAIKFKLITEKTKPYYEYTPQPVLETAETKMYYDRAILTDRTIHYNRPDITLLNKKTKIAFLIDVTIPNTHNIHKAITEKISKYTELKEEVLRIWDLQTVYIVPLVLSTTGVIPKHLLQSLKVLDLPQQTYHTMQKAAILNTCRIVRNFLSNNYQEVSI

SEQ ID NO: 4965 - protein, 1308 aa, Proteides mercurius
MRKCKILKNETKTTQSPTVVDIINNTPESSSLPEKTQNNILESINTNAVRRSSRRTQNRYRSNSTTISDTIEPYSPSTTSYTPSLASIDEETRDLVTPNLDVARERNTLLPASTKAGKPRVRMSWNDDVNLFIMRSYYYITKLETDKTIYRKRLYDKFKLNYPDVNVTEQRISDQMRAILRNKYLSDAVIKQIKAEVAEQLKIEEEDTNLTSYITPQSIHSPQSSSYSVRQTSQHALTTNSTPTCNSHLKQCNTISSDISTQTEITPISNTILLETEQFSYVPHTDTQDLLEKLQTALVSFSGTDPLTRPRLPRLKPNKKLHALVNTFNNNILPISYSLDSDLTQIHTLIYCSGLVISKEMGYKIEPEFKNANKKKGNIRKPAWERRLENDIIELRANIGRLTQYIKGNRSRNIVEKVKVIFENTKIHSIHEPENTRAHEYLDTLKQKLTLKSHRLARYKKALQRKTDNKLFTSNEKGFYRSVKAGCMSKLNPSEVPSVNDLRSYWAEIWDKQTGYNSSADWIDKESQHWNHIEEMSYPEITEKDMAVVIKKLKNWKATGLDGVHNFWLKYFSSLHSILVKLTNDLIHNRVQLPLFLTTGITYMLPKSSNTSDPAQYRPITCLPTIYKLITSCITKKIVHHLDKHNIIAEEQKGCRQNHRGCKEQLIIDSTILKHAHKNNRNLNITYIDYKKAFDSVPHSWLIRVLHIYKIHPAIISFLEHAMANWKTTLTLTTSLAKFTSEEIRIRSGIFQGDSLSPVWFCMALNPISRLLCQNNSGYRLTRDASISHLMYMDDIKLFAKSEKEMKELLKITTDFSKDISMSFGLDKCKTLNIRKGKIVGGDYNIDEDVVISAMEDDDLYKYLGILQARAINHTKIRQELSVEYIRRVKLVCKRQLYSRNLTKAINTYATPILTYSFGIIKWTKTDIKNLEIKTRTVLTKYNYLHPKSAIERMTLKREQGGRGFTDLMMLWQNQLNNLRQFFYNKMETSNVHLATVNTDDNYTPLNLKHKEIQFKTYSEHTRHKIQLWKRKELHGRHLYDLEQPHIDIVASNKWLKLGYLFPETEGFIIGIQDQVINTRNYKKYILKENIESDKCRKCHRQPETIQHITGACTSLLQTDYTHRHNQIVHFIHQKLALKFKLITEKPKPYYEYTPEPVLENNETKMYYDRAILTDRTIHHNRPDITLLHKTSKTAFIIDITIPNTHNIQKSITEKLSKYTELKEELLRIWNLHTVHIVPLVLSTTGVIPKHLLHSLKIIDLPPQTYYTMQKAAILNTCRIVRKFLTNTDGVMTDMTDSTIQNTQTHLV

SEQ ID NO: 4966 - protein, 1307 aa, Epargyreus clarus
MRRSKIKQNKNQKNDIETTQSPTVVDIIDTPHSSSSNEQSQNERLESIHINPVRRSSRRTQNRYRSSSPATSDIIEPYSPSTVSYTPSLASIDEEVRDLETPNLDVARERNTLLPASTKAGRPRVRMRWNDDVNLFIMRTYYYITKLETDKTIYRKRLFDRFKLNYPDVKVTEQRISDQMRAILRNKLLSDAVIKQIKTEVSEQLKNEAESSNLTTCNTSQFIQSSQSPSHTVPQTSQYALTTNSRPTYNPHVSRSHRILQDNSTQTHITPITNPILPDIDQSELSCDPPTDTQDLLEKLQTALVTFSGTDPLTRPKLPRLKANKKLYALVNTFNNNILPISYSLDSDLTQIHTLIYCSGFVISKEMGYKIETEFNYTRKKKQCIRKPAWEMRLENDIKELRANIGRLTQYIKGNRSKKLVEIVKVIFENAKIHTIHEPENTRGQEYLDTLKQKLTLKSHRLARYKKALQRKTDNKLFSVNEKGFYRSMNESDKSKVSPSEIPSANDLRTYWASIWEKRTDYNSSAGWIDEETEKWNQIEEMSFPEITETDMTVIIKKLKNWKATGLDGVHNFWLKYFTSLHGILTKLTNDLIHNTVQLPHFLTTGITYMIPKSSNTSDPSQYRPITCLPTIYKLITSCITKKIVHHLEKHNIIAEEQKGCRQNHRGCKEQLIIDSTILKHAHKNSRNLNITYIDYKKAFDSVPHSWLIRVLHIYKIHPAIISFLENAMANWKTTLTLTASVERLTIEKICIRNGIFQGDSLSPVWFCMALNPISRLLSQNNLGYRLTRDTSISHLMYMDDIKLFAKTEKEMKELLKVTTEFSKDISMTFGLDKCKTMHIKKGKITGGNYNIDEDIVITAMDKDDLYKYLGILQAKVINHTKIRQELGSEYIRRVKQVCKRQLYSRNLTKAINTYAIPILTYSFGIIKWTQTDIKNLEIKTRTVLTKYNYLHPKSAIERMTLKREQGGRGFIDLIILWQKQLKNLREFFYNKMETSAIHLATIDTDDNYTPLNLKHREIQFKTPAEHIRQKEQTWKRKELHGRHLYDLEQPHIDIIASNKWLKLGYLFPETEGFIIAIQDQVINTRNYKKYILKENIQTDTCRKCHRQPETIQHITGACTSLLQTDYTHRHNQIVHFIHQKLALKFNLITEKPKPYYEYMPKPVLENTEIKMYYDRAILTDRTIHHNRPDITLLDKKSKTAFLIDVTIPNTHNIQKSITEKLSKYIELKEELLRIWNLQTVYIVPLVLSTTGVIPKHLLNSLKILNLPPQTYYTMQKAAILNTCRIVRKFLTNNDNETTDMTDLPTL

SEQ ID NO: 4967 - protein, 1298 aa, Autochton zarex
MRRYKKTKNDMQTTQSPTVVDIINTPDSSSTHKQQNERLESIHTNTVRRSNRKTQNRYRSNSPTTSDITEPYSPSTVSYTPSLASIDEEVRDVVTPNLDVARDRNTLLPASTKAGKPRVRMRWDNNVNLFIMRTYYYITKLETDKTIYRKRLYDKFKLNYPDVKVTEQRISDQMRAILRNKLLSDTVIEQIKDEVAEQLRNEDEHSNLASCSTSQLIQSPERPSHSVTQASYTLTANSRPTYTPHISQPHVITSDISTQTQVTPIMNTIVFETDQTDLSYDLCTNVQNLLEKLQAKLISFSGTDPLTRPKLPRLKANKKLYALVNTFNNNILPTLYSLDSDLTHIHTLIYCSGLVISQEMGYKIEPEFNCNQRQKDKMSKPAWEMRLENDIMKLRADIGRLTQYIKGNRSRKIVETVRVIFENARIHSIHEPENTRATEYLDTLKQKLTLKSHRLARYKKSLQRKIDNKLFSANEKGFYRSMTERVMNKLNPSEVPSAIDLRTYWAEIWDKQADYNHSADWIDNETQRWNQIEEMTFPEVTENDMALVIKRLKNWKATGLDGVHNFWLKYFTSLHGILTKLTNDLIHNTVQLPHFLTTGITYMIPKSSNTSDPSQYRPITCLPTIYKVITSCITKKIVHHLEKHNIIAEEQKGCRQNHRGCKEQLIIDSVILKHAHKHNRNLNISYIDYKKAFDSVPHSWLIRVLHIYKIHPAIISFLENAMANWKTTLTLTTSSAKLTTEGIRIRNGIFQGDSLSPVWFCMALNPISRLLSQNNLGYRLTRNTAISHLMYMDDIKLFAKTEKEMKELLSVTTEFSKDINMTFGLDKCKTLHIKKGKLCGGDYNIGDEVAVTSMDNDDLYKYLGILQARTINHTKIRQELSANYFRRVKQICKRQLYSRNLTKAINTYATPILTYSFGIIKWTQTDIKNLEIKTRTVLTTYNYLHPKSAIERMTLKREEGGRGFIDLMILWKNQLKNLREFFYNKSETSPIHLATVDTDDNYTPLNLTNKEIHFKTSAEHTREKVQAWKRKELHGRHLHDLEQPHIDIVASNKWLKLGYLFPETEGFTIAIQDQVINTRNYKKYILKENLESDKCRKCHRQPETIQHITGACTSLLQTDYTHRHNQIVHVIHQKLAFKFKLITEKPVPYYEYTPKPVLETDEIKMYYDRAILTDRTIHHNRPDITLLDKKSKTAFLIDITVPNAHNIQKSITEKLSKYVELKEELLRIWNLQTVYIVPLVVSTTGIIPKHLLQSLKILGLPPQTYFTIQKAAILNTCRIVRKFLSNSDNDNMTDRPVL

SEQ ID NO: 4968 - protein, 1290 aa, Udranomia orcinus
MKKSKNPKNQNRTTQFPTVVDMTNNQSSSSLQPEMCYERTNSTNPVRRSSRRIQNRVTSTLSSSSDISEPYSPSTSSYTPSLDSTDEESRLVVTPNLDVAREVQTLLPVSTKAGKPRVRMRWDNEVNIFIMRTYYYITKLETDKTMYRKRLLNEFQLAYPDVNVTEQRISDQMRTILRNKRLPDAVINQIKLEVSEQLNKDEQSSSHRLSPTLPGPSSLHSPMPNVTTSQCILNSSSTTLTHRENMLSDTSTQTQTIPISYTTLTETDLDDLQNVTRPNTQDLGEKLQTALTSFLGTDPLTRPKLPRIRPNKKLLALMHTFNIDILPTLFSLDSDITHIHTLIYCSALVISREMGYKIETQQDNIHTHRQHGRHRKPTWELRLENDIKNLRADIGRVTQYIKGNRSRKLVNAVQIIFKNAKIHSSHDKENTRIQEYLDTLKQKLTLKSHRLARYKKSLQRKTDNKVFITNEKGFYRSINNNDMSNSDVRNISETISASSIRNYWTDIWDRSTDYNSTADWIKRETEQWDKIEEMAFVEVTEEDIFIVTKKMKNWKATGLDGIHNYWLKYFTSLHGILAKLITDLIHGTIQIPPFLTTGITYMIAKSPNPSNPSQYRPITCLPTTYKLITSCITKKIVYHLEKHNIIAEEQKGCRQYHRGCKEQLIIDSTILKHAHKNNRNLHITYIDYKKAYDSVPHSWLIRVLHIYKIHPTIISFLESTMASWKTILTLTTRLARLTTEEIRVRNGIFQGDSLSPVWFCMALNPLSRLLSQNKCGYRLTPETPITHLLYMDDIKLYAKSDIEMKELLMKTAEFSNDIKMTFGLEKCKTLHIKRGKIIGGDYSIDEGVSISAMKNDELYKYLGILQARVINHKQIRQDLSAEYFKRVKQVCKRQLNSRNLTKAINTYATPVLTFSFGIIRWTRTDIKNLEIKTRTILTKYNYHHPKSAIERMSVKRDQGGRGFIDLMILWQNQIKNLRDFFYNKIETSAIHLATVETDDNFTPLNLKEKDIQFKTVAEQVTEKVQRWKRKELHGRHLHDLEQPHIDSTASNKWLKQGNLFPETEGFAIAIQDQVINTRNYKKYILKETIHTDKCRKCFRQPETIQHITGACTSLLQTDYTHRHNQIVHFIHQKLAFKFKLITDKLKPYYEYTPKPVLETTETKMYYDRAILTDRTIHHNRPDITLLNKKTKTAFLIDVTIPNTHNIHKAITEKITKYTELKEEILRLWNLQKVYIVPLVLSTTGVIPKHLIHSLKLLDLSPHTYQTMQKAAILNTCRIVRKFLSTNDHET

SEQ ID NO: 4969 - protein, 1293 aa, Blastobasis adustella
MRRIKKKNVNATQLSTVVDTEYIRNPLLTSPQTPHDCLEQSETLPVRRSLRITNNRYRSPSPAISEVIEPYSPSTISYTPSLASVDEEQIVVEIPNLDVAREVNAFLPASTKAGKPRVRMRWSNDVNLFIMRTYYFITKLETDKTMYRKRLFDRFKIEYPDINVTEQRISDQMRAILRNKLLSDTIITQIKLEVSTLLKEDEERVNSSAPHISHPPSYIDSTPQQQLLSSFTLTDTISTQYENELHISLNSPILSPRTQTERSIYTTAAESDPTDINNTTITNTNTQELLKQLQNTLIEFTGTDPLKRPKLPRLKVNKKLNGLLQIINAVILPKLISQDSDLIQIHTLIYCTALVICQEMGYKVERNITKGRTSRENIGKPAWKIRLEKDIEILRKSIGRLTQYIKGNRSSKVTNTVETIFRNTKVHSTHEPANVRPQEYLDTLKQKLALKSHRLGRYNKALQRKTNNNLFNTNEKGFYRSLHNSGSDNQNSTEVPSAEDMKHYWSEIWDKSSEFNRSAKWVDDEAQHWDHIEEMAFSDVTEDDICIVTSKMKNWKAAGLDGIQNFWLKHLTVLHSILAKVVTKLIRGTTPLPPFLTTGITLMLPKSPNTADPSQYRPITCLPTTYKLITSCITNKIVNHLEMHNIIAEEQKGCRQNHRGCKEQLIIDSTVLKHAHKHNRNLNISYIDYKKAFDSVPHSWLIRVLQIYKIHPSIIAFLEHAMANWRTTLTLSVKTAKLITEQIQIRNGIFQGDSLSPLWFCMALNPLSKLLSKSKHGYKLTCDTSITHLMYMDDIKLYGKTDHGMKELLEITTEFSKDINMNFGLDKCRTLHIKKGKIIEGDYNINEDICITAMDNDEMYKYLGIQQTKSINHTQIKKDLTLEYIRRIKKVCKKQLNARNLTKAINTYATPILTYSFGIIKWTQTDINNLEIKTRSTLTQHKYLHPKSAIERVSTKRELGGRGFIDLNILWQNQLKNLRDFFYSKIRNSVLHLATTLTDDKYTPLNLKLKEKEFMPVTEQVKNKLNSWRSKELHGRHVHDLEKPHVDPIASNNFLKQGYLFPETEGFIIAIQDQVINTRNYKKYILKENIESDKCRKCLQQPETIQHITGACTSLLQTDYTHRHNQIVHYIHQKLALKYQLITGNQKPYYEYTPRPVLENAATKMYYDRAILTDRTIHYNRPDITLLNKITKTAYLIDVTIPNTHNLQTAITGKINKYTELKEEVLRVWNLQSVYIVPLVLSTTGVIPKHLLHSLTTLDLPTQVFHTMQKAAILNTCRIVRKFLSGDPESTGS

SEQ ID NO: 4970 - protein, 1301 aa, Autochton zarex
MRRHKTKNNKIQTTQSPTVVDIVNTPDSSTVHEQQSEKIQSIHTNAVRRSSRITQNRYRSNSPTTSEITEPYSPSTVSYTPSLASIDEEVRDLVTPNLDVARDRNTLLPASTKAGKPRVRMRWDNNVNLFIMRTYYYITKLETDKTIYRKRLYDKFKLNYPDVQVTEQRISDQMRAILRNKLLSDAVIKEIKYEIAEQLRNEDEHSNQTSCNTSQQMQSSQRPLHSIHQNSHTLTTNLRPTYTPHLSQSHFVNTSDISTQTQLTHITNTTLLETDQADISYSLSINAQDLLEKLQATLVSFSGTDPLTRPKLPRLTANKKLYALVNTFNNNILPTLYSLDSDLTQIHTLIYCSGLVITKEMGYKIETESNCTRRKKDNIRKPAWEIRLESDITKLRADIGRLTQYIKGNRSRKIVEAVKVIFENAKIHSIHEPENTRATEYLDTLKQKLTLKSHRLARYKKALQRKTDNKLFSANEKGFYRSMNERATSKLNPSEIPNAIDLRTYWAEIWDKRADYNRSADWIDNETQHWNQIEEMTYPEITENDMTLVIKRLKNWKAPGLDGVHNFWLKHFTSLHGILTKLTNDLICNTIQLPLFLTTGITYMLPKSSNTSDPSQYRPITCLPTIYKLITSCITKKIVQHLEKYNVIAEEQKGCRQNHRGCKEQLIIDSVILKHAHKNNRNLNITYIDYKKAFDSVPHSWLIRVLHIYKIHPAIISFLENAMANWKTTLTLTTSLTKLTTEEIRIRNGIFQGDSLSPVWFCMALNPISRLLSQNNSGYRLTRATSISHLMYMDDIKLFAKTEKEMKEQLKVTTKFSKDISMTFGLDKCKTLHIKKGKITGGDYNIDDDEVITAMSNDDLYKYLGILQARVINHKGIRQELSAEYIRRVKQVCKRQLYSRNLTKAVNTYATPILTYSFGIIKWTQTDIKNLEIKTRTVLTKYNYLHPKSAIERMTLKREQGGRGYIDFTILWQDQLKNLREFFYNKSETSPIHLATVDTDDNYTPLNLSQKEIQFKTSIEHTRQKVQSWKRKELHGRHIHDLEQPHIDKKASNKWLKLGYLFPETEGFTIAIQDQVINTRNYKKYILKERIETDKCRKCHRQPETIQHITGACTSLLQTDYTHRHNQIVHFIHQKLALKFKLISDKPKPYYEYTPKPVLETDDTKMYYDRAILTDRTIHHNRPDITLLNKNSKIAFLIDITVPNTHNIQKSITEKLSKYIELKEELLRIWNLQTVYIVPLVLSTTGVIPKHLLHSLKILDLPSHTYYTMQKAAILNTCRIVRKFLSNIDDEMTDMTDNPAL

SEQ ID NO: 4971 - protein, 1307 aa, Epargyreus clarus
MRRSKIKQNKNQKNDIDTTQSPTVVDIINTPHSSSTNEQTQNERLESIHINPVRRSSRRTQNRYRSSSPATSDIIEPYSPSTVSYTPSLTSIDEEVRDLETPNLDVARERNTLLPASTKAGKPRVRMRWNDDVNLFIMRTYYYITKLETDKTIYRKRLFDRFKLNYPDVKVTEQRISDQMRAILRNKLLSDAVIKQIKAEVSEQLKNEAENSNLPTCNTSQFIQSSQSPSHSVPQTPQYALTTNSRPTYTPHVSRSHSILQDNSTQTQITPITNPILPDIDQSELSCDPPTDTQDLLEKLQTTLVLFSGTDPLTRPKLPRLKANKKLYALVNTFNNNILPISYSLDSDLTQIHTLIYCSGFVISKEMGYKIETEFNYTQKKKQYIRKPAWEMRLENDIKELRANIGRLTQYIKGNRSRKIVEIVEAIFENAKIHTIHEPQNTRAQEYLDTLKQKLTLKSHRLARYKKALQRKTDNKLFSVNEKGFYRSMNESCKSKLSPSEIPCANDLRTYWASIWEKRTDYNSSAGWIGEETEKWSQIEEMSFPEVTEMDMTVVIKKLKNWKATGLDGIHNFWLKYFTSLHGILTKLTNDLINNTIQLPHFLTTGITYMIPKSSNTSDPSQYRPITCLPTIYKLITSCITKKIVHHLEKHNIIAEEQKGCRQNHRGCKEQLIIDSTILKHAHKNNRNLNITYIDYKKAFDSVPHSWLIRVLHIYKIHPAIISFLENAMANWKTTLTLTTSVERLTIDKICIRNGIFQGDSLSPVWFCMALNPISRLLSQNNLGYRLTRDTSISHLMYMDDIKLFAKTEKEMEELLKVTTEFSKDISMTFGLDKCKTMHIKKGKITGGDYNIDEDVVITAMDKDDLYKYLGILQAKSINHTKIRQELGSEYIRRVKQVCKRQLYSRNLTKAINTYATPILTYSFGIIKWTQTDIRNLEIKTRTVLTKYNYLHPKSAIERMTLKREQGGRGFIDLIILWQNQLKNLREFFYNKIETSAIHLATIDTDDNYTPLNLKHKEIQFKTPAEHIRQKEQTWKRKELHGRHLYDLEQPHIDIIASNKWLKLGYLFPETEGFAIAIQDQVINTRNYKKYILKENIQTDTCRKCHRQPETIQHITGACTSLLQTDYTHRHNQIVHFIHQKLALKFNLITEKPKPYYEYMPKPVLETTETKMYYDRAILTDRTIHHNRPDITLLDKKSKTAFLIDVTIPNTHNIQKSITEKLSKYIELKEELLRIWNLQTVYIVPLVLSTTGVIPKHLLNSLKILNLPPQTYYTMQKAAILNTCRIVRKFLTNNDDEMTDMTDLPTL

SEQ ID NO: 4972 - protein, 1249 aa, Blastobasis adustella
MRRIKKKNVNATQLSTVVDTECIRNPLLTSPQTPHDCLEQSETLPVRRSLRITNNRYRSPSPAISEVIEPYSPSTISYTPSLASVDEEQIVVEIPNLDVAREVNAFLPASTKAGKPRVRMRWSNDVNLFIMRTYYFITKLETDKTMYRKRLFDRFKIEYPDINVTEQRISDQMRAILRNKLLSDTIITQIKLEVSTLLKEDEERVNSSAPHISHPPSYIDSTPQQQLLSSFTLTDTISTQYENELHISLNSPILSPRTQTERSIYTTAAESDPTDINNTTITNTNTQELLKQLQNTLIEFTGTDPLKRPKLPRLKVNKKLNGLLQIINAVILPKLISQDSDLIQIHTLIYCTALVICQEMGYKVERNITKGRTRENIGKPAWKIRLEKDIEILRKSIGRLTQYIKGNRSSKVTNTVETIFRNTKVHSTHEPANVRPQEYLDTLKQKLALKSHRLGRYNKALQRKTNNNLFNTNEKGFYRSLHNSGSDNQNSTEVPSAEDMKHYWAEIWDKSSEFNRSAKWVDDEAQHWDHIEEMTFSDVTEDDICIVTSKMKNWKAAGLDGIQNFWLKHLTVLHSILAKVVTKLIRGTTPLPPFLTTGITLMLPKSPNTADPSQYRPITCLPTTYKLITSCITNKIVNHLEMHNIIAEEQKGCRQNHRGCKEQLIIDSTVLKHAQKHNRNLNISYIDYKKAFDSVPHSWLIRVLQIYKIHPSIIAFLEHAMANWRTTLTLSVKTAKLITEQIQIRNGIFQGDSLSPLWFCMALNPLSKLLSKSKHGYKLTCDTSITHLMYMDDIKLYGKTDHGMKELLEITTEFSKDINMNFGLDKCRTLHIKKGKIIEGDYNINEDICITAMDNDEMYKYLGIQQTKSINHTQIKKDLTLEYIRRIKKVCKKQLNARNLTKAINTYATPILTYSFGIIKWTQTDINNLEIKTRSTLTQHKYLHPKSAIERVSTKRELGGRGFIDLNLLWQNQLKNLRDFFYSKISNSVLHLATTLTDDKYTPLNLKLKEKEFMPVTEQVKNKLISWRSKELHGRHVHDLEKPHVDPKASNNFLKQGYLFPETEGFIIAIQDQVINTRNYKKYILKENIESDKCRKCLQQPETIQHITGACTSLLQTDYTHRHNQIVHYIHQKLALKYQLITGNQKPYYEYTPRPVLENAATKMYYDRAILTDRTIHYNRPDITLLNKITKTAYLIDVTIPNTHNLQTAITGKINKYTELKEEVLRVWNLQSVYIVPLVLSTTTQSNHP

SEQ ID NO: 4973 - protein, 1301 aa, Autochton oryx
MRKYRKSKNEIQTTQSPTVVDTVNTPASSFQEQTQNERLESNDPKTVRRSSRKTQNRYRSISPTTSDIKEPYSPSTVSYTPSLASIDEDSRDLVTPNLDVTRHRNTLLPASTKAGKPRVRMRWDDNVNVFIMCTYYYITKLETYKTMYRKRLYDRFKLNYPNVKVTEQRISDQMRAIIRNKLLSDAVITQIKADVSEQLRNEDGYTNLTAYNTTQLTQSSHRPLHAVPQTSQYAIITNSSPTYTSHVSRSHIISSDNSTQTQMTSITNTIISETDESNLSYVPPTNTQDLLEKLHTALVSFSGTDPLTRPKLPRLKSNKKLYALINTFNNNILPSSFSLDSDLTQIHTLIYCSGLVICKEMGYKIEPDFAHIQRKKGDIRKPAWEIRLESDIMKLRADIGRLTQYIKGNRSRKIVETVKLIFENVKKHSIHEPENTRAQEYLDTLKQKLTLKSHRLARYRKALQRKTDNKLFSANEKGFYRSMNENGKSKLNTSEVINPIDLRNYWAEIWDKRTDYNASADWINKEVQQWNGIEEMSFPQVTDKDMAVAMKKLKNWKAPGLDGVHNFWLKYFTSLHSILTKLTNDLIHNTIQLPPFLTTGITYMLKKSSNTSDPSQYRPITCLPTVYKLITPCISTKIVNHLEKHNIIAEEQKGCRQHHRGCKEQLIIDSTILKHAHKNNRNLNVTYIDYKKAFDSVPHSWLIRVLHIYKIHPTIISFLENAMANWKTTLTLTTSFAKLTSEEIRIRNGIFQGDSLSPVWFCMALNPISRLLLQNNSGYRLTRNTSISHLMYMDDIKLFAKTEKEMKELLRVTTQYSKDISMAFGVDKCKTLHIKKGKITGGDYKIDEEVVITAMDNDDLYKYLGILQARAINHTKIRQELSAEYIRRVKQVCKRQLYSRNLTKAINTYATPILTYSFGIIKWTPTDIKNLEIKTRTVLTKYNYLHPKSAIERMTLKREQGGRGFIDLIILWQNQLKNLREFFYNKTKTSPIHLAIVDTDDNYTPLNLNHKEIEFKTFSEHTSQKIQSWKRKELHGRHLHELEQPHTDITASNKWLKLGYLFPETEGFVIAIQDQVINTRNYKKYILKENIETDKCRKCHRQPETIQHITGACTSLLQTDYTHRHNQIVNFIHQKLALKFKLITDKPKPYYEYTPKSVLETDETKMYYDRAILTDRTIHHNRPDITLLNKKSKTAFLIDVTIPNTHNIQKSITEKLSKYTELKEELLRIWNLQTVYIVPLVLSTTGVIPKQLLHSLRLLDLSPETYYTMQKAAILNTCRIVRKFLSNIDDEITDITDRPAL

SEQ ID NO: 4974 - protein, 1178 aa, Entheus sp.
MRWDDDVNLFIMRTYYYITKLETDKTIYRKRLFDKFKLNYPDVNVTEQRISDQLRTILRNKLLPNTVINQIKTEISEQLRKDEDTSNLTLSTNHPSSIQQSQEHQFSLIPPNSQNLLTPSPMLTHTQSMSQIPVISSDVSTQTYTTPLPNTTLSHTDQTDLTPPANTQDLLGKLQTTLTLFSGTDPFTRPTLPRLKPNKKLYSLIHTFNTDILPTLFSLDSDLLQIHTLIFCSGLVICQEMGYKIKSDSHYTQRKNENIKKPAWEIRLENDVIKLRADIGRITQYIKGNRSKNIVDKIEIIFKNTQIHSTHEPNNIRAQEYLDTLKQKLTLKSHRLARYKKALQRKADNMLFINNEKGFYRSMNSSGLSNLSTLNTPNATDLRKYWAEIWERPTHYDSSAEWIKEETQKWDTIEAMACPEVTEEDMDTVTKTMKNWKAPGLDGIHNFWLKHFTSLHGILTKLTNDLIHGSIQLPVFFTTGITHMLPKSIRTSDPSQYRPITCLPTMYKLITSCITKKIVHHLEKHDILAEEQKGCRQNHRGCKEQLVIDSTILKHAHKHNRNLNITYIDYKKAFDSIPHTWLIRILQIYKIHPEIVSFLERAMANWKTTLTLTTRLNKLTTEEIRIRNGIFQGDSLSPLWFCMALNPLSRLLSQNNLGYHLTHDTRIAHLMYMDDIKLYAKSEKDMKSLLKTTTDFSKDINMSFGIEKCKTLHIRKGKITGGNYDIDETVSITAMGNDDLYKYLGILQAKAINHTQIRQELSKEYVRRIKQICKRQLYSRNLTKAINSYAVPVLTYSFGIIKWTQSDIRNLEIKTRTTLTKYNYLHPKSAIERMTLKREQGGRGFIDLMLLWQNQLKYLREFFYRKSETSAIHLATVETDNKYTPLNLKEKEIEFKTTTQQTKEKMQSWKTKELHGRHLHDLELPHIDSVASNKWLKHGYLFPETEGFIIAIQDQVINTRNYKKYILKENVPTDKCRKCLRQSETIQHITGACTSLLQTDYTHRHNQIVHFIHQKLALKHKLITEKPKPYYEYAPKPVLESTQIKMYYDRAILTDRTVHHNRPDITLLDKITKSVFLIDVTIPNTHNIQKAVSEKMTKYTDLKEEILRIWKVQTVTIVPLVLSTTGIIPKHLLHSLKILDLPSQIYQTMQKAAILNTCHIVRKFLTNNDYEVTDTDRN

SEQ ID NO: 4975 - protein, 1293 aa, Blastobasis adustella
MRRTKKKNVNATQLSTVVDTEYIRNPLLTSPQTPHDCLEQSETLPVRRSLRITNNRYRSPSPAISEVIEPYSPSTISYTPSLASVDEEQIVVEIPNLDVAREVNAFLPASTKAGKPRVRMRWSNDVNLFIMRTYYFITKLETDKTMYRKRLFDRFKIEYPDINVTEQRISDQMRAILRNKLLSDTIITQIKLEVSTLLKEDEERVNSSAPHISHPPSYIDSTPQQQLLSSFTLTDTISTQYENELHISLNSPTLSPRTQTERSIYTTAAESDPTDINNTTITNTNTQELLKQLQNTLVEFTGTDPLKRPKLPRLKVNKKLNGLLQIINAVILPKLISQDSDLIQIHTLIYCTALVICQEMGYKVERNITKGRTSRENIAKPAWKIRLEKDIEILRKSIGRLTQYIKGNRSSKVTNTVETIFRNTKAHSTHEPANVRPQEYLDTLKQKLALKSHRLGRYNKALQRKTNNNLFNTNEKGFYRSSHNSGSDNQKSTEVPSAEDMKHYWAEIWDKSSEFNRSAKWVDDEAQHWDHIEEMAFSDVTEDDICIVTSKMKNWKAAGLDGIQNFWLKHLTVLHSILAKVVTKLIRGTTPLPPFLTTGITLMLPKSPNTADPSQYRPITCLPTTYKLITSCITNKIVNHLEMHNIIAEEQKGCRQNHRGCKEQLIIDSTVLKHAHKHNRNLNISYIDYKKAFDSVPHSWLIRVLQIYKIHPSIIAFLEHAMANWRTTLTLSVKTAKLITEQIQIKNGIFQGDSLSPLWFCMALNPLSKLLSKSKHGYKLTCDTSITHLMYMDDIKLYGKTDHGMKELLEITTEFSKDINMNFGLDKCRTLHIKKGKIIEGDYNINEDICITAMDNDEMYKYLGIQQTKPINHTQIKKDLTLEYIRRIKKVCKKQLNARKLTKAINTYATPILTYSFGIIKWTQTDINNLEIKTRSTLTQHKYLHPKSAIERVSTKRELGGRGFIDLNILWQNQLKNLRDFFYSKIRNSVLHLATTLTDDKYTPLNLKLKEKEFMPVTEQVKNKLNSWRSKELHDRHVHDLENPHVDPIASNNFLKQGYLFPETEGFIIAIQDQVINTRNYKKYILKENIESDKCRKCLQQPETIQHITGACTSLLQTDYTHRHNQIVHYIHQKLALKYQLITGNQKPYYEYTPRPVLENAATKMYYDRAILTDRTIYYNRPDITLLNKITKTAYLIDVTIPNTHNLQTAITGKINKYTELKEEVLRVWNLQSVYIVPLVLSTTGVIPKHLLHSLTTLDLPTQVFHTMQKAAILNTCRIVRKFLSGDPESTGS

SEQ ID NO: 4976 - protein, 1182 aa, Urbanus proteus
MSWNDDVNLFIMRTYYYITKLETDKTIYRKRLYDKFKLNYPDVKATEQRIADQMRAILRNKLLSDNVIKQIKAEVSEQLKNEEENSNLTSCTSHTSHLTQSPYHSSYSDPQTSQSTFNINPRPTFTPHVSRSYTTSSDIATQTHASTAVNTILSETDQSIVSCVPPIDTQDLVDKLKTAIVSFSGTDPLTRPKLPRLKANKKLYALVNTFNNKILPTSYSLDSDLTQIHTLIYCSGLVICKEMGYKIEPELSYMQRNKNNIRKPAWEMRLENDIMKLRADIGRLTQFIKGNRSKKIVDRVKVIFENAKIHTIHEPENTRVQEYLDTLKQKLNLKSHRIARYKKALQRKTDNKLFSVNEKGFYRSMNGSSMSKVDSSAVPSAIGLRTYWADIWDKRTDYNSSANWIDEETQHWNQIEEMSFPEVTDSDMSRAIKKLKNWKATGLDGVHNFWLKYFTSLQGILTKLTNDLINNTIQLPSFLTTGITYMLPKSSNTSDPSQYRPITCLPTIYKLITSCITQKIVLHLETHNIIAEEQKGCRQNHRGCKEQLIIDSTILKHAHKNNSNLNITYIDYKKAFDSIPHSWLIRVLHIYKIHPAIISFLENAMANWRTTLTLTTSLTKLTTDEIRIRNGIFQGDSLSPVWFCMALNPISRLLSQNNSGYRLTRDTPVSHLMYMDDIKLFAKSDKEMKELLKVTTEFSKDISMSFGLDKCKTLHIKKGKIIGGNYNIDEEVVITAMDNNDLYKYLGILQARAINHTKIRQDLGAEYIRRMKQVCKRQLYSRNLTKAINTYATPILTYSFGIIKWTQTDIKNLEIKTRTVLTKYNYLHPKSAIERMSLKREQGGRGFIDLMILWQNQVKNLRDFFYKKSETSPIHLATINTDDNFTPLNLKHKETQFKTPTEHTREKLQSWKRKELHGRHLHDIEQPHIDIIASNKWLQLGYLFPETEGFTIAIQDQVINTRNYKKYILKKNIETDQCRICRRQPETIQHITGACTSLLQTDYTHRHNQIVHYIHQKLALKYKLITEKSKPYYEYTPKPVLETSETKMYYDRAILTDRTIHHNRPDITLLHKKSKTAFLIDVTIPNTHNLQKSITEKLSKYVELKEELLRIWKLQTVYIVPLVLSTTGVIPKNLLQSLKILDLPPQTYYTMQKAAILNTCRIVRKFLSNIDDEMTDMTNRHA

SEQ ID NO: 4977 - protein, 1296 aa, Chioides albofasciatus
MRKCKLKQNKIQSTQSPTVVDTVNSPNFSSLQEQTQNERLESIHTNALRRSNRRTQNRYRSNSPATSDIIEPYSPSTVSYTPSLASIDEEVRDLETPNLDVARERNTLLPASTKAGKPRVRMRWNDDVNLFIMRTYYYITKLETDKTMYRKRLFDKFKLNYPDVKVTEQRISDQMRTILRNKLLSDAVIKQIKTEISEQLKNEDENSSLTSCNSSQVIHTPQRPSHSVPHASQHVLPSDSRPTYTPHVSQSHIILSDISTQTQIMPITNPILSDTVQSNFSVDPPTDVQDLLEKFQTALVSFSGTDPLARPKLPRLKANKKLYALVDTFNNNILPTSYSLDSDLTQIHTIIYCSGFVICKEMGYIVEPEFDYRKKQDTRKPAWEMRLEKDIMELRANIGRLTQFIKGNRSRKIVEAVKVIFENAKIHSIHEPENTRTQEYLDTLKQKLTLKSHRLARYKKALQRKTDNKLFSGNEKGFYRSMNESCIAKKPSEVPNVIDLRTYWAEIWEKRTDYNSSANWIEEETQKWNQIEEMSFPDVTENDMALVIRKLKNWKAPGLDGVHNFWLKYFTSLHSILTKLTNDLIHNSVQLPHFLTTGITYMLAKSSNTSDPSQYRPITCLPTIYKLITSCITKKIVHHLEKHNIIAEEQKGCRQNHRGCKEQLIIDSTILKHAHKNSRNLNISYIDYKKAFDSVPHSWLIRVLHIYRIHPTIISFLENAMANWKTTLTLTTSLAKLTTEEICIRNGIFQGDSLSPVWFCMALNPISRLLSQNNLGYRLTRDTSISHLMYMDDIKLFAKTEKEMKELLKVTTEFSKDINMTFGLDKCKTLHIKKGKVIGGNFNVDEDVVITAMANDDFYKYLGILQSRTINHTNIRQELSAEYIRRVKQICKRQLYSRNLTKAINTYASPILTYSFGVIKWTQTDIKNLEIKMRTVLTKYNYLHPKSAIERMTLKREHGGRGFVDLIILWQNQIKNLREFFYNKAKTSPIHLATVVTDDNYTPLNLKHKEIEFKTFDEHTKQKVQTWKRKELHGRHLHDLQQPHIDIIASNKWLRLGYLFPETEGFTIAIQDQVINTRNYKKYILKENIETDTCRKCHRQPETIQHITGACTSLLQTDYTHRHNQIVHFIHQKLAFKFKLINEKPKPYYEYTPKPVLETNETKMYYDRAILTDRTIHHNRPDITLLDKTSKTAFLIDITIPNTHNIQKSITEKLSKYTELKEELLRIWNLHTVYIVPLVLSTTGVIPKHLLNSLKILSLPPQTYYTMQKAAILNTCRIVRKFLSNTDDELTDMTDR

SEQ ID NO: 4978 - protein, 1302 aa, Astraptes talus
MRRYKKTFKEIQTTQSPTVVDMTNTPASSSLHEQIQIEKLETVHTNAVRRSNRRTQNRYRSKSPTTSDIIEPYSPSTVSYTPSIASIDEEARELVTPNLDVARDRNTLLPASTKAGKPRVRMRWDDDVNLFIMRTYYYITKLETDKTIYRKRLYEKFKLNYPDVKVTEQRISDQMRAILRNKLLSDAVIRQIKAEISEQLQNEDEHNNVTSCNATQLIVSPQRSSYSAPQTTHYAITSNPNSTYTSHVSRSHIISSDISTQTQITPIINSILSETDQPNLSYAPLTEVQDLLEKFQTALVSFSGSDPLTRPKLPRLKADKRLYALVNTFNKHILPTAYSLDSDLTQIHTLIYCSGLVISNEMGYKVEPDFIYTHRKKGNIRKPAWEIRLEKDIIKLRADIGRLTQFIKGNRSRKIVETVKLIFENAKIHSIHEPENRRAQEYLDTLKQKLTLKSHRLARYKKALQRKTDNKLFSSNEKGFYRSMNESGVSKLNPSEVPSAIDLKTYWAGIWDKQTEYNNSAEWIEKETQHWNQIEEMSFPEITEEDMILVIRKLKNWKATGLDGVHNFWLKYFTSLHGILTKLTNDLIHDTVQLPHFLTTGITYMLPKSSNTSDPSQYRPITCLPTIYKLITSCITRKIVHHLEKQNIISEEQKGCRQNHRRCKEQLIIDSTILKHAQKNNRTLNITYIDYKKAFDSVPHSWLVRVLHIYKIHPAIISFLEKAMANWKTTLTLTTSMSKLTTEEIRIRNGIFQGDSLSPVWFCMALNPISRLLSQKKVGYRLTRDTSISHLMYMDDIKLFAKTDKEMKELLHITTEFSKDISMTFGLDKCKTLHIKKGKITGGDYNINEGVVITAMDSEDLYKYLGVLQARAINHTKIRQELRVEYIRRVKQVCKRQLYSRNLTKAINTYASPILTYSFGIIKWTQTDIKNLEIKTRTILTKYNYLHPKSAIERMTLKREQGGRGFIDLMILWQNQLKNLREFFYKKSETSPIHLATIDTDNNFTPLNLNQKEKQFKSSAEVTREKVQTWKRKELHGRHSHDLEQPHIDTVASNKWLQLGYLFPETEGFTIAIQDQVINTRNYRRFILKENIETDKCRKCHRQPETIQHITGACTSLLQTDYTHRHNQVVHFIHQKLALKFKLSTEKPKPYYEYTPKPVLENEEKKMYYDRAILTDRTIHHNRPDITLLDKNSKIAFLIDITIPNTHNIQKSITEKLSKYVELKEELLRIWNLQTVYVVPLVLSSTGVIPKHLLHSLKLLDLPPQTYYTMQKAAILNTCRIVRKFLSNSDDDMTDVTDRPVF

SEQ ID NO: 4979 - protein, 1305 aa, Urbanus proteus
MRRHKKTNKEIQTTQSPTVVDTINIPTSSSLHEQTQPARLETSHINSVRRSNRRTQNRYRSISPTTSDIIEPYSPSTVSYTPSIASIDEEAIDLVTPNLDAARDRNTLLPASTKAGKPRVRMSWNDDVNLFIMRTYYYITKLETDKTVYRKRLFDQFKLNYPDVKVTEQRISDQMRAILRNKLLSDAVIKQIKAEVSEQLRNEDDPNNTSCSVIQVMESPQRPLYSVPQTTQYAITASPNPTYTPHVLRSHIISSDISTQTQITPITNTILSETDQPNFSPVPLPDTKDLLEKFQTALISFTGSDPLTRPKLPRLKANKKLYALINTFNTHILPTSYSLDSDLTQIHTLIYCSGLVISKEMGYKIEPEFNYIHKKKEDIRKPAWEKRLENDIIKLRADIGRLTQFIKGNRSRKIVETVKVIFENAKTHSIHEPENIRAQEYLDTLKQKLTLKSHRLARYKKALQRKTDNKLFSSNEKGFYRFMTENGISKNPSEVPSALELKSYWAGIWDKHADYNRSAEWIEKETLHWSQIEEMSFPEITEEDMKLVIKKLKNWKATGLDGVHNFWLKYFTSLHGILTKLTNDLIHDTVQLPRFLTTGITYMLPKSSNTSDPSQYRPITCLPTVYKLITSCITKKIVHHLEKHNIITEEQKGCRQNHRGCKEQLIIDSTILKHAHKNNRNLNITYIDYKKAFDSVPHSWLVRVLHIYKIHPVIISFLEKAMANWTTTLTMTTSMSKVTTDVIRIRNGIFQGDSLSPVWFCMALNPISRLLSQNNSGYRLTRDTPISHLMYMDDIKLFAKTEKEMKELLKITTQFSKDISMSFGLDKCKTLHLKKGKITGGDYNIDDEVVITAMDNDDLYKYLGILQARAINHTKIKQELSAEYVRRVKQICKRPLYSRNLTKAINTYATPILTYSFGIIKWTQTDIKNLEIKTRTILTKYNYLHPKSAIERMTLKREQGGRGFIDLTILWQNQLRSLREFFYNKSETSPIHLATIDADNNFTPLNLNHKEIQFRTSVELTNQKIETWKRKELHGRHLHDLEQPHIDTIASNKWLQLGYLFPETEGFTIAIQDQVINTRNYKKYILKENIETDKCRKCHRQPETIQHITGACTSLLQTDYTHRHNQVVHFIHQKLALKFKLINENLKPYYEYTPKPVLENGEKKMYYDRAILTDRTIHHNRPDITLLDKNSKTAFLIDITIPNTHNIQKSITEKLSKYVELKEELLRIWNLQTVYIVPLVLSSTGVIPKHLLHSLKIIDLPPQTYYTMQKAAILNTCRIVRKFLSNSDDEMTDMTDRLTTDRPAL

SEQ ID NO: 4980 - protein, 1255 aa, Junonia grisea
MEQHSQRLRIGPLPGGRRGTPGASAGCYSMRSTGGGGLSRRVPPEQLSTAEYSLPDIMASQNSAVNINRPTEDVSQGASSSQPVTTKAGKPRVRMKWDKEVNLFIMRTYLYITKLETDKVMYPKRLFDKFKTQYPEWNVSQQRIADQRRVIIRNKLLSEEEIAHLKSEIAEQLEREEVLTQTKILPLSPHLETSLTQTQEIITTSTASTATQSDAFTQTIITPVDYDTEVENNLNINSEVSQQENITELTQLLQTELTKFNGTDPKSRPKLPRLKESKTLYNLIHIFNTHILPKCFSLDSDLIHVHTLIYCTALVITIKLGYKTKLGNIENTNQEKNHKPAWEHRLESDIKKLRADIGRLTQYIKGNRSKKLIEKVEIIFKNTKLHTTYEQENKRPEEYIDTLKQKLSLKVHRLARYKKALRRKTDNKLYCTNEKAFYRSLNNNITNNSPDEKQIPSKNELKNYWAEIWEQRSSHNIQAEWIAEENQKWDSTEMMEFKEINLDDLRNVLKKTKNWKAAGIDQIHNFWYKKLTSLHNILSNIITDLINGKTSLPTFVTTGLTYMLPKSQNTHDPSQYRPITCLPTIYKIITACITNKIVSHLEEHNIISEEQKGCRRNHRGCKEQLIIDSTVLKHANTHNRNLYITYIDFKKAFDSVPHSWLIQILHTYKINPIIIRFLKDAMSSWKTTITLSTKTTKICCEEIRISNGIFQGDSLSPLWFCLALNPLSRILTESKFGYQLTRGTAVSHLMYMDDIKLFSKSEKEMEKMIRITAQFSKDINMNFGLDKCKTLTIKRGKLIEKSYEIDEEVNISGMVGDELYKYLGMLQGRDINHTKIKNNLTTEYIKRVNQLCKKQLYSRNLVKAINTFAIPVLTYSFGIIKWSQTDINNLEIKTRTILTKYKYHHPKSAIERVTIKRELGGRGIVDLNILWQNQIHNLKNFFYSKINNSKIHAATVAVDDNFTPLNLKNKEKQFKTTQEQLDEKVCTWRKKELHGRHLHDLEQNHIDLEASNKWLTKGYLFPETEGFLISIQDQVINTRNYKKYILKEPIETDLCRKCHRLPETIQHITGACPTLVHTDYTHRHNQIAHYIHQKLALKYKLINGNPKPYYQYLPNPVLESNEVKIYFDRGILTDKTIHYNRPDITIVNKSSKIAYLIDVSIPNTHNLQKTITEKITKYTELKEEIIRLWNLNKVYIVPLVLSTTGVIPKHLHHSLKILDLPPLTYITMQKAAILNTCRIVRKFLDSENEPTDCTD

SEQ ID NO: 4981 - protein, 1226 aa, Junonia neildi
MRSTGGGGLSRRVPPEQLSTAEYSLPDIMASQNSAVNINRPTEDVSQGASSSQPVTTKAGKPRVRMKWDKEVNLFIMRTYLYITKLETDKVMYPKRLFDKFKTQYPEWNVSQQRIADQRRVIIRNKLLSEEEIAHLKREIAEQLEREEVLTQTKILPLSPHLETSLTQTQEIITTFTASTATQSDAFTQTIITPVDYDTEVENNLNINSEVSQQENITELTQLLQTELTKFNGTDPKSRPKLPRLKESKTLYNLIHIFNTHILPKCFSLDSDLIHVHTLIYCTALVITIKLGYKTKLGNIENTNKDKNHKPAWEHRLESDIKKLRADIGRLTQYIKGNRSKKLIEKVEIIFKNTKLHTTYEQENKRPEEYIDTLKQKLSLKVHRLARYKKALRRKTDNKLYCTNEKAFYRSLNNNITNNSPDEKQIPSKNELKNYWAEIWEQRSSHNIQAEWIAEENQKWDSTEMMEFKEINLDDLRNVLKKTKNWKAAGIDQIHNFWYKKLTSLHNILSNIITDLINGKTSLPTFVTTGLTYMLPKSQNTHDPSQYRPITCLPTIYKIITACITNKIVSHLEEHNIISEEQKGCRRNHRGCKEQLIIDSTVLKHANTHNRNLYITYIDFKKAFDSVPHSWLIQILHTYKINPIIIRFLKDAMSSWKTTITLSTKTTKICCEEIRISNGIFQGDSLSPLWFCLALNPLSRILTESKFGYQLTRGTAVSHLMYMDDIKLFSKSEKEMEKMIRITAQFSKDINMNFGLDKCKTLTIKRGKLIEKSYEIDEEVNISGMVGDELYKYLGMLQGRDINHTKIKNNLTTEYIKRVNQLCKKQLYSRNLVKAINTFAIPVLTYSFGIIKWSQTDINNLEIKTRTILTKYKYHHPKSAIERVTIKRELGGRGIVDLNILWQNQIHNLKNFFYSKINNSNIHAATVAVDDNFTPLNLKSKEKQFKTTQEQLDEKVCTWRKKELHGRHIHDLEQNHIDLEASNKWLTKGYLFPETEGFLISIQDQVINTRNYKKYILKEPIETDLCRKCHRLPETIQHITGACPTLVHTDYTHRHNQIAHYIHQKLALKYKLINGNPKPYYQYLPNPVLESNEVKIYFDRGILTDKTIHYNRPDITIVNKSSKIAYLIDVSIPNTHNLQKTITEKITKYTELKEEIIRLWNLNKVYIVPLVLSTTGVIPKHLHHSLKILDFPPLTYITMQKAAILNTCRIVRKFLDSENEPTDCTD

SEQ ID NO: 4982 - protein, 1300 aa, Codatractus imalena
MRRYKITNNEIQTTQSPTVVDLINTPDSSSLHEQIQNERLQSNHTCAVRRSSRRTQNRYRSKSPTASEIIEPHSPSTVSYTPSLASINEDVRELVTPNLDVARDRNALLPASTKAGKPRVRMRWDDNVNLFIMRTYYYITKLETDKTMYRKRLYDKFKRNYPDVKVTEQRISDQMRAILRNKLLSDAMIEHIKVEISEQLRNEDVHSNQTSCSASQLIQSPQRPSHSVPQTSHTTTTNTRSTNISHVSRSHITTSDTSTQTQISPITNTTLLETDQVDLSYVSSTNNTQDLLEKLQATLISFSGTDPLTRPKLPRLKPNKKLYALVNTFNNHILPTSYSLDSDLTQIHTLIYCSGFVISKEMGYKIETEFNCIGKKGNIRKPTWEMRLENDIMKLRADIGRLTQYIKGNRSRKIIETVKVIFDNAKIHSIHEPENTRATEYLDTLKQKLTLKSHRLARYKKALQRKTDNKLFSTNEKGFYRSMNQRVMSKFNSSEIPSATDLRTYWAEIWDKRTDYNSSADWIDNETQHWNQIEEMSFPNVTEKDMALVIKKLKNWKATGLDGVHNFWLKYFTSLHGILTKLTNDLIHNTVQLPHFLTTGLTYMIPKSLNTSDPSQYRPITCLPTVYKVITSCITMKIVHHLEKHNIIAEEQKGCRQNHRGCKEQLIIDSIILKHAHKHNRNLNITYIDYKKAFDSVPHSWLIRVLHIYKIHPQIIAFLESAMANWKTTLTLTTSSTKVSTEGIRIRNGIFQGDSLSPVWFCMALNPISRLLSQNNLGYRLTRETSISHLMYMDDIKLFAKTEKEMKELLLVTKEFSKDINMTFGLDKCKTLHIKKGKVTGGDYSIDEEVITAMDNDDLYKYLGVLQARAINHTKIRQELGAEYFRRVKQVCKRQLYSRNLTKAINTYATPILTYSFGIVKWTQTDINNLEIKTRTILTKYNYLHPKSAIERMTLKREQGGRGFIDLMVLWKNQLQNLRQFFYNKSETSPIHLATVYTDDNYTPLNLTHKEIEFKTSAEHIKEKVQSWKTKELHGRHLHDLEQPHIDIIASNKWLKLGNLFPETEGFTIAIQDQVINTRNYKKYILKENIESDKCRKCHRQPETIQHITGACTSLLQTDYTHRHNQIVHFIHQKLALKFKLITEKPKPYYEYTPKPVLETGDTKMYYDRAILTDRTIHHNRPDITLLDKNSKTAFLIDVTIPNTHNIQKSITDKLTKYIELKEELLRIWNLQTVYVVPLVVSTTGVIPKHLLQSLKILGLPPQTYYTIQKAAILNTCRIVRKFLSNIDDEMTDVTDRPAL

SEQ ID NO: 4983 - protein, 762 aa, Junonia vestina
MMEFKEINLDDLRNVLKKTKNWKAAGIDQIHNFWYKKLTSLHNILSNIITDLINGKTSLPTFVTTGLTYMLPKSQNTHDPSQYRPITCLPTIYKIITACITNKIVSHLEEHNIISEEQKGCRRNHRGCKEQLIIDSTVLKHANTHNRNLYITYIDFKKAFDSVPHSWLIQILHTYKINPIIIRFLKDAMSSWKTTITLSTKTTKICCDEIRISNGIFQGDSLSPLWFCLALNPLSRILTESKFGYQLTRGTAVSHLMYMDDIKLFSKSEKEMEKMIRITAQFSKDINMNFGLDKCKTLTIKRGKLIEKSYEIDEEVNISGMVGDELYKYLGMLQGRDINHTKIKNNLTTEYIKRVNQLCKKQLYSRNLVKAINTFAIPVLTYSFGIIKWSQTDINNLEIKTRTILTKYKYHHTKSAIERVTIKRELGGRGIVDLNILWQNQIHNLKNFFYSKINNSKIHAATVAVDDNFTPLNLKSKEKQFKTTQEQLDEKVCTWRKKELHGRHIHDLEQNHIDLEASNKWLTKGYLFPETEGFLISIQDQVINTRNYKKYILKEPIETDLCRKCHRLPETIQHITGACPTLVHTDYTHRHNQIAHYIHQKLALKYKLINGNPKPYYQYLPNPVLESNEVKIYFDRGILTDKTIHYNRPDITIVNKSSKIAYLIDVSIPNTHNLQKTITEKITKYTELKEEIIRLWNLNKVYIVPLVLSTTGVIPKHLHHSLKILDLPPLTYITMQKAAILNTCRIVRKFLDSENEPTDCTD

SEQ ID NO: 4984 - protein, 1226 aa, Junonia coenia
MRSTGGGGLSRRVPPEQLSTAEYSLPDIMASQNSAVNINRPTEDVSQGASSSQPVTTKAGKPRVRMKWDKEVNLFIMRTYLYITKLETDKVMYPKRLFDKFKTQYPEWNVSQQRIADQRRVIIRNKLLSEEEIAHLKREIAEQLEREEVLTQTKILPLSPHLETSLTQTQEIITTSTASTATQSDAFTQTIITPVDYDTEIENNLNINSEVSQQENITELTQLLQTELTKFNGTDPKSRPKLPRLKESKTLYNLIHIFNTHILPKCFSLDSDLIHVHTLIYCTALVITIKLGYKTKLGNIENTNKEKNHKPAWEHRLESDIKKLRADIGRLTQYIKGNRSKKLIEKVEIIFKNTKLHTTHEQENKRPEEYIDTLKQKLSLKVHRLARYKKALRRKTDNKLYCTNEKAFYRSLNNNITNNSPDEKQIPSKNELKNYWAEIWEQRSSHNIQAEWIAEENQKWDSTEMMEFKEINLDDLRNVLKKTKNWKAAGIDQIHNFWYKKLTSLHNILSNIITDLINGKTSLPTFVTTGLTYMLPKSQNTHDPSQYRPITCLPTIYKIITACITNKIVSHLEEHNIISEEQKGCRRNHRGCKEQLIIDSTVLKHANTHNRNLYITYIDFKKAFDSVPHSWLIQILHTYKINPIIIRFLKDAMSSWKTTITLSTKTTKICCEEIRISNGIFQGDSLSPLWFCLALNPLSRILTESKFGYQLTRGTAVSHLMYMDDIKLFSKSEKEMEKMIRITAQFSKDINMNFGLDKCKTLTIKRGKLIEKSYEIDEEVNISGMVGDELYKYLGMLQGRDINHTKIKNNLTTEYIKRVNQLCKKQLYSRNLVKAINTFAIPVLTYSFGIIKWSQTDINNLEIKTRTILTKYKYHHPKSAIERVTIKRELGGRGIVDLNILWQNQIHNLKNFFYSKINNSKIHAATVAVDDNFTPLNLKSKEKQFKTTQEQLDEKVCTWRKKELHGRHIHDLEQNHIDLEASNKWLTKGYLFPETEGFLISIQDQVINTRNYKKYILKEPIETDLCRKCHRLPETIQHITGACPTLVHTDYTHRHNQIAHYIHQKLALKYKLINGNPKPYYQYLPNPVLESNEVKIYFDRGILTDKTIHYNRPDITIVNKSSKIAYLIDVSIPNTHNLQKTITEKITKYTELKEEIIRLWNLNKVYIVPLVLSTTGVIPKHLHHSLKILDLPPLTYITMQKAAILNTCRIVRKFLDSENEPTDCTD

SEQ ID NO: 4985 - protein, 1226 aa, Junonia evarete
MRSTGGGGLSRRVPPEQLSTAEYSLPDIMASQNSAVNINRPTEDVSQGASSSQPVTTKAGKPRVRMKWDKEVNLFIMRTYLYITKLETDKVMYPKRLFDKFKIQYPEWNVSQQRIADQRRVIIRNKLLSEEEIAHLKREIAEQLEREEVLTQTKILPLSPHLETSLTQTQEIITTSTASTATQSDAFTQTIITPVDYDTEVENNLNLNSEVSQQENITELTQLLQTELTKFNGTDPKSRPKLPRLKESKTLYNLIHIFNTHILPKCFSLDSDLIHVHTLIYCTALVITIKLGYKTKLGNIENTNKEKNHKPAWEHRLESDIKKLRADIGRLTQYIKGNRSKKLIEKVEIIFKNTKLHTTHEQENKRPEEYIDTLKQKLSLKVHRLARYKKALRRKTDNKLYCTNEKAFYRSLNNNITNNSPDEKQIPSKNELKNYWAEIWEQRSSHNIQAEWIAEENQKWDNTEMMEFKEINLDDLRNVLKKTKNWKAAGIDQIHNFWYKKLTSLHNILSNIITDLINGKTSLPTFVTTGLTYMLPKSQNTHDPSQYRPITCLPTIYKIITACITNKIVSHLEEHNIISEEQKGCRRNHRGCKEQLIIDSTVLKHANTHNRNLYITYIDFKKAFDSVPHSWLIQILHTYKINPIIIRFLKDAMSSWKTTITLSTKTTKICCEEIRISNGIFQGDSLSPLWFCLALNPLSRILTESKFGYQLTRGTAVSHLMYMDDIKLFSKSEKEMEKMIRITAQFSKDINMNFGLDKCKTLTIKRGKLIEKSYEIDEEVNISGMVGDELYKYLGMLQGRDINHTKIKNNLTTEYIKRVNQLCKKQLYSRNLVKAINTFAIPVLTYSFGIIKWSQTDINNLEIKTRTILTKYKYHHPKSAIERVTIKRELGGRGIVDLNILWQNQIHNLKNFFYSKINNSKIHAATVAVDDNFTPLKLKSKEKQFKTTQEQLDEKVCTWRKKELHGRHIHDLEQNHIDLEASNKWLTKGYLFPETEGFLISIQDQVINTRNYKKYILKEPIETDLCRKCHRLPETIQHITGACPTLVHTDYTHRHNQIAHYIHQKLALKYKLINGNPKPYYQYLPNPVLESNEVKIYFDRGILTDKTIHYNRPDITIVNKSSKIAYLIDVSIPNTHNLQKTITEKITKYTELKEEIIRLWNLNKVYIVPLVLSTTGVIPKHLHHSLKILDLPPLTYITMQKAAILNTCRIVRKFLDSENEPTDCTD

SEQ ID NO: 4986 - protein, 1093 aa, Ophraella communa
MRWTRTMNINLMYAYYKATDLEKNKIGFRERLETVWNEDHPENKLTAQRLSDQVRSILKRKALSDAELESIKENMRRRSIRERSNMAHPQQEEMVTSINDQQEMDQELMDLFIEYNLKFQGIPLESRPKLPKMTLNKGVRNTTARMNCTLITIANTSSDLLETCHMVYCAGAAISSIYHKTKLTKHPIPKPAAIPPWEKRLLERINTLRTKIGTLHTYLNTQNPSKKVKKKAVTIAALAKIKIRDPRFRDKLLVYLDSLKQKIAAFGNRIRRYKKRTQRYSQNKTFSQTPKMFYRQLEQGSSQMTNQDRPNEQNMIQFWNEIWSNDVEHDSTAYWIQKEKEKLTQLPNMICTSITEEDVRSTIKKLKNWSAPGVDGIFNYWWKTMHCFHAIIAKQLQEIFENPALTPKYLTLGLTHMIPKNSDTKDPKNYRPITCLPTIYKILTGILNSKINQHLKQYNILAWEQKGCKKKSRGTKELLVIDNIVTKQVKSKNRNLSVSWVDYRKAFDSVPHSWLKESLKIHKIDQKMINLLEHLMKSWRTMLDLGAYRTTEIKIKRGIFQGDSLSPSWFCLAINVLSQMLNSNFGGYNINKDTILTHLFYVDDLKIYAKNLEQLTGQLEIVKSFSDAIKMEMCIDKCAVMQVKRGKVVNMKNVTLMDNTSIPVLTENYKYLGFYQTLNFDEPENKTRVKNEYFKRVDKILKSLLNSKNKITALNTWAQPVLSYSFGILNYSPTELQALDRQLRSNLTKHQMLHPNSAVERLYLPRSAGGRGLLNLEETCKKEKRKLAHYFKEKKVPFYRSLISIDIRYSPLNLATAISEEKEKEEYNEVLEGSWKSKAMHGRFYASLHQPVVDLKASNTYLNSGYLFPETEGALFAIQDQVVPTRYYKRHILKQQVETTKCRLCNSEEESIQHLISACTYLAPTAYTSRHNSMGKVIHQFLAQKVGLVNQESPIYKYEPKNVLENATTKIYWDTPIHTDRTVQHNRPDMILVNKETKKCTLIDFAVPLDDNISRTYRTKNEKYVQLADEIKNLWRMQNVEIKPLIITANGLVHKNTVKHLEELEIPNHVLNWMQKAVLLGTTAIIRRTLSKR

SEQ ID NO: 4987 - protein, 1127 aa, Ophraella communa
MCYVLYYITNVESKVQEIYKVIIIIIIIIIIIIIIIIIIIIIIIIIIIIIIIIIIIIIIIIIIINNNNNNNEDHPENKLTAQRLSDQVRSILKRKALSDAELESIKENMRRRSIRERSNMAHPQQEEMVTSINDQQEMDQELMDLFIEYNLKFQGIPLESRPKLPKMTLNKGVRNTTARMNCTLITIANTSSDLLETCHMVYCAGAAISSIYHKTKLTKHAIPKSAAIPPWEKRLLERINTLRTKIGTLHTYLNTQNPSKKVKKKAVTIAALAKIKIRDPRFRDKLLVYLDSLKQKLAAFGNRIRRYKKRTQRYSQNKTFSQTPKMFYRQLEQGTSQMTNQDRPNEQIMIQFWNEIWSNDVEHDSTAYWIQKEKEKLTQLPNMICTSITEEDVRSTIKKLKNWSAPGVDGIFNYWWKTMHCFHAIIAKQLQEIFENPALTPKYLTLGLTHMIPKNSDTKDPKNYRPITCLPTIYKILTGILNSKINQHLKQYNILAWEQKGCKKKSRGTKELLVIDNIVTKQVKSKNRNLSVSWVDYRKAFDSVPHSWLRESLKIHKIDQKMINLLEHLMKSWRTMLDLGAYRTTEIKIKRGIFQGDSLSPSWFCLAINVLSQMLNSNFGGYNINKDTILTHLFYVDDLKIYAKNLEQLTGQLEIVKSFSDAIKMEMCIDKCAVMQVKRGKVVNMKNVTLMDNTSIPVLTENYKYLGFYQTLNFDEPENKTRVKNEYFKRVDKILKSLLNSKNKITALNTWAQPVLSYSFGILNYSPTELQALDRQLRSNLTKHQMLHPNSAVERLYLPRSAGGRGLLNLEETCKKEKRKLAHYFKEKKVPFYRSLISIDIRYSPLNLATAISEEKEKEEYNEVLEGSWKSKAMHGRFYASLHQPVVDLKASNTYLNSGYLFPETEGALFAIQDQVVPTRYYKRHILKQQVETTKCRLCNSEEESIQHLISACTYLAPTAYTSRHNSMGKVIHQFLAQKVGLVNQESPIYKYEPKNVLENATTKIYWDTPIHTDRTVQHNRPDMILVNKETKKCTLIDFAVPLDDNISRTYRTKNEKYVQLADEIKNLWRMQNVEIKPLIITANGLVHKNTVKHLEELEIPNHVLNWMQKAVLLGTTAIIRRTLSKR

SEQ ID NO: 4988 - protein, 1093 aa, Ophraella communa
MRWTRTMNINLMYAYYKATDLEKNKIGFRERLETVWNEDHPENKLTAQRLSDQVRSILKRKALSDAELESIKENMRRRSIRERSNMAHPQQEEMVTSINDQQEMDQELMDLFIEYNLKFQGIPLESRPKLPKMTLNKGVRNTTARMNCTLITIANTSSDLLETCHMVYCAGAAISSIYHKTKLTKHPIPKSAAIPPWEKRLLERINTLRTKIGTLHTYLNTQNPSKKVKKKAVTIAALAKIKIRDPRFRDKLLVYLDSLKQKLAAFGNRIRRYKKRTQRYSQNKTFSQTPKMFYRQLEQGTSQMTNQDRPNEQIMIQFWNEIWSNDVEHDSTAYWIQKEKEKLTQLPNMICTSITEEDVRSTIKKLKNWSAPGVDGIFNYWWKTMHCFHAIIAKQLQEIFENPALTPKYLTLGLTHMIPKNSDTKDPKNYRPITCLPTIYKILTGILNSKINQHLKQYNILAWEQKGCKKKSRGTKELLVIDNIVTKQVKSKNRNLSVSWVDYRKAFDSVPHSWLRESLKIHKIDQKMINLLEHLMKSWRTMLDLGAYRTTEIKIKRGIFQGDSLSPSWFCLAINVLSQMLNSNFGGYNINKDTILTHLFYVDDLKIYAKNLEQLTGQLEIVKSFSDAIKMEMCIDKCAVMQVKRGKVVNMKNVTLMDNTSIPVLTENYKYLGFYQTLNFDEPENKTRVKNEYFKRVDKILKSLLNSKNKITALNTWAQPVLSYSFGILNYSPTELQALDRQLRSNLTKHQMLHPNSAVERLYLPRSAGGRGLLNLEETCKKEKRKLAHYFKEKKVPFYRSLISIDIRYSPLNLATAISEEKEKEEYNEVLEGSWKSKAMHGRFYASLHQPVVDLKASNTYLNSGYLFPETEGALFAIQDQVVPTRYYKRHILKQQVETTKCRLCNSEEESIQHLISACTYLAPTAYTSRHNSMGKVIHQFLAQKVGLVNQESPIYKYEPKNVLENATTKIYWDTPIHTDRTVQHNRPDMILVNKETKKCTLIDFAVPLDDNISRTYRTKNEKYVQLADEIKNLWRMQNVEIKPLIITANGLVHKNTVKHLEELEIPNHVLNWMQKAVLLGTTAIIRRTLSKR

SEQ ID NO: 4989 - protein, 1125 aa, Ophraella communa
METRNRKNKVTAPEWSEAQTPVVCLVTDAGQPRRSTSDCITDDNETQPGPSRHPQQKVPIQIRASPRADTSSGDEEELIATSATSYSDSRPSSPNQSLACICGRNYKTKSGLAKHKATCGTQNRTECQFCQRVFPTYKSVRAHETRAHKDITEEQKRQRHHKSEVEILQTMAKIEARAKKGDHIRKILADETGLTVHQVRHWRTKKTYQELLAAEKEAILLETGHHQPTPQLDSQNTTTAISNTPPEVTPPTTINEETSDSSIPLPDRVPDILLEFLNNVEADLSTNDTPDNFVLDLVQAGSTLDKPALTTFIDDWLDKADIRYHWLRRNRRKTAKKPPRSYGQTHTGSNERAANYKRIQDLYKKNRTTLIDKILTDTSLSLPESYPTKVSIEEFYNNIMGTESPPDNEPILDTKRRANIFLPIQTHELEEAKRSWSNSAPGADGIQIGELKRTPNLPLAIVLSIILLRNIQPRRFREAKTIIIYKNGDRRDPSNWRPITISSALQRLLHRIIARRMNNILHLNFNQRGFTDGDGTLANALILDNFIRTRRADTKSFAVVSLDVRKAFDSVSHHSIRRGMLRMGLTNELTNYVTDSISNTHTIIQVGGEKTNPIILKRGVKQGDPMSPILFNLVIDELLTTLNDGERGASLADGVRVLAMAFADDIVLIADDPKDIPAALLQTSKFLQQRGMTINAKKSTSICVERRKGELVEWNKPTFSIEGTPIPATSNITSFKYLGHQYNTTGALKPTLANVPLWLQRLQKAALKPDQKISALKEIVIPKLIYGLQNPRTTSQQLRSVDRMVRHFVKKALHFNVHTPDAALHARVSDGGLGILELRRHVPCVFRKRLEGLKTRTNDPATRAVLEHPLTQRLLTKLNDLKGPTDDKQYWRQRIMACPFTKGLELTAEDSASRSWINRTPYGWTGRDYVRAVQLRSNNLPTAAIPSNPKDQRLCRAGCNKTETISHVLQHCPATHWETIQRHNEICKKIAKHARKFWVVEEEKHIRHPDGELFKPDLVIHMNDRTLVVDIGVSWEGNIPIQRVYSNKQGVYDHAKFREATTARNIGPNITVLPIILGARGIWPNVNREVSDLLKITPTVKASCVHSVLKWGSSIHEAFGRKVWR

SEQ ID NO: 4990 - protein, 1002 aa, Trichonephila clavata
MWETFPTKVGLDNHCLAHKKDAIKIKDVPVVVPPPTKAKRVARKERIRKHAVGPPALAPLSGPPPNTATDSPPPPGDIPLPLIDIQENRLLSSFVEPLNALLTHDDLPGAVDDFFGITQDLVAVVQQHFRIKTYLNNREGIPPRRKELDMLDPQAVQRCYGWNRRKFIRQLTGDNSERCRIPKADIVSHYSTSWGSPSEPPNLPACDPPERSPVVHAFTPTFVASCLQSAENSAPGPDGIMYKQWREVDPGCKIVSAIFNICLKLNKIPPSWKSSSTVLIHKNGEHDDITNWRPIALSNTLYKLFTKCLTRKLADWCEMHEVFSNSQKGFTPYDGVVEHNFLLSQHFETARAGHSDSLAAWIDISNAFGSVPHEVILHSLRSRGVDHDFVSLVENIYQGSTTSILTEEGPSPPIPIQRGVKQGCPLSGILFNLALNDTLTTVQGPEVDKQILAFADDIVLLAKNQDQLQGLLDCTWQSLQKINLKVNPAKCASFHLAGSTPVGSRPSPFTIGDCDIKILGDGDFFKYLGKPVGFQMSKDCSSINDAVSNAVKISASKLSPWQKLDAMKSFFFPSLNFAMRTAQFPKGDWLKIQQSTTKGIKDVLSLPTNASVSYLHGDRFKGGCGVPEATRDSDFYLVDTAFKLLTSTDEEVVVKALGQLVKTVRHRLQREPTNGDLASFLSGSMEGKFRETTNAVQNTWTLARMATRRQNLTWTFSEDQPSISFDGVTITGSDRKKLLRSLHQAAKVSHIEKLLSMRSQGKAMECVAAHPASSHFISNGKFTRFADWRFVHSARLNLLPVNGAKQWVDPSAKRCRRCGAPNETLPHVVNHCKVHSAAWQKRHNAIQERIRKAIAFSGQVISVNRAVGETRLRPDIVASIEGKVFIIDITIPFENRLTAFQEARRMKNKKYEPLINHFKNQGASEVFIVPIVVGSLGAWDVANDDFLRLIATKSYLALLRKLCCSDAIRWSRDIYIEHITGHRQYGNIEQGEVEGAIEGTHL

SEQ ID NO: 4991 - protein, 1006 aa, Trichonephila clavata
MVPQETPSAWDCRECGNSFPTKVGLDNHLLAHKKEAIKRKEIPVKVPPPTRLKKIQRKARIQQHAIGEPAAAPLAAPMPSANLAIMPPVEVEPLPLIDLPEGRVLSSFVEPLNSFLTHDDLPGAIGDFFNIIDDIVAVVRDHFRIRPIEGPTNNEIKPRRRELDLLDPQAVQKCYGWNRRKFVRHLTGENSDRCKIPTIELTNHFSTTWDLPTEAPNLAAFDPPDRPPVVHAFTPKFVASCLQSAENSAPGPDGIMYRQWREVDPGCKILCAVFNVCLRLCKVPPSWKISSTILIHKSGDHDDVTNWRPIALSNTLYKLFTKCMTRKLAEWCEDHEVFSNAQKGFTPYDGVIEHNFLLSQHFENARAGHSESLAAWIDISNAFGSIPHDVILHALRTQGVDHDFVSLVADIYHEATTCLLTEEGPSPPISIRRGVKQGCPLSGILFNLALNDTLKRVQGPEEEKKILAFADDLVLLAKNREQLQDLLDCTWQSLQTIHLEVNPAKCASLHLSGSTPVGSRPSPFTIGDCDIKTLEDGEFTKYLGKPVGFRLAKDCSSINDALSNATKISASKLSPWQKLDALKSFFFPSLNFAMRTAQFPKSDWLKVQQATTREIKDIMSLPSRASVAYIFGERAQGGCGVPEATRDSDFYLIDTAFKLLTSRDEEILVKALGQLIKTTRHRLKAEPSNDDLASFLSGSMEGKFDVTINAIQNTWTLARSASRRQSVTWSFAENQPSVSINGMTVTGTYRKKLLKTLHKASRQSHIDKLLSMRSQGKAMECVAAHPASSHFMSTGKFTRFADWRFVHPARLNLLPVNGAKQWTDATSKRCRRCGADNETLPHVVNHCKIHSAAWTKRHNAIQERIRKAVAFRGQVMSVNRAVGDTRLRPDIVATIDGKVYIIDITIPFENRLSAFQEASNRKINKYQPIITHFKNQGVKEVFIIPIIVGSLGAWDVNNDDFLRLVATKSYLSLLRKLCVSDSTRWSRDIYIEHMTGHRQFDNEAIV

SEQ ID NO: 4992 - protein, 992 aa, Trichonephila clavata
MWELVPHQGWPRQPFVGPQKRSHQAKRNSGKSTTPTRLKKIQRKARIQQHAIGEPAAAPLAAPMPSANLAIMPPVEVEPLPLIDLPEGRVLSSFVEPLNSFLTHDDLPGAIGDFFNIIDDIVAVVRDHFRIRPIEGPTNNEIKPRRRELDLLDPQAVQKCYGWNRRKFVRHLTGENSDRCKIPTIELTNHFSTTWDLPTEAPNLAAFDPPDRPPVVHAFTPKFVASCLQSAENSAPGPDGIMYRQWREVDPGCKILCAVFNVCLRLCKVPPSWKISSTILIHKSGDHDDVTNWRPIALSNTLYKLFTKCMTRKLAEWCEDHEVFSNAQKGFTPYDGVIEHNFLLSQHFENARAGHSESLAAWIDISNAFGSIPHDVILHALRTQGVDHDFVSLVADIYHEATTCLLTEEGPSPPISIRRGVKQGCPLSGILFNLALNDTLKRVQGPEEEKKILAFADDLVLLAKNREQLQDLLDCTWQSLQTIHLEVNPAKCASLHLSGSTPVGSRPSPFTIGDCDIKTLEDGEFTKYLGKPVGFRLAKDCSSINDALSNATKISASKLSPWQKLDALKSFFFPSLNFAMRTAQFPKSDWLKVQQATTREIKDIISLPSRASVAYIFGERAQGGCGVPEATRDSDFYLIDTAFKLLTSRDEEILVKALGQLIKTTRHRLKAEPSNDDLASFLSGSMEGKFDVTINAIQNTWTLARSASRRQSVTWSFAENQPSVSINGMTVTGTYRKKLLKTLHKASRQSHIDKLLSMRSQGKAMECVAAHPASSHFMSTGKFTRFADWRFVHPARLNLLPVNGAKQWTDATSKRCRRCGADNETLPHVVNHCKIHSAAWTKRHNAIQERIRKAVAFRGQVMSVNRAVGDTRLRPDIVATIDGKVYIIDITIPFENRLSAFQEASNRKINKYQPIITHFKNQGVKEVFIIPIIVGSLGAWDVNNDDFLRLVATKSYLSLLRKLCVSDSTRWSRDIYIEHMTGHRQFDNEAIV

SEQ ID NO: 4993 - protein, 1006 aa, Trichonephila clavata
MVPQETPSAWDCRECGNSFPTKVGLDNHLLAHKKEAIKRKEIPVKVPPPTRLKKIQRKARIQQHAIGEPAAAPLAAPMPSANLAIMPPVEVEPLPLIDLPEGRVLSSFVEPLNSFLTHDDLPGAIGDFFNIIDDIVAVVRDHFRIRPIEGPTNNEIKPRRRELDLLDPQAVQKCYAWNRRKFVRHLTGENSDRCKIPTIELTNHFSTTWDLPTEAPNLAAFDPPDRPPVVHAFTPKFVASCLQSAENSAPGPDGIMYRQWREVDPGCKILCAVFNVCLRLCKVPPSWKISSTILIHKSGDHDDVTNWRPIALSNTLYKLFTKCMTRKLAEWCEDHEVFSNAQKGFTPYDGVIEHNFLLSQHFENARAGHSESLAAWIDISNAFGSIPHDVILHALRTQGVDHDFVSLVADIYHEATTCLLTEEGPSPPISIRRGVKQGCPLSGILFNLALNDTLKRVQGPEEEKKILAFADDLVLLAKNREQLQDLLDCTWQSLQTIHLEVNPAKCASLHLSGSTPVGSRPSPFTIGDCDIKTLEDGEFTKYLGKPVGFRLAKDCSSINDALSNATKISASKLSPWQKLDALKSFFFPSLNFAMRTAQFPKSDWLKVQQATTREIKDIMSLPSRASVAYIFGERAQGGCGVPEATRDSDFYLIDTAFKLLTSRDEEILVKALGQLIKTTRHRLKAEPSNDDLASFLSGSMEGKFDVTINAIQNTWTLARSASRRQSVTWSFAENQPSVSINGMTVTGTYRKKLLKTLHKASRQSHIDKLLSMRSQGKAMECVAAHPASSHFMSTGKFTRFADWRFVHPARLNLLPVNGAKQWTDATSKRCRRCGADNETLPHVVNHCKIHSAAWTKRHNAIQERIRKAVAFRGQVMSVNRSVGDTRLRPDIVATIDGKVYIIDITIPFENRLSAFQEASNRKINKYQPIITHFKNQGVKEVFIIPIIVGSLGAWDVNNDDFLRLVATKSYLSLLRKLCVSDSTRWSRDIYIEHMTGHRQFDNEAIV

SEQ ID NO: 4994 - protein, 992 aa, Trichonephila clavata
MWQLVPHQGWPRQPFVGPQKRSHQAKRNSGKSTTPTRLKKIKRKARIQQHAIGEPAAAPLAAPMPSANLAIMPPVEVEPLPLIDLPEGRVLSSFVEPLNSFLTHDDLPGAIGDFFNIIDDIVAVVRDHFRIRPIEGPTNNEIKPRRRELDLLDPQAVQKCYAWNRRKFVRHLTGENSDRCKIPTIELTNHFSTTWDLPTEAPNLAAFDPPDRPPVVHAFTPKFVASCLQSAENSAPGPDGIMYRQWREVDPGCKILCAVFNVCLRLCKVPPSWKISSTILIHKSGDHDNVTNWRPIALSNTLYKLFTKCMTRKLAEWCEDHEVFSNAQKGFTPYDGVIEHNFLLSQHFENARAGHSESLAAWIDISNAFGSIPHDVILHALRTQGVDHDFVSLVADIYHEATTCLLTEEGPSPPISIRRGVKQGCPLSGILFNLALNDTLKRVQGPEEEKKILAFADDLVLLAKNREQLQDLLDCTWQSLQTIHLEVNPAKCASLHLSGSTPVGSRPSPFTIGDCDIKTLEDGEFTKYLGKPVGFRLAKDCSSINDALSNATKISASKLSPWQKLDALKSFFFPSLNFAMRTAQFPKSDWLKVQQATTREIKDIMSLPSRASVAYIFGERAQGGCGVPEATRDSDFYLIDTAFKLLTSRDEEILVKALGQLIKTTRHRLKAEPSNDDLASFLSGSMEGKFNVTINAIQNTWTLARSASRRQSVTWSFAENQPSVSIDGMTVTGTYRKKLLKTLHKASRQSHIDKLLSMRSQGKAMECVAAHPASSHFMSTGKFTRFADWRFVHPARLNLLPVNGAKQWTDATSKRCRRCGADNETLPHVVNHCKIHSAAWTKRHNAIQERIRKAVAFRGQVMSVNRAVGDTRLRPDIVAAIDGKVYIIDITIPFENRLSAFQEASNRKINKYQPIITHFKNQGVKEVFIIPIIVGSLGAWDVNNDDFLRLVATKSYLSLLRKLCVSDSTRWSRDIYIEHMTGHRQFDNEAIV

SEQ ID NO: 4995 - protein, 950 aa, Trichonephila clavata
MWELVPHQGWPRQPFVGPQKRSHQAKRNSGKSTTPHQGQEDQAESPHSAACYRGTSSSPLAAPMPSANLAIMPPVEVEPLPLIDLPEGRVLSSFVEPLNSFLTHDDLPGAIGDFFNIIDDIVAVVRDHFRIRPIEGPTNNEIKPRRRELDLLDPQAVQKCYGWNRRKFVRHLTGENSDRCKIPTIELTNHFSTTWDLPTEAPNLAAFDPPDRPPVVHAFTPKFVASCLQSAENSAPGPDGIMYRQWREVDPGCKILCAVFNVCLRLCKVPPSWKISSTILIHKSGDHDNVTNWRPIALSNTLYKLFTKCMTRKLAEWCEDHEVFSNAQKGFTPYDGVIEHNFLLSQHFENARAGHSESLAAWIDISNAFGSIPHDVILHALRTQGVDHDFVSLVADIYHEATTCLLTEEGPSPPISIRRGVKQGCPLSGILFNLALNDTLKRVQGPEEEKKILAFADDLVLLAKNREQLQDLLDCTWQSLQTIHLEVNPAKCASLHLSGSTPVGSRPSPFTIGDCDIKTLEDGEFTKYLGKPVGFRLAKDCSSINDALSNATKISASKLSPWQKLDALKSFFFPSLNFAMRTAQFPKSDWLKVQQATTREIKDIMSLPSRASVAYIFGERAQGGCGVPEATRDSDFYLIDTAFKLLTSRDEEILVKALGQLIKTTRHRLKAEPSNDDLASFLSGSMEGKFNVTINAIQNTWTLARSASRRQSVTWSFAENQPSVSIDGMTVTGTYRKKLLKTLHKASRQSHIDKLLSMRSQGKAMECVAAHPASSHFMSTGKFTRFADWRFVHPARLNLLPVNGAKQWTDATSKRCRRCGADNETLPHVVNHCKIHSAAWTKRHNAIQERIRKAVAFRGQVMSVNRAVGDTRLRPDIVAAIDGKVYIIDITIPFENRLSAFQEASNRKINKYQPIITHFKNQGVKEVFIIPIIVGSLGHGMSIMTTSYDS

SEQ ID NO: 4996 - protein, 1006 aa, Trichonephila clavata
MAPQETPSAWDCRECGNSFPTKVGLDNHLLAHKKEAIKRKEIPVKVPPSTRIKKIKRKARIQQHAIGEPAAAPLAAPMPSANLAIMPPVEVEPLPLIDLPEGRVLSSFVEPLNSFLTHDDLPGAIGDFFNIIDDIVAVVRDHFRIRPIEGPTNNEIKPRRRELDLLDPQAVQKCYGWNRRKFVRHLTGENSDRCKIPTIELTNHFSTTWDLPTEAPNLAAFDPPDRPPVVHAFTPKFVASCLQSAENSAPGPDGIMYRQWREVDPGCKILCAVFNVCLRLCKVPPSWKISSTILIHKSGDHDNVTNWRPIALSNTLYKLFTKCMTRKLAEWCEDHEVFSNAQKGFTPYDGVIEHNFLLSQHFENARAGHSESLAAWIDISNAFGSIPHDVILHALRTQGVDHDFVSLVADIYHEATTCLLTEEGPSPPISIRRGVKQGCPLSGILFNLALNDTLKRVQGPEEEKKILAFADDLVLLAKNREQLQDLLDCTWQSLQTIHLEVNPAKCASLHLSGSTPVGSRPSPFTIGDCDIKTLEDGEFTKYLGKPVGFRLAKDCSSINDALSNATKISASKLSPWQKLDALKSFFFPSLNFAMRTAQFPKSDWLKVQQATTREIKDIMSLPSRASVAYIFGERAQGGCGVPEATRDSDFYLIDTAFKLLTSRDEEILVKALGQLIKTTRHRLKAEPSNDDLASFLSGSMEGKFDVTINAIQNTWTLARSASRRQSVTWSFAENQPSVSINGMTVTGTYRKKLLKTLHKASRQSHIDKLLSMRSQGKAMECVAAHPASSHFMSTGKFTRFADWRFVHPARLNLLPVNGAKQWTDATSKRCRRCGADNETLPHVVNHCKIHSAAWTKRHNAIQERIRKAVAFRGQVMSVNRAVGDTRLRPDIVATIDGKVYIIDITIPFENRLSAFQEASNRKINKYQPIITHFKNQGVKEVFIIPIIVGSLGAWDVNNDDFLRLVATKSYLSLLRKLCVSDSTRWSRDIYIEHMTGHRQFDNEAIV

SEQ ID NO: 4997 - protein, 957 aa, Amphibalanus amphitrite
MARKELELEREGTRFMNVALLEEFPHRTLEAIKGRRKQTQYRRIREGLRRVSPEPQPEQVRPSPNRQRHSQRNNDNPPTSPDRRNVRRTYNDEIQEVLQGLPKAPQGASWSEDILDEAIDAAADPSRLRELLDKHAAAIAGKQRRRRKPKRRKQTSETGETRKAKKRSARHRQYIWVQRLYRKNRQKGAAMILNGNWADAHEATDIPVEEKESFWAGLVSRPSADDDRPVNPVDKPEAHKIAEPVTTDEIIRATRGVKLSSAPGPDLLTVRLLRAMPVRMLRKVFNLWLLAEHVPESLRHARTTLIPKVAKPNSPAQYRPISVTSVVLRLFTKILASRCSKERPLDPLQRAFIQADGCAENVSILDALLWRARARLQPLALASVDLAKAFDSVSHHSITRAMKRLRIPEKVINTVVSFYTKATTEIRRDTKIQVNNGVRQGDPLSPYLFNAVLDEAIQKLKEDAGDEADPPPILAFADDAIILARTPRMLQHRIRIFAETLAPTGLKPNAAKCHSLTIKVDGKHKKTVVDNNAKYTIAGQPIPTMGPTDSIKYLGVEISASGVLMSAGKRLHKQLTETDRAPLKPQQRLFILKRHIIPGMTHTLVLGKTNITKLKAMDITIRTMTRKWLHIPKDTPVGFFHAALEDGGLDIPALVDTIPRLVKNRLAKLNDSDHPNIKLVTQSGYLSHRGGVASGAMTADENRRKRAQQLLSSVDGRGLHAAKNCPASNRWIDQGGHVQTGTGFVGSILVRGNLLSTAVRRSRGRGGGTPPNCDAGCGKRESLAHISQTCIRTHGGRVRRHDKIVNYTAEILRKQHWKVLEEPRIQTAEGLRKPDIVASKGPVTKVIDAQVLADNANLETQHKKKADFYDTDDIKTWIKTETTNQNQAISYTTITLNWRGNWSRTSAADLQELGMHSKNLTKISTMTLEETAWMHRAFRRTTVGRRGRGVASDAHGR

SEQ ID NO: 4998 - protein, 1591 aa, Amphibalanus amphitrite
MNSSSSQNESLDTQVSHTPRCCKCVTNPCKTCRCAKQNKRCTSCRFGDGCSNSAANDPPTSDIANEIASLKQRCRLLPFIPKGARIAVADALAHCINDAVTQGTDLAWRKLMRFGYLALTIRDNKGSKKRLSLATQVRNNLSQDDFNPPRHASKRTAQNKRNRPPSTMALLRRVSEKITDGDLRGALRLLASDDSFAVPTDDVISKMQEKHPEPPEDIRPVSPPDEGTASLTATEADVLKAINSFPPSSSAGLDGVRPAHLRSLISRTTAEAGARLLTALTALVNLALCGRLPEFVLPAFFGASLIALRKKDGGLRPIAVGSVYRRITAKVAAHSVSGRIGAELRPVQLGVATRNGCEAAVHAVRTYIQQSEPSEDRILVKLDVSNAFNSVRRDSMLEAVRARAPDIYSLVWQGYSQSAPLFIGESQVLSKTGIQQGDPLSSLLFSLAIDTATKAADADINVWYLDDGTLAGPLPKVLASIERVKENFEKAGLRFNGAKCECTFLGKQGAQQKQNILEDLHGILPDAHEVCLDDLELLGAPMNDSQTRHRLLLGKQEIEKLVRRLRSMEEPHQSFFLLKNYVSMPRLLYLLRSSPAHRHIDLLSGIDEVVRKGLEAITNVQMRDDAWRQATLPVSLGGLGVRMTSDLALPAHLASHVASAAMVAAINETTSADFNETTRRLISEWQNRTGLTPPDDEKRHLQREWDRSEAKSISTHLLDSSTDKVCQARLRAAAQPHSGAWLNAYPSPSVGTLLEPDTLRTAIALRIGAELCAPHRCRCGADIDERGLHGLSCQLSAGRLPRHAELNNIIKRGLAAAGLPAVLEPAGLDRGDGRRPDGITTFPYSEGKCLIWDATCVDTFSASSVSACASRASAAATAAEGRKRRRYADLSRRYLFQTVAVETSGAFGTDSLHFLRELGQRIVQTTGDRRDMEHLMQRISVAVARGNAAAVRLAAADDTSTLRRVHAQPSCTAESSPCSQEPDSDENAGRQASDVDSSHSLSKSSQGGSTLGTMHPSEAKGSRLSRSKERAPSCPDRADSENTKLLQVPGVGPRRFYGDSAEAGGSLSAASPQMRPPPSLRKSGEGDKNPQLHCGKAQAASRGLQLVPAIRPLDSDNDGKDPLYIGLPNYGNSCYQNATLQSLLGLRPFLSEMISLISGLDESGQCRTLRAVAKLMVLRQKALSKSVSSHLNDLRDVFADIDPAFRGTEMQDANEFLLRLLDTMKEEIDARRPTDNPVRDNFQYQIVESYMCTKCHETALKRQENICWFVRVPRRQGTETPTLQDALRMCMRPDRRERLCQHCQHDECRVTTKISQLPRTLILQLNRYVFLGEESKKIRANVGIPKFLSLNEYVADDVTRPPEWKCRKPSLCTLSDFEESEAPRSGPSPPPAACGPSSVPTASAGPPESAAAGSPVSAGTAAPARPSSPATGAEPLPPPPPAQDELVVLDADSESKPARTREDEDGELQEAIVRSLGKGAPADTSEQAHLSDFCVEDGQSLCSVDLAGGFTYRLVGVVSHYGGATHSGHYVSDVYSVGRDRWYHYNDSRVSCVDEADIMGEGHQRNGYIFFYLHKDLYNQVVSAEGAGGAL

SEQ ID NO: 4999 - protein, 1591 aa, Amphibalanus amphitrite
MNSSSSQNESLDTQVSHTPRCCKCVTNPCKTCRCAKQNKRCTSCRFGDGCSNSAANDPPTSDIANEIASLKQRCRLLPFIPKGARIAVADALAHCINDAVTQGTDLAWRKLMRFGYLALTIRDNKGSKKRLSLATQVRNNLSQDDFNPPRHASKRTAQNKRNRPPSTMALLRRVSEKITDGDLRGALRLLASDDSFAVPTDDVISKMQEKHPEPPEDIRPISPPDEGTASLTATEADVLKAINSFPPSSSAGLDGVRPAHLRSLISRTTAEAGARLLTALTALVNLALCGRLPEFVLPAFFGASLIALRKKDGGLRPIAVGSVYRRITAKVAAHSVSGRIGAELRPVQLGVATRNGCEAAVHAVRTYIQQSEPSEDRILVKLDVSNAFNSVRRDSMLEAVRARAPDIYSLVWQGYSQSAPLFIGESQVLSKTGIQQGDPLSSLLFSLAIDTATKAADADINVWYLDDGTLAGPLPKVLASIERVKENFEKAGLRFNGAKCECTFLGKQGAQQKQNILDDLHGILPDAHEVCLDDLELLGAPMNDSQTRHRLLLGKQEIEKLVRRLRSMEEPHQSFFLLKNYVSMPRLLYLLRSSPAHRHIDLLSGIDEVVRKGLEAITNVQMRDDAWRQATLPVSLGGLGVRMTSDLALPAHLASHVASAAMVAAINATTSADFNETTRRLISEWQNRTGLTPPDDEKRHLQREWDRSEAKSISTHLLDSSTDKVCQARLRAAGQPHSGAWLNAYPSPSVGTLIEPDTLRTAIALRIGAELCAPHRCRCGADIDERGLHGLSCQLSAGRLPRHAELNNIIKRGLAAAGLPAVLEPAGLDRGDGRRPDGITTFPYSEGKCLIWDATCVDTFSASSVSACASRASAAATAAEGRKRRRYADLSRRYLFQTVAVETSGAFGTDSLHFLRELGQRIVQTTGDRRDMEHLMQRISVAVARGNAAAVRLAAADDTSTLRRVHAQPSCTAESSPCSQEPDSDENAGRQASDVDSSHSLSKSSQGGSTLGTMHPSEAKGSRLSRSKERAPSCPDRADRENTKLLQVAGVGPRRFYGDSAEAGGSLSAASPQMRPPPSLRKSGEGDKNPQLHCGKAQAASRGLQLVPAIRPLDSDNDGKDPLYIGLPNYGNSCYQNATLQSLLGLRPFLSEMISLISGLDESGQCRTLRAVAKLMVLRQKALSKSVSSHLNDLRDVFADIDPAFRGTEMQDANEFLLRLLDTMKGEIDARRPTDNPVRDNFQYQVVESYMCTKCHETALKRQENICWFVRVPRRQGTETPTLQDALRMCMRPDRRERLCQHCQHDECRVTTKISQLPRTLILQLNRYVFLGGESKKIRANVGIPKFLSLNEYVADDVTRPPEWKCRKPSLCTLSDFEESEAPRSGPSPPPAACGPSSVPTASAGPPESAAAGSPVSAGTAAPARPSSPATGAEPLPPPPPAQDELVVLDADSESKPARTREDEDGELQEAIVRLLGKGAPADTSEQAHLSDFCVEDGQSLCSVDLAGDFTYRLVGIVSHYGGATHSGHYVSDVYSVGRDRWYHYNDSRVSCVDEADIMGEGHQRNGYIFFYLHKDLYNQVVSAEGAGGAL

SEQ ID NO: 5000 - protein, 1591 aa, Amphibalanus amphitrite
MNSSSSQNESLDTQVSHTPRCCKCVTNPCKTCRCAKQNKRCTSCRFGDGCSNSAANDPPTSDIANEIASLKQRCRLLPFIPKGARIAVADALAHCINDAVTQGTDLAWRKLMRFGYLALTIRDNKGSKKRLSLATQVRNNLSQDDFNPPRHASKRTAQNKRNRPPSTMALLRRVSEKITDGDLRGALRLLASDDSFAVPTDDVISKMQEKHPEPPEDIRPVSPPDEGTASLTATEADVLKAINSFPPSSSAGLDGVRPAHLRSLISRTTAEAGARLLTALTALVNLALCGRLPEFVLPAFFGASLIALRKKDGGLRPIAVGSVYRRITAKVAAHSVSGRIGAELRPVQLGVATRNGCEAAVHAVRTYIQQSEPSEDRILVKLDVSNAFNSVRRDSMLEAVRARAPDIYSLVWQGYSQSAPLFIGESQVLSKTGIQQGDPLSSLLFSLAIDTATKAADADINVWYLDDGTLAGPLPKVLTSIERVKENFEKAGLRFNGAKCECTFLGKQGAQQKQNILEDLHGILPDAHEVCLDDLELLGAPMNDSQTRHRLLLGKQEIEKLVRRLRSMEEPHQSFFLLKNYVSMPRLLYLLRSSPAHRHIDLLSGIDEVVRKGLEAITNVQMRDDAWRQATLPVSLGGLGVRMTSDLALPAHLASHVASAAMVAAINETTSADFNETTRRLISEWQNRTGLTPPDDEKRHLQREWDRSEAKSISTHLLDSSTDKVCQARLRAAGQPHSGAWLNAYPSPSVGTLIEPDTLRTAIALRIGAELCAPHRCRCGADIDERGLHGLSCQLSAGRLPRHAELNNIIKRGLAAAGLPAVLEPAGLDRGDGRRPDGITTFPYSEGKCLIWDATCVDTFSASSVSACASRASAAATAAEGRKRRRYADLSRRYLFQTVAVETSGAFGTDSLHFLRELGQRIVQTTGDRRDMEHLMQRISVAVARGNAAAVRLAAADDTSTLRRVHAQPSCTAESSPCSQEPDSDENAGRQASDVDSSHSLSKSSQGGSTLGTMHPSEAKGSRLSRSKERAPSCPDRADRENTKLLQVAGVGPRRFYGDSAEAGGSLSAASPQMRPPPSLRKSGEGDKNPQLHCGKAQAASRGLQLVPAIRPLDSDNDGKDPLYIGLPNYGNSCYQNATLQSLLGLRPFLSEMISLISGLDKSGQCRTLRAVAKLMVLRQKALSKSVSSHLNDLRDVFADIDPAFRGTEMQDANEFLLRLLDTMKEEIDARRPTDNPVRDNFQYQIVESYMCTKCHETALKRQENICWFVRVPRRQGTETPTLQDALRMCMRPDRRERLCQHCQHDECRVTTKISQLPRTLILQLNRYVFLGEESKKIRANVGIPKFLSLNEYVADDVTRPPEWKCRKPSLCTLSDFEESEAPRSGPSPPPAACGPSSVPTASAGPPESAAAGSPVSAGTAAPARPSSPATGAEPLPPPPPAQDELVVLDADSESKPARTREDEDGELQEAIVRSLGKGAPADTSEQAHFSDFCVEDSQSLCSVDLAGDFTYRLVGVVSHYGGATHSGHYVSDVYSVGRDRWYHYNDSRVSCVDEADIMGEGHQRNGYIFFYLHKDLYNQVVSAEGAGGAL

SEQ ID NO: 5001 - protein, 1591 aa, Amphibalanus amphitrite
MNSSSSQNESLDTPVSHTPRCCKCVTNPCKTCRCAKQNKRCTSCRFGDGCSNSAANDPPTSDIANEIASLKQRCRLLPFIPKGARIAVADALAHCINDAVTQGTDLAWRKLMRFGYLALTIRDNKGSKKRLSLATQVRNNLSQDDFNPPRHASKRTAQNKRNRPPSTMALLRRVSEKITDGDLRGALRLLASDDSFAVPTDDVISKMQEKHPEPPEDIRPVSPPDEGTASLTATEADVLKAINSFPPSSSAGLDGVRPAHLRSLISRTTAEAGARLLTALTALVNLALCGRLPEFVLPAFFGASLIALRKKDGGLRPIAVGSVYRRITAKVAAHSVSGRIGAELRPVQLGVATRNGCEAAVHAVRTYIQQSEPSEDRILVKLDVSNAFNSVRRDSMLEAVRARAPDIYSLVWQGYSQSAPLFIGESQVLSKTGIQQGDPLSSLLFSLAIDTATKAADADINVWYLDDGTLAGPLPKVLASIERVKENFEKAGLRFNGAKCECTFLGKQGAQQKQNILDDLHGILPDAHEVCLDDLELLGAPMNDSQTRHRLLLGKQEIEKLVRRLRSMEEPHQSFFLLKNYVSMPRLLYLLRSSPAHRHIDLLSGIDEVVRKGLEAITNVQMRDDAWRQATLPVSLGGLGVRMTSDLALPAHLASHVASAAMVAAINATTSADFNETTRRLINEWQNRTGLTPPDDEKRHLQREWDRSEAKSISTHLLDSSTDKVCQARLRAAGQPHSGAWLNAYPSPSVGTLIEPDTLRTAIALRIGAELCAPHRCRCGADIDERGLHGLSCQLSAGRLPRHAELNNIIKRGLAAAGLPAVLEPAGLDRGDGRRPDGITTFPYSEGKCLIWDATCVDTFSASSVSACASRASAAATAAEGRKRRRYADLSRRYLFQTVAVETSGAFGTDSLHFLRELGQRIVQTTGDRRDMEHLMQRISVAVARGNAAAVRLAAADDTSTLRRVHAQPSCTAESSPCSQEPDSDENAGRQASDVDSSHSLSKSSQGGSTLGTMHPSEAKGSRLSRSKERAPSCPDRADRENTKLLQVAGVGPRRFYGDSAEAGGSLSAASPQMRPPPSLRKSGEGDKNPQLHCGKAQAASRGLQLVPAIRPLDSDNDGKDPLYIGLPNYGNSCYQNATLQSLLGLRPFLSEMISLISGLDESGQCRTLRAVAKLMVLRQKALSKSVSSHLNDLRDVFADIDPAFRGTEMQDANEFLLRLLDTMKGEIDARRPTDNPVRDNFQYQVVESYMCTKCHETALKRQENICWFVRVPRRQGTETPTLQDALRMCMRPDRRERLCQHCQHDECRVTTKISQLPRTLILQLNRYVFLGGESKKISANVGIPKFLSLNEYVADDVTRPPEWKCRKPSLCTLSDFEESEAPRSGPSPPPAACGPSSVPTASAGPPESAAAGSPVSAGTAAPARPSSPATGAEPLPPPPPAQDELVVLDADSESKPARTREDEDGELQEAIVRSLGKGAPADTSEQAHLSDFCVEDGQSLCSVDLAGDFTYRLVGIVSHYGGATHSGHYVSDVYSVGRDRWYHYNDSRVSCVDEADIMGEGHQRNGYIFFYLHKDLYNQVVSAEGAGGAL

SEQ ID NO: 5002 - protein, 1591 aa, Amphibalanus amphitrite
MNSSSSQNESLDTQVSHTPRCCKCVTNPCKTCRCAKQNKRCTSCRFGDGCSNSAANDPPTSDIANEIASLKQRCRLLPFIPKGARIAVADALAHCINDAVTQGTDLAWRKLMRFGYLALTIRDNKGSKKRLSLATQVRNNLSQDDFNPPRHASKRTAQNKRNRPPSTMALLRRVSEKITDGDLRGALRLLASDDSFAVPTDDVISKMQEKHPEPPEDIRPISPPDEGTASLTATEADVLKAINSFPPSSSAGLDGVRPAHLRSLISRTTAEAGARLLTALTALVNLALCGRLPEFVLPAFFGASLIALRKKDGGLRPIAVGSVYRRITAKVAAHSVSGRIGAELRPVQLGVATRNGCEAAVHAVRTYIQQSEPSEDRILVKLDVSNAFNSVRRDSMLEAVRARAPDIYSLVWQGYSQSAPLFIGESQVLSKTGIQQGDPLSSLLFSLAIDTATKAADADINVWYLDDGTLAGPLPKVLASIERVKENFEKAGLRFNGAKCECTFLGKQGAQQKQNILDDLHGILPDAHEVCLDDLELLGAPMNDSQTRHRLLLGKQEIEKLVRRLRSMEEPHQSFFLLKNYVSMPRLLYLLRSSPAHRHIDLLSGIDEVVRKGLEAITNVQMRDDAWRQATLPVSLGGLGVRMTSDLALPAHLASHVASAAMVAAINATTSADFNETTRRLISEWQNRTGLTPPDDEKRHLQREWDRSEAKSISTHLLDSSTDKVCQARLRAAGQPHSGAWLNAYPSPSVGTLIEPDTLRTAIALRIGAELCAPHRCRCGADIDERGLHGLSCQLSAGRLPRHAELNNIIKRGLAAAGLPAVLEPAGLDRGDGRRPDGITTFPYSEGKCLIWDATCVDTFSASSVSACASRASAAATAAEGRKRRRYADLSRRYLFQTVAVETSGAFGTDSLHFLRELGQRIVQTTGDRRDMEHLMQRISVAVARGNAAAVRLAAADDTSTLRRVHAQPSCTAESSPCSQEPDSDENAGRQASDVDSSHSLSKSSQGGSTLGTMHPSEAKGSRLSRSKERAPSCPDRADRENTKLLQVAGVGPRRFYGDSAEAGGSLSAASPQMRPPPSLRKSGEGDKNPQLHCGKAQAASRGLQLVPAIRPLDSDNDGKDPLYIGLPNYGNSCYQNATLQSLLGLRPFLSEMISLISGLDESGQCRTLRAVAKLMVLRQKALSKSVSSHLNDLRDVFADIDPAFRGTEMQDANEFLLRLLDTMKGEIDARRPTDNPVRDNFQYQVVESYMCTKCHETALKRQENICWFVRVPRRQGTETPTLQDALRMCMRPDRRERLCQHCQHDECRVTTKISQLPRTLILQLNRYVFLGGESKKIRANVGIPKFLSLNEYVADDVTRPPEWKCRKPSLCTLSDFEESEAPRSGPSPPPAACGPSSVPTASAGPPESAAAGSPVSAGTAAPARPSSPATGAEPLPPPPPAQDELVVLDADSESKPARTREDEDGELQEAIVRSLGKGAPADTSEQAHLSDFCVEDGQSLCSVDLAGDFTYRLVGIVSHYGGATHSGHYVSDVYSVGRDRWYHYNDSRVSCVDEADIMGEGHLRNGYIFFYLHKDLYNQVVSAEGAGGAL

SEQ ID NO: 5003 - protein, 1281 aa, Metopolophium dirhodum
MADHTGSSQVAGPSLRADPVPPPDRDESDSDSVSDRGSTADGPIVSRRQPALEGHTLVFWLPLPTTVECPHADCSAKFRAKVWTSAKQSITRHLRELHAEAEDTSVRCVGCGIVLGVRPGAHKCQVPIEDAADTADRFTCTVAGCPESFPSKQGLTNHLRNHRRIDALAAAAVPLPVPATRQRLRSDRNPRPARGGDARVPEAVDVPRTPAGTRPPATGGTSPLPPTTSTEPRIPAGNIPPDTGGSVSTAGAASGGAPRTPAGDRPPDTGGAPLSPLPTLLPASTRRATPVRPRGVGDRLSLPLPSLPPPRRESPRNEGYNVVIASPELWRPRIPPPTSDSGSDSSGLAPEDDDLLDVPVPELDAAAEVPDDGDHILQPDDTTPLHAFRERFADFSRGPCTEEVWSRFVALVDEMTAEAAVIVKLPVRPEGRSSGNRTAIDPTDAKGIQSLYRRNRRRAVRLILSGEGQSCEVPVPAVEEHFQRTWAPSACDPSIYARVDGRDPVPMGPFQYADVSKRLGKFENTAPGDDGLTYRHWKRLDPECTVLTGILNTCLRFKRVPPAWKKAVTILIYKKGAKEDLTNWRPISLSRTLYKLYVGCVAGRLTEWLVANNVLSPCQKGFLPADGAFEHVHTLNRVLEKARTHAADKCVAWLDVSNAFGAIPHPALEAAIQASGAGEDLLLAVRDIYSGATSSVSVAGGMTGDIPVRSGIKQGCPLSGLLFIMAIDPVVARLQGASADHRVLAFADDLCLIADSPGDLQSAIDAARVGLGMIGLKLNANKCASLHLSGKRPVGVRDTQFRLLDSPLRPLVEGEAATFLGAQVGFNIVPPLSTLAEITEIGLKISRSKLAPWQRIDALKTFFYPSTVHLQRMGTFPKGDWARVDKVLRPEIKATLYLPQEASGEYIYGSTRRGCCGIRLLAEDADIAAVDSAFKLVSSPDLRVAEDAAEHVEEVTRRRICKVPTIHEVASYLSGEDEGVFRESRGTGVSSVWSRARNASKRLGVKWSLDGAPAITHGGAVMGRKQRRAVMRTVRDTLRLGRSDALIAKPDQGRAVECAAAHAASTHFLKEGDFTRFADWRFVHRARLNLVPLNGSSSWRVGDRRCRRCGYTNESLAHVVDHCMRYTGLYMARHNSVVARIKKAASTRFEVLSENQALGDQGLRPDLVLKKGPNLYIVDVTVPFDNRLAAFEVAAAEKRTKYEELRAWLAARHGCEAVVVPFVVGALGSWDPANDVFLRKLCSRSYGTLFRKLCVSDAIAASRDVYIEHLSGVRQVRELPS

SEQ ID NO: 5004 - protein, 1147 aa, Aphis gossypii
MNGCSETFPSKQGLMNHARNHRRIDALEAAAVPLPAPLTRQRLRAGQNTRPVRGGDARVPLGDVPRILVGKRPPDTGGTVSPTSIAAGGVPRIPAGIIPPDTGGSPLSAAADVLSSVPGTGTSSVPRIPAGNRPDPDTGGPHLSPLPTMMPTAMRPATPRRPRGTGDRLSLPLPPTSPVRRESPRNEAYNIVVASPELWRPRVPSPAASSSSASSGVDDGNDDLVDTPLPDNLDGPEVLVDEALILQPDDTTPLHAFRERFTDLNKQPCSEAGWSRFVELVDEMTAEAAVIAKLPARPEGRNSGRGTAIDPNDAKEIQSLYKRNRRRAVRVILSGEGQSCEVAVPEVEKHFTRTWAPSTCDTSIFQRVDGRDPVPMGPFQCADVAKCLGKFENTAPGDDGLTYRHWKRLDPECTVLTEIVNACLRYKRVPLVWKRAVTVLIYKKGAREDLGNWRPISLSRTLYKLYVGCVANRLTEWLLTNKVLNPCQKGFLPADGAFEHVHTLNRVLEKARTHAADKCVAWLDVSNAFGAIPHPALEAAIEASGAGQEFLHAIRDIYTGATSTVSVAGGMTGNIPVLSGIKQGCPLSGLLFIMAIDPVVTLLQGASADHRVLAFADDLCLISDSPEELQLSIDAAHISLGMLGLSLNAAKCASLHLSGRRPVGVRDTRFNLNGSPLRPLAEGEAATFLGAQVGFNVVPPLSTLAEIIDIGLRIARSKLAPWQRMDALKTFFYPSTVHLQRLGTFPKTDWAKVDNILRSEIKATLYLPQEASGEYIYGSTKRGCCGVRLLAEDADIAAVDSAFKLITSPDQRVAADAADHVEEVAIRRIQKDPSVQEVASYLTREDEGVFRAARGTGVSSVWSRARNASKRLSIGWSLGGAPSITHEGTVMVSKHRRAVMRTIRNTLRLKRSDALIAKPDQGRAVECVAAHPASFHFLADGDFTRFAEWRFVHRARLNLVPLNGSSSWRAGDRRCRRCRYNTESLSHVVDHCMRYTALYMARHNAIVARVKKAASTKFEVLSENQVLGNQGLRPDLVLKKGPNIYIVDVTVPFDNRLEAFKVAATEKKVKYERLRTEMADRYGCSASVVPIIVGALGSWDPGNDPFMRILCSRSYASLMRKLCVSDTIAASRDIYIEHLSGVRQVRG

SEQ ID NO: 5005 - protein, 1087 aa, Aphis glycines
MGDVPRILVGNIPPDTGGTVSPTGIAAGGVPRIPAGNIPPDTGGSPLSAAADRLSSVPGTGTSSVPRIPAGNRPEPDTGGPPLSPLPAMMPTTRRPATPRRPRGTGDRLSLPLPPSSPLRRESPRNEAYNIVVASPELWRPRTPSPAPSSSSASSGVADGNDDVVDIPLPDTLDGPEVLVDDAIILQPDDTTPLHAFRERFAAFNKEPCSEAGWSRFVELVDEMTAEAAIIAKLPARREGRNSGRGTAIDPNDAKEIQSLYRRNRRRAVRVIVSGEGQSCEVAVPEVEEHFTRTWAPSTCDTSIFQRVDGRDPVPMGPFQCADVSKRLGKFENTAPGDDGLTYRHWKRLDPECTVLTEIINTCLRYKRVPPAWKRAVTVLIYKKGAREDLGNWRPISLSRTLYKLYVGCVANRLTEWLITNKVLSPCQKGFLPADGAFEHVHTLNRVLEKARTHAKDKCVAWLDVSNAFGAIPHPALEAAIEASGAGQEFLHAIRDIYTGATSTVSVAGGMTGNIPVLSGIKQGCPLSGLLFIMAIDPVVTLLQGASADHRVLAFADDLCLIADSPEELQLSIDAAHVSLGMLGLSLNAAKCASLHLSGRRPLGVRDTQFNLNGSPLRPLAEGEAATFLGAQVGFNVVPPLSTLAEIIDIGLRIARSKLAPWQRMDALKTFFYPSTVHLQRLGTFPKTDWAKVDNILRPEIKATLYLPQEASGEYIYGSTKRGCCGVRLLAEDADIAAVDSAFKLITSPDQRVAADAADHVEEVTRRRIQKDPSVQEVASYLTGEDEGVFRAARGTGVSSVWSRARNASKRLSVGWSLGGAPSITHGGTVMVSKHRRAVMRTIRNTLRLNRSDALIAKPDQGRAVECVAAHPASSHFLTDGDFTRFADWRFVHRARLNLVPLNGSSSWRAGDRRCRRCGYITESLSHVVDHCMRYTALYMARHNAIVARVKKAASTRFEVLSENQVLGNQGLRPDLVLKKGPNIYIVDVTVPFDNRLEAFRAAATEKKVKYEQLRVEMADQYGCTASVVPIIVGALGSWDPNNDPFMRVLCSRSYATLMRKLCVSDTVAASRDIYIEHLSGVRQVRG

SEQ ID NO: 5006 - protein, 867 aa, Metopolophium dirhodum
MTAEAAVIVKLPVRPEGRSSGNRTAIDPTDAKGIQSLYRRNRRRAVRLILSGEGQSCEVPVPAVEEHFRRTWAPSACDPSIYARVDGRDPVPMGPLQYADVSKRLGKFENTAPGDDGLTYRHWKRLDPECTVLTGILNTCLRFKRVPPAWKKAVTILIYKKGAKEDLTNWRPISLSRTLYKLYVGCVAGRLTEWLVANNVLSPCQKGFLPADGAFEHVHTLNRVLEKARTHAADKCVAWLDVSNAFGAIPHPALEAAIQASGAGEDLLLAVRDIYSGATSSVSVAGGMTGDIPVRSGIKQGCPLSGLLFIMAIDPVVARLQGASADHRVLAFADDLCLIADSPGDLQSAIDAARVGLGMIGLKLNANKCASLHLSGKRPVGVRDTQFRLLDSPLRPLVEGEAATFLGAQVGFNIVPPLSTLAEITEIGLKISRSKLAPWQRIDALKTFFYPSTVHLQRMGTFPKGDWARVDKVLRPEIKATLYLPQEASGEYIYGSTRRGCCGIRLLAEDADIAAVDSAFKLVSSPDLRVAEDAAEHVEEVTRRRICKVPTIHEVASYLSGEDEGVFRESRGTGVSSVWSRARNASKRLGVKWSLDGAPAITHGGAVMGRKQRRAVMRTVRDTLRLGRSDALIAKPDQGRAVECAAAHAASTHFLKEGDFTRFADWRFVHRARLNLVPLNGSSSWRVGDRRCRRCGYTNESLAHVVDHCMRYTGLYMARHNSVVARIKKAASARFEVLSENQALGDQGLRPDLVLKKGPNLYIVDVTVPFDNRLAAFEVAAAEKRTKYEELRAWLAARHGCEAVVVPFVVGALGSWDPANDVFLRKLCSRSYGTLFRKLCVSDAIAASRDIYIEHLSGVRQVRELPS

SEQ ID NO: 5007 - protein, 1281 aa, Metopolophium dirhodum
MADHTGSSQVAGPSLRADPVPPPDRDESDSDSVSDRGSTADGPIVSRRQPALEGHTLVFWLPLPTTVECPHADCSAKFRAKVWTSAKQSITRHLRELHAEAEDTSVRCVGCGIVLGVRPGAHKCQVPIEDAADTADRFTCTVAGCPESFPSKQGLTNHLRNHRRIDALAAAAVPLPVPATRQRLRSDRNPRPARGGDARVPEAVDVPRTPAGTRPPATGGTSPLPPTTSTEPRIPAGNIPPDTGGSVSTAGAASGGAPRTPAGDRPPDTGGAPLSPLPTLLPASTRRATPVRPRGVGDRLSLPLPSLPPPRRESPRNEGYNVVIASPELWRPRIPPPTSDSGSDSSGLAPEDDDLLDVPVPELDAAAEVPDDGDQILQPDDTTPLHAFRERFADFSRGPCTEEVWSRFVALVDEMTAEAAVIVKLPVRPEGRSSGNRTAIDPTDAKGIQSLYRRNRRRAVRLILSGEGQSCEVPVPAVEEHFRRTWAPSACDPSIYARVDGRDPVPMGPLQYADVSKRLGKFENTAPGDDGLTYRHWKRLDPECTVLTGILNTCLRFKRVPPAWKKAVTILIYKKGAKEDLTNWRPISLSRTLYKLYVGCVAGRLTEWLVANNVLSPCQKGFLPADGAFEHVHTLNRVLEKARTHAADKCVAWLDVSNAFGAIPHPALEAAIQASGAGEDLLLAVRDIYSGATSSVSVAGGMTGDIPVRSGIKQGCPLSGLLFIMAIDPVVARLQGASADHRVLAFADDLCLIADSPGDLQSAIDAARVGLGMIGLKLNANKCASLHLSGKRPVGVRDTQFRLLDSPLRPLVEGEAATFLGAQVGFNIVPPLSTLAEITEIGLKISRSKLAPWQRIDALKTFFYPSTVHLQRMGTFPKGDWARVDKVLRPEIKATLYLPQEASGEYIYGSTRRGCCGIRLLAEDADIAAVDSAFKLVSSPDLRVAEDAAEHVEEVTRRRICKVPTIHEVASYLSGEDEGVFRESRGTGVSSVWSRARNASKRLGVKWSLDGAPAITHGGAVMGRKQRRAVMRTVRDTLRLGRSDALIAKPDQGRAVECAAAHAASTHFLKEGDFTRFADWRFVHRARLNLVPLNGSSSWRVGDRRCRRCGYTNESLAHVVDHCMRYTGLYMARHNSVVARIKKAASARFEVLSENQALGDQGLRPDLVLKKGPNLYIVDVTVPFDNRLAAFEVAAAEKRTKYEELRAWLAARHGCEAVVVPFVVGALGSWDPANDVFLRKLCSRSYGTLFRKLCVSDAIAASRDIYIEHLSGVRQVRELPS

SEQ ID NO: 5008 - protein, 960 aa, Aphis craccivora
MYNIVVASPELWRPREPSPAADDSSASSGIAADDDDLLGAPPPELDAANEFVDEEAHILMPDDTTPLHAFRGQFAALRAEPCSEEVWSRFVALVDEMTAEAAVIVKLPVRSDGRSSGNRTAIDPGDAKAIQSLYRRNRRRAVRLILSGEGQSCEVAVPLVEEHFRRVWAPSTCDTDIFPQVDGRDPVPMGPFQCADVSKRLGKFENTAPGDDGLTYRHWKKLDPECTVLTEVVNMCLRYKRVPPAWKKAVTVLIYKKGAKEDLGNWRPISLSRTLYKLYVGCVANRLTAWLTTNRVLSQCQKGFLPADGAFEHVHTLNRVLEKARTHAADKCVAWLDVSNAFGAIPHPALEAAIQSSGAGADFLEAVRDIYDGASSSVSVAGGMTADIPVRSGIKQGCPLSGLLFIMAIDPVVALLQGESADHKVLAFADDLCLVANSTTELQVSIDAAHHGLSKLGLQLNAAKCASLHISGRRPVGVRDTRFLLQGSPLRPLAEGEAATFLGAQVGFNIVPPLSTLAEIIDIGLRIARSMLAPWQRIDALKTFFYPSTVHLQRLGVFPKTDWARVDSILRPEIKKTFYLPQEASGEYLYGSTKRGCCGIRVLAEDSDIAAVDSAFKLFTSPDQRVAEDAAEHAEEVTKRRISKEPSIHEVGAYLSGEDEGVFREARGTGVASVWSRARNASKRLNVKWSLDGAPSVTHEGTVMGRKQRRAVMRTIRDTLRLKRSDALIAKPDQGRAVECVAAHAASSHFLREGDFTRFADWRFVHRARLNLVPLNGSSSWRAGDRRCRRCGYNTESLSHVVDHCMRYTALYLARHNAIVTRIKKAASTKFEVLSENQALGDQGLRPDLVLKKGPNIYVVDVTVPFDNRMEAFKAAAAIKNEKYEQLRVDLAAQHRCDAVVVPFIVGALGSWDPANDGFMRVLCSRSYANLMRKLCVSETISITRDIYIEHLSGVRQVRP

SEQ ID NO: 5009 - protein, 1244 aa, Macrosiphum rosae
MRITTRQAAATHTGSSQIAGPSTRIDTTAAGRTSTGHDDSATTGRTPTDSTNSTPNPTERRATNIRTRLNAQVPVNSPSRVPIPICTPAAPPTINAAARKQPTISDGALYFYHPAPGTLKCPFDACHAEFRAETWTAAKQSVTRHVRSLHSFAPDAIFVDCTGCGIRLGARPGSHKCQHTIAEATVEPARFTCAVNGCGSSYPSKQGLANHTRNHQRRIAVTAAAVPLPIPATRQRSRLNPGPALHRGGDARRPVLTPRPPTINPPVRVTSPTVTSTAPSVTSPAANSPPPASPAFVWSASPDVNDHPSEFNIDELDPTGEADESDTGANATASTTDNIEEILLAPDDTTPVHKFLPQLHALARAPMTTTNWELFVSTMEDVTNEAACTAKIPARPEGGANKRSALDPGDAQGIQTLYRRNRRRAIRLIVSGEGEACNISVSDIQAHFSQVWAPSHCDTSIFPTVNGRTPVPVDAFTPIEVSKRLKKFENTAPGDDGLTYKHWRRLDPAGSLLTEVLNICLKYRKIPPSWKKAVTVLIYKKGDKGDPSNWRPISLCRTLYKLYAGCLAARLTEWLVSNSVLSPCQKGFLPSDGAFEHVHTLKRELEKARTGNSDKCVAWLDVSNAFGAIPHAALEAAIERSGAGGGLLEIVRDIYFGASSSVSVIGGKTDDIQVLSGIRQGCPLSGLLFILAIDPVVSSLQGADADHRVLAFADDLCLLANSAPDLQLAIESAQASLNRLGLSINAGKCASLHISGRTPVGVRDTTFFLQGTALKPLAEGDAASFLGAQVGFNMIPSLATIAEIIQLGLKIVRSKLAPWQRIDALKTFFYPAAVHLQRMGTFSKTDWKRVDDIMRPEIKSTLNVPQEASNEYLYGSTLQGCCGIILLAEDADIAAVDSAFKLLTSPDGRVAREAIEHVHKTSHRRIGRTPSIPEVGAYLSGSNDGVFREQRGGGVTSVWSRARNASGRLDIVWSLEGPPTIKTNDCTMRAKQRREVMRTIRESKRLTRSATLIEKPDQGRAIECAAAHAASTHFFKSGDFCRFADWRFIHRARLNLVPLNGSSSWRPGDRRCRRCANPTESLAHVVNHCMRYSSLYMARHNSLVARIKKAAAVKYEIVSENQVIGTQRLRPDLVIRKGTTTLIIDATVPFDNRLEAFKVAAAEKVAKYEELRRELAESSAGDVTVVPFIVGALGSWDPGNDDLVKRICSRSYGSLLRKLCVSEVVSFTRDIYTEHISGVRARHG

SEQ ID NO: 5010 - protein, 1282 aa, Sitobion miscanthi
MAAHAGSSQVAGPSNRPDPVPPLDRDDSDSDSVSDGGSTGNGETPVPRRQPVLEGHVLTFWYPLPTTLECPHERCSTLIRVKLWTSAKQSISRHVRDLHEEVDSTVVRCVGCKIVLGFRPKAHRCTFVIEEAVAAADFLACTVDGCEDSFPTRQGLANHLRNHRRQAALEAAAVPLPAPATKQRLRAVPVRRPTRGGDARVPVEQAEDVPRIPAGNRPPATGGTSPLPPTVRAEPRTPAGNRPPDTGGSASRSLRITTGGVPRTPAGNRPPDTGGPPLSPLPNMLPTATRQATPVRPRGAGDRLSLPLPPQPLLRVESPRNEGYSVVVASPELWRPRDHSPAASDSSSSSGVAAEDDDLLGVPLPDPDTGGDEVDDGAQILMPDDTTPLHEFRERFAALNREPCSEEVWSRFVALVDEMTAEAAVIVKLPVRPGGGASGNRTEIDPTDAKGIQSLYKRNRRRAVRLILSGEGQSCQVAVQDVEDHFRGVWAPSTCDVEIFPRVDGRAPVPMGPFLCADVSKRLGKFENTAPGDDGLTYRHWKRLDPECTVLTEVINICLRYKRIPPVWKRAVTVLIYKKGAKEDLSNWRPISLSRTLYKLYVGCVAGRLTEWLVSNKVLSPCQKGFLPADGAFEHVHTLNRVLEKARTHAADKCVAWLDVSNAFGAIPHPALEAAIDRSGAGEDFLLAVRDVYTGATSSVSVAGGLTGDIPVMSGIKQGCPLSGLLFIMAIDPVVSLLQGESVDHRVLAFADDLCLIADSPGELQASIDAAHSGLDMLGLRLNAAKCASLHLSGRRPVGVRDTRFLLRGSPLRPLAEGEAATFLGAQVGFNVVPPLSTLAEIIAIGLRIARSKLAPWQRIDALKTFFYPSTVHLQRLGAFPKTDWARVDKILRPEIKATLYLPQEASGEYIYGSTRRGCCGIRILAEDSDIAAVDSGFKLVTSPDQRVASDAAEHVKDVTRRRISKDPSIQEVASYLSGEDEGVFREARGTGVTSVWSRARNASKRLGVKWTLDGAPSITHEGAVMGGKQRRAVMRTVRDTLRLKRSDALIAKPDQGRAVECVAAHSASSHFLRDGDFTRFADWRFVHRARLNLVPLNGSSSWRAGDRRCRRCGYINESLSHVVDHCMRYTALYMARHNAIVARVKKAASTKFEVLSENQVLGNQGLRPDLVLKKGPNIYVVDVTVPFDNRLAAFEAAAAEKRDKYEQLRAELASLHGCEAVVVPFIVGALGSWDPANDPFMRVLCSRSYAALMRKLCVSDTIAASRDIYIEHLSGIRQVRA

SEQ ID NO: 5011 - protein, 1260 aa, Rhopalosiphum padi
MADHTGSSQVAGPSNRADPVPPLDRDPSDSDSVSDCGSTVGNIARRRQPTLEGRTLAVWFPLPATVECPYDDCHARFRVKVWTSAKQSIVRHIRDLHTEAESTVVRCVGCGIVLGVRPGGHKCPVAIEEAEDVVERYACSVDGCSESFPSKQGLTNHLRNHKRVLALAAAAVPFPVPVTRQRRRAMLDPLPVRGGDARIPAATDTVEDVPRTPAGNRPPDTGGTSPPPPSPGAEPRTPVGNRPPDTGGSALLPHPVTGSAPRTPAGTRPPDTGGAPLSPAPITVIPAIPVRLSPLRRELPRNEAYNIVVASPDLWRPRDLSPAASSSSRSSGMADGDGDQLGDPMPDQDDGAVDRDDVQILQPDGTTPLHAFLVKFLELAKVPCSEEVWMRFVALVDEMTAEAAVIAKLPVRSEGRASGNKTAIDPSDAKVIQSLYKRNRRRAVRLIVSGEGQPCEVAVPEVEEHFRRVWAPSVCDPSVYEPVEGRNPVPMGPFQCADVSKRLGKFENTAPGDDGLTYRHWKRLDPECTVLTEILNLCLRYGRIPPAWKKAVTILIYKKGDRGDLGNWRPISLSRTLYKLYVGCIASRLTECQTSNKVLSPCQKGFLPADGALEHVHTLNRVLEKARTSKSDKCVAWLDVSNAFGAIPHAALDMAIGCSGAGDDLRRIVRDIYDGASSSVIVAGGLTGDIEVRSGIRQGCPLSGLLFIMAIDPVVRRLQGDESGHRVLAFADDLCLIADRPEDLQQSIFAARDGLSRLGLKLNASKCASLHLSGRRPVGARSTVFSLDGTDMRPLLEGEATTFLGAQVGFNVVPPLSTLAEITEIGLKIARSKLAPWQRLDALKTFFYPSTVHLQRMGTFPKSDWVRVDRILRPEIKATLYLPQEASGEYIYGSTKRGCCGIRIFAEDADIAAVDSAFKLYTSPDLRVASDAAVHAEEVTRRRISKDPSIHEVASYLSGEDEGVFRAARGSGVSSVWSRSRNASKRLNVEWTVGEAPSITHEGTVLGAKHRRAVMRSIRDTLRLKRSDALIAKPDQGRAVECVAAHAASTHFLRDGDFTRFADWRFVHRARLNLVPLNGSSSWRAGDRRCRRCGYITESLSHVVDHCMRYTALYLARHNAIVARIKKAASTKFEVLSENQALGNQGLRPDLVLKKGPNIYVVDVTVPFDNRLAAFEVAAAEKRAKYEEVRAELATRYTCDATVVPFIVGALGSWDPANDAILRVLCSRSYGTLMRKLCVSDTISSSRNIYIEHLTGVRQV

SEQ ID NO: 5012 - protein, 1274 aa, Pentalonia nigronervosa
MEKRLRNRGPTTAPAPTAEHTGSSQVAGPSTRPDPAPPPDDGEAGPIDRRQPTYEGGKLTIWFPLPATECPDPQCSARFRVKLWTSAKQSLTRHQRDLHEEAAETVVRCVGCGVVLGTRPGSHKCRVRIQDADDQACRYACSWEGCIDSFPSKQGLTNHVRNHRTREANAAAAVPLPAPATRQRREDARGPQPVRGGDARIPAEAEATEDVPRTPEGTTPPDTGGTSPTPDTRAEPGTPAGDRPPDTGGSASTAADRGPTVPAGNRPPATDDVREAEPGTLDGNRPPDTGGPAPEATRSGPRIPAGNRPPDTGGPLSSPTPTMAPTRTRQATPARPRGSGDRLSLPLPAQPAIRRESLRNDGYNVVYASPELWRPRPPQDQTSSEDDSTTEVEPDTAAEDPNAEAPGPDGDEIILAPDDTTPIHGFLNAARQLAREPCTDENWTRFVAMVDEMTAEAAVIAKLPIRTEGTAATSRKAPVDPEDAQGIQTLYRRNRRQAVRLVVNGASKPCDLPVEAVEAHFRRVWAPSQCDTSMYTPVDGREAVPTGLFTCGEVAKRLRKFENTAPGDDGLTYNHWRRLDKGCSVLTEVLNTCLRYRRVPPAWKRSVTVLIFKKGDATDVSNWRPISLCRTLYKLYARCVAGRLTKWLVDNRVLSPSQKGFLPADGAFEHVHTLQRSLEKARIGRKDKCVAWLDVSNAFGAIPHAALDAAIHGCGAGDALREIVRDIYTGASSCISVAAGKTESINVESGIKQGCPLSGLLFVMAIDPVVVALQGNAAEHGVLAFADDLCLLADKPEDLQQKIDTAQGRLQALGLQLNPAKCATLHLSGKTPVGTRDTAFEVNGRPTRTLRDGEAAAFLGAQVGFNVVPQLSTIAEIVDIGLKIARSKLAPWQRVDALKTFFYPSTVHIQRFGTFQKTEWERVDKILRPELKKTYYLPQEASGEYLYGSTRRGGCGIRLLAEDSDIAAVDSAFKLLTSPDDLLAADAKAHAAETTEKRIRRKPSGTEVGQYLSGFDQDRFQEVRGYGGVANVWSRARKASKRLGVVWEADGRPSITHDGAVLRTKQRREVMRTIRESLRAKRSATLISKVDQGRAMECVAAHAASTHFLRSGDFTRFADWRFVHRARLNLVPLNGSSSWRAGDRRCRRCGYKTESLAHVVDHCMRYTAQYMARHNAIVARIRKAAEPRYQVISENQAIGTERLRPDLVLKKGRQVQIIDVTIPFDNRLSAFEEAAKTKRGKYERLRTELAAEHGDAVIVPFIVGALGSWDPEND

SEQ ID NO: 5013 - protein, 903 aa, Cinara cedri
MRDTTPLHAFLNLARQLAREPCTELNWSRFVDLVDQMTAEAAIIVKLPVRTEKGASSRRSAIDPNDAQGIQTLYRRNRRRAVRVIISGEGMTCDIPTEEVEAHFRRVWAPSECDTSAYIPVEGREPMPSGPFSNAEVAKRLQKFENTAPGDDGLTYSHWRRLDPGCSILTEIINTCLRYRRVPAVWKRSVTVLIYKKGDVTDVTNWRPISLSRTLYKLYAGCIAGRLTDWLIRNRVLSPCQKGFLPADGAFEHVHTLNRSLEKARTGRADRCVAWLDISNAFGAIPHMALEAAISACGAGNGLVEIIRDLYDGASASVSVAAGTTAAIDIRSGIKQGCPLSGLLFILAIDPVVTAIQGEAELHRVLAFADDLCLIENSPEALQRSIDATRTRLRSIGPQLNAAKCASLHLSGCTPVGVRGTSFQVDGVLMKLLREGEAATFLGAQVGFNIVPRMASLAEITDIGLKIARSKLAPWQRIDALKTFFYPSTVHMQRMGTFSKSDWATIDRILRPELKKTFYLPQEASGEFLYGSAKRGGCGIRLLAEDSDIAAVDSSFKLLTSPDLRLASDAATHAKETTGRRLRKNADSTEVGLYLSGEENGVFRETRGYGGVTNVWSRARNASKRLGVSWTVDGDNTAITYDGAVLRRKQRREIMRTIRESLRLKRSETLTAKPDQGRAMECVAADLASTHFIKSGDFTRFADWRFIHRARLNLVPLNGSSSWRTGDRRCRRCGYTTESLSHVVDHCMRYTALYMARHNSIVARIKKAAGTRFQVIAENTTIGTQKLRPDLVIKRGKTVLIIDVTVPFDNRMAAFEVAARSKKEKYEQLRAELASEHGAAEVVPFIVGALGSWDPNNNKFMRQLCSRKYGDLMRKLCVSDTIRSSRNIYIEHITGVRQEPDLI

SEQ ID NO: 5014 - protein, 1033 aa, Nephila pilipes
MMSTQAASDDTNRTTWVCTVCGFRASSKVGLDVHGRIHKRESLASKGTPIVSLPTPKQRKQLRKKKIAPLLVGSPGDLPLDRPLPDFQVPADIVQEVAPGPTTEIPLIDLPPPNIIESFIDPLDALISEDIDDRLRLLEVINNDITTALQHHFHLKKRQVSTSNTGSSKNDKLNKLKDPQTIQKAYAWNRRKCIRDLVESNDTRCGVHIDDIYSHFSSTWAAPPIDSSPSFPDPPELPPIAESFTEDLVCECLKAAENTAPGPDLVAYKHWREADPKGRILTRLFNICLSLKKVPASWKQSETVLIHKKGDLMDLSNWRPIALSNTVYKLFSKCLTRKLLDWCSANQTLSSCQKGFTPFDGVLEHNFVIAQHLEDAHRLKRDSFACWIDISNAFGSIPHSILWSSLKAMGADMDFISLCQDIYKDSNTSVLGLDGKTPPIPLKNGIKQGCPMSGILFDIAIDHVLRLIQGDEDRKKILAFADDIVLLANTEQEMQDNIIALSHLLEDIHLKVNGRKCATLHLSGITPVGARPTAFFLDGNQILTLGDGDHYQYLGKPVGFCLPKKFENINQALEAAHSICSSKLAPWQRLDALKTFFYPSLCHAMRMAQFGKSDWNLVDKAMMREVKEILYLPSNAANEYVWGSRQKGCCGVPCAATDSDLYLIDSAFKLLNSSDEEVQLLALAQLKRSVSHRIKRAPTDGDLASYMSGSMEQDFKTTTNARQNTWTRARMASSRLGITWSFCDGIPTITYDDITIKPHMKRKLMKLLHKCIREAESDNLVQQHKSQGKAMECVSKAKASSHFMHEGKYTRFADWRFVHKARLNLVSLNAKSWKPAQDRVCRRCGYKEETLPHVLNHCYSYSRAWQLRHNAVVDRIKNAITYKHKIISENRECGIPGLRPDLVAEVNGMVRIIDVTIPFENREFAFEAARARKIEKYLPLVQHFMSIGYKDVKVIPIVVGSLGAWDESNDSFLKKICSRSYLSLLRKLCVSDTIRWSRDIYISHLTNKCQYSDALKGNNAPPQPDEEGSSEEL

SEQ ID NO: 5015 - protein, 1033 aa, Nephila pilipes
MMSSQAASDDTNRTTWVCTVCGFRASSKVGLDVHGRIHKRESLASKGTPIVSLPTPKQRKQLRKKKIAPLLVGSPGDLPLDRPLPDFQVPADIVQEVAPGPTTEIPLIDLPPPNIIESFIDPLDALISEDIDDRLRLLEVINNDITTALQHHFHLKKRQVSTSNTGSSRNDKLNKLKDPQTIQKAYAWNRRKCIRDLVESNDTRCSVHIDDIYSHFSSTWAAPTIDSSPSFPDPPELPPIAESFTEDLVCECLKAAENTAPGPDLVAYKHWREADPKGRILTRLFNICLSLKKVPASWKQSETVLIHKKGDLMDLSNWRPIALSNTVYKLFSKCLTRKLLDWCSANQTLSSCQKGFTPFDGVLEHNFVIAQHLEDAHRLKRDSFACWIDISNAFGSIPHSILWSSLKAMGADMDFISLCQDIYKDSNTSVLGLDGKTPPIPLKNGIKQGCPMSGILFDIAIDHVLRLIQGDEDRKKILAFADDIVLLANTEQEMQDNIIALSHLLEDIHLKVNGRKCATLHLSGITPVGARPTAFFLDGNQILTLGDGDHYQYLGKPVGFCLPKKFENINQALEAAHSICSSKLAPWQRLDALKTFFYPSLCHAMRMAQFGKSDWNLVDKAMMREVKEILYLPSNAANEYVWGSRQKGCCGVPCAATDSDLYLIDSAFKLLNSSDEEVQLLALAQLKRSVSHRIKRAPTDGDLASYMSGSMEQDFKTTTNARQNTWTRARMASSRLGTTWSFCDGIPTITYDDITIKPHMKRKLMKLLHKCIREAESVKLVQQHKSQGKAMECVSKAKASSHFMHEGKYTRFADWRFVHKARLNLVSLNAQSWKPAQDRVCRRCGYKEETLPHVLNHCYSYSRAWQLRHNAVVDRIKNAITYKHKIISENRECGIPGLRPDLVAEVNGMVRIIDVTIPFENREFAFEAARARKIEKYLPLVQHFMSIGYKDVKVIPIVVGSLGAWDASNDSFLKKICSRSYLSLLRKLCVSDTIRWSRDIYISHLTNKCQYSDALKGNNAPPQPDEEGSSEEL

SEQ ID NO: 5016 - protein, 1033 aa, Nephila pilipes
MMSSQAASDDTNRTTWVCTVCGFRASSKVGLDVHGRIHKKESLASKGTPIVSLPTPKQRKQLRKKKIAPLLVGSPGDLPLDRPLPDFQVPADIVQEVAPGPTTEIPLIDLPPPNIIESFIDPLDALISEDIDDRLRLLEVINNDITTALQHHFHLKKRQVSTSNTGSSKNDKLNKLKDPQTIQKAYAWNRRKCIRDLVESNDTRCGVHIDDIYSHFSSTWAAPTIDSSPSFPDPPELPPIAESFTEDLVCECLKAAENTAPGPDLVAYKHWREADPKGRILTRLFNICLSLKKVPASWKQSETVLIHKKGDLMDLSNWRPIALSNTVYKLFSKCLTRKLLDWCSANQTLSSCQKGFTPFDGVLEHNFVIAQHLEDAHRLKRDSFACWIDISNAFGSIPHSILWSSLKAMGADMDFISLCQDIYKDSNTSVLGLDGKTPPIPLKNGIKQGCPMSGILFDIAIDHVLRLIQGDEDRKKILAFADDIVLLANTEQEMQDNIIALSHLLEDIHLKVNGRKCATLHLSGITPVGARPTAFFLDGNQILTLGDGDHYQYLGKPVGFCLPKKFENINQALEAAHSICSSKLAPWQRLDALKTFFYPSLCHAMRMAQFGKSDWNLVDKAMMREVKEILYLPSNAANEYVWGSRQKGCCGVPCAATDSDLYLIDSAFKLLNSSDEEVQLLALAQLKRSVSHRIKRAPTDGDLASYMSGSMEQDFKTTTNARQNTWTRARMASSRLGITWSFCDGIPTITYDDITIKPHMKRKLMKLLHKCIREAESDNLVQQHKSQGKAMECVSKAKASSHFMHEGKYTRFADWRFVHKARLNLVSLNAKNWKPVQDRVCRRCGYKEETLPHVLNHCYSYSRAWQLRHNAVVDRIKNAITYKHKIISENRECGIPGLRPDLVAEVNGMVRIIDVTIPFENREFAFEAARARKIEKYLPLVQHFMSIGYKDVKVIPIVVGSLGAWDASNDSFLKKICSRSYLSLLRKLCVSDTIRWSRDIYISHLTNKCQYSDALKGNNAPPQPDEEGSSEEL

SEQ ID NO: 5017 - protein, 1229 aa, Nephila pilipes
MKKGGLRLHMFRNHNTVVALSEITAWGSTTTQDAPSSVATTAEQHHQCKRCATICKTAKGLRVHMQSAHNISVRKEGKSRRNDTLELQQSTNADQEIAGPPNEVPMEETPSGPKDNPVTLVNNILKYSFPLHDTIRCPERKCHKIFHTRKWYTTNNSVKRHLSIYHRIQLAGVEYWCTTCKRRISGKPASHPCISNAMTSSHNPSSVNNIKTWVCADCGFKASSRVGLDVHRRIHKRDEVAHKGTPLVSLPTPKQRKLAKNRKIAPLLVGSPGDLPLDRPLPTFQDPSDITVEETLDMSNENALIDIPHPSILDSFLEPLEALMNEDIDDRLRLLEVINNDITSAIQQHFHLEKREASSANKRANTNDKKEKLKDPQTIQKAYAWNRRKCIRDLVESNDTRCSVPTEVIHSHFTATWAAPSADSSPSFPTPPELPPIVESFTEDLVCECLKAAENTAPGPDLVAYKHWREADPKGRILSRLFNICLSIQKVPASWKQSDTVLIHKKGDQTDLSNWRPIALSNTVYKLFSKCLTRKLLDWCSANQTLSSCQKGFTPFDGVLEHNFTIAQHLEDAHRLKRNSFACWIDISNAFGSIPHSILWSALRAMGTDLDFIALCQDIYKESFTSILGLEGKTPPIPLKNGIKQGCPMSGILFDIAIDHVLRLIQGDEDRKKILAFADDIVLLANSQEELQENILALSHLLEAIHLKVNGKKCATLHLSGTSPVGAKPTAFFLDGKKIKSLGDGDHYQYLGKPVGFCLPKKFDNINQALEAAHVICKSKLAPWQRLDALKTFFFPSLCHAMRMAQFGKSDWKLVDRALMKEVKELLYLPSNAANQYVWGSRQKGCCGVPCAATDSDLYLIDSAFKLLNSDDEEVQVLALAQLKRSVSFRIKRAPTDGDLASYLSGSMADEFKSSTNARQNTWTRARQASTRVGITWSFSDGIPSIDFDDVKIKPHMKRRLLKILHKVFREAESAALVKHKSQGKAMECVSKSKASSHFLHEGKYTRFADWRFVHKARLNMVSLNAKSWKNIQDKVCRRCGYKEETLPHVINHCPSYSRAWQLRHNAVVERIKTAITYKHKIIGENQECGVPGLRPDLVAIINGTVRIIDVTIPFENRGLAFEVAKARKIEKYLPLVQYFLKQGYKDVKIIPIVVGALGAWDPANDTFLKKICSKFYLSLLRKLCVSDTIRWSRDIYITHLTNKCQYSDALNRNNAPPQPDEEGSSEDV

SEQ ID NO: 5018 - protein, 858 aa, Nephila pilipes
MEDRFRLLETIHSDIITTIQNHFNLLKSSTNNSNNSQQPSSSKKPLGDDAQSLQKAYSWNRRKCIREIINPNPTRCSIPIDDLLFHFNSSWSPPEDDSCPDFSPPPDLPPIVEHLPPELICECLKSAENTAPGPDRISYKHWRELDPMGKLLSKLFSICLSLKKIPSSWKSSTTILIHKKGSRDDVSNWRPIALSNTIYKLYTKCLTRKLSDWCSFNQCLSSNQKGFMPFDGVLEHNFIIAQHLEDAHRLKSESFACWIDISNAFGSIPHNVLWKTLAATGADQDFISICQDIYHNSNSSILSSTGITPPIPIRCGIKQGCPLSCILFDIAIDHILRTIQGNSERKKVLAFADDIVLLASSPGELQANLNILALLLSNIHLTINVEKCASLHISGATPAGVKNTSFNIQDTTITSLEDGDHYRYLGKPLGFCLPKDFRNINEALELASSICKSKLAPWQRLDALKTFFYPSLCHAMRMGQFGKSDWNLVDKAMVKELKNILYLPSHAANEYLWGSRERGCCGVPSTATDSDLYLVDSAFKLLSSGDDDVALLALAQLKRTVSFRIRRAATDGDLSSYLSGSMANEYQSTSNARQNTWTRARQASSRLGITWSFADGSPSLTFHDVVIKPSHRRRLLKNLHKQIRNQVAQGLIDHKSQGKALECVQAAKASSHFMHEGKYTRFADWRFVHKARLNLVPLNAQPWKKDQDKRCRKCGYKEESLPHVVNHCFSYSKAWQLRHNAIVQRIKNVVSYKGTVLFENQECGLPGLRPDLVAMVGDEIKIIDVTVPFENRQLSFEIARQRKISKYLPLIDFFKSKGHRKVSIVPILVGALGAWDANNDTFLKTVCSKSYLALLRKL

SEQ ID NO: 5019 - protein, 1168 aa, Nephila pilipes
MICDVSCRTQKGLRVHLQSIHKISVSKNGKNIQESSPVQNQNLVIPSPPGIPLPEECGYCNDPVSLLGNSIKYSFPLPQRLHCPIAGCGRPFQTQKWYTTNASLKKNIQIFHRLQISSVEFWCSICTKRISGKPSTHSCLKITDNSVIHPAIDPPSSWVCSICQFSAASKAGLDLHLRSHKKTDLATKGIPLVDLPTPKQRKKNKNNRITPLLNGEPGSMPLDRPLPSFNVQEDITIPPDPSSPIEDIQKIDLPPPPLLSSFLEPLSVLLHEEIDDKLSHLETLHNSIISSIQEHFHLLPPANRPDKPAYRKTVASDAQGVQKAYSWNRRKCIRDLINPNPTRCSIPASDLFSYFQNVWGAPVDDSCPYFSPPPALPAICESLDADLVCACLRSAENTAPGPDRIAYKHWREIDPSGKILTLIFNICLSLRKVPSSWKQSETILIHKKGSMDDIANWRPIALRNMIYKLFTKCLARKLADWCSANDCLSNSQKGFTPFDGVLEHNFVISQHLDDAHRLKRDSFACWVDISNAFGSVSHSVLWSTLHSMGADPDFILLVKDIYLDSSSSILTNNGKTAQVPILKGIKQGCPLSGILFDIAIDHVLKIILGDAERKKILAFADDLVLLASSHEELQDQINSLALLMNNIHLQVNPAKCATLHLSGSTKAGTRNSNFSLDGFQLLSLSDGDHYDYLGKPVGFCLPKDFTTINDALQVAHTICTSKLAPWQRLDALKTFFFPSLNHSMRMAQFGKSDWKLVDKALLKELKEVLYLPFHAANEYIWGARDQGCCGVPSAATDSDLYLLDSAFKLLNSSDEEVQILALAQLKRTVSHRIQRSPSDGDIASFMSGSMDCDFKTTSNARQNTWTRARAASRRLGVTWSFRNGTPSITLDEVTIKPHMKRRLLKNLHKYLRSVETRKLIEHKSQGKVIDCAQYSKASSHFFHEGKFTRFADWRFIHKARLNLVSLNAKPWKTALDRKCRKCGYKEETLPHVLNHCGSYSNAWRSRHNAIVDRIKKAVTYRGSILSENQECGVKGLRPDLVALVNGAIKIIDIIVPFENQYGSFEMARLRKTTKYSPLIQHFKNLGHKDVEIVPILVGSLGTWDTQNDHFLKKICSKSYLGLLRKLCVSETIRWSRDLFVTHLTGKCQFQSMDGTTHPHSGDESPAEL

SEQ ID NO: 5020 - protein, 1835 aa, Nephila pilipes
MALSHNIGKSRLFSPQKKSPTELSASLSPQETPDPHKSHQMLPGIQEMVEDLVTITCNNIHAPSVSPHVQSTPSPPTSRNHTKASPMASPECYKMKYYNNEVCTSASSSLASSQESLLFSSELKMKWIPVILSPIPSPVRPASPDILDLILTQPTTLSDSSPENDQLPIAITKRNLSIPTQIASNQVTIPSTSIAQPLKAGLPSGSPIKNNNSGLFCFPPISPAGTLNAKSSPVLASKNSNMMYARQPSISSKPTQPPSSQDKAPISYADAAKKGLCKICNASVPPCNLLAHLNLHRPCTKRHKCIKASLIEFPRSLPKRKPIKETPSPIEATFREKFPELPVFSIKSGSSSDSPDEIELRKKLDSPPSGPPSIPAFTKPLFSSVVRKGLYRCRFCEMPFASRSGLDAHLLKIHGIPSSIPKVPTLFPAPSGRPTCRTCFHDIEPGLSMADHCRLVHNLQVTTNRLEPISNIINIKPEKFHRPTPRTVSSQEDIIHIDLPVVNSSLPTVSAIPSTSIDPKRVTFSKNLTIFPSSVKNLKLPDPSESSSQEFQVPPKYQSAKSIPSASPTKACPHCPFIAHKKIGLRLHLYQQHSIRNNSKPESSTSCSNNSSLPTVSTLPSTSFSTNNHPLNNPVMPATSSPTSKNIPVLSSSIQQQPALPSTSTIKCNLCNAPCRTEKGLRVHLQMDHRISVLKKGKNPQDSSQDLPPALPSPNRIPLPEECGFCTDPISLLGNSLKYSFPLPQRLLCPIANCGRPFQTQKWYTTNNSIKKHIQIFHRLQISSIEFWCTICTQRIHGKPSTHHCLKSVSLPASTSSNKDSPTSWICSICQFPAASKSGLELHCRIHKRADLADKGIPIVNLPTPKQRRQTKSKRIAPLLTGDPGSMPLDRPLPPFNAQEDVIPPVDVSSNNLELPKIDIPPPPLLSSFIEPLTTLLQEEIDDKLSHLTSIHNNIISSIQDHFHLIPPSNNPKKPIFKKPAASDAQGIQKSYTWNRRKCIRDLFNPNPTRCTIPASDLFSFYKNIWDTPEDDSCPDFSPPPVLPPICEILEADLVCACLRSAENTAPGPDRIAYKHWREIDPSGKILTLLFNICLSIRKVPPSWKKSDTILIHKKGATDDVSNWRPIALSNTVYKLFSKCLARKLADWCSSNNCLSSSQKGFTPFDGVLEHNFVITQHLEDAHRLKRDSFACWVDISNAFGSLPHSILWSTLHSMGADPDFISLIQDIYSNSSSTILTNDGKTDEIPILKGIKQGCPLSGILFDIAIDHIIRIIQGDAERKKILAFADDLDLLATSHNELQDQIDSLALLLNNIHLRANPAKCATIHLSGATKVGTRDAPFSLDGFQLPSLKDGDHYDYLGKPIGFCLPKDFSSINDALQVAHTICTSKLAPWQRLDALKTFFFPSLCHAMRMAQFGKSDWKLVDKALLKEIKEVLYLPANAANEYVWGARDLGCCGVPNAATDSDLYLLDSAFKLLNSGDEEVQVLALAQLKRTVSHRIQRSPTDGDLSSYLSGSMDCDFKSTSNARQNTWTRARAASRRLGVTWSFSDGTPSFTLDEVTIKPHMKRRLLKNLHKHLRSLETQKLIEHRSQGKVIDCAQYSKASSHFFHEGKFTRFADWRFIHKARLNLVSLNAKVWKPQQDKKCRRCGHPEETLPHVLNHCACYCVAWRSRHDAIVDRIKNAISYKHSILSENRECGIKGLRPDLVALINGAIKIIDVTVPFENQLNSFEVARQRKISKYSPLIQHFKNLGHKEVEIVPIIVGALGSWDTKNDHFLKKICSKSYLGLLRKLCVSDTIRWSRDIYVTHITGKNQFDSKDGTTHPHSGDESPAEM

SEQ ID NO: 5021 - protein, 1158 aa, Odontomachus brunneus
MDLRSSKKKASDAELPDPGSSVTDLSVSQGITGNVTDRNMELALDNIRIFVPLLDGGTLCNLCVGSGKNIICLNLRDLAEHFNAHHACAEVRWVCRQCDKSFLKVHGWRCHFVKCKGAPGPSAIPKAFGCELCNEAFETKIGLSMHERHMHPALRNKKRMEKAEEPRKPRGKKATVWTAEEVILLKELDAQFRHVRFPNIEIQKFLPNKTSDQIRSKRKELPKSTEPRDTPPIDSDDDTVVYEDALSTENNICAESAQMVETETAGVIETATVGQDEISWLSDMKEAIETVGEISEAVRTTYNRLMDIWNENWANHAKLCTEVEEFIVSELLMLLSTKEDSIVKHTKGNNGRKVKDGNKKRRNIKRKFEYARAQMIYKNCPKKLAGMILKGDVSMINPPHTLPDDRDILELYTKLWGTAEPSNVESGTEPVTSPIALNLLMSPISDVEVEQKIKRIKPKSAAGLDGIQKSDINKQGIPSVLGKLYNILLYADYYPECWKANRTTLIPKTGKDLKDIRNWRPITISSMISRIFSSLIDRRIRANIEEHIRQKGFTAESGCKQNVTLLAGAIQRCKAYKGGVFSILDINKAFDTIPHSAIAAALMRKGIPFRISNYICKMYDDCSTKIRTNGSGSIQVNIRRGVKQGDPLSPLLFNLCIERIIEDVEKSTTGLAVSENRNVSILAFADDLVLLGENMAEAQEQIDRVSRFLDGLSMSLSASKCGAFQIITTRDTWYIKDPSIEIKGTMVTNIDPDEMFSYLGAKFGPWKGLHKGQVIPDIIGTLKRIRTLPLKPHQKVDLFQTYVLPHFIYSLLISPPSESTLKLLDKEIRQEIKEILHLVPSTATGFFYTTRNNGGLGLLRLEHVVKLASLRNGIKMMASEDPAVRDVLQHDNVERQLKAMANSLRINWPATIKDINIAKNRLKMEDTLNWSELRSQGHGVKDFQNDKIGNCWLRNPTLLKASRYIDALRLRTNTYGTKVVLARVNKNMDVRCRRCHMQPETIGHVLGLCTHTKQLRIKRHDEVKNLIASRLSATNEVAVEATLQVGANLYKPDLIVKSENKAFIVDVTVRYENRDYLLKANQEKMDKYDPCLPEVKRRFGCASARVLPIVIGSRGAIPRSTVENLQLLGIKKNDILTIALNVLRSSIEIANIFIDYDV

SEQ ID NO: 5022 - protein, 1116 aa, Bolitophila cinerea
MPSSILRRTISRFACECDRSFRTARGLALHKSRYCSFRRIHHISVNETTPQSHITAPTNATIISSNQPINIHSPTSSHSSLTRPERDDATIDPSQCTICERRFKGVAGVRQHMRLAHIVEYNRNLELVSTNARQQWSRLEIDNLAQTEASYSQNTGLLDYLANLWCKRTKEAIKGRRKRSSYKRQVVEIRKQIAQDHNLPHSHDSNHTTQDDNHSHLQPEIDDINNRQMASPDLPESSPQTPSTSTEDANQHRSTLWSFIVSISTELYGAHDTNILQFATASHGPNIEKEALLDQWTEELVHPYSRVTTSSRSAQASRPGTILPDLSRRQGRVKEFRDMQRLIRRDRRSAAKFILDGTTPNSSNAMPSPADIMASFGQSFGTESQDDDAPIKDRRHLITNMTLPITVEDVEWSIRTSRSGSAGDDGINRKSLMGIPRMKLVLLFNLMLHLGYTPKCLRKSRTVMIPKCNTDQHLVSNWRPITIASIILRTCNRIWAKRLQGIPLHPMQRGFTDIDGCFANNITMHTLVKNARKRVKPYAVILLDLQKAFDTVSHSTINRALIRLGLDEQSRKYISSTYKATKTSVSVCGNIIGHTAVLRGVKQGDPMSPFLFNAILDELLCDVNRMKATPLDNTHAITCMAYADDLAILAQNVTDGNIVLKQCKKHLDARGLLINPEKCAAFSTARVPGKKKLFCHTTPQFSVDTKPIRQLLFSDCAKYLGQKYSVSGITKATIGDLNTHLQAIRRAPLKPDQKFFILTDFLVPRYLAFLQNPTTKLKVLKEADRRIRQTTRKILHLTAHCTNSLFYAPLKSGGLGIPCFAQKIPILLLRRLNNICNQNALTDALVELTGDWRSSINALIKGGLDTTSKLNDHHKQTLEISFSGNGIHQVENNRACSEFIRRKPVYWTGEDYIRAIQLRYNLLPVMSIPSNPPHTRRCRAGCDRNETLSHVLQRCPRTHCNRIVRHNYVVKRIRDFAKKHNWTTIIEPHVRGSDGLLKKPDLLLINNSKVLIVEVGIHWEGPASLISAYKHKLSIYSTEPFITKINRLYPDKSVYILPIIVGARGAWCHLNKHAVHHISMSQSIISDIITTTLRGSWTCHRQFMKSIWRPTSRPRS

SEQ ID NO: 5023 - protein, 1201 aa, Megachile rotundata
MEQVDEDAASDAEHPGPGCSVTDLSVYQGTIDDDTACNMDNGIMNFYLPLEDASTKCPACFKIGRLIQIMCIKDLAKHIREYHITDDIIYTCSSCKRTFDKLHGWRCHYSKCKGPMAPDSDTQEQNQFICQACSRSFETKIGLSMHERHAHPDVRNDKRAAQFYNEGRKGARRKVWSIEEEEGLKVLNERFKDNRFPNVEIRKFFPDKTLKQISDKRIEIMKKEATARLNEEAEDENVNIENVLLVDNRDVNSTEINYIDDNLNNLDLNLDHNNEVDLGLINLTNSINERAEVPPGAVEVLNNLELYWKQYCSDKDVEQLKNGINEFLANKLIPYMLANENNEEIQEEHINTNERKRYNKTFNNTSNRKRNNNNKNRRNVCRNINNNENKNNNNNNYKYKNTSNKRKTLNYARCQDLYKNCPTKLADIVVNDQLSNLIENQPLPETKEISDLYNKLWGVKGPLDNNNKQFIRCDDEIPIERILIPITSTEITNKINKLKNKTAAGPDGILKRHLLVPGMPNILSKLFNILLTINYIPEKWKINRTTLIPKMGKDLKDIKNWRPITIGSILNRIFSSLLDYRLRLNIKQFQRQKGFSEESGCRFNILLLNELITKAKMLNGGVFQILDISKAFDTVPRAIIISGLKRRGVPEKICELVKDMYTNCTTEIKTNDKNNKILIKLERGVKQGDPLSPLLFNLSIEALLEYIENSSQGISVSENEKVATLAFVDDIGIIAQDRKEAQTQINKVVEYLETLGMSLSIDKCLVFQIVSKKDTWYLQDPRIRIGRDHVPYSTPGEAFKYLGASFSPWKGLEHGIVVPEIIKIIKRVRKLALKPPQKIELIIKYILPRFIYGLLINPPSDSVLKLLDSEIRQQIKQILHLVPSTASSFIYTPKRNGGLGIPKLENIIKLGVLKSSINILNSEDGALKSILKTDKKQEQLKKIASSLQINWPAELKDIEDAKIKLKNEACKEWSMLKSQGQGVNDFRNYTIGNHWLRYPTILKAGKYIDALRLRTNTVGTKVVLAKSERIADVSCRRCHTQLETLGHILGLCIHTKPQRISRHDHIKNIIAEKLAKKHPTCVEPTVNVRGNLFKPDIAVNKEQKAFILDVTVRCENRNYLHEGRREKIKKYETCLEYFKNKFKTNSAEVVPIVFGSSGAVPAATKNALLMLGFKKYEIQKIALSILRSSIEIANQFIDYAA

SEQ ID NO: 5024 - protein, 1093 aa, Eurytemora affinis
MYLLAQRDAALENMGLINSDRITILVDEFKRSADSLRKRRNLPEYKALVKAALERLHNLPDVQEEEVRTELHTTPIVQVEEEVRIESHTTPIVPIVLNVSANTVNTVVHNPVQKRVALLWTIEEETLLAHKEAALIIEGIEGTEITRILSEGSTRSKESIRKRRCLAAYKAIVQAKLRDLTQEPPSETVVEISLEAQEELIGETQEAGAAESHETQTPRVELSEDDQAELNRQEMFKHWFTVAGQSQLKNLWDPTQRMGIIEDPVEIDKFTEEFIQVNGLYKTEKPKDVERKKSAPPQGGRNARRNALRALTQKKFEKDPSGCIRAILNNTLVTEGGVDIEVLKEYWIEVFKKTPECEIFESKIKHPTLYRLSEPITRKEVEEGLKALKTKSAAGVDGVTCADLRKVKVGRIVLLFRIFQACSYTPACIRLGSVTMVPKIPEPTLPQHYRPITVASMILRLFHGIIARRFDLLPISPRQKAYKKLDGIAENIWIVSELLELAKKNKRGIALIFLDVSKAFDSVGHPIIQQAAERLGVPKDIRKYLDVLYSSSELVFKGCSQKFKQNGGVRQGDQLSGPLFNGTADLGNEDLDQNLMYKINEDVGIAEGLFADDEFLAAEGTMALQYQVDRLIPRYKKCGLQMNAGKCKSLVIVYNAQRKKYIVDPTPIITINGDLVPSVSLDETYKYLGVKLGAGTPNHKNILESLKVKIERVDKSCLKPQQRMLAMRQHIIPSLYHVLIFSKASKKSLLTLDRNIRFFVKKWCHLPKDTLNSFIHAEIKDGGLGIPNLGLRIPRMTMQRHMRLSASLDPVVQAIYTSIAGQASISRIHKPKRMNNIDIDTKKAEQEVWADKLYDGVDGKGLRQHRDSKMINEWVTDCSLKISGADFVRAIQVRSNTLKTPARAARGRTENGNNLCRLDRQVANSNHIFQVCQATHGLRVKRHDEVVDMLKSSVMKRGYVTFKEPKLPYKRTFRKPDLIISKGGKVTIIDPIICGDTADLNERRLQKEVLYGEEVLLEEARRIVKTHDPGIQIKETVVLGVPISFRGSLDNFTCRFLKRLGVPRRFLNLIIVRTLVNTYKMFQAYQRMTTAAR

SEQ ID NO: 5025 - protein, 1673 aa, Trichogramma pretiosum
MASIDIDIDFNYNNNEFVIIYEPFSESLVCELCSAAERNHVMRGGIRCGVFTGESRKAQFTKHLKLKHKIAADKIRAGCKMCGYVSMGKYSLKDVRAHIKKIHEAGQAEPVRARGAARAARPNSCRDNNSNNIDINNNNSNAGGSGEIVNISSQNDRATAAEIISTNRGAAPSESAQNRSRGEDGPEEDSPGPTSLRTRRAARQRLPSLSDTDDDSTNTSVHEQQQLHQLAPHNTSVSPDVQHHQHVTTRTQAAAATTPDSGRVTPPQTTPLSSRVTNANTSHSPESPRRTLRPRAAATQQPRLQTTSRARHATSVPAESQGSQRQQLLPRRTLRSSQGSAEGRRSTTSTATQRAAPTTSRQQRSASPTALARRSGSTRSNANSSASASTSRKSGPSPPAVRTTRAERLRLEKRARESTTATRATPPPSRSSTSGQKRRTQDNAPQRRSSSQQHQPGPSRIRSSATTYAEATRGQTSPRASVSGEDIAISRASPARTATGSVAATTSIAATLTTTTTTVSVCSGSIASAVSRPIISMACQRPEEVQVQLLSQTPALSVVEQIPPTSGDTPTPAVAEAATTPANPSPATPSAEATVEEDWRVVGRSRRRSSAPTPPVAEQERRTAAAPEITSSPVRTYNLFEQLNNAIELVFRDTPRRSVDIPRAINVPGPRQSAEETGHGDRHRPDLAPDVSEVRVVRREQEPPRGNGARGNGRRGGRAVAGRGPTVEQTALIDLACLANDAQQLEHTATLAAEYLSRFTERRARGPAGGGRRNRRANDARGRQRNGDDPAAGAGDGAGPITREGWVAAATRIQRLYRKNRRRAVQEVVNGAPQHCEISVAEVQRHFEDVHSVREPGGALPPLFNAEPPTAASNAALVKPFERAEVSLKLKGMNNSSPGPDGVTYCDLKRADPGCHVLAAIFNACLRTGLVPQCWKSSSTILLHKKGDRADIGNWRPIAMGDTTAKLFASLIADRLTTWAVVNQRISPSQKGFLPYEGCFEHNFVLGEILRDAKTRRKEVVVAWLDLSNAFGSVPHASIHEALDRHSVPLPIRNLVKSSYEGVSTSVKTAGAITDPVRILSGVRQGCPLSPIVFNLALEPVVRAVQATGRGYTLSGQTYNNLFYADDGALVSDSPDGMRLLLRSAEDAAAAVGLRFNPSKSATLHLKGAATARVQDTRFSIQGSEMRSMREGEAYEHLGVPTGFQVRQTPDSSIDGLVGDLRKLDQSLLAPWQKLEVAATFILPRLDFCLQGSHVEKGPLSEADKVVKKLAKGWMHLPQRASAEVVFLPPNMGGGGILPLADMADLYAIAHAFKLLSSKDAAVARLARSSLECVAAKRLGRIAAEQDLADYLSGVVDGDFARPSTGTASLWSHARNAARRSSAALGLRWVWCAERQELGVECRGPSGNTITVTPQARGQVVRRLRSALVAHYRERLLAKKDQGKVYEVTSRSRVGNHFLRNGSFTRFAEWRFIHRARLDVLPLNATKRWQTGGDKRCRKCGAHLETLPHVIQHCRSNFVAITKRHDGVLDRLVKALKIPGTVSVNRTVDGVDLEWAQLRPDLVVRDEVRKKIVIVDVAVPFENRGVALEEVRSEKLAKYQGLAACLERQGYDVKLMPFLVGALGGWDAGNERVIRLLGINRRYAVMMRRLMISDTIRWSRNVYVEHVSGARQY

SEQ ID NO: 5026 - protein, 1029 aa, Ormyrus nitidulus
MASPNSPTETEGETIPQDRARRAGASSLRSPANNIGADDPNRANRTLQRPESSNASAPRAGRPPANRGRRQGGGRGPTNEQKALIELADLAADAEQLEDAALQAARYLGRMRTGEAGGQRREGRRPARGGGRRRGPRIEQNAQAGGSQGEDAPVNDRRRWAEAAARIQRLYRNNRRRAVQEVLAGPTQHCEIGAGEVFEHFRHVHAERASEGELPPLFNEDAPIAASCDSLCSPLERAEVSRRLGRMSNSSPGPDGVTYANLKGADTGCHVLTALFNACLRLGVVPRCWKTSNTVLIYKKGDRGVIENWRPIAMGDTTPKLFSALVADRLTEWATANGRLSPSQKGFLQYEGCYEHNFVLQEILRDAKIRGRELVVAWLDLSNAFGSVPHASIHEALRRHGVPEKVRNIIHSAYDGVTTRIRTAGGITEPLRILSGVRQGCPLSPIVFNLTLEPVIRALNATGGGYRLWGQCHNNLVYADDAALMAATEEEMRALLRSAEIAAAAVGLRFNPAKCATLHLKGRGAARVRQTQFAIQGEVMRALAAGEPYEHLGTPTGYQVAQTSIATVERMVEDLRAVDRSLLTPWQKLEVAATFILPRMDFCLRGSQVQKGPLSEADKVLKRLAKGWMNLPQRASAEVVFLPPYMAGGGLLPLADMADVLTIVHAFKMLTSKDTSVSALAMATLRNTVSTRLGRPAAEEDLARYLSGDVQGEFARPSSDTSSLWSRARNAARRMSDALALRWGWTPERQELALECRGAGGGRIIVPPSARAQVVRRLRAAVVDHYRERLLAKQDQGKVYEVTARSQVSNHFLRAGRFTRFAEWRFIHRARLDVVPLNATKRWQSGGDKRCRKCGADLETLPHVINHCRPHYTAITRRHDAILDRLVKASHATGAVKVNGRVEGVDEESARLRPDLVIRDEVGKKIIIVDVAVPFENRLVAFEDARDEKISKYHPLAENLRRQGYDVKVCAFLVGSLGAWDPANERVMRLLRINRRYAVMMRSLMVSDTIRWSRNIYVEHVSGVRQYSD

SEQ ID NO: 5027 - protein, 977 aa, Helobdella robusta
MASSQSSSSGSSTLTRCHVCSKHFRLRPDGALVRHGGKVKGSECSGSLAKPKTGSKRASLGNVSGCAPAATAVGNVSISSAAPQQASKIDMAERFFRKSASFCLMDHIPKHSRTKFGQTLAKVVKEIIDKPSISISWFKLLFLPAMILRKSHRGGRRHNPTGLINQRIDDFGGQSVEKMADRLELVNKLENKKSAESKLISSVKSKIEKGNIKNAMQLLSSTDTVAPDTEETIRALKSKHPTAPNNKQQSPSKESSSLCVTSQQVLVCLKTFPKGTSGGSDGLTPEHLKDLTSSKTDSIDLINSITAFINMILNGDCPPDVAQYFFGGRLVALSKKCGGIRPIAVGCVWRRLAAKCAMLAVKDRVVPILQPQQVGVSVSGGAEGAVHAVRRFLDGTRDGQCLLKLDFSNAFNTLRRDHMLNCAKSILPEIFNFCYSAYDSPSFLSFGDTRILSAEGVQQGDPLGPLLFALSVDPLIKTLKSKFVVAYLDDISLGGDVESVLDDLNTIINSENNIGLKLNFEKCELYMNKPITLNIKYPIKILEKNEIDFLGSIIFPGESQNMSIAKKFENFKLITQRLNIINKHDAMVLLLQAAFLPRLVYFLRTSPLLDVSILNSFDDHLRDAFQSIFNIKLDQKNWLQGTLPICVGGLGLGSAAELAPSAFLASAAATVALQDLMLPRDVIYVDNFRLQVYDMWRATNGDVVALENPLQKHWIAPCLNRSVDRWLQLNGSAFDKARIMAVKSELGSAWLRALPNTSCGTRLDDSCVRVSLGLRLGAQIVTEYECACGARVDELGYHSLSCRLGPGRQARHTAVNEYLVRCFQKAGIPVIKEPMGLIEEGAFRPDGYTITPWAQGRSLAWDVTIPHTMADRYIGYTSVEAGTAALKASDFKNEKYVSLNNLSKIFQPICIETFGPTDKHTSLFINELTRKIVNITGDPNEGNYLKQTLSLLLQKFNSFCILDGAARYLTVRDQGHR

SEQ ID NO: 5028 - protein, 996 aa, Mizuhopecten yessoensis
MNNNEAWRSLDADLHTILESALMGSVERKVEAMGTFIYTFCKERFGLGGKQRNPKNVIIPNRRQDNIQRLRRELKAVTRQYRRASDIERIGLHQLRDDIRENLARLRKAEQVKKARKDRARKRESFIKDPYSFTKTLLGGERSGRLNSSTADIEQHLRETHGDEDRGIPLGNCPRIEAEEPPEFPLDTKEPTWKEIQDVVKKARTGSAPGPSGIPYKVYKKCPRLLRRLWQLLRKVWKKGKIPPCWQKAEGCFVPKEKDSKHIGQFRTISLLSVEGKIFFAVLARRMTSYMMTNGYIDTSVQKGGIPGFSGCVEHTSVLSQLIREAKSSRGNLTVVWLDLANAYGSIPHELIEVALQHYFIPEHIQGIVRSYFSGIQVRFTVGEDTTSWQNMEKGIVTGCTISVILFVMGMNLIIKAAGRETRGPRTESGIYQPSNRGFMDDLTVTTTTHVQARWVLSALEEVVSWARMKFKARKSRCMIMRKGRLTQQFKLKVQGEEIPSIADNPIKCLGKWFDASLKDTSNISSMQKQAIEWMRKIDKSGLPGKFKAWIFQHGLLPRLMWPLMLYEVPLTTVEGLERSISSYLRRWLGVPPSFSSIGLYSRTSSLQLPLSSLVEEFKVTKARLVMTLRDSKDVKIRNAGIQTRTGRKWSASQSVEQAEGALKHRDIVGATCSGRQGLGTTHFQTWEGSDDKEKRSLVQGEIRREEEGTRKARAVEMGSQGAWTKWKLPERKLTWTDLWRYEPLRIQFLLRSVYNTLPSPANLHLWGLVEEPKCQLCQERGTMGHILSACKTALTQGRYRWRHDQVLRELADVLEVERKKKRPPRKHKPSFIRFVKAGEKETKATSGNTGILEGAETWEMRVDLGKKLVFPDVVQTTLRPDVVIWSAESRQIIVIELTVPWEERCDQANERKRAKYTELMEQCRERGWRTWLFPVEVGCRGFPARSAWKTLQAVGLVGKTRKTAVRRLAEAAERASCWLWNRREEKDWKPSIDGQ

SEQ ID NO: 5029 - protein, 710 aa, Mizuhopecten yessoensis
MTSYMMTNGYIDTSVQKGGIPGFSGCVEHTSVLSQLIREAKSSRGNLTVVWLDLANAYGSIPHELIEVALQHYFIPEHIQGIVRSYFSGIQVRFTVGEDTTSWQNIEKGIVTGCTISVILFVMGMNLIIKAAGRETRGPRTESGIYQPSNRGFMDDLTVTTTTHVQARWVLSALEEVVSWARMKFKARKSRCMIMRKGRLTQQFKLKVQGEEIPSIADNPIKCLGKWFDASLKDTSNISSMQKQAIEWMRKIDKSGLPGKFKAWIFQHGLLPRLMWPLMLYEVPLTTVEGLERSISSYLRRWLGVPPSFSSIGLYSRTSSLQLPLSSLVEEFKVTKARLVMTLRDSKDVKIRNAGIQTRTGRKWSASQSVEQAEGALKHRDIVGATCSGRQGLGTTHFQTWEGSDDKEKRSLVQGEIRREEEGTRKARAVEMGSQGAWTKWKLPERKLTWTDLWRYEPLRIQFLLRSVYNTLPSPANLHLWGLVEEPKCQLCQERGTMGHILSACKTALTQGRYRWRHDQVLRELADVLEVERKKKRPPRKHKPSFIRFVKAGEKETKATSGNTGILEGAETWEMRVDLGKKLVFPDVVQTTLRPDVVIWSAESRQIIVIELTVPWEERCDQANERKRAKYTELMEQCRERGWRTWLFHVEVGCRGFPARSAWKTLQAVGLVGKTRKTAVRRLAEAAERASCWLWNRREEKDWKPSIDGQ

SEQ ID NO: 5030 - protein, 996 aa, Mizuhopecten yessoensis
MNNNEAWRSLDADLHTILESALMGSVERKVEAMGTFIYTFCKERFGLGGKQRNPKNVIIPNRRQDNIQRLRRELKAVTRQYRRASDIERIGLHQLRDDIRENLARLRKAEQVKKARKDRARKRESFIKDPYSFTKTLLGGERSGRLNSSTADIEQHLRETHGDEDRGIPLGNCPRIEAEEPPEFPLDTKEPTWKEIQDVVKKARTGSAPGPSGIPYKVYKKCPRLLRRLWQLLRKVWKKGKIPPCWQKAEGCFVPKEKDSKHIGQFRTISLLSVEGKIFFAVLARRMTSYMMTNGYIDTSVQKGGIPGFSGCVEHTSVLSQLIREAKSSRGNLTVVWLDLANAYGSIPHELIEVALQHYFIPEHIQGIVRSYFSGIQVRFTVGEDTTSWQNMEKGIVTGCTISVILFVMGMNLIIKAAGRETRGPRTESGIYQPSNRGFMDDLTVTTTTHVQARWVLSALEEVVSWARMKFKARKSRCMIMRKGRLTQQFKLKVQGEEIPSIADNPIKCLGKWFDASLKDTSNISSMQKQAIEWMRKIDKSGLPGKFKAWIFQHGLLPRLMWPLMLYEVPLTTVEGLERSISSYLRRWLGVPPSFSSIGLYSRTSSLQLPLSSLVEEFKVTKARLVMTLRDSKDVKIRNAGIQTRTGRKWSASQSVEQAEGALKHRDIVGATCSGRQGLGTTHFQTWEGSDDKEKRSLVQGEIRREEEGTRKARAVEMGSQGAWTKWKLPERKLTWTDLWRYEPLRIQFLLRSVYNTLPSPANLHLWGLVEEPKCQLCQERGTMGHILSACKTALTQGRYRWRHDQVLRELTDVLEVERKKKRPPRKHKPSFIRFVKAGEKETKATSGNTGILEGAETWEMRVDLGKKLVFPDVVQTTLRPDVVIWSAESRQIIVIELTVPWEERCDQANERKRAKYTELMEQCRERGWRTWLFPVEVGCRGFPARSAWKTLQAVGLVGKTRKTAVRRLAEAAERASCWLWNRREEKDWKPSIDGQ

SEQ ID NO: 5031 - protein, 1099 aa, Mizuhopecten yessoensis
MIQTTLSGEPVEARCHCGKICKNSRGLKIHQARTKCGHREILTQRTDISNESGETQEELSQESNHSTESLQASVSPDGSIGNLNEASAHGVQAVRDRRLDKVQWPKTNDEAAWRNLDQDLEAILETTLQGNVERKVEALTSIVYSVCKERFGVETSRTQPRAKTTKENRRERKIKQLRKELRELGKRFKTAPESEKVGIQQIRDDLRETLRRLRNAERLRKGRKERAKRRADFVKDPFQFSKTLLGAERSGHLESSKEEVEAHLKGVHSDNRRAEPLGYCPRILEVEAPSAPLDTKLPTWKEIQDVVKKARSGSAPGPSGITYRVYKKCPRLLRRLWQLICKVWKKGTIPACWKKAEGIFAPKEKDSKTVEQFRTISLLSVEGKIFFSILAKRMTAYMVENSYVDTSSQKGGIPGFSGCVEHTSVISQLIREAKQKKGNLTVVWLDLANAYGSVPHKLIEAALDHYHIPEHIRKMIMSYFGGIQLRFTVGESTTAWQDLEKGIVTGCTISPILFIMGMNIIIKAAERETRGPRMESGIYQPANRGFMDDLTITTTTHVQARWVLSALEEVVTWARMQFKPRKSRCMIMRNGRLSRQFVLKVQEEEIPSIIGSPIKCLGKWFDDTLSDSQNHKNTQSQVRQWMKKIHKSGLPGKYKAWIYQHGMLPRLTWLLLLYEIPTSTVEGLEKMVNGYLRKWLGVPPSFTSVGLYSCSAELQLPFKSVVEEFKVAKCRLVMTLRDSKDVKISEAGIQTRTGRKWSASTAVGEAESMLELKDIIGNTCVGRQGVGFSHFQQWEKANTQERRQMVQKEIRRIEEERRRGKSVELSKQGAWTRWNLPERKMTWAEIWRMEPFRISFLLRSVYDTLPSPVNLHQWGLTEDPCCKLCGGRGTMAHILSGCKEALRQGRYRWRHDNVLRVLADILEVERRKKRTGVRTNQAGIKFVKPGEKATVKPRSTSSIFERASTWEMKVDLDRKLVFPGIVETTLRPDMVIWTEQSRHLIAIELTVPWEEGCEEAHERKKAKYDELMEKCRSRGWTVWLFPVEVGCRGFPAQSVWRTLRSIGLTGRARATAIRRLGEAAERASCWLWHKRDEPMWKPT

SEQ ID NO: 5032 - protein, 1099 aa, Mizuhopecten yessoensis
MIQTTLSGEPVEARCHCGKICKNSRGLKIHQARTKCGHREILTQRTDISNESGETQEELSQESNHSTESLQASVSPDGSIGNLNEASAHGVQAVRDRRLDKVQWPKTNDEAAWRNLDQDLEAILETTLQGNVERKVEALTSIVYSVCKERFGVETSRTQPRAKTTKENRRERKIKQLRKELRELGKRFKTAPESEKVGIQQIRDDLRETLRRLRNAERLRKGRKERAKRRADFVKDPFQFSKTLLGAERSGHLESSKEEVEAHLKGVHSDNRRAEPLGYCPRILEVEAPSAPLDTKLPTWKEIQDVVKKARSGSAPGPSGITYRVYKKCPRLLRRLWQLICKVWKKGTIPACWKKAEGIFAPKEKDSKTVEQFRTISLLSVEGKIFFSILAKRMTAYMVENSYVDTSSQKGGIPGFSGCVEHTSVISQLIREAKQKKGNLTVVWLDLANAYGSVPHKLIEAALDHYHIPEHIRKMIMSYFGGIQLRFTVGESTTAWQDLEKGIVTGCTISPILFIMGMNIIIKAAERETRGPRMESGIYQPANRGFMDDLTITTTTHVQARWVLSALEEVVTWARMQFKPRKSRCMIMRNGRLSRQFVLKVQEEEIPSIIGSPIKCLGKWFDDTLSDSQNHKNTQSQVRQWMKKIHKSGLPGKYKAWIYQHGMLPRLTWLLLLYEIPTSTVEGLEKMVNGYLRKWLGVPPSFTSVGLYSCSAELQLPFKSVVEEFKVAKCRLVMTLRDSKDVKISEAGIQTRTGRKWSASTAVGEAESMLELKDIIGNTCVGRQGVGFSHFQQWEKANTQERRQMVQKEIRRIEEERRRGKSVELSKQGAWTRWNLPERKMTWAEIWRMEPFRISFLLRSVYDTLPSPVNLHQWGLTEDPCCKLCGGRGTMAHILSGCKEALRQGRYRWRHDNVLRVLADILEVERRKKRTGVRTNQAGIKFVKPGEKATVKPRSTSSIFERASTWEMKVDLDRKLVFPGIVETTLRPDMVIWTEQSRHLIVIELTVPWEEGCEEAHERKKAKYDELMEECRSRGWTVWLFPVEVGCRGFPAQSVWRTLQSIGLTGRAIATAIRRLGEAAERASCWLWHKREEPLWKPT

SEQ ID NO: 5033 - protein, 1099 aa, Mizuhopecten yessoensis
MIQTTLSGEPVEARCHCGKICKNSRGLKIHQARTKCGHREILTQRTDISNESGETQEELSQESNHSTESLQASVSPDGSIGNLNEASAHGVQAVRDRRLDKVQWPKTNDEAAWRNLDQDLEAILETTLQGNVERKVEALTSIVYSVCKERFGVETSRTQPRAKTTKENRRERKIKQLRKELRELGKRFKTAPESEKVGIQQIRDDLRETLRRLRNAERLRKGRKERAKRRADFVKDPFQFSKTLLGAERSGHLESSKEEVEAHLKGVHSDNRRAEPLGYCPRILEVEAPSAPLDTKLPTWKEIQDVVKKARSGSAPGPSGITYRVYKKCPRLLRRLWQLICKVWKKGTIPACWKKAEGIFAPKEKDSKTVEQFRTISLLSVEGKIFFSILAKRMTAYMVENSYVDTSSQKGGIPGFSGCVEHTSVISQLIREAKQKKGNLTVVWLDLANAYGSVPHKLIEAALDHYHIPEHIRKMIMSYFGGIQLRFTVGESTTAWQDLEKGIVTGCTISPILFIMGMNIIIKAAERETRGPRMESGIYQPANRGFMDDLTITTTTHVQARWVLSALEEVVTWARMQFKPRKSRCMIMRNGRLSRQFVLKVQEEEIPSIIGSPIKCLGKWFDDTLSDSQNHKNTQSQVRQWMKKIHKSGLPGKYKAWIYQHGMLPRLTWLLLLYEIPTSTVEGLEKMVNGYLRKWLGVPPSFTSVGLYSCSAELQIPFKSVVEEFNVAKCRLVMTLRDSKDVKISEAGIQTRTGRKWSASTAVGEAESMLELKDIIGNTCVGRQGVGFSHFQQWEKANTQESRQMVQKEIRRIEEERRRGKSVELSKQGAWTRWNLPERKMTWAEIWRMEPFRISFLLRSVYDTLPSPVNLHQWGLTEDPCCKLCGGRGTMAHILSGCKEALRQGRYRWRHDNVLRVLADILEVERRKKRTGVRTNQAGIKFVKPGEKATVKPRSTSSIFERASTWEMKVDLDRKLVFPGIVETTLRPDMVIWTEQSRHLIAIELTVPWEEGCEEAHERKKAKYDELMEKCRSRGWTVWLFPVEIGYRGFTAQSVWRTLRSIGLTGRARATAIRRLGEAAERASCWLWHKRDEPMWKPT

SEQ ID NO: 5034 - protein, 1099 aa, Mizuhopecten yessoensis
MIQTTLSGEPVEARCHCGKICKNSRGLKIHQARTKCGHREILTQRTDISNESGETQEELSQESNHSTESLQASVSPDGSIGNLNEASAHGVQAVRDRRLDKVQWPKTNDEAAWRNLDQDLEAILETTLQGNVERKVEALTSIVYSVCKERFGVETSRTQPRAKTTKENRRERKIKQLRKELRELRKRFKTAPESEKVGIQQIRDDLRETLRRLRNAERLRKGRKERAKKRADFVKDPFQFSKTLLGAERSGHLESSKEEVEAHLKGVHSDNRRAEPLGYCPRILEVEAPSAPLDTKLPTWKEIQDVVKKARSGSAPGPSGITYRVYKKCPRLLRRLWQLICKVWKKGTIPACWKKAEGIFAPKEKDSKTVEQFRTISLLSVEGKIFFSILAKRMTAYMVENSYVDTSSQKGGIPGFSGCVEHTSVISQLIREAKQKKGNLTVVWLDLANAYGSVPHKLIEAALDHYHIPEHIRKMIMSYFGGIQLRFTVGESTTAWQDLEKGIVTGCTISPILFIMGMNIIIKAAERETRGPRMESGIYQPANRGFMDDLTITTTTHVQARWVLSALEEVVTWARMQFKPRKSRCMIMRNGRLSRQFVLKVQEEEIPSIIGSPIKCLGKWFDDTLSDSQNHKNTQSQVRQWMKKIHKSGLPGKYKAWIYQHGMLPRLTWLLLLYEIPTSTVEGLEKMVNGYLRKWLGVPPSFTSVGLYSCSAELQLPFKSVVEEFKVAKCRLVMTLRDSKDVKISEAGIQTRTGRKWSASTAVGEAESMLELKDIIGNTCVGRQGVGFSHFQQWEKANTQERRQMVQKEIRRIEEERRRGKSVELSKQGAWTRWNLPERKMTWAEIWRMEPFRISFLLRSVYDTLPSPVNLHQWGLTEDPCCKLCGGRGTMAHILSGCKEALRQGRYRWRHDNVLRVLADILEVERRKKRTGVRTNQAGIKFVKPGEKATVKPRSTSSIFERASTWEMKVDLDRKLVFPGIVETTLRPDMVIWTEQSRHLIAIELTVPWEEGCEEAHERKKAKYDELMEKCRSRGWTVWLFPVEVGCRGFPAQSVWRTLRSIGLTGRARATAIRRLGEAAERASCWLWHKRDEPMWKPT

SEQ ID NO: 5035 - protein, 1097 aa, Mytilus edulis
MVQTTLTGEKAEAKCHCGKICKNQRGLKIHQSRSGCSRGIVTEQRTDLSGETQENPSQDTNHSARNLSASVTFHDSSQSLNDEEPIAQQRQETSHQKERIAWPKMNSEAQWRNLNDDLGVILETSLQGCVERRIETLTTLVYNIGKERFGVEERKERSNIKQTPNRREQKIKQLRKELKDLNRRFKKSNEIEKLGIACITDNVREELRRTRRAEQLKNSNKKKAKNRANFIKNPYNYTKTLLGGERTGHLHCSKEEVEKYLHETHSDKERETPLGYCPRVEEEKQPTIEFETKEPTWKEVCEVVKKARTGSAPGYSGVPYKVYKKCPKILRKLWQLFRILWKKGTIPESWQKAEGCFVPKEKDSKDISQFRTISLLSVEGKIYFSVLANRMTKYMVENSYIDTSMQKGGIAGFSGCVEHTSVLSQLIHEAKTGKKNLAVVWLDLANAYGSVPHKLIEMAMDHYHIPEHIKKIVLTYFDGILLRFTVDNKTTAWQKLEKGIVTGCTISPILFIMGMNIIMKAAERETRGPKTDSGIFLPATRGFMDDLTVTTSSHIQARWILTALEEVVTWARMKFKPRKSRSMILKKGKITTKFQLKIQGDEIPTIVDNPIKCLGKWFDDTLKDNTSVKTVQSQVVEWLKKVDKSGLPGKFKAWIYQHGLLPRLTWLLMIYEMTATTVESIERKINSHLRRWLGVPPSFTAIGLYSRSSQLQLPLTSTLEEYKVSKSRLVMTLRDSKDSKISEAGIQTRTGRKWSARTAVDQAESILHHKDIVGNTCTGRQGLGMTHFQQWSKATPKEKSSMVQSEIRTVEEQRRAKAVELSRQGAWMKWNLPERKITWAELWRMEPFRISFMLRSVYDTLPSPSNLHQWGLIEEPSCKLCGERGTMAHILSGCKVALTQGRYRWRHDKVLKHLAEILDIERKKKRPSKTEAKQIRFVREGDTGHATKSQQHFILDKGSDWNMRADIGKKLVFPECVQTTLRPDIVVWSQPSKMIVAIELTVPWEERCEEAYQRKKEKYTELMTTCRERGWKAWLFPVEVGCRGFPAQSVWRMLQAMGIVGKARKTAVRQLGEAAERSSCWLWHRRDDLSWKPSADE

SEQ ID NO: 5036 - protein, 937 aa, Chrysoteuchia culmella
MTDPLRATCPHCPGSSRLFVAPRGLNVHIGRKHKDCQTRRLDPVSAPVTPQGKSIDLNHLCNLKNSVRVLKHIPKGARCLAAGKLAQIINRCVDFNGIEDWQALLTYAYTALRVPDGGDKRSLTTKVKENIDRSFCHSAESSPSFSKPLPLYQSITTKVYDGDLRGAMRLLVSDNSLAPSTSETLDALKFKHPPPSRPLSLPPEPDSSCPSLSVTVNEVLYAIGTFQNGSAPGLDGLRPEHFKELISLSAGDNGHLLLESFTRLSNFLLRGLLNREVCPFLYGASLIALNKKDGGIRPIAVGSIVRRLVAKLGCRAVKSEQSEYLQPHQLGFGTPLGCEAAIHATRAFAFLKNNTDNIIVKLDIQNAFNSLERDVILTEVREHIPSIYPFLHQCYSASSYLYFGDSRVLSQTGTQQGDPLGPLIFSLAIHKLISSLESPLNVWYLDDGTVGGRPEDVAKDIQSLILGLEGIGLKINMSKCEYYPCSGNSSSIVESVLPGIKMLDRANFRILGAPVFSEAIPDVLMAKNQELLSSRECLERLPAHVALVLLRSCLSMPKLNYTVRTAPVWLHQEAMSTSDNSLKELLESILNVHLSDGQWHQASLPVRHGGLGIRRTQDKALPAFLASLHGALNLVTRVLNINGDSFRAPFADEALTAWSIFCPNHDPPDHPEAQRNWDDIRSKLTLEELIFDASNADLARLRAVSRPESGAWLHALPSPQLGTLMDDDSLRVAVGLRLGCNVVEPHRCICGVQVEANGHHGLSCSRCAGRFPRHHALNDVIRRALIAANIPCVLEPPGLSRTDGKRPDGLTLVPWERGRCLLWDATCVSTFAASHLPYTSRTAGSAAENAAGKKHSKYVTLKQNYFFIPFAVETSGVWGSEAIAFVRELGNRLVQRGHDRRSGSYLVQRLSLAIQRGNAAGIMGTFESEMTRGGLLD

SEQ ID NO: 5037 - protein, 937 aa, Chrysoteuchia culmella
MTDPLRATCPHCPGSSRLFVAPRGLNVHIGRKHKDCQTRRLDPVSAPVTPQGKSIDLNHLCNLKNSVRVLKHIPKGARCLAAGKLAQIINRCVGFNGIEDWQALLTYAYTALRVPDGGDKRSLTTKVKENIDRSFCHSAESSPSFSKPLPLYQSITTKVYDGDLRGAVRLLVSDNALAPSTGETLDALKFKHPPPSRPLSLPPEPDSSCPSLSVTVNEVLYAIGTFQNGSAPGLDGLRPEHFKELISLSAGDNGHLLLESFTRLSNFLLRGLLNREVCPFLYGASLIALNKKDGGIRPIAVGSIVRRLVAKLGCRAVKSEQSEYLQPHQLGFGTPLGCEAAIHAARAFAFLKNNTDNIIVKLDIQNAFNSLERDVILTEVREHIPSIYPFLHQCYSASSYLYFGDSRVLSQTGTQQGDPLGPLIFSLAIHKLISSLESPLNVWYLDDGTVGGRPEDVAKDIQSLILGLEGIGLKINMSKCEYYPCSGNSSSIIESVLPGIKMLDRANFRILGAPVFSEAIPDVLMAKNQELLSSRECLERLPAHVALVLLGSCLSMPKLNYTVRTAPVWLHQEAMSTSDNSLKELLESILNVHLSDGQWHQASLPVRHGGLGIRRTQDTALPAFLASLHGALNLVTRVLNINGDSFRAPFADEALTAWSIFCPNHDPPDHPEAQRNWDDIRSKLTLEELIFDASNADLARLRAVSRPESGAWLHALPSPQLGTLMDDDSLRVAVGLRLGCNVVEPHRCICGVQVEANGHHGLSCSRCAGRFPRHHALNDVIRRALIAANIPCVLEPPGLSRTDGKRPDGLTLVPWERGRCLLWDATCVSTFAASHLPYTSRTAGSAAENAAGKKHSKYVTLKQNYFFIPFAVETSGVWGSEAIAFVRELGNRLVQRGHDRRSGSYLVQRLSLAIQRGNAAGIMGTFESEMTRGGLLD

SEQ ID NO: 5038 - protein, 937 aa, Chrysoteuchia culmella
MTDPLRATCPHCPGSSRLFVAPRGLNVHIGRKHKDCQTRRLDPVSAPVTPQGKSIDLNHLCNLKNSVRVLKHIPKGARCLAAGKLAQIINRCVDFNGIEDWQALLTYAYTALRVPDGGDKRSLTTKVKENIDRSFCHSAESSPSISKPLPLYQSITTKVYDGDLRGAVRLLVSDNSLAPSTGETLDALKFKHPPPSRPLSLPPEPDSSCPSLSVTVNEVLYAIGTFQNGSAPGLDGLRPEHFKELISLSAGDNGHLLLESFTRLSNFLLRGLLNREVCPFLYGASLIALNKKDGGIRPIAVGSIVRRLVAKLGCRAVKSEQSEYLQPHQLGFGTPLGCEAAIHAARAFAFLKNNTDNIIVKLDIQNAFNSLERDVILTEVREHIPSIYPFLHQCYSASSYLYFGDSRVLSQTGTQQGDPLGPLIFSLAIHKLISSLESPLNVWYLDDGTVGGRPEDVAKDIQSLILGLEGIGLKINMSKCEYYPCSGNSSSIIESVLPGIKMLDRANFRILGAPVFSEAIPDVLMAKNQELLSSRECLERLPAHVALVLLRSCLSMPKLNYTVRTAPVWLHQEAMSTSDNSLKELLESILNVHLSDGQWHQASLPVRHGGLGIRRTQDTALPAFLASLHGALNLVTRVLNINGDSFRAPFADEALTAWSIFCPNQDPPDHPEAQRNWDDIRSKLTLEELIFDASNADLARLRAVSRPESGAWLHALPSPQLGTLMDDDSLRVAVGLRLGCNVVEPHRCICGVQVEANGHHGLSCSRCAGRFPRHHALNDVIRRALIAANIPCVLEPPGLSRTDGKRPDGLTLVPWERGRCLLWDATCVSTFAASHLPYTSRTAGSAAENAAGKKHSKYVTLKQNYFFIPFAVETSGVWGSEAIAFVRELGNRLVQRGHDRRSGSYLVQRLSLAIQRGNAAGIMGTFESEMTRGGLLD

SEQ ID NO: 5039 - protein, 971 aa, Cydia splendana
MFNQNAPPEIPLLECPICCDHKRYKGQRGLNIHCVRAHSPRIDPQLPPTATNNVATNSNANTHPATSSIISLAQLLATLKNETKLTKRIPKGARSSVARSLAECIARVVADNSNASWERLLTFAYHNLHIPHMKSNRSLTSIIKSNITHPSFPIPHSVHNPTDQTTRLLSTNPKYKCKSIENKLSDGNIKGATRLLFSSDTLATCSPAVLNDLQEKHPSVSTSSLQPNPPATSFQPLQVSKTAILHAILSFPTGSAGGLDGISPQHLKDLTSPLAGDAGETLLDELTALTNLMLTGKVCQDIVPVLYGANLVALMKKDGGIRPIAVGNTFRRLTSKICCREFHSRLTSKFKPTQLGFGLKGGCEAAVHATRSFLDSQHFEILVKVDVKNAFNSIDRGILLNQIENDLPEIYSYLWQCYGTTSKLMYKNNEILSCVGCQQGDPLGPAIFSLAIHPVITQLTSDLNLWYLDDGTIGGSKSSVLADLKTLIDRFAEIGLSINFNKCEMFISEAIPANTRSSIINEINQLTPNISILTRETLTLLGAPILDESIPLCINSKIEKFFKCSNLFYEINPHMALYILRLCLFSPKFLYILRCAPLWKFPIITANIDQILKDTVSKILNVTFTSPSWIQATLPIKYGGLGIRLTGSLALPAFLSSAYSTLTLIGGILRTPSTANVSVSCLADAESAWSADHPVERVPEEKSSQATWDVINIKSQHQLLLQNCHNDYERARLLAVSEKESGHWLHALPSRNLGSTLDPSALRIAVCLRLGLKICEPHACSRCAQAVDALGRHGLHCQMSAGRLYRHATLNDLIRRALCTASLPATLEPSGLSATDGKRPDGCTLVPWSLGRPLAWDATCVDTLAPSHVEGSARKPGTAADQAQTLKRRKYAFLTDTYDFAALAIETLGPWSTDTKQLIKEVSVRLIGVSGDHRAGSFLAQRLSLAVQRGNAASILGSIPEAGSLGEIFYI

SEQ ID NO: 5040 - protein, 969 aa, Notocelia uddmanniana
MSNQDAPSQIALLECPICADSKRYKGQRGLNIHCVRAHSPRSDLPSLPSSVQNVTASRIPNASPTQASLAQFLSALKASCKLSKRIPKGARTSAARSLAQCIARVVSDNNFMSWECLFTFPYQNFHIPHSKSNRSLTSIIKNNVSHPGFPASPPNNPNTSIQIPIMPSQNSKHKCKLIENKLSDGDLKGATRLLFSSDTLATYSPAVLSALQDKHPPSLASPQPPNPPSNSQLPLQVSKTAVLQAVLSFPAGSAGGLDGITPQHLKDLTSPLAGEAGETLLEELTALTNLMLAGKVCPDIVPILYGANLIALKKKDGGIRPIAVGSTLRRLTSKICCREYHSRLTDKFKPIQLGFGLKGGCEAAVHATRTFLNSQDFEILVKIDVKNAFNSIDRGILLNQIESDLPELYAYLWQCYGAPSKLIYKENEISSSVGCQQGDPLGPVIFNLAIHPIITQLTSKLNIWYLDDGTLGGKSSAVLTDLQFVINRFAEIGLSINFNKCELFISEKISPNIRASIINDINILTPNISTHSHDTLTLLGAPLFDESIPMCINSKIEHFQSCSELLFQINPHMALYILRLCLFSPKFMYILRCSPVWKFPSLTANIDQILKDTVCKILNITFSSHSWSQAILPIKFGGLGIRSTGSLALPAFLASVNSTLTIIGGILNVPSTDNVAVSCLADAEHAWSAENPNQRMPDEKPTQAAWDALKIKSIHQSLLGNSQNSHERARLMAVSEKESGHWLHALPSRNLGSVLDPSALRIAVCLRLGLKICEPHACSRCAQPVDSLGRHGLYCPMSAGRLYRHATLNDLIRRSLSTAALPATLEPSGLSAADGKRPDGCTLVPWCLGRPLAWDATCVDTLAPSHVEGSARKSGMAADQAQMFKHRKYAFLTNEYEFVALAVETLGPWSSDTKKFIKEVSVRLIGISGDHRAGSFFAQRLSLAVQRGNAASVLGSMPQACELDGVFYI

SEQ ID NO: 5041 - protein, 969 aa, Pammene fasciana
MSSQNNPPQIPLLECPICRDNKRYKGQRGLNIHSAHAHRPRTDLLPHPATTNNAAFNNNATSSPAPTSLAQLLATLKSESKLTKRIPKGARASAARSLSECIARVVADNNTASWERLLIFAYQHFHIPHYKSDQTLTSIIKNNVRNPSFPASQPNNWNIINQTPSSLSTNSKYQCTLIENKLSDGNLKAATRLLFSSDTLAPYSPAVFSALQDKHPAAPASTPQPNPPAASHQPLQVSRSAILQAVLSFPAGSAGGLDGISPQHLKDLTSPLAGDAGETLLDELTALTNLMLTGKVCHDITPILYGANLIALKKKDGGIRPIAVGNTFRRLVSKICCREFHSRLTSKFKPTQLGFGLKGGCEAAVHATRSFLAKEQFEVLVKVDVRNAFNSIDRSVLLSQIENDLPEIYGYLWQCYGNASKLMYKNDEISSCVGCQQGDPLGPVIFSLAIQPIITQLTSELNFWYLDDGTFGGSRSSVVADLQTLIDRFAEIGLSINYNKCEMFISESIPLNTRLSIINEINQLTPNISILSRETLTLLGAPILEESISSSINSKIEQFHKCSHLLFEINPHMAIFILRLCLFSPKFMYILRCAPLWKFPLITANVDQILKDTMSKILNVIFTTSSWSQATLPIKYGGLGIRLTGDLALPAFLSSAYSTRTLISGILRTQSTADVSVSCLADAESAWLADFSIEQIPDDKSSQAAWDVVNIKKHHQLLIENSCNRIERARILAVSEKESGYWLHAFPSRNLGSVLEPPALRIAVCLRLGLKVCEAHTCSRCAQQVDTLGRHGLHCQKSAGRIYRHSTLNDLIRRALNTASLPATLEPTGLSAADGKRPDGCTVVPWRLGRPLAWDATCVDTLAPSHVEGSTRKPGTAADKAQTLKRRKYAFLTNEYYFAALAVETLGPWSTDTKNFVKEVSIRLVGASGDHRAGSFFAQRLSLAVQRGNVASILGSFPEAGELGELFYI

SEQ ID NO: 5042 - protein, 971 aa, Cydia splendana
MFNQNAPPEIPLLECPICCDHKRYKGQRGLNIHCVRAHSPRIDPQLPPTATNNVATNSNANTHPATSSIISLAQLLATLKNETKLTKRIPKGARSSVARSLAECIARVVADNSNASWERLLTFAYQNLHIPQMKSNRSLTSIIKSNVTHPSFPIPHSVHNPTDQTTRLLSTNPKYKCKSIENKLSDGNIKGATRLLFSSDTLATCSPAVLNDLQEKHPSVSTSSLQPNPPATSSQPLQVSKTAILHAILSFPTGSAGGLDGISPQHLKDLTSPLAGDAGETLLDELTALTNLMLTGQVCQDIVPVLYGANLVALMKKDGGIRPIAVGNTFRRLTSKICCREFHSRLTSKFKPTQLGFGLKGGCEAAVHATRSFLDSQHFEILVKVDVKNAFNSIDRGILLNQIENDLPEIYSYLWQCYGTTSKLMYKNNEILSCVGCQQGDPLGPAIFSLAIHPVITQLTSDLNLWYLDDGTIGGSKSSVLADLKTLIDRFAEIGLSINFNKCEMFISEAVPANTRSSIINEINQLTPNISILTRETLTLLGAPILDESIPLCINSKIEKFFKCSNLFYEINPHMALYILRLCLFSPKFLYILRCAPLWKFPIITANIDQILKDTVSKILNVTFTSPSWIQATLPIKYGGLGIRLTGSLALPAFLSSAYSTLTLIGGILRTPSTANVSVSCLADAESAWSADHPVERVPEEKSSQATWDVINIKSQHQLLLQNCHNDYERARLLAVSEKESGHWLHALPSRNLGSTLDPSALRIAVCLRLGLKICEPHTCSRCAQAVDALGRHGLHCQMSAGRLYRHATLNDLIRRALCTASLPATLEPSGLSATDGKRPDGCTLVPWSLGRPLAWDATCVDTLAPSHVEGSARKPGTAADQAQTLKRRKYAFLTDTYDFAALAIETLGPWSTDTKQLIKEVSVRLIGVSGDHRAGSFLAQRLSLAVQRGNAASILGSIPEAGSLGEIFYI

SEQ ID NO: 5043 - protein, 971 aa, Cydia splendana
MFNQNAPPEIPLLECPICCDHKRYKGQRGLNIHCVRAHSPRIDPQLPPTVTNNVATNSNANTHPATSSIISLAQLLATLKNETKLTKRIPKGARSSVARSLAECIARVVADNSNASWERLLTFAYQNLHIPHMKSNRSLTSIIKSNVTHPSFPIPHSVHNPTDQTTRLLSTNPKYKCKSIENKLSDGNIKGATRLLFSSDTLATCSPAVLNDLQEKHPSVSTSSLQPNPPATSSQPLQVSKTAILHAILSFLTGSAGGLDGISPQHLKDLTSPLAGDAGETLLDELTALTNLMLTGKVCQDIVPVLYGANLVALMKKDGGIRPIAVGNTFRRLTSKICCREFHSRLTSKFKPTQLGFGLKGGCEAAVHATRSFLDSQHFEILVKVDVKNAFNSIDRGILLNQIENDLPEIYSYLWQCYGTTSKLMYKNNEILSCVGCQQGDPLGPAIFSLAIHPVITQLTSDLNLWYLDDGTIGGSKSSVLADLKTLIDLFAEIGLSINFNKCEMFISEAIPANTRSSIINEINQLTPNISILTRETLTLLGAPILDESIPLCINSKIEKFFKCSNLFYEINPHMALYILRLCLFSPKFLYILRCAPLWKFPIITANIDQILKDTVSKILNVTFTSPSWIQATLPIKYGGLGIRLTGSLALPAFLSSVYSTLTLIGGILRTPSTANVSVSCLADAESAWSADHPVERVPEEKSSQATWDVINIKSQHQLLLQNCHNDYERARLLAVSEKESGHWLHALPSRNLGSTLDPSALRIAVCLRLGLKICEPHTCSRCAQAVDALGRHGLHCQMSAGRLYRHATLNDLIRRALCTASLPATLEPSGLSATDGKRPDGCTLVPWSLGRPLAWDATCVDTLAPSHVEGSARKPGTAADQAQTLKRRKYAFLTDTYDFAALAIETLGPWSTDTKQLIKEVSVRLIGVSGDHRAGSFLAQRLSLAVQRGNAASILGSIPEAGSLGEIFYI

SEQ ID NO: 5044 - protein, 971 aa, Cydia splendana
MFNQNAPPEIPLLECPICCDHKRYKGQRGLNIHCVRAHSPRIDPQLPPTATNNVATNSNANTHPATSSIISLAQLLATLKNETKLTKRIPKGARSSVARSLAECIARVVADNSNASWERLLTFAYQNLHIPHMKSNRSLTSIIKSNVTHPSFPIPHSVHNPTDQTTRLLSTNPKYKCKSIENKLSDGNIKGATRLLFSSDTLATCSPAVLNDLQEKHPSVSTSSLQPNPPATSSQPLQVSKTAILHAILSFPTGSAGGLDGISPQHLKDLTSPLAGDAGETLLDELTALTNLMLTGKVCQDIVPVLYGANLVALMKKDGGIRPIAVGNTFRRLTSKICCREFHSRLTSKFKPTQLGFGLKGGCEAAVHATRSFLDSQHFEILVKVDVKNAFNSIDRGILLNQIENDLPEIYSYLWQCYGTTSKLMYKNNEILSCVGCQQGDPLGPAIFSLAIHPVITQLTSDLNLWYLDDGTIGGSKSSVLADLKTLIDRFAEIGLSINFNKCEMFISEAIPANTRSSIINEINQLTPNISILTRETLTLLGAPILDESIPLCINSKIEKFFKCSNLFYEINPHMALYILRLCLFSPKCLYILRCAPLWKFPIITANIDQILKDTVSKILNVTFTSPSWIQATLPIKYGGLGIRLTGSLALPAFLSSAYSTLTLIGGILRTPSTANVSVSCLADAESAWSADHPVERVPEEKSSQATWDVINIKSQHQLLLQNCHNDYERARLLAVSEKESGHWLHALPSQNLGSTLDPSALRIAVCLRLGLKICEPHTCSRCAQAVDALGRHGLHCQMSAGRLYRHATLNDLIRRALCTASLPATLEPSGLSATDGKRPDGCTLVPWSLGRPLAWDATCVDTLAPSHVEGSARKPGTAADQAQTLKRRKYAFLTDTYDFAALAIETLGPWSTDTKQLIKEVSVRLIGVSGDHRAGSFLAQRLSLAVQRGNAASILGSIPEAGSLGEIFYI

SEQ ID NO: 5045 - protein, 969 aa, Pammene fasciana
MSSQNNPPQIPLLECPICRDNKRYKGQRGLNIHSAHAHRPRTDLLPHPATTNNAAFNNNATSSPAPTSLAQLLATLKSESKLTKRIPKGARASAARSLSECIARVVADNNTASWERLLIFAYQHFHIPHYKSDQTLTSIIKNNVRNPSFPASQPNNWNIINQTPSSLSTNSKYQCTLIENKLSDGNLKAATRLLFSSDTLAPYSPAVFSALQDKHPAAPASTPQPNPPAASHQPLQVSRSAILQAVLSFPAGSAGGLDGISPQHLKDLTSPLAGDAGETLLDELTALTNLMLTGKVCHDITPILYGANLIALKKKDGGIRPIAVGNTFRRLVSKICCREFHSCLTSKFKPTQLGFGLKGGCEAAVHATRSFLAKEQFEVLVKVDVRNAFNSIDRSVLLSQIENDLPEIYGYLWQCYGNASKLMYKNDEISSCVGCQQGDPLGPVIFSLAIQPIITQLTSELNFWYLDDGTFGGSRSSVVADLQTLIDRFAEIGLSINYNKCEMFISESIPLNTRLSIINEINQLTPNISILSRETLTLLGAPILEESISSSINSKIEQFHKCSHLLFEINPHMAIFILRLCLFSPKFMYILRCAPLWKFPLITANVDQILKDTMSKILNVIFTTSSWSQATLPIKYGGLGIRLTGDLALPAFLSSAYSTRTLISGILRTQSTADVSVSCLADAESAWLADFSIEQIPDEKSSQAAWDVVNIKKHHQLLIENSCNRIERARIFAVSEKESGYWLHAFPSRNLGSVLEPPALRIAVCLRLGLKVCEAHTCSRCAQQVDTLGQHGLHCQKSAGRIYRHSTLNDLIRRALNTASLPATLEPTGLSAADGKRPDGCTVVPWSLGRPLAWDATCVDTLAPSHVEGSTRKPGTAADKAQTLKRRKYAFLTNEYYFAALAVETLGPWSTDTKNFVKEVSIRLVGASGDHRAGSFFAQRLSLAVQRGNVASILGSFPEAGELGELFYI

SEQ ID NO: 5046 - protein, 971 aa, Cydia splendana
MFNQNAPPEIPLLECPICCDHKRYKGQRGLNIHCVRAHSPRIDPQLPPTATNNVATNSNANTHPATSSILSLAQLLATLKNETKLTKRIPKGARSSVARSLAECIARVVADNSNASWERLLTFAYQNLHIPHMKSNRSLTSIIKSNVTHPSFPIPHSVHNSTDQTTRLLSTNPKYKCKSIENKLSDGNIKGATRLLFSSDTLATCSPAVLNDLQEKHPSVSTSSLQPNPPATFSQPLQVSKTAILHAILSFPTGSAGGLDGISPQHLKDLTSPLAGDAGETLLDELTALTNLMLTGKVCQDIVPVLYGANLVALMKKDGGIRPIAVGNTFRRLTSKICCREFHSRLTSKFKPTQLGFGLKGGCEAAVHATRSFLDSQHFEILVKVDVKNAFNSIDRGILLNQIENDLPEIYSYLWQCYGTTSKLMYKNNEILSCVGCQQGDPLGPAIFSLAIHPVITQLTSDLNLWYLDDGTIGGCKSSVFADLKTVIDRFAEIGLSINFNKCEMFISEAIPPNTRSSIINEINQLTPNISILTRETLTLLGAPILDESIPLCINSKIEKFFKCSNLFYEINPHMALYILRLCLFSPKFLYILRCAPLWKFPIITANIDQILKDTVSKILNVTFTSPSWIQATLPIKYGGLGIRLTGSLALPAFLSSAYSTLTLIGGILRTPSTANVSVSCLADAESAWSADHPVERVPEEKSSQATWDVINIKSQHQLLLQNCHNDYERARLLAVSEKESGHWLHALPSRNLGSTLDPSALRIAVCLRLGLKICEPHACSRCAQAVDALGRHGLHCQMSAGRLYRHATLNDLIRRALCTASLPATLEPSGLSATDGKRPDGCTLVPWSLGRPLAWDATCVDTLAPSHVEGSARKPGTAADQAQTLKRRKYAFLTDTYDFAALAIETLGPWSTDTKQLIKEVSVRLIGVSGDHRAGSFFAQRLSLAVQRGNAASILGSIPEAGSLGEIFYI

SEQ ID NO: 5047 - protein, 968 aa, Pammene fasciana
MATPNASPQVPLLECPICSDHKRYKGQRGLKIHCVRAHSPRIDRPALPTTALGSTTSNSGAGAGTDPASLAQLLAELKSSSKISKRIPKGARALAARSLAECLARVVSENSVGAWEQLLTFAYRHFHIPQIKTNRSLTSIIKANVSHPVIPNLHPADGQNIINQTTHNNDKYKCKLVEQKLSEGNLRGATRLLFSSDTLATHSPAVLTALQDKHPAGSVSSLPPPLPANSHQQLQVSRSAVLHAVLSFPAGSAGGLDGITPQHLKDLTSPLAGDAGETLLDELTALTNLMLEGKVCQDIVPLLYGANLIALKKKDGGIRPIAVGSTLRRLTSKICCREYQSRLTDKFKPIQLGFGVKGGCEAAVHATRSFLSGHDFEVFVKVDVKNAFNSIDRAVLLTQVRNELPEIYGYMWQCYGSASKLMYKGTEIPSCVGCQQGDPLGPVIFSLAIHPIITQLTSELNFWYLDDGTIGGSTLRVLADLKTLIDRFLEIGLSINFNKCEIFISETIPPNTRFAIINEINQLAPNISVLSRDTLTVLGAPILDESITQSVRSKIDQFQSCSNLLCEINPHMAIYILRLCLFAPKFMYFLRCAPLWKFPAITENIDQILKETVGKILNITFTSPSWSQATLPVKYGGLGIRLTGSLALPAFLSSAYGALPLVGGILHIPSTADTRVSCLADAESAWRTNHPAEGVPEDKASQAAWDAIDVKRLHQVLLQNCSDHYERARLLAVSEKESGHWLHALPSRNLGTALEPAALRIAVCLRLGLKVCEAHACSRCAHRVDTLGRHGLHCPKSAGRLYRHATLNDLIRRALGTASLPATLEPSGLSAADGKRPDGCTLVPWSLGRPLAWDATCVDTLAPSHVEGSARKPGTAADQAQTLKRRKYAFLTNEYEFAALAMETLGPWSSDTKAIVKEVSARLIGVSGDYRAGSFFAQRLSLAVQRGNSASILGSMPEAGKFGEVFYI

SEQ ID NO: 5048 - protein, 971 aa, Cydia splendana
MFNQNAPPEIPLLECPICCDHKRYKGQRGLNIHCVRAHSPRIDPQLPPTATNNVATNSNANTHPATSSIISLAQLLATLKNETKLTKRIPKGARSSVARSLAECIARVVADNSNASWERLLTFAYQNLHIPHMKSNRSLTSIIKSNVTHPSFPIPHSVHNPTDQTTRLLSTNPKYKCKSIENKLSDGNIKGATRLLFSSDTLATCSPAVLNDLQEKHPSVSTSSLQPNPPATSSQPLQVSKTAILHAILSFPTGSAGGLDGISPQHLKDLTSPLAGDAGETLLDELTALTNLMLTGKVCQDIVPVLYGANLVALMKKDGGIRPIAVGNTFRRLTSKICCREFHSRLTSKFKPTQLGFGLKGGCEAAVHATRSFLDSQHFEILVKVDVKNAFNSIDRGILLNQIENDLPEIYSYLWQCYGTTSKLMYKNNEILSCVGCQQGDPLGPAIFSLAIHPVITQLTSDLNLWYLDDGTIGGSKSSVLADLKTLIDRFAEIGLSINFNKCEMFISEAIPANTRSSIINEINQLTPNISILTRETLTLLGAPILDESIPLCINSKIEKFFKCSNLFYEINPHMALYILRLCLFSPKFLYILRCAPLWKFPIITANIDQILKDTVSKILNVTFTSPSWIQATLPIKYGGLGIRLTGSLALPAFLSSAYSTLTLIGGILRTPSTANVSVSCLADAESAWSADHPVERVPEEKSSQATWDVINIKSQHQLLLQNCHNDYERARLLAVSEKESGHWLHALPSRNLGSTLDPSALRIAVCLRLGLKICEPHTCSRCAQAVDALGRHGLHCQMSAGRLYRHATLNDLIRRALCTASLPVTLEPSGLSATDGKRPDGCTLVPWSLGRPLAWDATCVDTLAPSHVEGSARKPGTAADQAQTLKRRKYAFLTDTYDFAALAIETLGPWSTDTKQLIKEVSVRLIGVSGDHRAGSFLAQRLSLAVQRGNAASILGSIPEAGSLGEIFYI

SEQ ID NO: 5049 - protein, 969 aa, Pammene fasciana
MSSQNNPPQIPLLECPICRDNKRYKGQRGLNIHSAHAHRPRTDLLPHPATTNNAAFNNNATSSPAPTSLAQLLATLKSESKLTKRIPKGARASAARSLSECIARVVADNNTASWERLLIFAYQHFHIPHYKSDQTLTSIIKNNVRNPSFPASQPNNWNIINQTPSSLSTNSKYQCTLIENKLSDGNLKAATRLLFSSDTLAPYSPAVFSALQDKHPAAPASTPQPYPPAASHQPLQVSRSAILQAVLSFPAGSVGGLDGISPQHLKDLTSPLAGDAGETLLDELTALTNLMLTGKVCHDITPILYGANLIALKKKDGGIRPIAVGNTFRRLVSKICCREFHSRLTSKFKPTQLGFGLKGGCEAAVHATRSFLAKEQFEVLVKVDVRNAFNSIDRSVLLSQIENDLPEIYGYLWQCYGNASKLMYKNDEISSCVGCQQGDPLGPVIFSLAIQPIITQLTSELNFWYLDDGTFGGSRSSVVADLQTLIDRFAEIGLSINYNKCEMFISESIPLNTRLSIINEINQLTPNISILSRETLTLLGAPILEESISSSINSKIEQFHKCSHLLFEINPHMAIFILRLCLFSPKFMYILRCAPLWKFPLITANVDQILKDTMSKILNVIFTTSSWSQATLPIKYGGLGIRLTGDLALPAFLSSAYSTRTLISGILRTQSTADVSVSCLADAESAWLADFSIEQIPDDKSSQAAWDVVNIKKHHQLLIENSCNRIERARILAVSEKESGYWLHAFPSRNLGSVLEPPALRIAVCLRLGLKVCEAHTCSRCAQQVDTLGRHGLHCQKSAGRIYRHSTLNDLIRRALNTASLPATLEPTGLSAADGKRPDGCTVVPWSLGRPLAWDATCVDTLAPSHVEGSTRKPGTAADKAQTLKRRKYAFLTNEYYFAALAVETLGPWSTDTKNFVKEVSIRLVGASGDHRAGSFFAQRLSLAVQRGNVASILGSFPEAGELGELFYI

SEQ ID NO: 5050 - protein, 1015 aa, Andrena haemorrhoa
MNLNCCIVGEPTGSADPAINTEETGPNSDPNLAYPCRMPECNRSFATSRGRGVHEQKAHKNWHDERQAASINVRKAPWSAEEAALLARQEATLVINGERLINLALQPYFPHRTIEAIKGQRRYQCHKERVLQLLEEMRRGPVLPSSPEVANEPPQDDAGAVLVDQMVELQDQLEPLSGEDFHAKHLNSICDNLKQWSKDRIYEELESYLLEVFPPTSRKKKMGNAHIPNKTPTKRQLRRVAYAQTQRAWRKNPGDCLRTILRDKTSTQTPDKDTMVPYWHAVMTGGGTSTPGIGERREVKNALWTPIGTDEVKRALPEMSTAPGPDGLSARQLRAVPLGILTRVFNIFMLSGKVPKHLLESRTTLIPKKDAAAEPGEFRPITVSSVLTRAFHKVLANRLTRLVDLDKRQQAFMPTDGCARNIFNLDLILRYHRQNFKPLYMASVDIAKAFDSVTHQAIHDTLTNMGLPKPMVEYIMNTYERSYTKLTCDGWESDQIHPTCGVKQGDPLSPVIFNMIIDRLLQLIPEEVGVDIAGTHHNALAFADDIIFVASTPQGLQLMLDNAVDHLAKCGLIINVNKSFTVAIRNVPHMKKSVVDKTTTFRCLGRVLPAMQRESEWRYLGVPFTPEGLTLTRPEDQLKEDISRLTRAPLKPQQRLFALRVMVLPGSYHLLTLGNTNLSRLKKVDTLVRGAVRKWLSLPHDVPNAYIHANVKDGGLSIPSMRWLMPLRRRKRLEGLREQSTRPCSFLSQEIDRAKRRLLDERNDLDSAQKLDKRWAKILHASIDGMALKESRQTPQQHQWVIEGTRFLSGRDYVNTMKLRINALPTRSRTTRGQRADRLCRAGCKEIETLNHVLQRCHRTHSTRVNRHNAVAAYVKRALHKNFKTVEEEPHFQTVEGLRKPDLVAVQNKTAMVIDAQIVSEQTDLDAAHERKRDYYKHLEQAVKDRYSVETVKFSSITLSCRGIWSKASASDLIKNKIIKKSELKILSSRTLIGGLYAFWRFNKCTSIVRRTGIG

SEQ ID NO: 5051 - protein, 1015 aa, Andrena haemorrhoa
MNLNCCIVGEPTGSADPAINTEETGPNSDPNLAYPCRMPECNRSFATSRGRGVHEQKAHKNWHDERQAASINVRKAPWSAEEAALLARQEATLVINGERLINLALQPYFPHRTIEAIKGQRRYQCHKERVLQLLEEMRRGPVLPSSPEVANEPPQDDAGAVLVDLMVELQDQLEPLSGEDFHAKHLNSICDNLKQWSNDRIYEELESYLLEVFPPTSRKKKMGNAHIPNKTPTKRQLRRVAYAQTQPAWRKNPGDCLRTILRDKTSTQTPDKDTMVPYWHAVMTGGGTSTPGIGERREVKNALWTPIGTDEVKRALPEMSTAPGPDGLSARQLRAVPLGILTRVFNIFMLSGKVPKHLLESRTTLIPKKDAAAEPGEFRPITVSSVLTRAFHKVLANRLTRLVDLDKRQQAFMPTDGCARNIFNLDLILRYHRQNFKPLYMASVDIAKAFDSVTHQAIHDTLTNMGLPKPMVEYIMNTYERSYTKLTCDGWESDQIHPTCGVKQGDPLSPVIFNMIIDRLLQLIPEEVGVDIAGTHHNALTFADDIIFVASTPQGLQLMLDNAVDHLAKCGLIINVNKSFTVAIRNVPHMKKSVVDKTTTFRCLGRVLPAMQRESEWRYLGVPFTPEGLTLTRPEDQLKEDISRLTRAPLKPQQRLFALRVMVLPGSYHLLTLGNTNLSRLKKVDTLVRGAVRKWLSLPHDVPNAYIHANVKDGGLSIPSMRWLMPLRRRKRLEGLREQSTRPCSFLSQEIDRAKRRLLDERNDLDSAQKLDKRWAKILHASIDGMALKESRQTPQQHQWVIEGTRFLSGRDYVNTMKLRINALPTRSRTTRGQRADRLCRAGCKEIETLNHVLQRCHRTHSTRVNRHNAVAAYVKRALHKNFKTVEEEPHFQTVEGLRKPDLVAVQNKTAMVIDAQIVSEQTDLDAAHERKRDYYKHLEQAVKDRYSVETVKFSSITLSCRGIWSKASASDLIKNKIIKKSELKILSSRTLIGGLYAFWRFNKCTSIVRRTGIG

SEQ ID NO: 5052 - protein, 1015 aa, Andrena haemorrhoa
MNLNCCIVGEPTGSADPAINTEETGPNSDPNLAYPCRMPECNRSFATSRGRGVHEQKAHKNWHDERQAASINVRKAPWSAEEAALLARQEATLVINGERLINLALQPYFPHRTIEAIKGQRRYQCHKERVLQLLEEMRRGPVLPSSPEVANEPPQDDAGAVLVDQMVELQDQLEPLSGEDFHAKHLNSICDNLKQWSKNRIYEELESYLLEVFPPTSRKKKMGNAHIPNKTPTKRQLRRVAYAQTQRAWRKNPGDCLRTILRDKTSTQTPDKDTMVPYWHAVMTGGGTSTPGIGERREVKNALWTPIGTDEVKRALPEMSTAPGPDGLSARQLRAVPLGILTRVFNIFMLSGKVPKHLLESRTTLIPKKDAATEPGEFRPITVSSVLTRAFHKVLANRLTRLVDLDKRQQAFMPTDGCARNIFNLDLILRYHRQNFKPLYMASVDIAKAFDSVTHQAIHDTLTNMGLPKPMVEYIMNTYERSYTKLTCDGWESDQIHPTCGVKQGDPLSPVIFNMIIDRLLQLIPEEVGVDIAGTHHNALAFADDIIFVASTPQGLQLMLDNAVDHLAKCGLIINVNKSFTVAIRNVPHMKKSVVDKTTTFRCLGRVLPAMQRESEWRYLGVPFTPEGLTLTRPEDQLKEDISRLTRAPLKPQQRLFALRVMVLPGSYHLLTLGNTNLSRLKKVDTLVRGAVRKWLSLPHDVPNAYIHANVKDGGLSIPSMRWLMPLRRRKRLEGLREQSTRPCSFLSQEIDRAKRRLLDERNDLDSAQKLDKRWAKILHASIDGMALKESRQTPQQHQWVIEGTRFLSGRDYVNTMKLRINALPTRSRTTRGQRADRLCRAGCKEIETLNHVLQRCHRTHSTRVNRHNAVAAYVKRALHKNFKTVEEEPHFQTVEGLRKPDLVAVQNKTAMVIDAQIVSEQTDLDAAHERKRDYYKHLEQAVKDRYSVETVKFSSITLSCRGIWSKASASDLIKNKIIKKSELKILSSRTLIGGLYAFWRFNKCTSIVRRTGIG

SEQ ID NO: 5053 - protein, 1015 aa, Andrena haemorrhoa
MNLNCCIVGEPTGSADPAINTEETGPNSDPNLAYPCRMPECNRSFATSRGRGVHEQKAHKNWHDERQAASINVRKAPWSAEEAALLARQEATLVINGERLINLALQPYFPHRTIEAIKGQRRYQCHKERVLQLLEEMRRGPVLPSSPEVANEPPQDDAGAVLVDQMVELQDQLEPLSGEDFHAKHLNSICDNLKQWSKDRIYEELESYLLEVFPPTSRKKKMGNAHIPNKTPTKRQLRRVAYAQTQRAWRKNPGDCLRTILRDKTSTQTPDKDTMVPYWHAVMTGGGTSTPGIGERREVKNALWTPIGTDEVKRALPEMSTAPGPDGLSARQLRAVPLGILTRVFNIFMLSGKVPKHLLESRTTLIPKKDAAAEPGEFRPITVSSVLTRAFHKVLANRLTRLVDLDKRQQAFMPTDGCARNIFNLDLILRYHRQNFKPLYMASVDIAKAFDSVTHQAIHDTLTNMGLPKPMVEYIMNTYERSYTKLTCDGWESDQIHPTCGVKQGDPLSPVIFNMIIDRLLQLIPEEVGVDIAGTHHNALAFADDIIFVASTPQGLQLMLDNAVDHLAKCGLIINVNKSFTVAIRNVPHMKKSVVDKTTTFRCLGRVLPAMQRESEWRYLGVPFTPEGLTLTRPEDQLKEDISRLTRAPLKPQQRLFALRVMVLPGSYHLLTLGNTNLSRLKKVDTLVRGAVRKWLSLPHDVPNAYIHANVKDGGLSIPSMRWLMPLRRRKRLEGLREQSTRPCSFLSQEIDRAKRRLLDERNDLDSAQKLDKRWAKILHASIDGMALKESRQTPQQHQWVIEGTRFLSGRDYVNTMKLRINALPTRSRTTRGQRADRLCRAGCKEIETLNHVLQRCHRTHSTRVNRHNAVAAYVKRALHKNFKTVEEEPHFQTVEGLRKPDLVAVQNKTAMVIDAQIVSEQTDLDAAHERKRDYYKHLEQAVKDRYSVETVKFSSITLSCRGIWSKASASDLIKNKIIKKSELKILSFRTLIGGLYAFWRFNKCTSIVRRTGIG

SEQ ID NO: 5054 - protein, 930 aa, Crematogaster levior
MNDFNDAGEPSGSSGPTTLTDEARRSDSDLNNNVFPCQMTGCDRVFASARGRGVHEQRQHKSWYDQQVIQTIEHRKAPWSAEEAAILARQEAHLTLSGERFINQALLPLFPHRSLEAIKGQRRNQRHKQRVLQIIEELENEPLVDQAKPDDHNTGEETIGLGDKVNELFAALSPLESEEFRAGKLELICGNITKWPVSKIFEELEIYLLEVFPCSSRKQNNTTRIPSDQPLTRRQARRAEYARTQRAWSKNPSRCLRAILKDKIAAHPPHESIMVPYWRTVMTEGSIDTPGVGQKCPSKEEIWGPVRPDEIKSALPEMTTAPGPDGLTARQLKAVPLDILTRIFNLFLICGKIPKHLLESKTTLIPKKDAALEPGDFRPITVSSVLTRAFHKVLALRLNSYITLDKRQNAFLPVDGTSESVFKLDMILRYHRQFFKQLYLASVDIAKAFDSVSHQAIKDTLETMGVPKPMREYIMYTYNNSYTKLACNGWESDLIHPTCGVKQGDPLSPGIFNMIMDRLFRLIPDEIGVDITGEHTNALAFADDLLLVASTPKGLQILIDTAVNFLAQCGLKINTNKSFTVAIRNVPHKKMSVVDKTTKFTCTGRRLPSMTRDDEWKYLGVPFTPEGRSLCRPEKEISLYIDKLTKAALKPQQRLFALRVIALPTFYHQLVLGNTNLSRLKKIDTSVRGAVRKWLALPADTPNAYIHAHYKDGGLSIPSMRWLVPLRRKMRLEALLKRTRTPCPFLEQEIDKARRRLIIDRHNELKVRQDLDKLWANSLHKSCDGMALKCSRLVPQQHQWTIDGSRFLSGRDFINAVKLRIGAMPTKSRSSRGRYADRLCRAGCNEIETLNHILQRCHRTHPARVKRHNAVVAYIKRALEKNCEEVNEEPHFKTKEGLRKPDLIAKRGQIALVIDAQVVSEQSDLTILVN

SEQ ID NO: 5055 - protein, 846 aa, Pseudomyrmex gracilis
MLGPLEGEKFCAGRLQLICGNITQWPVSKICEELEIYLLEVFPWSSRKQSNTTKIPFNQPLTRRQARRAEYARTQRAWSENPCRCLRAILKDKTTAHAPHKDIMVPYWNTVMTAGNVNTPGVGQKCPSKEEMWGPVSPKEIKNALPEMTTAPGPDGLTARQLRAVPLGILTRIFNLFLICGKIPKHLLESRTTLIPKKDAAIEPSDFRPITVSSVLTRAFHKVLALRLSEHIVLDKRQSAFLPMDGTSENVFKLDMILRYHRQFFKQLYLASVDIAKAFDSVSHQAIEDTLETMGVPEPMKKYIMYTYNNSYTKLACDGWESDLIHPTCGVKQGDPLSPGIFNMIMDRLFCLIPDEIGVDITGKHINALAFADDLLLVASTPKGLQILIDKVVDFLAHCGLKINTNKSFTVAIRNVPHKKMSVVDRTTKFTCEGRRLPSMTRDDEWKYLGVPFTPEGRSLCKPEREIDLYIDRLTKAALKPQQRLFALRVIALPTFYHQLVLGNTNLSRLKKIDASVRGAVRKWLALPADTPNAYIHAHYKDGGLSIPSMRWLMPLRRKLRLEALLERTRTPYPFLEQEISIARRRLIIDRHNELKERQDVDKLWANLLHKSCDGMALKCSRLVPQQHQWIIDGSRFLTGRDFINAVKLRIGAMPTKSRSSRGRYADRLCRAGCNEIETLNHILQRCHRTHPARVKRHNAVVAYIKRALKKNCEEVDVEPHFKTEEGLRKPDLIAKRGQTALVIDAQVVSEQSDLSVAHRKKIDYYRGLKDAIKDRYKTREARFMSATLSCRGIWSKASEQDLIEAKVIKKKDLKVISTRTLISGLHSYGLFNKATSTTFRRTGIG

SEQ ID NO: 5056 - protein, 992 aa, Anoplius nigerrimus
MYSAVPASPLNEAFPCEFPGCERSFSTKTGRGVHHRRAHPDWSDSRANTASIKTRWTEEEVQLLARKEVDLIRQGMRLLNQALLNAFPNRTLEGIKGKRRQESYKAIVRELLESPEVPDDQPTEPNIENDYSNAFAEFLSALPKPVCQTHQIGRLVKIGRSLSSGRQKVFEDLSLYLREVFPLIKKTPQRAHMRPAAPTLSKRQERRANYARTQDLWRKNRSKCIQLLLNDTSDVKYPPMDVMVPFWETTMKNNCDRSPGMEPVRTLIPQIWAPITFQEIKKSLPNNHTAAGPDGLTARLWKSAPPDVLVRVLNLLMWCGKLPTHLLESKTTLIPKKNKPKEPSDFRPITVSSVIIRSMHKVLATRMSQLIKLDDRQRAFRKTDGCSDNIFLLDLVLRYHHQKHKPLFVASLDIAKAFDTVSHNTIYETLTIMGLPPPMVEYIRGVYNNSTTRLSCAGWSSEPIQPTCGVKQGDPMSPMIFNMVIERLLKRIPQEIGARVEGNTINAAAFADDLVLISSTPTGLQRMLNITAEYLTGCGLNISASKCMTVTLRTVPREKKTVVDKDTVFTCQGRIIPSLKRTDEWTYLGVPFTPEGRTKSDVLQRYTTALNIITRAPLKPQQRLFALRTNVIPSICHQLELGRVSLSLLKKIDKQSRQNIRKWLNLPTDTPVAYFHADVKDGGLGVQSLRWNSPLRRWNRLNNLPAAVTPGSSDPGSFLQKEIHTCMKRLIDNGSQIDSIQDIRKRWSSQLYAKVDGVGLKDSNKTAVQHLWVREGTRFLSGRDFLQICKLRINALPTKSRTARGRPKERLCRAGCNRAETLNHILQQCHRTHGIRIKRHNAVASYIGRGLAKQEYLVDSEPVIGLGDTTRKPDLIAKRGVTAIVIDAQVVHDQADLDREHRRKIEYYEGLKDKIKDLYNVKEVVFTSATLSWRGVWSPASARSLVALGIIRRKDLKVISTRALIGGLTAFHIFNRTTTVDWNGGRTRRGMG

SEQ ID NO: 5057 - protein, 992 aa, Anoplius nigerrimus
MYSAVPGSPLNGAFPCEFPGCERSFSTKTGRGVHHRRAHPDWSDSRANTASIKTRWTEEEVQLLARKEVDLIRQGMRLLNQALLNAFPNRTLEGIKGKRRQESYKAIVRELLESPEVPDDQPTEPNIENDYSNAFAEFLSALPKPVCQTHQIGRLVKIGRSLSSGRQKVFKDLSLYLREVFPLIKKTPQRAHMRPAAPTLSKRQERRANYARTQDLWRKNRSKCIQLLLNDTSDVKYPPMDVMVPFWETTMKNNCDRSPGMEPVRTLIPQIWAPITFQEIKKSLPNNHTAAGPDGLTARLWKSAPPDVLVRVLNLLMWCGKLPTHLLESKTTLIPKKNKPKEPSDFRPITVSSVIIRSMHKVLATRMSQLIKLDDRQRAFRKTDGCSDNIFLLDLVLRYHHQKHKPLFVASLDIAKAFDTVSHNTIYETLTIMGLPPPMVEYIRGVYNNSTTRLSCAGWSSEPIQPTCGVKQGDPMSPMIFNMVIERLLKRIPQEIGARVEGNTINAAAFADDLVLISSTPTGLQRMLNITAEYLTGCGLNISASKCMTVTLRTVPREKKTVVDKDTVFTCQGRIIPSLKRTDEWTYLGVPFTPEGRTKSDVLQRYTTALNIITRAPLKPQQRLFALRTNVIPSICHQLELGRVSLSLLKKIDKQSRQNIRKWLNLPTDTPVAYFHADVKDGGLGVQSLRWNSPLRRWNRLNNLPAAVTPGSSDPGSFLQKEIHTCMKRLIDNGSQIDSIQDIRKRWSSQLYAKVDGVGLKDSNKTAVQHLWVREGTRFLSGRDFLQICKLRINALPTKSRTARGRPKERLCRAGCNRAETLNHILQQCHRTHGIRIKRHNAVASYIGRGLAKQEYLVDSEPVIGLGDTTRKPDLIAKRGVTAIVIDAQVVHDQADLDREHRRKIEYYEGLKDKIKDLYNVKEVVFTSATLSWRGVWSPASARSLVALGIIRRKDLKVISTRALIGGLTAFHIFNRTTTVDWNGGRTRRGMG

SEQ ID NO: 5058 - protein, 992 aa, Anoplius nigerrimus
MYSAVPGSPLNEAFPCEFPGCERSFSTKTGRGVHHRRAHPDWSDSRANTASIKTRWTEEEVQLLARKEVDLIRQGMRLLNQALLNAFPNRTLEGIKGKRRQESYKAIVRELLESPEVPDDQPTEPNIENDYSNAFAEFLSALPKPVCQTHQIGRLVKIGRSLSSGRQKVFEDLSLYLREVFPLIKKTPQRAHMRPAAPTLSKRQERRANYARTQDLWRKNRSKCIQLLLNDTSDVKYPPMDVMVPFRETTMKNNCDRSPGMEPVRTLIPQIWAPITFQEIKKSLPNNHTAAGPDGLTARLWKSAPPDVLVRVLNLLMWCGKLPTHLLESKTTLIPKKNKPKEPSDFRPITVSSVIIRSMHKVLATRMSQLIKLDDRQRAFRKTDGCSDNIFLLDLVLRYHHQKHKPLFVASLDIAKAFDTVSHNTIYETLTIMGLPPPMVEYIRGVYNNSTTRLSCAGWSSEPIQPTCGVKQGDPMSPMIFNMVIERLLKRIPQEIGARVEGNTINAAAFADDLVLISSTPTGLQRMLNITAEYLTGCGLNISASKCMTVTLRTVPREKKTVVDKDTVFTCQGRIIPSLKRTDEWTYLGVPFTPEGRTKSDVLQRYTTALNIITRAPLKPQQRLFALRTNVIPSICHQLELGRVSLSLLKKIDKQSRQNIRKWLNLPTDTPVAYFHADVKDGGLGVQSLRWNSPLRRWNRLNNLPAAVTPGSSDPGSFLQKEIHTCMKRLIDNGSQIDSIQDIRKRWSSQLYAKVDGVGLKDSNKTAVQHLWVREGTRFLSGRDFLQICKLRINALPTKSRTARGRPKERLCRAGCNRAETLNHILQQCHRTHGIRIKRHNAVASYIGRGLAKQEYLVDSEPVIGLGDTTRKPDLIAKRGVTAIVIDAQVVHDQADLDREHRRKIEYYEGLKDKIKDLYNVKEVVFTSATLSWRGVWSPASARSLVALGIIRRKDLKVISTRALIGGLTAFHIFNRTTTVDWNGGRTRRGMG

SEQ ID NO: 5059 - protein, 992 aa, Anoplius nigerrimus
MYSAVPGSPLNEAFPCEFPGCERSFSTKTGRGVHHRRAHPDWSDSRANTASIKTRWTEEEVQLLARKEVDLIRQGMRLLNQALLNAFPNRTLEGIKGKRRQESYKAIVRELLESPEVPDDQPTEPNIENDYSNAFAEFLSALPKPVCQTHQIGRLVKIGRSLSSGRQKVFEDLSLYLREVFPLIKKTPQRAHMRPAAPTLSKRQERRANYARTQDLWRKNRSKCIQLLLNDTSDGKYPPMDVMVPFWETTMKNNCDRSPGMEPVRTLIPQIWAPITFQEIKKSLPNNHTAAGPDGLTARLWKSAPPDVLVRVLNLLMWCGKLPTHLLESKTTLIPKKNKPKEPSDFRPITVSSVIIRSMHKVLATRMSQLIKLDDRQRAFRKTDGCSDNIFLLDLVLRYHHQKHKPLFVASLDIAKAFDTVSHNTIYETLTIMGLPPPMVEYIRGVYNNSTTRLSCAGWSSEPIQPTCGVKQGDPMSPMIFNMVIERLLKRIPQEIGARVEGNTINAAAFADDLVLISSTPTGLQRMLNITAEYLTGCGLNISASKCMTVTLRTVPREKKTVVDKDTVFTCQGRIIPSLKRTDEWTYLGVPFTPEGRTKSDVLQRYTTALNIITRAPLKPQQRLFALRTNVIPSICHQLELGRVSLSLLKKIDKQSRQNIRKWLNLPTDTPVAYFHADVKDGGLGVQSLRWNSPLRRWNRLNNLPAAVTPGSSDPGSFLQKEIHTCMKRLIDNGSQIDSIQDIRKRWSSQLYAKVDGVGLKDSNKTAVQHLWVREGTRFLSGRDFLQICKLRINALPTKSRTARGRPKERLCRAGCNRAETLNHILQQCHRTHGIRIKRHNAVASYIGRGLAKQEYLVDSEPVIGLGDTTRKPDLIAKRGVTAIVIDAQVVHDQADLDREHRRKIEYYEGLKDKIKDLYNVKEVVFTSATLSWRGVWSPASARSLVALGIIRRKDLKVISTRALIGGLTAFHIFNRTTTVDWNGGRTRRGMG

SEQ ID NO: 5060 - protein, 991 aa, Anoplius nigerrimus
MTTDVQAPSTSSYTCEYPGCNRPFTTKTGGGVHHRRAHPDWADSKTSTVTSKTKWTEEETKLLARKEVELLRQGMKLVNQALQNAFPNRTLEGIKGKRRQESYKTLVRELLEERPSCAQLQPEPIVENEYDKAFVDFISSMPRPTCQSHQIGRLVNICNSLGNGKGRVYEDLCLYLREVFPPVKRTPQKAHDDPNPITSKKQQRRVDYARTQDLWRKNRSKSIQLILNDTTQVKYPPKDVMVPFWRTVMTNMTDCSPGLGPARSIIAEIWAPITSNEIKNAMPSNHTAAGPDGITARLWRKTPGDVLIRVLNLILWCGKLPEHLLESKTTLIPKKNQSAEPSDFRPITVSSVITRTLHKLLASRLSRHIQLDDRQRAFRRTDGCSDNIFLLDLVLRFHHEQHKPLFLASLDIAKAFDSVSHKTIYETLTIMGVPMPMVDYICYIYSNSFTRLSCDQWLSEPITPTCGVKQGDPMSPMIFNMIIERLLGKLPQEIGARVGGRIINAAAFADDLVLMASTPNGLQKLLDYTSEYLTGCGLKINTSKCMTVTLRSVPREKKTVVDKDTVFICQERTIPALKRTDEWSYLGVPFTPEGRSKVNVLHKYTTALSKITRAPLKPQQRLFALRTNVIPSICHQLELGKVSLSLLRKIDTVTRQSIRKWLILPSDTPIAYFHADVKDGGLGVQSLRWNAPLRRLKRLTNLPTAVTPGSSNPGSFLQREIQICNRRLNDSGQQISTIQDIRKRWSTKLYSNVDGVGLKESSKTPVQHLWVREATRFLSGRDYLQLCKMRVNALPTRSRTARGRPKDRLCRAGCNRPETLNHILQQCHRTHGIRIKRHNAICTYIEKALTRQEYLVENEPVIRLEQGARKPDLVAKRGVTALIIDAQVVHGQADLDREHRRKIEYYENLKDKVKEQYNVQEVILTSATLSWRGVWSQASYKSLVGLGVIRKKDLKVLSTRALIGGLTSFHLFNRTTTVKDRTGGRNRRGVG

SEQ ID NO: 5061 - protein, 1382 aa, Chrysoperla carnea
MIRRPPITKEATADDGRDTRDDLPVDVPLPQTEMATADNSSRRRMKWTDEMNQFILLTYLEVTRLEQDKTGYRQKLYQQFTQKYTKLTHITEQRLADQRRTIITHTLIPLTIQNQIRQQVHHQIHTIHNTGIIHMDTQTTQTAENNNSNNSNDNTSITHIQNSLNTALAEFTNLDPTQKHKLPKLHHSRNLTNIVNTLNNYILPQYLSQDTTFTDLHNIIYCGAVAAVRCNGLKVTSPLNIRNTRTSQTHVPAWEKRLNSRITSIRRDLGRITQYIQGTRTQKLTKHIQNIKTTYRIHSKYDVHNTALEEFRDTLHQKLTVYSTRLKRYKDAHKRKIHNTQFQYNQKFFYRSLTHNNTPQHDTQPPTEHSLFTYWSGLWSEVVQHNAETCWIGDEIHKTNNITLMTKTTITTKDIHNATQHLHNWKSPGVDQIHNYWLKHFTCTHEHLARHFTKFIQHPHTTPPFLMKGITYMIPKDNDAINPTKYRPITCLSTLYKLITSCITQKIYTHITDNNILAEEQKGCRKLSRGCKEQLIIDSVVTEQAKHNNRSMYTAYIDYKKAFDSVPHSWLQRVLNLYKIDEHIIQFLTHAMSLWTTTLNLTHNSTTITTDTIHIRRGIFQGDSLSPLWFCLALNPLSHILTDSGCGFKVKFDKEFHKISHLFYMDDLKLYASTQTQLTHLMRLTEIFSADIRMEFGTDKCKTQHIHADPGTPVLFDLQNGGVISPMEEGQFYSYLGVLQSQGIPHTDIKQTLTQHYIQRIQNILKSGLDGRNTVRAINTYATPFLTYSFGIIKWTNTDIKNIQIKTRTIMTKHRIHHIHSSSARLILPRSLGGRGLKDIQLLHDRQLHSLREYFQSKTHTSHLHNAITSADKSYTPLNMHTTQHSLPPTKTQHTSTNMQTWKTKVLHGRYFHELSHDCIDREASQAWLTKCNIFPETEGFMFAIQDQIIHTLNYRKHILKDNAQQTDLCRQCRQKPETIQHITSACSRLTQTDYKHRHDQVAKIIHQKLAIKHKLTTDNSPYYKYTPSSILENNTHKLYWDRTIITDKAVHYNRPDITLIHKHTKTTFLIDIAVPNTHNLQSTHTEKLTKYTDLAVDLRNQWKMTTVVVVPVILSSIGVIPTTLHNSLHTLELHKNTYIQLQKAVIINTCRIVRKFLSMGHSTLQTQTLTTAQQTTTNTTYSPTNANTLMPNTETSHQHPHNTQLHTQNITQEIYPTQHSTSTTTPTHATSAHSPNQTQNNTQETNSSQHNIITYTTTALIHAPPPLYRNETHNTPPIARLTSLTQDQISRPSDVSNKTQNTSQETQHSITLLTTTPIHVPPPINQNLTQNTSPIVRLTRLTHDQIAHYSKPTENVPIAHRTRKRAQHNTTPHTSPKRRGR

SEQ ID NO: 5062 - protein, 1422 aa, Chrysoperla carnea
MMVNKRIKSLGKQPLPGGYRQGTSGATAGCDSMRPGGGGLMIRRPPITKEATADDGRDTRDDLPVDVPLPQTEMATADNSSRRRMKWTDEMNQFILRTYLEVTRLEQDKTGYRQKLYQQFTQKYTKLTHITEQRLADQRRTIITHTLIPLTIQNQIRQQVHHQIHTIHNTGIIHMDTQTTQTAENNNSNNSNDNTSITHIQNSLNTALAEFTNLDPTQKHKLPKLHHSRNLTNIVNTLNNYILPQYLSQDTTFTDLHNIIYCGAVAAVRCNGLKVTSPLNTRNTRTSQTRVPAWEKRLNSRITSIRRDLGRITQYIQGTRTQKLTKHIQNIKTTYRIHSKYDVHNTALEEFRDTLHQKLTVYSTRLKRYKAAHKRKIHNTQFQYNQKFFYRSLTHNNTPQHDTQPPTEHSLFTYWSGLWSEEVQHNVETCWIGDEIHKTNNITLMTKTTITTKDIHNATQHLHNWKSPGVDQIHNYWLKHFTCTHEHLARHFTKFIQHPHTTPPFLMKGITYMIPKDNDAINPTKYRPITCLSTLYKLITSCITQKIYTHITDNNILAEEQKGCRKLSRGCKEQLIIDSVVTEQAKHNNRSMYTAYIDYKKAFDSVPHSWLQRVLNLYKIDEHIIQFLTHAMSLWTTTLNLTHNSTTITTDTIHIRRGIFQGDSLSPLWFCLALNPLSHILTDSGCGFKVKFDKEFHKISHLFYMDDLKLYASTQTQLTHLMRLTEIFSADIRMEFGTDKCKTQHIHADPGTPVLFDLQNGGVISPMEEGQFYSYLGVLQSQGIPHTDIKQTLTQHYIQRIQNILKSGLDGRNTVRAINTYATPFLTYSFGIIKWTNTDIKNIQIKTRTIMTKHRIHHIHSSSARLVLPRSLGGRGLTDIQLLHDRQLHSLREYFQSKTHTSHLHNAITSADKSYTPLNMHTTQHSLPPTKTQHTSTNMQTWKTKVLHGRYFHELSHDCIDREASQAWLTKCNIFPETEGFMFAIQDQIIHTLNYKKHILKDNAQQTDLCRQCRQKPETIQHITSACSRLTQTDYKHRHDQVAKIIHQKLAIKHKLTTDNSPYYKYTPSSILENNTHKLYWDRTIITDKAVHYNRPDITLIHKHTKTTFLIDIAVPNTHNLQSTHTEKLTKYTDLAVDLRNQWKMTTVVVVPVILSSIGVIPTTLHNSLHTLELHKNTYIQLQKAVIINTCRIVRKFLSMGHSTLQTQTLTTAQQTTTNTTYSPTNANTLMPNTETSHQHPHNTQLHTQNITQEIYTTQHSTSTTTLTHATSAHSPNQTQNNTQETNSSQHNIISYTTTALIHAPPPLYRNETHNTPPIARLTSLTQDQISRPSDVSNKTQNTSQETQHSITLLTTTPIHVPPPINQNLTQNTSPIVRLTRLTHGQIAHYSKPTENVPIAHRTRKRAQHNTTPHTSPKRRGR

SEQ ID NO: 5063 - protein, 1422 aa, Chrysoperla carnea
MMVNKRIKSLGKQPLPGGYRQGTSGATAGCDSMRPGGGGLMIRRPPITKEATADDGRDTRDDLPVDVPLPQTEMATADNSSRRRMKWTDEMNQFILRTYLEVTRLEQDKTGYRQKLYQQFTQKYTKLTHITEQRLADQRRTIITHTLIPLTIQNQIRQQVHHQTHTIHNTGIIHMDTQTTQTAENNNSNNSNDNTSITHIQNSLNTALAEFTNLDPTQKHKLPKLHHSRNLTNIVNTLNNYILPQYLSQDTTFTDLHNIIYCGAVAAVRCNGLKVTSPLNIRNTRTSQTHVPAWEKRLNSRITSIRRDLGRITQYIQGTRTQKLTKHIQNIKTTYRIHSKYDVHNTALEEFRDTLHQKLTVYSTRLKRYKDAHKRKIHNTQFQYNQKFFYRSLTHNNTPQHDTQPPTEHSLFTYWSGLWSEEVQHNAETCWIGDEIHKTNNITLMTKTTITTKDIHNATQHLHNWKSPGVDQIHNYWLKHFTCTHEHLARHFTKFIQHPHTTPPFLMKGITYMIPKDNDAINPTKYRPITCLSTLYKLITSCITQKIYTHITDNNILAEEQKGCRKLSRGCKEQLIIDSVVTEQAKHNNRSMYTAYIDYKKAFDSVPHSWLQRVLNLYKIDEHIIQFLTHAMSLWTTTLNLTHNSTTITTDTIHIRRGIFQGDSLSPLWFCLALNPLSHILTDSGCGFKVKFDKEFHKISHLFYMDDLKLYASTQTQLTHLMRLTEIFSADIRMEFGTDKCKTQHIHADPGTPVLFDLQNGGVISPMEEGQFYSYLGVLQSQGIPHTDIKQTLTQHYIQRIQNILKSGLDGRNTVRAINTYATPFLTYSFGIIKWTNTDIKNIQIKTRTIMTKHRIHHIHSSSARLVLPRSLGGRGLTDIQLLHDRQLHSLREYFQSKTHTSHLHNAITSADKSYTPLNMHTTQHSLPPTKTQHTSTNMQTWKTKVLHGRYFHELSHDCIDREASQAWLTKCNIFPETEGFMFAIQDQIIHTLNYRKHILKDNAQQTDLCRQCRQKPETIQHITSACSRLTQTDYKHRHDQVAKIIHQKLAIKHKLTTDNSPYYKYTPSSILENNTHKLYWDRTIITDKAVHYNRPDITLIHKHTKTTFLIDIAVPNTHNLQSTHTEKLTKYTDLAVDLRNQWKMTTVVVVPVILSSIGVIPTTLHNSLHTLELHKNTYIQLQKAVIINTCRIVRKFLSMGHSTLQTQTLTTAQQTTTNTTYSPTNANTLMPNTETSHQHPHNTQLHTQNITQEIYPTQHSTSTTTPTHATSAHSPNQTQNNTQETNSSQHNIITYTTTALIHAPPPLYRNETHNTPLIARLTSLTQDQISRPSDVSNKTQNTSQETQHSITLLTTTPIHVPPPINQNLTQNTSPIVRLTRLTHDQIAHYSKPTENVPIAHRTRKRAQHNTTPHTSPKRRGR

SEQ ID NO: 5064 - protein, 978 aa, Chrysoperla carnea
MTKTTITTKDIHNATQHLHNWKSPGVDQIHNYWLKHFTCTHEHLARHFTKFIQHPHTTPPFLMKGITYMIPKDNDAINPTKYRPITCLSTLYKLITSCITQKIYTHITDNNILAEEQKGCRKLSRGCKEQLIIDSVVTEQAKHNNRSMYTAYIDYKKAFDSVPHSWLQRVLNLYKIDEHIIQFLTHAMSLWTTTLNLTHNSTTITTDTTHIRRGIFQGDSLSPLWFCLALNPLSHILTDSGCGFKVKFDKEFHKISHLFYMDDLKLYASTQTQLTHLMRLTEIFSADIRMEFGTDKCKTQHIHADPGTPVLFDLQNGGVISPMEEGQFYSYLGVLQSQGIPHTDIKQTLTQHYIQRIQNILKSGLDGRNTVRAINTYATPFLTYSFGIIKWTNTDIKNIQIKTRTIMTKHRIHHIHSSSARWVLPRSLGGRGLTDIQLLHDRQLHSLREYFQSKTHTSHLHNAITSADKSYTPLNMHTTQHSLPPTKTQHTSTNMQTWKTKVLHGRYFHELGHDCIDREALQAWLTKCNIFPETEGFMFAIQDQIIHTLNYKKHILKDNAQQTDLCRQCRQKPETIQHITSACSRLTQTDYKHRHDQVAKIIHQKLAIKHKLTTDNSPYYKYTPSSILENNTHKLYWDRTIITDKAVHYNRPDITLIHKHKKTTFLIDIAVPNTHNLQSTHTEKLTKYTDLAVDLRNQWKMTTVVVVPVILSSIGVIPTTLHNSLHTLELHKNTYIQLQKAVIINTCRIVRKFLSMGHSTLQTQTLTTAQQTTTNTTYSPTNANTLMPNTETSHQHPHNTQLHTQNITQEIYPTQHSTSTTTLTHATSAHSPNQTQNNTQETNSSQHNIITYTTTALIHAPPPLYRNETHNTPPIARLTSLTQDQISRPSDVSNKTQNTSQETQHSITLLTTTPIHVPPPINQNLTQNTSPIVRLTRLTHGQIAHYSKPTENVPIAHRTRKRAQHNTTPHTSPKRRGR

SEQ ID NO: 5065 - protein, 959 aa, Chrysoperla carnea
MTKTTITTKDIHNATQHLHNWKSPGVDQIHNYWLKHFTCTHEHLARHFTKFIQHPHTTPPFLMKGITYMIPKDNDAINPTKYRPITCLSTLYKLITSCITQKIYTHITDNNILAEEQKGCRKLSRGCKEQLIIDSVVTEQAKHNNRSMYTAYIDYKKAFDSVPHSWLQRVLNLYKIDEHIIQFLTHAMSLWTTTLNLTHNSTTITTDTTHIRRGIFQGDSLSPLWFCLALNPLSHILTDSGCGFKVKFDKEFHKISHLFYMDDLKLYASTQTQLTHLMRLTEIFSADIRMEFGTDKCKTQHIHADPGTPVLFDLQNGGVISPMEEGQFYSYLGVLQSQGIPHTDIKQTLTQHYIQRIQNILKSGLDGRNTVRAINTYATPFLTYSFGIIKWTNTDIKNIQIKTRTIMTKHRIHHIHSSSARWVLPRSLGGRGLTDIQLLHDRQLHSLREYFQSKTHTSHLHNAITSADKSYTPLNMHTTQHSLPPTKTQHTSTNMQTWKTKVLHGRYFHELGHDCIDREALQAWLTKCNIFPETEGFMFAIQDQIIHTLNYKKHILKDNAQQTDLCRQCRQKPETIQHITSACSRLTQTDYKHRHDQVAKIIHQKLAIKHKLTTDNSPYYKYTPSSILENNTHKLYWDRTIITDKAVHYNRPDITLIHKHTKTTFLIDIAVPNTHNLQSTHTEKLTKYTDLAVDLRNQWKMTTVVVVPVILSSIGVIPTTLHNSLHTLELHKNTYIQLQKAVIINTCRIVRKFLSMGHSTLQTQTLTTAQQTTTNTTYSPTNANTLMPNTETSHQHPHNTQLHTQNITQEIYPTQHSTSTTTLTHATSAHSPNQTQNNTQETNSSQHNIITYTTTALIHAPPPLYRNETHNTPPIARLTSLTQDQISRPSDVSNKTQNTSQETQHSITLLTTTPIHVPPPINQNLTQNTSPIVRLTRLTHGQIAHYSKPTENVPIAHRT

SEQ ID NO: 5066 - protein, 1422 aa, Chrysoperla carnea
MMVNKRIKSLGKQPLPGGYRQGTSGATAGCDSMRPGGGGLMIRRPPITKEATADDGRDTRDDLPVDVPLPQTEMATADNSSRRRMKWTDEMNQFILRTYLEVTRLEQDKTGYRQKLYQQFTQKYTKLTHITEQRLADQRRTIITHTLIPLTIQNQIRQQVHHQIHTIHNTGIIHMDTQTTQTVENNNSNNSNDNTSITHIQNSLNTALAEFTNLDPTQKHKLPKLHHSRNLTNIVNTLNNYILPQYLSQDTTFTDLHNIIYCGAVAAVRCNGLKVTSPLNIRNTRTSQTRVPAWEKRLNSRITSIRRDLGRITQYIQGTRTQKLTKHIQNIKTTYRIHSKYDVHNTALEEFRDTLHQKLTVYSTRLKRYKAAHKRKIHNTQFQHNQKFFYRSLTHNNTPQHETQPPTEHSLFTYWSGLWSEEVQHNVETCWIGDEIDKTNNITLMTKTTITTKDIHNATQHLHNWKSPGVDQIHNYWLKHFTCTHEHLARHFTKFIQHPHTTPPFLMKGITYMIPKDNDATNPTKYRPITCLSTLYKLITSCITQKIYTHITDNNILAEEQKGCRKLSRGCKEQLIIDSVVTEQAKHNNRSMYTAYIDYKKAFDSVPHSWLQRVLNLYKIDEHIIQFLTHAMSLWTTTLNLTHNSTTITTDTIHIRRGIFQGDSLSPLWFCLALNPLSHILTDSGCGFKVKFDKEFHKISHLFYMDDLKLYASTQTQLTHLMRLTEIFSADIRMEFGTDKCKTQHIHADPGTPVLFDLQNGGVISPMEEGQFYSYLGVLQSQGIPHTDIKQTLTQHYIQRIQNILKSGLDGRNAVRAINTYATPFLTYSFGIIKWTNTDIKNIQIKTRTIMTKHRIHHIHSSSARLVLPRSLGGRGLTDIQLLHDRQLHSLREYFQSKTHTSHLHNAITSADKSYTPLNMHTTQHSLPPTKTQHTSTNMQTWKTKVLHGRYFHELSHDCIDREASQAWLTKCNIFPETEGFMFAIQDQIIHTLNYKKHILKDNAQQTDLCRQCRQKPETIQHITSACSRLTQTDYKHRHDQVAKIIHQKLAIKHKLTTDNSPYYKYTPSSILENNTHKLYWDRTIITDKAVHYNRPDITLIHKHTKTTFLIDIAVPNTHNLQSTHTEKLTKYTDLAVDLRNQWKMTTVVVVPVILSSIGVIPTTLHNSLHTLELHKNTYIQLQKAVIINTCRIVRKFLSMGHSTLQTQTLTTAQQTTTNTTYSPTNANTLMPNTETSHQHPHNTQLHTQNITQEIYPTQHSTSTTTLTRATSAHSPNQTQNNTQETNSSQHNIITYTTTALIHAPPPLYRNEAHNTPPIARLTGLTQDQISGPSDVSNKTQNTSQEAQHSITLLTTTPIHVPPPINQNLTQNTSPIVRLTRLTHGQIAHYSKPTENVPIAHRTRKRAQHNTTPHTPPKRRGR

SEQ ID NO: 5067 - protein, 1422 aa, Chrysoperla carnea
MMVNKRIKSLGKQPLPGGYRQGTSGATAGCDSMRPGGGGLMIRRPPITKEATADDGRDTRDDLPVDVPLPQTEMATADNSSRRRMKWTDEMNQFILRTYLEVTRLEQDKTGYRQKLYQQFTQKYTKLTHITEQRLADQRRTIITHTLIPLTIQNQIRQQVHHQIHTIHNTGIIHMDTQTTQTAENNNSNNSNDNTSITHIQNSLNTALAEFTNLDPTQKHKLPKLHHSRNLTNIVNTLNNYILPQYLSQDTTFTDLHNIIYCGAVAAVRCNGLKVTSPLNIRNTRTSQKRVPAWEKRLNSRITSIRRDLGRITQYIQGTRTQKLTKHIQNIKTTYRIHSKYDVHNTALEEFRDTLHQKLTVYSTRLKRYKAAHKRKIHNTQFQYNQKFFYRSLTHNNTPQHDTQPPTEHSLFTYWSGLWSEEVQHNVETCWIGDEIHKTNNITLMTKTTITTKDIHNATQHLHNWKSPGVDQIHNYWLKHFTCTHEHLARHFTKFIQHPHTTPPFLMKGITYMIPKDNDAINPTKYRPITCLSTLYKLITSCITQKIYTHITDNNILAEEQKGCRKLSRGCKEQLIIDSVVTEQAKHNNRSMYTAYIDYKKAFDSVPHSWLQRVLNLYKIDEHIIQFLTHAMSLWTTTLNLTHNSTTITTDTIHIRRGIFQGDSLSPLWFCLALNPLSHILTDSGCGFKVKFDKEFHKISHFFYMDDLKLYASTQTQLTLLMRLTEIFSADIRMEFGTDKCKTQHIHADPGTPVLFDLQNGGVISPMEEGQFYSYLGVLQSQGIPHTDIKQTLTQHYIQRIQNILKSGLDGRNTVRAINTYATPFLTYSFGIIKWTNTDIKNIQIKTRTIMTKHRIHHIHSSSARLVLPRSLGGRGLTDIQLLHDRQLHSLREYFQSKTHTSHLHNAITSADKSYTPLNMHTTQHSLPPTKTQHTSTNMQTWKTKVLHGRYFHELSHDCIDREASQAWLTKCNIFPETEGFMFAIQDQIIHTLNYKKHILKDNAQQTDLCRQCRQKPETIQHITSACSRLTQTDYKHRHDQVAKIIHQKLAIKHKLTTDNSPYYKYTPSSILENNTHKLYWDRTIITDKAVHYNRPDITLIHKHTKTTFLIDIAVPNTHNLQSTHTEKLTKYTDLAVDLRNQWKMTTVVVVPVILSSIGVIPTTLHNSLHTLELHKNTYIQLQKAVIINTCRIVRKFLSMGNSTLQTQTLTTAQQTTTNTTYSPTNANTLMPNTETSHQHPHNTQLHTQNITQEIYPTQHSTSTRTLTHATSAHSPNQTQNNTQETNSSQHNIITYTTTALIHAPPPLYRNETHNTPPIARLTSLTQDQISRPSDVSNKTQNTSQETQHSITLLTTTPIHVPPPINQNLTQNTSPIVRLTRLTHGQIAHYSKPTENVPIAHRTRKRAQHNTTPHTSPKRRGR

SEQ ID NO: 5068 - protein, 1152 aa, Chrysoperla carnea
MVSMVTSPLNTRNTRTSQTRVPAWEKRLNSRITSIRRDLGRITQYIQGTRTQKLTKHIQNIKTTYRIHSKYDVHNTALEEFRDTLHQKLTVYSTRLKRYKAAHKRKIHNTQFQYNQKFFYRSLTHNNTPQHDTQSPTEHSLFTYWSGLWSEEVQHNVETCWIGDEIHKTNNITLMTKTTITTKDIHNATQHLHNWKSPGVDQIHNYWLKHFTCTHEHLARHFTKFIQHPHTTPPFLMKGITYMIPKDNDAINPTKYRPITCLSTLYKLITSCITQKIYTHITDNNILAEEQKGCRKLSRGCKEQLIIDSVVTEQAKHNNRSMYTAYIDYKKAFDSVPHSWLQRVLNLYKIDEHIIQFLTHAMSLWTTTLNLTHNSTTITTDTIHIRRGIFQGDSLSPLWFCLALNPLSHILTDSGCGFKVKFDKEFHKISHFFYMDDLKLYASTQTQLTLLMRLTEIFSADIRMEFGTDKCKTQHIHADPGTPVLFDLQNGGVISPMEEGQFYSYLGVLQSQGIPHTDIKQTLTQHYIQRIQNILKSGLDGRNTVRAINTYATPFLTYSFGIIKWTNTDIKNIQIKTRTIMTKHRIHHIHSSSARLVLPRSLGGRGLTDIQLLHDRQLHSLREYFQSKTHTSHLHNAITSADKSYTPLNMHTTQHSLPPTKTQHTSTNMQTWKTKVLHGRYFHELSHDCIDREASQAWLTKCNIFPETEGFMFAIQDQIIHTLNYKKHILKDNAQQTDLCRQCRQKPETIQHITSACSRLTQTDYKHRHDQVAKIIHQKLAIKHKLTTDNSPYYKYTPSSILENNTHKLYWDRTIITDKAVHYNRPDITLIHKHTKTTFLIDIAVPNTHNLQSTHTEKLTKYTDLAVDLRNQWKMTTVVVVPVILSSIGVIPTTLHNSLHTLELHKNTYIQLQKAVIINTCRIVRKFLSMGHSTLQTQTLTTAQQTTTNTTYSPTNANTLMPNTETSHQHPHNTQLHTQNITQEIYTTQHSTSTTTLTHATSAHSPNQTQNNTQETNSSQHNIITYTTTALIHAPPPLYRNETHNTPPIARLTSLTQDQISRPSDVSNKTQNTSQETQHSITLLTTTPIHVPPPINQNLTQNTSPIVRLTRLTHGQIAHYSKPTENVPIAHRTRKRAQHNTTPHTSPKRRGR

SEQ ID NO: 5069 - protein, 1422 aa, Chrysoperla carnea
MMVNKRIKSLGKQPLPGGYRQGTSGATAGCDSMRPGGGGLMIRRPPITKEATADDGRDTRDDLPVDVPLPQTEMATADNSSRRRMKWTDEMNQFILRTYLEVTRLEQDKTGYRQKLYQQFTQKYTKLTHITEQRLADQRRTIITHTLIPLTIKNQIRKQVHHQIHTIHNTGIIHMDTQTTQTAENNNSNNSNDNTSITHIQNSLNTALAEFTNLDPTQKHKLPKLHHSRNLTNIVNTLNNYILPQYLSQDTTFTDLHNIIYCGAVAAVRCNGLKVTSPLNIRNTRTSQTRVPAWEKRLNSRITSIRRDLGRITQYIQGTRTQKLTKHIQNMKTTYRIHSKYDVHNTALEEFRDTLHQKLTVYSTRLKRYKAAHKRKIHNTQFQYNQKFFYRSLTHNNTPQHDTQPPTEHSLFTYWSGLWSEEVQHNVETCWIGDEIHKTNNITLMTKTTITTKDIHNATQHLHNWKSPGVDQIHNYWLKHFTCTHEHLARHFTKFIQHPHTTPPFLMKGITYMIPKDNDAINPTKYRPITCLSTLYKLITSCITQKIYTHITDNNILAEEQKGCRKLSRGCKEQLIIDSVVTEQAKHNNRSMYTAYIDYKKAFDSVPHSWLQRVLNLYKIDEHIIQFLTHAMSLWTTTLNLTHNSTTITTDTIHIRRGIFQGDSLSPLWFCLALNPLSHILTDSGCGFKVKFDKEFHKISHLFYMDDLKLYASTQTQLTHLMRLTEIFSADIRMEFGTDKCKTQHIHADPGTPVLFDLQNGGVISPMEEGQFYSYLGVLQSQGIPHTDIKQTLTQHYIQRIQNILKSGLDGKNTVRAINTYATPFLTYSFGIIKWTNTDIKNIQIKTRTIMTKHRIHHIHSSSARLVLPRSLGGRGLTDIQLLHDRQLHSLREYFQSKTHTSHLHNAITSADKSYTPLNMHTTQHSLPPTKTQHTSTNMQTWKTKVLHGRYFHELSHDCIDREASQAWLTKCNIFPETEGFMFAIQDQIIHTLNYKKHILKDNAQQTDLCRQCRQKPETIQHITSACSRLTQTDYKHRHDQVAKIIHQKLAIKHKLTTDNSPYYKYTPSSILENNTHKLYWDRTIITDKAVHYNRPDITLIHKHTKTTFLIDIAVPNTHNLQSTHTEKLTKYTDLAVDLRNQWKMTTVVVVPVILSSIGVIPTTLHNSLHTLELHKNTYIQLQKAVIINTCRIVRKFLSMGHSTLQTQTLTTAQQTTTNTTYSPTNANTRMPNTETSHQHPHNTQLHTQNITQEIYPTQHSTSTTTLTHATSAHTPNQTQNNTQETNSSQHNIITYTTTALIHAPPPLYRNETHNTPPNARLTSLTQDQISRPSDVSNKTQNTSQETQHSITLLTTTPIHVPPPINQNLTQNTSPIVRLTRLTHCQIAHYSKPTENVPIAHRTRKRAQHNTTPHTSPKRRGR

SEQ ID NO: 5070 - protein, 1338 aa, Chrysoperla carnea
MKWTDEMNQFILRTYLEVTRLEQDKTGYRQKLYQQFTQKYTKLTHITEQRLADQRRTIITHTLIPLTIQNQIRQQVHHQIHTIHNTGIIHMDTQTTQTVKNNNSNNSNDNTSITHIQNSLNTALAEFTNLDPTQKHKLPKLHHSRNLTNIVNTLNNYILPQYLSQDTTFTDLHNIIYCGAIAAVRCNGLKVTSPLNIRNTRTSQTRVPAWEKRLNSRITSIRRDLGRITQYIQGTRTQKLTKHIQNIKTTYRIHSKYDVHNTALEEFRDTLHQKLTVYSTRLKRYKAAHKRKIHNTQFQYNQKFFYRSLTHNNTPQHDTQPPTEHSLFTYWSGLWSEEVQHNVETCWIGDEIHKTNNITLMTKTTITTKDIHNATQHLHNWKSPGVDQIHNYWLKHFTCTHEHLARHFTKFIQHPHTTPPFLMKGITYMIPKDNDAINPTKYRPITCLSTLYKLIPSCITQKIYTLITDNNILAEEQKGCRKLSRGCKEQLIIDSVVTEQAKHNNRSMYTAYIDYKKAFDSVPHSWLQRVLNSYKIDEHIIQFLTHAMSLWTTTLNLTHNSTTITTDTIHIRRGIFQGDSLSPLWFCLALNPLSHILTDSGCGFKVKFDKEFHKISHLFYMDDLKLYASTQTQLTHLMRLTEIFSADIRMEFGTDKCKTQHIHADPGTPVLFDLQNGGVISPMEEGQFYSYLGVLQSQGIPHTDIKQTLTQHYIQRIQNILKSGLDGRNTVRAINTYATPFLTYSFGIIKWTNTDIKNIQIKTRTIMTKHRIHHIHSSSARLVLPRSLGGRGLTDIQLLHDRQLHSLREYFQSKTHTSHLHNAITSADKSYTPLNMHTTQHSLPPTKTQHTSTNMQTWKTKVLHGRYFHELSHDCIDREASQAWLTKCNIFPETEGFMFAIQDQIIHTLNYKKHILKDNAQQTDLCRQCRQKPETIQHITSACSRLTQTDYKHRHDQVAKIIHQKLAIKHKLTTDNSPYYKYTPSSILENNTHKLYWDRTIITDKAVHYNRPDITLIHKHTKTTFLIDIAVPNTHNLQSTHTEKLTKYTDLAVDLRNQWKMTTVVVVPVILSSIGVIPTTLHNSLHTHELHKNTYIQLQKAVIINTCRIVRKFLSMGHSTLQTQTLTTAQQTTTNTTYSPTNANTLMPNTETSHQHSHNTQLHTQNITQEIYPTQHSTSTTTLTHATSAHSPNQTQNNTQETNSSQHNIITYTTTALIHAPPPLYRNETHNTPPIARLTSLTQDQISRPSDVSNKTQNTSQETQHSITLLTTTPIHVPPPINQNLTQNTSPIVRLTRLTHGQIAHYSKSTENVPIAHRTRKRAQHNTTPHTSPKRRGR

SEQ ID NO: 5071 - protein, 1422 aa, Chrysoperla carnea
MMVNKRIKSLGKQPLPGGYRQGTSGATAGCDSMRPGGDGLMIRRPPITKEATADDGRDTRDDLPVDVPLPQTEMATADNSSRRRMKWTDEMNQFILRTYLEVTRLEQDKTGYRQKLYQKFTQKYTKLTHITEQRLADQRRTIITHTLIPLTIQNQIRQQVHHQIHTIHNTGIIHMDTQTTQTAENNNSNNSNDNTSITHIQNSLNTALAEFTNLDPTQKHKLPKLHHSRNLTNIVNTLNNYILPQYLSQDTTFTDLHNIIYCGAVAAVRCNGLKVTSPLNIRNTRTSQTRVPAWEKRLNSRITSIRRDLGRITQYIQGTRTQKLTKHIQNIKTTYRIHSKYDVHNTALEEFRDTLHQKLTVYSTRLKRYKAAHKRKIHNTQFQYNQKFFYRSLTHNNTPQHDTQPPTEHSLFTYWSGLWSEEVQHNVETCWIGDEIHKTNNITLMTKTTITTKDIQNATQHLHNWKSPGVDQIHNYWLKHFTCTHEHLARHFTKFIQHPHTTPPFLMKGITYMIPKDNDAINPTKYRPITCLSTLYKLITSCITQKIYTHITDNNILVEEQKGCRKLSRGCKEQLIIDSVVTEQAKHNNRSMYTAYIDYKKAFDSVPHSWLQRVLNLYKIDEHIIQFLTHAMSLWTTTLNLTHNSTTITTDTIHIRRGIFQGDSLSPLWFCLALNPLSHILTDSGCGFKVKFDKEFHKISHLFYIDDLKLYASTQTQLTHLMRLTEIFSADIRMEFGTDKCKTQHIHADPGTPVLFDLQNGGVISPMEEGQFYSYLGVLQSQGIPHTDIKQTLTQHYIQRIQNILKSGLDGRNTVRAINTYATPFLTYSFGIIKWTNTDIKNIQIKTRTIMKKHRIHHIHSSSARLVLPRSLGGRGLTDIQLLHDRQLHILREYFQSKTHTSHLHNAITSADKSYTPLNMHTTQHSLPPTKTQHTSTNMQTWKTKVLHGRYFHELSHDCIDREASQAWLTKCNIFPETEGFMFAIQDQIIHTLNYKKHILKDNAQQTDLCRQCRQKPETIQHITSACSRLTQTDYKHRHDQVAKIIHQKLAIKHKLTTDNSPYYKYTPSSILENNTHKLYWDRTIITDKAVHYNRPDITLIHKHTKTTFLIDIAVPNTHNLQSTHTEKLTKYTDLAVDLRNQWKMTTVVVVPVILSSIGVIPTTLHNSLHTLELHKNTYIQLQKAVIINTCRIVRKFLSMGHSTLQTQTLTTAQQTTTNTTYSPTNANTLMPNTETSHQHPHNTQLHTQNITQEIYPTQHSTSTTTLTHATSAHSPNQTQNNTQETNSSQHNIITYTSTALIHAPPPLYRNETHNTPPIARLTSLTQDQISRPSDVSNKTQNTSQETQHSITLLTTTPIHVPPPINQNLTQNTSPIVRLTRLTHGQIAHYSKPTENVPIAHRTRKRAQHNTTPHTSPKRRGR

SEQ ID NO: 5072 - protein, 968 aa, Biston betularia
MNNESVRNASNTPLSIQDVLLECAICNDRKLYKGQRGLRIHCSRRHVPRSDLLISGGGGARTDLHMLSSVDSAQSNTSLTERLTQLKRSVKIVKRIPKGARITVAQSLSECVAKVVTNNTVQDWESLLTFAYYTFHISSDSNHRSLTTTIKFNTVRQTIPYPLDTTFTKLSSQSPLLFKLVENKISDGNVRGAAKLLFSSDSFATDSAETYTALCDKHPVQSPSTQIPISPSPDTPLCVNEETTLQAISSFPNGSAGGLDGLTPQHLKDLTDPFVGDAGKCLLRELTKLVNLMLNGQVPSEIVPILYGANLIALTKKDGGVRPIAVGSTIRRLTSKLACRAIQERLTAKFQPRQLGFGIKSGCEAAVHAARTFLRSVDYDVFIKIDVKNAFNSLDRGVFLTEIQKHAPEIYKYLWQCYGAPTKLLFRDKEIGSCVGCQQGDPLGPAIFSLGIHSIISNLNSKFNVWYLDDGSLGGRTSEVLDDLNHIIQHFDSIGLSLNFNKCEIFIPEHIQDNIRTSIYQKFNSLCPNICMQTKSSLTLLGAPIFIEGIPPLMMSKIENFNNNSHRLYQIKSHMAIYLLRLCLFAPKIMYLLRCSPLWYFLSITNLIDSIMKETVTKILNLQVDDNSWAQATLPISFGGLGIRQTSSVALPAFLASSHGSQTLIGMILNNSIADVRVACQAEALAAWCASCPGVSTPTELNIQKMWDLPLTKITFTALLDQATDDIDRARLLAVSEVESGHWLHALPSDNLGTVLDPSCLRIAAGLRLGAKLCEPHRCQCGRTVDQFGRHGLSCIKSAGRLFRHSAINDLVRRALCTASVPSTLEPSGMSIDGKRPDGATLVPWSLGRALVWDATCVDTLAPSHVGISARSVGTAAAQAQLNKQRKYSMLSTHYEFVGLAVETMGPWSSDTKKFIKDISKRLVLASGNPRAGAYLRQRLSLAIQRGNAASVLGTLPRGSDLDGVFIL

SEQ ID NO: 5073 - protein, 968 aa, Biston betularia
MNNVSVRNASNTPLSIQDVLLECAICNDRKLYKGQRGLRIHCSRRHVPRSDLLISGGGGARTDLHMLSSVDSAQSNTSLTERLTQLKRSVKIVKRIPKGARITVAQSLSECVAKVVTNNTVQDWESLLTFAYYTFHISSDSNHRSLTTTIKFNTVRQTIPYPLDTTFTKLSSQSPLLFKLVENKISDGNVRGAAKLLFSSDSFATDSAETYTALCDKHPVQSPSTQIPISPSPDTPLCVNEETTLQAISSFPNGSAGRLDGLTPQHLKDLTDPFVGDAGKCLLRELTKLVNLMLNGQVPSEIVPILYGANLIALTKKDGGVRPIAVGSTIRRLTSKLACRAIQERLTAKFQPRQLGFGIKSGCEAAVHAARTFLRSVDYDVFIKIDVKNAFNSLDRGVFLTEIQKHAPEIYKYLWQCYGAPTKLLFRDKEIGSCVGCQQGDPLGPAIFSLGIHSIISNLNSKFNVWYLDDGSLGGRTSEVLDDLNHIIQHFDSIGLSLNFNKCEIFIPEHIQDNIRTSIYQKFNSLCPNICMQTKSSLTLLGAPIFIEGIPPLMMSKIENFNNNSHRLYQIKSHMAIYLLRLCLFAPKIMYLLRCSPLWYFLSITNLIDSIMKETVTKILNLQVDDNSWAQATLPISFGGLGIRQTSSVALPAFLASSHGSQTLIGMILNNSIADVRVACQAEALAAWCASCPGVSTPTELNIQKMWDLPLTKITFTALLDQATDDIDRARLLAVSEVESGHWLHALPSDNLGTVLDPSCLRIAAGLRLGAKLCEPHRCQCGRTVDQFGRHGLSCIKSAGRLFRHSAINDLVRRALCTASVPSTLEPSGMSIDGKRPDGATLVPWSLGRALVWDATCVDTLAPSHVGISARSVGTAAAQAQLNKQRKYSMLSTHYEFVGLAVETMGPWSSDTKKFIKDISKRLVLASGNPRAGAYLRQRLSLAIQRGNAASVLGTLPRGSDLDGVFIL

SEQ ID NO: 5074 - protein, 969 aa, Biston betularia
MMNNESVRNASNTPLSIQDVLLECAICNDRKLYKGQRGLRIHCSRRHVPRSDLLISGGGGARTDLHMLSSVDSAQSNTSLTERLTQLKRSVKIVKRIPKGARITVAQSLSECVAKVVTNNTVQDWESLLTFAYYTFHISSDSNHRSLTTTIKFNTVRQTIPYPLDTTFTKLSSQSPLLFKLVENKISDGNVRGAAKLLFSSDSFATDSAETYTALCDKHPVQSPSTQIPISPSPDTPLCVNEETTLQAISSFPNGSAGGLDGLTPQHLKDLTDPFVGDAGKCLLRELTKLVNLMLNGQVPSEIVPILYGANLIALTKKDGGVRPIAVGSTIRRLTSKLACRAIQERLTAKFQPRQLGFGIKSGCEAAVHAARTFLRSVDYDVFIKIDVKNAFNSLDRGVFLTEIQKHAPEIYKYLWQCYGAPTKLLFRDKEIGSCVGCQQGDPLGPAIFSLGIHSIISNLNSKFNVWYLDDGSLGGRTSEVLDDLNHIIQHFDSIGLSLNFNKCEIFIPEHIQDNIRTSIYQKFNSLCPNICMQTKSSLTLLGAPIFIEGIPPLMMSKIENFNNNSHRLYQIKSHMAIYLLRLCLFAPKIMYLLRCSPLWYFLSITNLIDSIMKETVTKILNLQVDDNSWAQATLPISFGGLGIRQTSSVALPAFLASSHGSQTLIGMILNNSIADVRVACQAEALAAWCASCPGVSTPTELNIQKMWDLPLTKITFTALLDQATDDIDRARLLAVSEVESGHWLHALPSDNLGTVLDPSCLRIAAGLRLGAKLCEPHRCQCGRTVDQFGRHGLSCIKSAGRLFRHSAINDLVRRALCTASVPSTLEPSGMSIDGKRPDGATLVPWSLGRALVWDATCVDTLAPSHVGISARSVGTAAAQAQLNKQRKYSMLSTHYEFVGLAVETMGPWSSDTKKFIKDISKRLVLASGNPRAGAYLRQRLSLAIQRGNAASVLGTLPRGSDLDGVFIL

SEQ ID NO: 5075 - protein, 907 aa, Ennomos fuscantarius
MTFRYSSVYKPYVRVMCLVILWLNVHYVNCSESYNIYIYIYIYIYIYIYIIYIYIYIYHNQSVWENLLTFAYKTFHLGPDTKKRSLTSAIKFNTSRDFIHTHTTDIEHAIPSRNHFKLIENKVSDGNVRGAAKLLFCSDSLATSSAETYTLLRDRHPAQSPSTQLPSPPSTELPLQIDEVATLQAIRSFPNGSAGGLDAITPQHLKDLTDPFVGEAGKSLLRELTALANLILDGRVPAEILPILYGANLVALTKKDGGVRPIAVGSTIRRLTSKICCRAIQERMSKKFVPHQLGFGVRSGCEAAVHAARTFLGSKDYEVFIKIDVKNAFNSLDRGVLLSKIQKEIPEIYNYMWQCYGAPTKLLFGQNEISSCVGCQQGDPLGPALFSLGIDHIIKELNSKFNIWYLDDGSLGGSASEVLDDLKSIIHRFSCVGLTLNFNKCEIFIPDHIPDQIRSSIIDKFNSLCPNILVQTKTSLTLLGAPIFLEAIPPLMMSKIENFNDVSGRLFEIKPHMAIYILRLCLFTPKFMYLLRSCPMWYFQSIVDLVDSTLKDTVTKILNLHFDSRAWAQATLPISFGGLGVRRSSSVALPAFLASCHGSQTLIGMILKTPIADVRVAGQTEALSAWCASCQGVSVPTEMGRQSAWDIPLIKLTHSALLDQVTDDADRARLLASSEVESGHWLRALPSDNLATVLDPSSLRVAVGLRLGVKLCEPHHCQCGQGVDRLGRHGLSCVKSAGRLFRHWAINDLVRRALSTASVPSTLEPTGLVRDDGKRPDGATLVPWCLGRTLVWDATCVDTLAPSHVSSTAQSVGAAAEQAQIKKRRKYAQVSANHEFVALAVETLGPWSSDTKKFIKQVSTRLVLASGDPRAGTYFAQKLSLLIQRGNAASILGTLPRGGELDSVFIL

SEQ ID NO: 5076 - protein, 966 aa, Ennomos quercinarius
MIGPNTLSSSSAPDVLLECSICADRKLYKGPRGLKIHCSRRHVPRTDITPGIVLTPNVPNVPLSSSSVTAGAPSNTSLATRLAQLKRTTKIIKRIPRGARVTVARSLAECVEKVVNENTPSVWEHLLTFAYKTFHLGPDTKKRSLTAAIKLNTSREFIPTPTTDIDQATPSRTHLKFIENKVSDGNVSGAAKLLFCSDSLATNSAETYATLCDKHPTQSPSTQLPSPPSTELPLQIDEKATLEAVRSFPNGSAGGLDAITPQHLKDLTDPFIGEAGKSLLRELTALVNLILDGRVPAEVLPILYGANLVALTKKDGGVRPIAVGSTIRRLTSKMCCRAIQERMSKKLVPHQLGFGVRSGCEAAVHAARTYLGSKDYEVFIKIDVKNAFNSLDRGVLLSEIQKETPEIYNYMWQCYGAPTKLLFGPNEISSCVGCQQGDPLGPALFSLGINPIIRELNSKFNIWYLDDGSLGGSASVVLDDLKSIIHRFSCIGLTLNFNKCEIFIPDHIPDQTRAFIIDKFNSICPNILVQSKSSLTLLGAPVFLEAISPLVTSKIENFNDVSGRLFEVKPHMAIYILRLCLFTPKFMYLLRSCPMWYFQSIIDLVDSTLKETVTKILNLNFDSRAWAQATLPISFGGLGIRRSSTVALPAFLASCHGSQTLIGMILNTPVTDVRVAGQAEALSAWCASCPGVSIPTEMGRQSAWDAPLIKLIHSALLDQVTDDADRARLLASSEVESGHWLRALPSENLATVLDPGSLRVAVGLRLGVGLCEPHRCQCGLGVDQLGRHGLSCVKSAGRLFRHWAINDLVRRALSTASVPSTLEPTGLLRDDGKRPDGATLVPWCLGRTLVWDATCVDTLAPSHVASTARSVGAAAEQAQTLKRRKYAQVSANHEFVALAVETLGPWSSDTKNFCKQISTRLVLASGDPRAGTYFAQKLSLLIQRGNAASILGTLPRGGELDGVFML

SEQ ID NO: 5077 - protein, 960 aa, Ennomos fuscantarius
MQSNTLSSSSAPDVLLECSICADRKLYKGTRGLKIHCSRRHVPRTDITLTPDLPLPSSSVIYTAGAPSNTSLATRLAQLKRTTKIIKRIPRGARVAVARSLAECVEKVVSDNTPLVWENLLTFAYKTFHLGPDTKKRSLTSAIKFNTSRDFIHTHTTDIEHAIPSRNHFKLIENKVSDGNVRGAAKLLFCSDSLATSSAETYTLLRDRHPAQSPSTQLPSPPSTELPLQIDEVATLQAIRSFPNGSAGGLDAITPQHLKDLTDPFVGEAGKSLLRELTALANLILDGRVPAEILPILYGANLVALTKKDGGVRPIAVGSTIRRLTSKICCRAIQERMSKKFVPHQLGFGVRSGCEAAVHAARTFLGSKDYEVFIKIDVKNAFNSLDRGVLLSKIQKEIPEIYNYMWQCYGAPTKLLFGQNEISSCVGCQQGDPLGPALFSLGIDHIIKELNSKFNIWYLDDGSLGGSASEVLDDLKSIIHRFSCVGLTLNFNKCEIFIPDHIPDQIRSSIIDKFNSLCPNILVQTKTSLTLLGAPIFLEAIPPLVMSKIENFNDVSGRLFEIKPHMAIYILRLCLFTPKFMYLLRSCPMWYFQSIVDLVDSTLKDTVTKILNLHFDSRAWAQATLPISFGGLGIRRSSSVALPAFLASCHGSQTLIGMILKTPIADVRVAGQTEALSAWCASCQGVSVPTEMGRQSAWDIPLIKLTHSALLDQVTDDADRARLLASSEVESGHWLRALPSDNLATVLDPSSLRVAVGLRLGVKLCEPHHCQCGQGVDRLGRHGLSCVKSAGRLFRHWAINDLVRRALSTASVPSTLEPTGLVRDDGKRPDGATLVPWCLGRTLVWDATCVDTLAPSHVSSTAQSVGAAAEQAQIKKRRKYAQVSANHEFVALAVETLGPWSSDTKKFIKQVSTRLVLASGDPRAGTYFAQKLSLLIQRGNAASILGTLPRGGELDSVFIL

SEQ ID NO: 5078 - protein, 966 aa, Ennomos quercinarius
MIGPNTLSSSSAPDVLLECSICADRKLYKGPRGLKIHCSRRHVPRTDITPGIVLTPNVPNVPLSSSSVTAGAPSNTSLATRLAQLKRTTKIIKRIPRGARVTVARSLADCVEKVVNENTPSVWEHLLTFAYKTFHLGPDTKKRSLTAAIKLNTSREFIPTPTTDIDQATPSRTHLKFIENKVSDGNVSGAAKLLFCSDSLATNSAETYATLCDKHPTQSPSTQLPSPPSTELPLQIDEKATLEAVRSFPNGSAGGLDAITPQHLKDLTDPFVGEAGKSLLRELTALANLILDGRVPAEVLPILYGANLVALTKKDGGVRPIAVGSTIRRLTSKMCCRAIQERMSKKLVPHQLGFGVRSGCEAAVHAARTYLGSKDYEVFIKIDVKNAFNSLDRGVLLSEIQKETPEIYNYMWQCYGAPTKLLFGPNEISSCVGCQQGDPLGPALFSLGINPIIRELNSKFNIWYLDDGSLGGSASVVLDDLKSIIHRFSCIGLTLNFNKCEIFIPDHIPDQTRAFIIDKFNSICPNILVQSKSSLTLLGAPVFLEAISPLVTSKIKNFNDVSGRLFEVKPHMAIYILRLCLFTPKFMYLLRSCPMWYFQSIIDLVDSTLKETVTKILNLNFDSRAWAQATLPICFGGLGIRRSSTVALPAFLASCHGSQTLIGMILNTPVTDVRVAGQAEALSAWCASCPGVSIPTEMGRQSAWDAPLIKLIHSALLDQVTDDADRARLLASSEVESGHWLRALPSENLATVLDPGSLRVAVGLRLGVGLCEPHRCQCGLGVDQLGRHGLSCVKSAGRLFRHWAINDLVRRALSTASVPSTLEPTGLLRDDGKRPDGATLVPWCLGRTLVWDATCVDTLAPSHVASTARSVGAAAEQAQTLKRRKYAQVSANHEFVALAVETLGPWSSDTKNFCKQISTRLVLASGDPRAGTYFAQKLSLLIQRGNAASILGTLPRGGELDGVFML

SEQ ID NO: 5079 - protein, 966 aa, Ennomos quercinarius
MIGPNTLSSSSAPDVLLECSICADRKLYKGPRGLKIHCSRRHVPRTDITPGIVLTPNVPNVPLSSSSVTAGAPSNTSLATRLAQLKRTTKIIKRIPRGARVTVARSLADCVEKVVNENTPSVWEHLLTFAYKTFHLGPDTKKRSLTAAIKLNTSREFIPTPTTDIDQATPSRTHLKFIENKVSDGNVSGAAKLLFCSDSLATNSAETYATLCDKHPTQSPSTQLPSPPSTELPLQIDEKATLEAVRSFPNGSAGGLDAITPQHLKDLTDPFVGEAGKSLLRELTALANLILDGRVPAEVLPILYGANLVALTKKDGGVRPIAVGSTIRRLTSKMCCRAIQERMSKKLVPHQLGFGVRSGCEAAVHAARTYLGSKDYEVFIKIDVKNAFNSLDRGVLLSEIQKETPEIYNYMWQCYGAPTKLLFGPNEISSCVGCQQGDPLGPALFSLGINPIIRELNSKFDIWYLDDGSLGGSASVVLDDLKSIIHRFSCIGLTLNFNKCEIFIPDHIPDQTRAFIIDKFNSICPNILVQSKSSLTLLGAPVFLEAISPLVTSKIKNFNDVSGRLFEVKPHMAIYILRLCLFTPKFMYLLRSCPMWYFQSIIDLVDSTLKETVTKILNLNFDSRAWAQATLPICFGGLGIRRSSTVALPAFLASCHGSQTLIGMILNTPVTDVRVAGQAEALSAWCASCPGVSIPTEMGRQSAWDAPLIKLIHSALLDQVTDDADRARLLASSEVESGHWLRALPSENLATVLDPGSLRVAVGLRLGVGLCEPHRCQCGLGVDQLGRHGLSCVKSAGRLFRHWAINDLVRRALSTASVPSTLEPTGLLRDDGKRPDGATLVPWCLGRTLVWDATCVDTLAPSHVASTARSVGAAAEQAQTLKRRKYAQVSANHEFVALAVETLGPWSSDTKNFCKQISTRLVLASGDPRAGTYFAQKLSLLIQRGNAASILGTLPRGGELDGVFML

SEQ ID NO: 5080 - protein, 960 aa, Ennomos fuscantarius
MQSNTLSSSSAPDVLLECSICADRKLYKGTRGLKIHCSRRHVPRTDITLTPDLPLPSSSVIYTAGAPSNTSLATRLAQLKRTTKIIKRIPRGARVAVARSLAECVEKVVSDNTPLVWENLLTFAYKTFHLGPDTKKRSLTSAIKFNTSRDFIHTHTTDIEHAIPSRNHFKLIENKVSDGNVRGAAKLLFCSDSLATSSAETYTLLRDRHPAQSPSTQLPSPPSTELPLQIDEVATLQAIRSFPNGSAGGLDAITPQHLKDLTDPFVGEAGKSLLRELTALANLILDGRVPAEILPILYGANLVALTKKDGGVRPIAVGSTIRRLTSKICCRAIQERMSKKFVPHQLGFGVRSGCEAAVHAARTFLGSKDYEVFIKIDVKNAFNSLDRGVLLSKIQKEIPEIYNYMWQCYGAPTKLLFGQNEISSCVGCQQGDPLGPALFSLGIDHIIKELNSKFNIWYFDDGSLGGSASEVLDDLKSIIHRFSCVGLTLNFNKCEIFIPDHIPDQIRSSIIDKFNSLCPNILVQTKTSLTLLGAPIFLEAIPPLVMSKIENFNDVSGRLFEIKPHMAIYILRLCLFTPKFMYLLRSCPMWYFQSIVDLVDSTLKDTVTKILNLHFDSRAWAQATLPISFGGLGIRRSSSVALPAFLASCHGSQTLIGMILKTPIADVRVAGQTEALSAWCASCQGVSVPTEMGRQSAWDIPLIKLTHSALLDQVTDDADRARLLASSEVESGHWLRALPSDNLATVLDPSSLRVAVGLRLGVKLCEPHHCQCGQGVDQLGRHGLSCVKSAGRLFRHWAINDLVRRALSTASVPSTLEPTGLVRDDGKRPDGATLVPWCLGRTLVWDATCVDTLAPSHVSSTAQSVGAAAEQAQIKKRRKYAQVSANHEFVALAVETLGPWSSDTKKFIKQVSTRLVLASGDPRAGTYFAQKLSLLIQRGNAASILGTLPRGGELDSVFIL

SEQ ID NO: 5081 - protein, 954 aa, Agriopis aurantiaria
MNNSNSLCLSAPVVLLECSICADRKLYKGPRGLKIHCSRRHVPRTDLPSTSDIPLSSNSATCTTGASSNTSLATRLAQFKRTIKVIKRIPRGARVTVARSLAECVAKVVSDNTLSSWENLLTFSYNTFHIGPDSNKHSLTSAIKHNTSRRFIPSHVIDPVIPFTNHTKLIENKVSDGNIKGAAKLLFCSDSLATDSAETYAALCDKHPAQSPTTQLPSPPASEPTLQTDEEAILLAIRSFPNGSAGGLDAITPQHLKDLTDPFVGEAGRSLLRDLTALANLMLDGRVPEEIVPILYGANLVALTKKDGGVRPIAVGSTLRRLTSKICCRAFQQRLSKKFMPYQLGFGVKSGCEAAVHATRTFLGSTDYEVYIKIDVKNAFNSLDRGVLLSEIHKEIPEIYNYMWQCYGAPTKLLYGQNEINSCVGCQQGDPLGPALFSLGIHPIVADLNSKLNVWYLDDGSLGGSASLVLEDLKLIIHRFNTIGLTLNFDKCEIYVPDHITDQIRSSIIGQFNLLCPDISIQTKSSLTLLGAPIFLDAIPSLVTSKIKKFTDNSARLFQIKPHMAIYILRLCLFTPKFMYLLRSCPVWYFQSIIDIVDNTLKETVTKILNLQFDSRAWAQATLPISFGGLGIRRSASVALPAFLASSHGSQALIGMILNIPIADVRVAGQSEALTAWCASCPSISVPAEMGTQSAWDIPLIKITHSALLEQATDIADRARLLAVSEVESGHWLRALPSDNLATILDPSSLRVVVGLRLGVKLCEPHRCQCGRGVDQLGRHGLSCVKSAGRLFRHWAINDLVRRALSSASVPSTLEPTGMVRDDGKRPDGATLVPWCLGRALVWDATCVDTLAPSHLSSLVRDVGAAADNAQLLKHRKYAQLSAHYEFLALAVETLGPWSSDTKKFCKDIATRLVLASGDPRAGAYFAQKLSLAIQRGNAASILGTLPHGGDLFT

SEQ ID NO: 5082 - protein, 624 aa, Ennomos fuscantarius
MSKKFVPHQLGFGVRSGCEAAVHAARTFLGSKDYEVFIKIDVKNAFNSLDRGVLLSKIQKEIPEIYNYMWQCYGAPTKLLFGQNEISSCVGCQQGDPLGPALFSLGIDHIIKELNSKFNIWYLDDGSLGGSASEVLDDLKSIIHRFSCVGLTLNFNKCEIFIPDHIPDQIRSSIIDKFNSLCPNILVQTKTSLTLLGAPIFLEAIPPLVMSKIENFNDVSGRLFEIKPHMAIYILRLCLFTPKFMYLLRSCPMWYFQSIVDLVDSTLKDTVTKILNLHFDSRAWAQATLPISFGGLGIRRSSSVALPAFLASCHGSQTLIGMILKTPIADVRVAGQTEALSAWCASCQGVSVPTEMGRQSAWDIPLIKLTHSALLDQVTDDADRARLLASSEVESGHWLRALPSDNLATVLDPSSLRVAVGLRLGVELCEPHHCQCGQGVDRLGRHGLSCVKSAGRLFRHWAINDLVRRALSTASVPSTLEPTGLVRDDGKRPDGATLVPWCLGRTLVWDATCVDTLAPSHVSSTAQSVGAAAEQAQIKKRRKYAQVSANHEFVALAVETLGPWSSDTKKFIKQVSTRLVLASGDPRAGTYFAQKLSLLIQRGNAASILGTLPRGGELDSVFIL

SEQ ID NO: 5083 - protein, 960 aa, Ennomos fuscantarius
MQSNTLSSSSAPDVLLECSICADRKLYKGTRGLKIHCSRRHVPRTDITLTPDLPLPSSSVIYTAGAPSNTSLATRLAQLKHTTKIIKRIPRGARVAVARSLAECVEKVVSDNTPLVWENLLTFAYKTFHLGPDTKKRSLTSAIKFNTSRDFIHTHTTDIEHAIPSRNHFKLIENKVSDGNVRGAAKLLFCSDSLATSSAETYTLLRDRHPAQSPSTQLPSPPSTELPLQIDEVATLQAIRSFPNGSAGGLDAITPQHLKDLTDPFVGEAGKSLLRELTALANLILDGRVPAEILPILYGANLVALTKKDGGVRPIAVGSTIRRLTSKICCRAIQERMSKKFVPHQLGFGVRSGCEAAVHAARTFLGSKDYEVFIKIDVKNAFNSLDRGVLLSKIQKEIPEIYNYMWQCYGAPTKLLFGQNEISSCVGCQQGDPLGPALFSLGIDHIIKELNSKFNIWYLDDGSLGGSASEVLDDLKSIIHRFSCVGLTLNFNKCEIFIPDHIPDQIRSSIIDKFNSLCPNILVQTKTSLTLLGAPIFLEAIPPLVMSKIENFNDVSGRLFEIKPHMAIYILRLCLFTPKFMYLLRSCPMWYFQSIVDLVDSTLKDTVTKILNLHFDSRAWAQATLPISFGGLGIRRSSSVALPAFLASCHGSQTLIGMILKTPIADVRVAGQTEALSAWCASCQGVSVPTEMGRQSAWDIPLIKLTHSALLDQVTDDADRARLLASSEVESGHWIRALPSDNLATVLDPSSLRVAVGLRLGVKLCEPHHCQCGQGVDRLGRHGLSCVKSAGRLFRHWAINDLVRRALSTASVPSTLEPTGLVRDDGKRPDGATLVPWCLGRTLVWDATCVDTLAPSHVSSTAQSVGAAAEQAQIKKRRKYAQVSANHEFVALAVETLGPWSSDTKKFIKQVSTRLVLASGDPRAGTYFAQKLSLLIQRGNAASILGTLPRGGELDSVFIL

SEQ ID NO: 5084 - protein, 966 aa, Ennomos quercinarius
MIGPNTLSSSSAPDVLLECSICADRKLYKGPRGLKIHCSRRHVPRTDITPGIVLTPNVPNVPLPSSSVTAGAPSNTSLATRLAQLKRTTKIIKRIPRGARVTVARSLAECVEKVVNENTPSVWEHLLTFAYKTFHLGPDTKKRSLTAAIKLNTSREFIPTPTTDIDQATPSRTHLKFIENKVSDGNVSGAAKLLFCSDSLATNSAETYATLCDKHPTQSPSTQLPSPPSTELPLQIDEKATLEAVRSFPNGSAGGLDAITPQHLKDLTDPFVGEAGKSLLRELTALANLILDGRVPAEVLPILYGANLVALTKKDGGVRPIAVGSTIRRLTSKMCCRAIQERMSKKLVPHQLGFGVRSGCEAAVHAARTYLGSKDYEVFIKIDVKNAFNSLDRGVLLSEIQKETPEIYNYMWQCYGAPTKLLFGPNEISSCVGCQQGDPLGPALFSLGINPIIRELNSKFNIWYLDDGSLGGSASVVLDDLKSIIHRFSCIGLTLNFNKCEIFIPDHIPDQTRAFIIDKFNSICPNILVQSKSSLTLLGAPVFLEAISPLVTSKIENFNDVSGRLFEVKPHMAIYILRLCLFTPKFMYLLRSCPMWYFQSIIDLVDSTLKETVTKILNLNFDSRAWAQATLPICFGGLGIRRSSTVALPAFLASCHGSQTLIGMILNTPVTDVRVAGQAEALSAWCASCPGVSIPTEMGRQSAWDAPLIKLIHSALLDQVTDDADRARLLASSEVESGHWLRALPSENLATVLDPGSLRVAVGLRLGVGLCEPHRCQCGLGVDQLGRHGLSCVKSAGRLFRHWAINDLVRRALSTASVPSTLEPTGLLRDDGKRPDGATLVPWCLGRTLVWDATCVDTLAPSHVASTARSVGAAAEQAQTLKRRKYAQVSANHEFVALAVETLGPWSSDTKNFCKQISTRLVLASGDPRAGTYFAQKLSLLIQRGNAASILGTLPRGGELDGVFML

SEQ ID NO: 5085 - protein, 960 aa, Ennomos fuscantarius
MQSNTLSSSSAPDVLLECSICADRKLYKGTRGLKIHCSRRHVPRTDITLTPDLPLPSSSVIYTAGAPSNTSLATRLAQLKRTTKIIKRIPRGARVAVARSLAECVEKVVSDNTPLVWENLLTFAYKTFHLGPDTKKRSLTSAIKFNTSRDFIHTHTTDIEHAIPSRNHFKLIENKVSDGNVRGAAKLLFCSDSLATSSAETYTLLRDRHPAQSPSTQLPSPPSTELPLQIDEVATLQAIRSFPNGSAGGLDAITPQHLKDLTDPFVGEAGKSLLRELTALANLILDGRVPAEILPILYGANLVALTKKDGGVRPIAVGSTIRRLTSKICCRAIQERMSKKFVPHQLGFGVRSGCEAAVHAARTFLGSKDYEVFIKIDVKNAFNSLDRGVLLSKIQKEIPEIYNYMWQCYGAPTKLLFGQNEISSCVGCQQGDPLGPALFSLGIDHIIKELNSKFNIWYLDDGSLGGSASEVLDDLKSIIHRFSCVGLTLNFNKCEIFIPDHIPDQIRSSIIDKFNSLCPNILVQTKTSLTLLGAPIFLEAIPPLVMSKIENFNDVSGRLFEIKPHMAIYILRLCLFTPKFMYLLRSCPMWYFQSIVDLVDSTLKDTVTKILNLHFDSRAWAQATLPISFGGLGIRRSSSVALPAFLASCHGSQTLIGMILKTPIADVRVAGQTEALSAWCASCQGVSVPTEMGRQSAWDIPLIKLTHSALLDQVTDDADRARLLASSEVESGHWLRALPSDNLATVLDPSSLRVAVGLRLGVKLCEPHHCQCGQGVDRLGRHGLSCVKSAGRLFRHWAINDLVRRALSTASVPSTLEPTGLVRDDGKRPDGATLVPWCLGRTLVWDATCVDTLAPSHVSSTAQSVGAAAEQAQIKKRRKYAQVSANHEFVTLAVETLGPWSSDTKKFIKQVSTRLVLASGDPRAGTYFAQKLSLLIQRGNAASILGTLPRGGELDSVFIL

SEQ ID NO: 5086 - protein, 899 aa, Ennomos fuscantarius
MQVYKYYDKSYFYYSTLNIKIKKSIKRIPRGARVAVARSLAECVEKVVSDNTPLVWENLLTFAYKTFHLGPDTKKRSLTSAIKFNTSRDFIHTHTTDIEHAIPSRNHFKLIENKVSDGNVRGAAKLLFCSDSLATSSAETYTLLRDRHPAQSPSTQLPSPPSTELPLQIDEVAALQAIRSFPNGSAGGLDAITPQHLKDLTDPFVGEAGKSLLRELTALANLILYGRVPAEILPILYGANLVALTKKDGGVRPIAVGSTIRRLTSKICCRAIQERMSKKFVPHQLGFGVRSGCEAAVHAARTFLGSKDYEVFIKIDVKNAFNSLDRGVLLSEIQKEIPEIYNYMWQCYGAPTKLLFGQNEISSCVGCQQGDPLGPALFSLGIDHIIKELNSKFNIWYLDDGSLGGSASEVLDDLKSIIHRFSCVGLTLNFNKCEIFIPDHIPDQIRSSIIDKFNSLCPNILVQTKTSLTLLGAPIFLEAIPPLVMSKIENFNDVSGRLFEIKPHMAIYILRLCLFTPKFMYLLRSCPMWYFQSIVDLVDSTLKDTVTKILNLHFDSRAWAQATLPISFGGLGIRRSSSVALPAFLASCHGSQTLIGMILKTPIADVRVAGQTEALSAWCASCQGVSFPTEMGRQSAWDIPLIKLTHSALLDQVTDDADRARLLASSEVESGHWLRALPSDNLATVLDPSSLRVAVGLRLGVKLCEPHHCQCGQGVDRLGRHGLSCVKSAGRLFRHWAINDLVRRALSTASVPSTLEPTGLVRDDGKRPDGATLVPWCLGRTLVWDATCVDTLAPSHVSSTAQSVGAAAEQAQIKKRRKYAQVSANHEFVALAVETLGPWSSDTKKFIKQVSTRLVLASGDPRAGTYFAQKLSLLIQRGNAASILGTLPRGGELDSVFIL

SEQ ID NO: 5087 - protein, 966 aa, Ennomos quercinarius
MIGPNTLSSSSAPDVLLECSICADRKLYKGPRGLKIHCSRRHVPRTDITPGIVLTPNVPNVPLSSSSMTAGAPSNTSLATRLAQLKRTTKIIKRIPRGARVTVARSLAECVEKVVNENTPSVWEHLLTFAYKTFHLGPDTKKRSLTAAIKLNTSREFIPTPTTDIDQATPSRTHLKFIENKVSDGNVSGAAKLLFCSDSLATNSAETYATLCDKHPTQSPSTQLPSPPSTELPLQIDEKATLEAVRSFPNGSAGGLDTITPQHLKDLTDPFVGEAGKSLLRELTALANLILDGRVPAEVLPILYGANLVALTKKDGGVRPIAVGSTIRRLTSKMCCRAIQERMSKKLVPHQLGFGVRSGCEAAVHAARTYLGSKDYEVFIKIDVKNAFNSLDRGVLLSEIQKETPEIYNYMWQCYGAPTKLLFGPNEISSCVGCQQGDPLGPALFSLGINPIIRELNSKFNIWYLDDGSLGGSASVVLDDLKSIIHRFSCIGLTLNFNKCEIFIPDHIPDQTRAFIIDKFNSICPNILVQSKSSLTLLGAPVFLEAISPLVTSKIENFNDVSGRLFEVKPHMAIYILRLCLFTPKFMYLLRSCPMWYFQSIIDLVDSTLKETVTKILNLNFDSRAWAQATLPICFGGLGIRRSSTVALPAFLASCHGSQTLIGMILNTPVTDVRVAGQAEALSAWCASCPGVSIPTEMGRQSAWDAPLIKLIHSALLDQVTDDADRARLLASSEVESGHWLRALPSENLATVLDPGSLRVAVGLRLGVGLCEPHRCQCGLGVDQLGRHGLSCVKSAGRLFRHWAINDLVRRALSTASVPSTLEPTGLLRDDGKRPDGATLVPWCLGRTLVWDATCVDTLAPSHVASTARSVGAAAEQAQTLKRRKYAQVSANHEFVALAVETLGPWSSDTKNFCKQISTRLVLASGDPRAGTYFAQKLSLLIQRGNAASILGTSPRGGELDGVFML

SEQ ID NO: 5088 - protein, 954 aa, Agriopis aurantiaria
MNNSNSLCLSAPVVLLECSICADRKLYKGPRGLKIHCSRRHVPRTDLPSTPDIPLSSNSATCTTGASSNTSLATRLAQFKRTIKVIKRIPRGARVTVARSLAECVAKVVSDNTLSSWENLLTFSYNTFHIGPDSNKHSLTSAIKHNTSRRFIPSHVIDPVIPFTNHTKLIENKVSDGNIKGAAKLLFCSDSFATDSAETYAALCDKHPAQSPTTQLPSPPASEPTLQTDEEAILLAIRSFPNGSAGGLDAIHPQHLKDLTDPFVGEAGRSLLRDLTALANLMLDGRVPEEIVPILYGANLVALTKKDGGVRPIAVGSTLRRLTSKICCRAFQQRLSKKFMPYQLGFGVKSGCEAAVHATRTFLGSTDYEVYIKIDVKNAFNSLDRGVLLSEIHKEIPEIYNYMWQCYGAPTKLLYGQNEINSCVGCQQGDPLGPALFSLGIHPIVADLNSKLNVWYLDDGSLGGSASLVLEDLKLIIHRFNTIGLTLNFDKCEIYVPDHITDQIRSSIIGQFNLLCPDISIQTKSSLTLLGAPIFLDAIPSLVTSKIKKFTDNSARLFQIKPHMAIYILRLCLFTPKFMYLLRSCPVWYFQSIIDIVDNTLKETVTKILNLQFDSRAWAQATLPISFGGLGIRRSASVALPAFLASSHGSQALIGMILNIPIADVRVAGQSEALTAWCASCPSISVPAEMGTQSAWDIPLIKITHSALLEQATDIADRARLLAVSEVESGHWLRALPSDNLATILDPSSLRVVVGLRLGVKLCEPHRCQCGRGVDQLGRHGLSCVKSAGRLFRHWAINDLVRRALSSASVPSTLEPTGMVRDDGKRPDGATLVPWCLGRALVWDATCVDTLAPSHLSSLVRDVGAAADNAQLLKHRKYAQLSAHYEFLALAVETLGPWSSDTKKFCKDIATRLVLASGDPRAGAYFAQKLSLAIQRGNAASILGTLPHGGDLFT

SEQ ID NO: 5089 - protein, 954 aa, Agriopis aurantiaria
MNNSNSLCSSAPVVLLECSICADRKLYKGPRGLKIHCSRRHVPRTDLPSTPDIPLSSNSATCTTGASSNTSLATRLAQFKRTIKVIKRIPRGARVTVARSLAECVAKVVSDNTLSSWENLLTFSYNTFHIGPDSNKHSLTSAIKHNTSRRFIPSHVIDPVIPFTNHTKLIENKVSDGNIKGAAKLLFCSDSFATDSAETYAALCDKHPAQSPATQLPSPPASEPTLQTDEEAILLAIRSFPNGSAGGLDAITPQHLKDLTDPFVGEAGRSLLRDLTALANLMLDGRVPEEIVPILYGANLVALTKKDGGVRPIAVGSTLRRLTSKICCRAFQQRLSKKFMPYQLGFGVKSGCEAAVHATRTFLGSTDYEVYIKIDVKNAFNSLDRGVLLSEIHKEIPEIYNYMWQCYGAPTKLLYGQNEINSCVGCQQGDPLGPALFSLGIHPIVADLNSKLNVWYLDDGSLGGSASLVLEDLKLIIHRFNTIGLTLNFDKCEIYVPDHITDQIRSSIIGQFNLLCPDISIQTKSSLTLLGAPIFLDAIPSLVTSKIKKFTDNSARLFQIKPHMAIYILRLCLFTPKFMYLLRSCPVWYFQSIIDIVDNTLKETVTKILNLQFDSRAWAQATLPISFGGLGIRRSASVALPAFLASSHGSQALIGMILNIPIADVRVAGQSEALTAWCASCPSISVPAEMGTQSAWDIPLIKITHSALLEQATDIADRARLLAVSEVESGHWLRALPSDNLATILDPSSLRVVVGLRLGVKLCEPHRCQCGRGVDQLGRHGLSCVKSAGRLFRHWAINDLVRRALSSASVPSTLEPTGMVRDDGKRPDGATLVPWCLGRALVWDATCVDTLAPSHLSSLVRDVGAAADNAQLLKHRKYAQLSAHYEFLALAVETLGPWSSDTKKFCKDIATRLVLASGDPRAGAYFAQKLSLAFQRGNAASILGTLPHGGDLFT

SEQ ID NO: 5090 - protein, 954 aa, Agriopis aurantiaria
MNNSNSLCLSAPVVLLECSICADRKLYKGSRGLKIHCSRRHVPRTDLPSTPDIPLSSNSATCTTGASSNTSLATRLAQFKRTIKVIKRIPRGARVTVARSLAECVAKVVSDNTLSSWENLLTFSYNTFHIGPDSNKHSLTSAIKHNTSRRFILSHDIDPVIPFTNHTKLIENKVSDGNIKGAAKLLFCSDSLATDSAETYAALCDKHPAQSPTTQLPSPPASEPTLQTDEEAILLAIRSFPNGSAGGLDAITPQHLKDLTDPFVGEAGRSLLRDLTALANLMLDGRVPEEIVPILYGANLVALTKKDGGVRPIAVGSTLRRLTSKICCRAFQQRLSKKFMPYQLGFGVKSGCEAAVHATRTFLGSTDYEVYIKIDVKNAFNSLDRGVLLSEIHKEIPEIYNYMWQCYGAPTKLLYGQNEINSCVGCQQGDPLGPALFSLGIHPIVTDLNSKLNVWYLDDGSLGGSASLVLEDLKLIIHRFNTIGLTLNFDKCEIYVPDHITDQIRSSIIGQFNLLCPDISIQTKSSLTLLGAPIFLDAIPSLVTSKIKNFTDNSARLFQIKPHMAIYILRLCLFTPKFMYLLRSCPVWYFQSIIDIVDNTLKETVTKILNLQFDSRAWAQATLPISFGGLGIRRSASVALPAFLASSHGSQALIGMILNIPIADVRVAGQSEALTAWCASCPSISVPAEMGTQSAWDIPLIKITHSALLEQATDIADRARLLAVSEVESGHWLRALPSDNLATILDPSSLRVVVGLRLGVKLCEPHRCQCGRGVDQLGRHGLSCVKSAGRLFRHWAINDLVRRALSSASVPSTLEPTGMVRDDGKRPDGATLVPWCLGRALVWDATCVDTLAPSHLSSLVRDVGAAADNAQLLKHRKYAQLSAHYEFLALAVETLGPWSSDTKKFCKDISTRLVLASGDPRAGAYFAQKLSLAIQRGNAASILGTLPHGGDLFT

SEQ ID NO: 5091 - protein, 960 aa, Ennomos fuscantarius
MQSNTLSSSSAPDVLLECSICADRKLYKGTRGLKIHCSRRHVPRTDITLTPDLPLPSSSVIYTAGAPSNTSLATRLAQLKRTTKIIKRIPRGARVAVARSLAECVEKVVSDNTPLVWENLLTFAYKTFHLGPDTKKRSLTSAIKFNTSRDFIHTHTTDIEHAIPSRNHFKLIENKVSDGNVRGAAKLLFCSDSLATSSAETYTLLRDRHPAQSPSTQLPSPPSTELPLQIDEVATLQAIRSFPNGSAGGLDAITPQHLKDLTDPFVGEAGKSLLRELTALANLILDGRVPAEILPILYGANLVALTKKDGGVRPIAVGSTIRRLTSKICCRAIQERMSKKFVPRQLGFGVRSGCEAAVHAARTFLGSKDYEVFIKIDVKNAFNSLDRGVLLSKIQKEIPEIYNYMWQCYGAPTKLLFGQNEISSCVGCQQGDPLGPALFSLGIDHIIKELNSKFNIWYLDDGSLGGSASEVLDDLKSIIHRFSCVGLTLNFNKCEIFIPDHIPDQIRSSIIDKFNSLCPNILVQTKTSLTLLGAPIFLEAIPPLVMSKIENFNDVSGRLFEIKPHMAIYILRLCLFTPKFMYLLRSCPMWYFQSIVDLVDSTLKDTVTKILNLHFDSRAWAQATLPISFGGLGIRRSSSVALPAFLASCHGSQTLIGMILKTPIADVRVAGQTEALSAWCASCQGVSVPTEMGRQSAWDIPLIKLTHSALLDQVTDDADRARLLASSEVESGHWLRALPSDNLATVLDPSSLRVAVGLRLGVKLCEPHHCQCGQGVDRLGRHGLSCVKSAGRLFRHWAINDLVRRALSTASVPSTLEPTGLVRDDGKRPDGATLVPWCLGRTLVWDATCVDTLAPSHVSSTAQSVGAAAEQAQIKKRRKYAQVSANHEFVALAVETLGPWSSDTKKFIKQVSTRLVLASGDPRAGTYFAQKLSLLIQRGNAASILGTLPRGGELDSVFIL

SEQ ID NO: 5092 - protein, 960 aa, Ennomos fuscantarius
MQSNTLSSSSAPDVLLECSICADRKLYKGTRGLKIHCSRRHVPRTDITLTPDLPLPSSSVIYTAGAPSNTSLATRLAQLKRTTKIIKRIPRGARVAVARSLAECVEKVVSDNTPLVWENLLTFAYKTFHLGPDTKKRSLTSAIKFNTSRDFIHTHTTDIEHAIPSRNHFKLIENKVSDGNVRGAAKLLFCSDSLATSSAETYTLLRDRHPAQSPSTQLPSPPSTELPLQIDEVATLQAIRSFPNGSAGGLDAITPQHLKDLTDPFVGEAGKSLLRELTALANLILDGRVPAEILPILYGANLVALTKKDGGVRPIAVGSTIRRLTSKICCRAIQERMSKKFVPHQLGFGVRSGCEAAVHAARTFLGSKDYEVFIKIDVKNAFNSLDRGVLLSKIQKEIPEIYNYMWQCYGAPTKLLFGQNEISSCVGCQQGDPLGPALFSLGIDHIIKELNSKFNIWYLDDGSLGGSASEVLDDLKSIIHRFSCVGLTLNFNKCEIFIPDHIPDQIRSSIIDKFNSLCPNILVQTKTSLTLLGAPIFLEAIPPLMMSKIENFNDVSGRLFEIKPHMAIYILRLCLFTPKFMYLLRSCPMWYFQSIVDLVDSTLKDTVTKILNLHFDSRAWAQATLPISFGGLGVRRSSSVALPAFLASCHGSQTLIGMILKTPIADVRVAGQTEALSAWCASCQGVSVPTEMGRQSAWDIPLIKLTHSALLDQVTDDADRARLLASSEVESGHWLRALPSDNLATVLDPSSLRVAVGLRLGVKLCEPHHCQCGQGVDRLGRHGLSCVKSAGRLFRHWAINDLVRRALSTASVPSTLEPTGLVRDDGKRPDGATLVPWCLGRTLVWDATCVDTLAPSHVSSTAQSVGAAAEQAQIKKRRKYAQVSANHEFVALAVETLGPWSSDTKKFIKQVSTRLVLASGDPRAGTYFAQKLSLLIQRGNAASILGTLPRGGELDSVFIL

SEQ ID NO: 5093 - protein, 966 aa, Ennomos quercinarius
MIGPNTLSSSSAPDVLLECSICADRKLYKGPRGLKIHCSRRHVPRTDITPGIVLTPNVPNVPLSSSSVTAGAPSNTSLATRLAQLKRTTKIIKRIPRGARVTVARSLAECVEKVVNENTPSVWEHLLTFAYKTFHLGPDTKKRSLTAAIKLNTSREFIPTPTTDIDQATPSRTHLKFIENKVSDGNVSGAAKLLFCSDSLATNSAETYATLCDKHPTQSPSTQLPSPPSTKLPLQIDEKATLEAVRSFPNGSAGGLDAITPQHLKDLTDPFIGEAGKSLLRELTALVNLILDGRVPAEVLPILYGANLVALTKKDGGVRPIAVGSTIRRLTSKMCCRAIQERMSKKLVPHQLGFGVRSECEAAVHAARTYLGSKDYEVFIKIDVKNAFNSLDRGVLLSEIQKETPEIYNYMWQCYGAPTKLLFGPNEISSCVGCQQGDPLGPALFSLGINPIIRELNSKFNIWYLDDGSLGGSASVVLDDLKSIIHRFSCIGLTLNFNKCEIFIPDHIPDQTRAFIIDKFNSICPNILVQSKSSLTLLGAPVFLEAISPLVTSKIENFNDVSGRLFEVKPHMAIYILRLCLFTPKFMYLLRSCPMWYFQSIIDLVDSTLKETVTKILNLNFDSRAWAQATLPISFGGLGIRRSSTVALPAFLASCHGSQTLIGMILNTPVTDVRVAGQAEALSAWCASCPGVSIPTEMGRQSAWDAPLIKLIHSALLDQVTDDADRARLLASSEVESGHWLRALPSENLATVLDPGSLRVAVGLRLGVGLCEPHRCQCGLGVDQLGRHGLSCVKSAGRLFRHWAINDLVRRALSTASVPSTLEPTGLLRDDGKRPDGATLVPWCLGRTLVWDATCVDTLAPSHVASTARSVGAAAEQAQTLKRRKYAQVSANHEFVALAVETLGPWSSDTKNFCKQISTRLVLASGDPRAGTYFAQKLSLLIQRGNAASILGTLPRGGELDGVFML

SEQ ID NO: 5094 - protein, 960 aa, Ennomos fuscantarius
MQSNTLSSSSAPDVLLECSICADRKLYKGTRGLKIHCSRRHVPRTDITLTPDLPLPSSSVIYTAGAPSNTSLATRLAQLKRTTKIIKRIPRGARVAVARSLAECVEKVVSDNTPLVWENLLTFAYKTFHLGPDTKKRSLTSAIKFNTSRDFIHTHTTDIEHAIPSRNHFKLIENKVSDGNVRGAAKLLFCSDSLATSSAETYTLLRDRHPAQSPSTQLPSPPSTELPLQIDEVATLQAIRSFPNGSAGGLDAITPQHLKDLTDPFVGEAGKSLLRELTALANLILDGRVPAEILPILYGANLVALTKKDGGVRPIAVGSTIRRLTSKICCRAIQERMSKKFVPHQLGFGVRSGCEAAVHAARTFLGSKDYEVFIKIDVKNAFNSLDRGVLLSKIQKEIPEIYNYMWQCYGAPTKLLFGQNEISSCVGCQQGDPLGPALFSLGIDHIIKELNSKFNIWYLDDGSLGGSASEVLDDLKSIIHRFSCVGLTLNFNKCEIFIPDHIPDQIRSSIINKFNSLCPNILVQTKTSLTLLGAPIFLEAIPPLMMSKIENFNDVSGRLFEIKPHMAIYILRLCLFTPKFMYLLRSCPMWYFQSIVDLVDSTLKDTVTKILNLHFDSRAWAQATLPISFGGLGVRRSSSVALPAFLASCHGSQTLIGMILKTPIADVRVAGQTEALSAWCASCQGVSVPTEMGRQSAWDIPLIKLTHSALLDQVTDDADRARLLASSEVESGHWLRALPSDNLATVLDPSSLRVAVGLRLGVKLCEPHHCQCGQGVDRLGRHGLSCVKSAGRLFRHWAINDLVRRALSTASVPSTLEPTGLVRDDGKRPDGATLVPWCLGRTLVWDATCVDTLAPSHVSSTAQSVGAAAEQAQIKKRRKYAQVSANHEFVALAVETLGPWSSDTKKFIKQVSTRLVLASGDPRAGTYFAQKLSLLIQRGNAASILGTLPRGGELDSVFIL

SEQ ID NO: 5095 - protein, 633 aa, Ennomos quercinarius
MCCRAIQERMSKKLVPHQLGFGVRSGCEAAVHAARTYLGSKDYEVFIKIDVKNAFNSLDRGVLLSEIQKETPEIYNYMWQCYGAPTKLLFGPNEISSCVGCQQGDPLGPALFSLGINPIIRELNSKFNIWYLDDGSLGGSASVVLDDLKSIIHRFSCIGLTLNFNKCEIFIPDHIPDQTRAFIIDKFNSICPNILVQSKSSLTLLGAPVFLEAISPLVTSKIENFNDVSGRLFEVKPHMAIYILRLCLFTPKFMYLLRSCPMWYFQSIIDLVDSTLKETVTKILNLNFDSRAWAQATLPISFGGLGIRRSSTVALPAFLASCHGSQTLIGMILNTPVTDVRVAGQAEALSAWCASCPGVSIPTEMGRQSAWDAPLIKLIHSALLDQVTDDADRARLLASSEVESGHWLRALPSENLATVLDPGSLRVAVGLRLGVGLCEPHRCQCGLGVDQLGRHGLSCVKSAGRLFRHWAINDLVRRALSTASVPSTLEPTGLLRDDGKRPDGATLVPWCLGRTLVWDATCVDTLAPSHVASTARSVGAAAEQAQTLKRRKYAQVSANHEFVALAVETLGPWSSDTKNFCKQISTRLVLASGDPRAGTYFAQKLSLLIQRGNAASILGTLPRGGELDGVFML

SEQ ID NO: 5096 - protein, 954 aa, Agriopis aurantiaria
MNNSNSLCLSAPVVLLECSICADRKLYKGSRGLKIHCSRRHVPRTDLPSTPDIPLSSNSATCTTGASSNTSLATRLAQFKRTIKVIKRIPRGARVTVARSLAECVAKVVSDNTLSSWENLLTFSYNTFHIGPDSNKHSLTSAIKHNTSRRFIPSHDIDPVIPFTNHTKLIENKVSDGNIKGAAKLLFCSDSLATDSAETYAALCDKHPAQSPTTQLPSPPASEPTLQTDEEAILLAIRSFPNGSAGGLDAITPQHLKDLTDPFVGEAGRSLLRDLTALANLMLDGRVPEEIVPILYGANLVALTKKDGGVRPIAVGSTLRRLTSKICCRAFQQRLSKKFMPYQLGFGVKSGCEAAVHATRTFLGSTDYEVYIKIDVKNAFNSLDRGVLLSEIHKEIPEIYNYMWQCYGAPTKLLYGQNEINSCVGCQQGDPLGPALFSLGIHPIVTDLNSKLNVWYLDDGSLGGSASLVLEDLKLIIHRFNTIGLTLNFDKCEIYVPDHITDQIRSSIIGQFNLLCPDISIQTKSSLTLLGAPIFLDAIPSLVTSKIKKFTDNSARLFQIKPHMAIYILRLCLFTPKFMYLLRSCPVWYFQSIIDIVDNTLKETVTKILNLQFDSRAWAQATLPISFGGLGIRRSASVALPAFLASSHGSQALIGMILNIPIADVRVAGQSEALTAWCASCPSISVPAEMGTQSAWDIPLIKITHSALLEQATDIADRARLLAVSEVESGHWLRALPSDNLATILDPSSLRVVVGLRLGVKLCEPHRCQCGRGVDQLGRHGLSCVKSAGRLFRHWAINDLVRRALSSASVPSTLEPTGMVRDDGKRPDGATLVPWCLGRALVWDATCVDTLAPSHLSSLVRDVGAAADNAQLSKHRKYAQLSTHYEFLALAVETLGPWSSDTKKFCKDISTRLVLASGDPRAGAYFAQKLSLAIQRGNAASILGTLPHGGDLFT

SEQ ID NO: 5097 - protein, 954 aa, Agriopis aurantiaria
MNNSNSLCLSAPVVLLECSICADRKLYKGPRGLKIHCSRRHVPRTDLPSTPDIPLSSNSATCTTGASSNTSLATRLAQFKRTIKVIKRIPRGARVTVARSLAECVAKVVSDNTLSSWENLLTFSYNTFHIGPDSNKHSLTSAIKHNTSRRFIPSHVIDPVIPFTNHTKLIENKVSDGNIKGAAKLLFCSDSFATDSAETYAALCDKHPAQSPTTQLPSPPASEPTLQTDEEAILLAIRSFPNGSAGGLDAITPQHLKDLTDPFVGEAGRSLLRDLTALANLMLDGRVPEEIVPILYGANLVALTKKDGGVRPIAVGSTLRRLTSKICCRAFQQRLSKKFMPYQLGFGVKSGCEAAVHATRTFLGSTDYEVYIKIDVKNAFNSLDRGVLLSEIHKEIPEIYNYMWQCYGAPTKLLYGQNEINSCVGCQQGDPLGPALFSLGIHPIVADLNSKLNVWYLDDGSLGGSASLVLEDLKLIIHRFNTIGLTLNFDKCEIYVPDHITDQIRSSIIGQFNLLCPDISIQTKSSLTLLGAPIFLDAIPSLVTSKIKKFTDNSARLFQIKPHMAIYILRLCLFTPKFMYLLRSCPVWYFQSIIDIVDNTLKETVTKILNLQFDSRAWAQATLPISFGGLGIRRSASVALPAFLASSHGSQALIGMILNIPIADVRVAGQSEALTAWCASCPSISVPAEMGTQSAWDIPLIKITHSALLEQATDIADRARLLAVSEVESGHWLRALPSDNLATILDPSSLRVVVGLRLGVKLCEPHRCQCGRGVDQLGRHGLSCVKSAGRLFRHWAINDLVRRALSSASVPSTLEPTGMVRDDGKRPDGATLVPWCLGRALVWDATCVDTLAPSHLSSLVRDVGAAADNAQLLKHRKYAQLSAHYEFLALAVETLGPWSSDTKKFCKDIATRLVLASGDPRAGAYFAQKLSLAIQRGNAASILGTLPHGCDLFT

SEQ ID NO: 5098 - protein, 966 aa, Ennomos quercinarius
MIGPNTLSSSSAPDVLLECSICADRKLYKGPRGLKIHCSRRHVPRTDITPGIVLTPNVPNVPLSSSSVTAGAPSNTSLATRLAQLKRTTKIIKRIPRGARVTVARSLADCVEKVVNENTPSVWEHLLTFAYKTFHLGPDTKKRSLTAAIKLNTSREFIPTPTTDIDQATPSRTHLKFIENKVSDGNVSGAAKLLFCSDSLATNSAETYATLCDKHPTQSPSTQLPSPPSTELPLQIDEKATLEAVRSFPNGSAGGLDAITPQHLKDLTDPFVGEAGKSLLRELTALANLILDGRVPAEVLPILHGANLVALTKKDGGVRPIAVGSTIRRLTSKMCCRAIQERMSKKLVPHQLGFGVRSGCEAAVHAARTYLGSKDYEVFIKIDVKNAFNSLDRGVLLSEIQKETPEIYNYMWQCYGAPTKLLFGPNEISSCVGCQQGDPLGPALFSLGINPIIRELNSKFNIWYLDDGSLGSSASVVLDDLKSIIHRFSCIGLTLNFNKCEIFIPDHIPDQTRAFIIDKFNSICPNILVQSKSSLTLLGAPVFLEAISPLVTSKIKNFNDVSGRLFEVKPHMAIYILRLCLFTPKFMYLLRSCPMWYFQSIIDLVDSTLKETVTKILNLNFDSRAWAQATLPICFGGLGIRRSSTVALPAFLASCHGSQTLIGMILNTPVTDVRVAGQAEALSAWCASCPGVSIPTEMGRQSAWDAPLIKLIHSALLDQVTDDADRARLLASSEVESGHWLRALPSENLATVLDPGSLRVAVGLRLGVGLCEPHRCQCGLGVDQLGRHGLSCVKSAGRLFRHWAINDLVRRALSTASVPSTLEPTGLLRDDGKRPDGATLVPWCLGRTLVWDATCVDTLAPSHVASTARSVGAAAEQAQTLKRRKYAQVSANHEFVALAVETLGPWSSDTKNFCKQISTRLVLASGDPRAGTYFAQKLSLLIQRGNAASILGTLPRGGELDGVFML

SEQ ID NO: 5099 - protein, 960 aa, Ennomos fuscantarius
MQSNTLSSSSAPDMLLECSICADRKLYKGTRGLKIHCSRRHVPRTDITLTPDLPLPSSSVIYTAGAPSNTSLATRLAQLKRTTKIIKRIPRGARVAVARSLAECVEKVVSDNTPLVWENLLTFAYKTFHLGPDTKKRSLTSAIKFNTSRDFIHTHTTDIEHAIPSRNHFKLIENKVSDGNVRGAAKLLFCSDSLATSSAETYTLLRDRHPAQSPSTQLPSPPSTELPLQIDEVATLQAIRSFPNGSAGGLDAITPQHLKDLTDPFVGEAGKSLLRELTALANLILDGRVPAEILPILYGANLVALTKKDGGVRPIAVGSTIRRLTSKICCRAIQERMSKKFVPHQLGFGVRSGCEAAVHAARTFLGSKDYEVFIKIDVKNAFNSLDRGVLLSKIQKEIPEIYNYMWQCYGAPTKLLFGQNEISSCVGCQQGDPLGPALFSLGIDHIIKELNSKFNIWYLDDGSLGGSASEVLDDLKSIIHRFSCVGLTLNFNKCEIFIPDHIPDQIRSSIIDKFNSLCPNILVQTKTSLTLLGAPIFLEAIPPLVMSKIENFNDVSGRLFEIKPHMAIYILRLCLFTPKFMYLLRSCPMWYFQSIVDLVDSTLKDTVTKILNLHFDSRAWAQATLPISFGGLGIRRSSSVALPAFLASCHGSQTLIGMILKTPIADVRVAGQTEALSAWCASCQGVSVPTEMGRQSAWDIPLIKLTHSALLDQVTDDADRARLLASSEVESGHWLRALPSDNLATVLDPSSLRVAVGLRLGVKLCEPHHCQCGQGVDRLGRHGLSCVKSAGRLFRHWAINDLVRRALSTASVPSTLEPTGLVRDDGKRPDGATLVPWCLGRTLVWDATCVDTLAPSHVSSTAQSVGAAAEQAQIKKRRKYAQVSANHEFVALAVETLGPWSSDTKKFIKQVSTRLVLASGDPRAGTYFAQKLSLLIQRGNAASILGTLPRGGELDSVFIL

SEQ ID NO: 5100 - protein, 937 aa, Ennomos quercinarius
MIGPNTLSSSSAPDVLLECSICADRKLYKGPRGLKIHCSRRHVPRTDITPGIVLTPNVPNVPLSSSSVTAGAPSNTSLATRLAQLKRTTKIIKRIPRGARVTVAQSLADCVEKVVNENTPSVWEHLLTFAYKTFHLGPDTKKRSLTAAIKLNTSREFIPTPTTDIDQATPSRTHLKFIENKVSDGNVSGAAKLLFCSDSLATNSAETYATLCDKHPTQSPSTQLPSPPSTELPLQIDEKATLEAVRSFPNGSAGGLDAITPQHLKDLTDPFVGEAGKSLLRELTALANLILDGRVPAEVLPILYGANLVALTKKDGGVRPIAVGSTIRRLTSKMCCRAIQERMSKKLVPHQLGFGVRSGCEAAVHAARTYLGSKDYEVFIKIDVKNAFNSLDRGVLLSDIQKETPEIYNYMWQCYGAPTKLLFGPNEISSCVGCQQGDPLGPALFSLGINPIIRELNSKFNIWYLDDGSLGGSASVVLDDLKSIIHRFSCIGLTLNFNKCEIFIPDHIPDQTRAFIIDKFNSICPNILVQSKSSLTLLGAPVFLEAISPLVTSKIKNFNDVSGRLFEVKPHMAIYILRLCLFTPKFMYLLRSCPMWYFQSIIDLVDSTLKETVTKILNLNFDSRAWAQATLPICFGGLGIRRSSTVALPAFLASCHGSQTLIGMILNTPVTDVRVAGQAEALSAWCASCPGVSIPTEMGRQSAWDAPLIKLIHSALLDQVTDDADRARLLASSEVESGHWLRALPSENLATVLDPGSLRVAVGLRLGVGLCEPHHCQCGLGVDQLGRHGLSCVKSAGRLFRHWAINDLVRRALSTASVPSTLEPTGLLRDDGKRPDGATLVPWCLGRTLVWDATCVDTLAPSHVASTARSVGAAAEQAQTLKRRKYAQVSANHEFVALAVETLGPWSPTRKISVSKFPLGWSSPQEIPELAHTSLRS

SEQ ID NO: 5101 - protein, 966 aa, Ennomos quercinarius
MIGPNTLSSSSAPDVLLECSICADRKLYKGPRGLKIHCSRRHVPRTDITPGIVLTPNVPNVPLSSSSVTAGAPSNTSLATRLAQLKRTTKIIKRIPRGARVTVARSLAECVEKVVNENTPSVWEHLLTFAYKTFHLGPDTKKRSLTAAIKLNTSREFIPTPTTDIDQATPSRTHLKFIENKVSDGNVSGAAKLLFCSDSLATNSAETYATLCDKHPTQSPSTQLPSPPSTELPLQIDEKATLEAVRSFPNGSAGGLDAITPQHLKDLTDPFVGEAGKSLLRELTALANLILDGRVPAEVLPILYGANLVALTKKDGGVRPIAVGSTIRRLTSKMCCRAIQERMSKKLVPHQLGFGVRSGCEAAVHAARTYLGSKDYEVFIKIDVKNAFNSLDRGVLLSEIQKETPEIYNYMWQCYGAPTKLLFGPNEISSCVGCQQGDPLGPALFSLGINPIIRELNSKFNIWYLDDGSLGGSASVVLDDLKSIIHRFSCIGLTLNFNKCEIFIPDHIPDQTRAFIIDKFNSICPNILVQSKSSLTLLGAPVFLEAISPLVTSKIENFNDVSGRLFEVKPHMAIYILRLCLFTPKFMYLLRSCPMWYFQSIIDLVDSTLKETVTKILNLNFDSRAWAQATLPISFGGLGIRRPSTVALPAFLASCHGSQTLIGMILNTPVTDVRVAGQAEALSAWCASCPGVSIPTEMGRQSAWDAPLIKLIHSALLDQVTDDADRARLLASSEVESGHWLRALPSENLATVLDPGSLRVAVGLRLGVGLCEPHRCQCGLGVDQLGRHGLSCVKSAGRLFRHWAINDLVRRALSTASVPSTLEPTGLLRDDGKRPDGATLVPWCLGRTLVWDATCVDTLAPSHVASTARSVGAAAEQAQTLKRRKYAQVSANHEFVALAVETLGPWSSDTKNFCKQISTRLVLASGDPRAGTYFAQKLSLLIQRGNAASILGTLPRGGELDGVFML

SEQ ID NO: 5102 - protein, 908 aa, Ennomos fuscantarius
MQSNTLSSSSAPDVLLECSICADRKLYKGTRGLKIHCSRRHVPRTDITLTPDLPLPSSSVIYTAGAPSNTSLATRLAQLKRTTKIIKRIPRGARVAVARSLAECVEKVVSDNTPLVWENLLTFAYKTFHLGPDTKKRSLTSAIKFNTSRDFIHTHTTDIEHAIPSRNHFKLIENKVSDGNVRGAAKLLFCSDSLATSSAETYTLLRDRHPAQSPSTQLPSPPSTELPLQIDEVATLQAIRSFPNGSAGGLDAITPQHLKDLTDPFVGEAGKSLLRELTALANLILDGRVPAEILPILYGANLVALTKKDGGVRPIAVGSTIRRLTSKICCRAIQERMSKKFVPHQLGFGVRSGCEAAVHAARTFLGSKDYEVFIKIDVKNAFNSLDRGVLLSKIQKEIPEIYNYMWQCYGAPTKLLFGQNEISSCVGCQQGDPLGPALFSLGIDHIIKELNSKFNIWYLDDGSLGGSASEVLDDLKSIIHRFSCVDLTLNFNKCEIFIPDHIPDQIRSSIIDKFNSLCPNILVQTKTSLTLLGAPIFLEAIPPLVMSKIENFNDVSGRLFEIKPHMAIYILRLCLFTPKFMYLLRSCPMWYFQSIVDLVDSTLKDTVTKILNLHFDSRAWAQATLPISFGGLGIRRSSSVALPAFLASCHGSQTLIGMILKTPIADVRVAGQTEALSAWCASCQGVSVPTEMGRQSAWDIPLIKLTHSALLDQVTDDADRARLLASSEVESGHWLRALPSDNLATVLDPSSLRVAVGLRLGVKLCEPHHCQCGQGVDRLGRHGLSCVKSAGRLFRHWAINDLVRRALSTASVPSTLEPTGLVRDDGKRPDGATLVPWCLGRTLVWDATCVDTLAPSHVSSTAQSVGAAAEQAQIKKRRKYAQVSANHEFVALAVETLGPWSSDTKKIY

SEQ ID NO: 5103 - protein, 965 aa, Erannis defoliaria
MDSSSNTQILTSSTASDVLLECEICADRKLYKGHRGLKIHCSRRHVPRSDLLTPSGGPKDLHRSTPGISTAGNSSLASRLAQLKRSVKIIKRVPRGARVSVARSLSECVAKVVSENSFSSWEDLLTFAYYTFHVTSDSKHRSLTSAVKLNTSRRFIPPHLNILNASQSSFSIKLIENKLSDGNVRGAAKLLFCSDSLATDSAETYSALCQKHPAQSTSIQFPAPPSLSSVKPLNIDEEATLQAIRSFPNGSAGGLDGITPQHLKDLTDPLIGEAGKDLLRNLTSLANFMLDGHVPGNILPILYGANLIALAKKDGGVRPIAIGSTLRRLASKLCCRTIQDNLSKKFHPRQLGFGVRGGCEAAVHAARTFLGSTDYDVFIKIDVKNAFNSLDRGVLLSEIQKEIPEIYNYMWQCYGAPTKLMFGEKEIASCVGCQQGDPLGPAIFSLGINSIISDLNSKFNVWYLDDGSLGGSASEVLEDLRTIIQRFDSIGLSLNFDKCEIFFPDHISDSARASLYQKFNSVCPKISIQTKTSLTLLGAPVFLEAIPPLMTSKIEHFNNSSHRLFQIKPHMAIYILRLCLFTPKFMYLLRCSPLWYFHSITNLVDSTLKETVIKILNLQFDNRSWAQATLPISFGGLGIRRTSSVALPAFLASSHGSQTLIGMILNNPVADVRVACQTEALEAWCASCPGVSTPTEMKIQSKWDLPLTKITFTALLDQASDDADRARLLAVAEAESGHWLHALPSDNLATVLDPSCLRIAVGLRLGAKLCEPHRCHCGRDVDQSGRHGLSCVKSAGRLFRHWALNDLVRRALSTAAVPSTLEPSGMSRDDGKRPDGATLVPWCLGRALVWDATCVDTLAPSHVGSSARSVGAAAEQAQLLKHRKYSQLSAHYDFVALAVETLGPWSSDTKKFCKDLAKRLVLASGDLRAGAYFAQRLSIAIQRGNAASILGTLPHGGDLDGVFVL

SEQ ID NO: 5104 - protein, 965 aa, Erannis defoliaria
MDSSSNTQILTSSTASDVLLECEICADRKLYKGHRGLKIHCSRRHVPRSDLLTPSGGPKDLHRSTPGISTAGNSSLASRLAQLKRSVKIIKRVPRGARVSVARSLSECVAKVVSENSFSSWEDLLTFAYYTFHVTSDSNHRSLTSAVKLNTSRRFIPPHLNILNASQSSFSTKLIENKLSDGNVRGTAKLLFCSDSLATDSAETYSALCQKHPAQSTSIQFPAPPSLSSVMPLNIDEEATLQAIRSFPNGSAGGLDGITPQHLKDLTDPLIGEAGKDLLRNLTSLANFMLDGHVPGNILPILYGANLIALAKTDGGVRPIAIGSTLRRLASKLCCRTIQDNLSKKFHPRQLGFGVRGGCEAAVHAARTFLGSTDYDVFINIDVKNAFNSLDRGVLLSEIQKEIPEIYNYMWQCYGAPTKLMFGEKEIASCVGCQQGDPLGPAIFSLGINSIISDLNSKFNVWYLDDGSLGGSASEVLEDLRTIIQRFDSIGLWLNFDKCEIFFPDHISDSTRASLYQKFNSVCPKISIQTKTSLTLLGAPVFLEAIPPLMTSKIEHFNNSSHRLFQIKPHMAIYILRLCLFTPKFMYLLRCSPLWYFHSITNLVDSTLKETVIKILNLQFDNRSWAQATLPISFGGLGIRRTSSVALPAFLASSHGSQTLIGMILNNPVADVRVACQTEALEAWCASCPGVSTPTEMKIQSKWDLPLTKITFTALLDQASDDADRARLLAVAEAESGHWLHALPSDNLATVLDPSCLRIAVGLRLGAKLCEPHRCHCGRDVDQSGRHGLSCVKSAGRLFRHWALNDLVRRALSTAAVPSTLEPSGMSRDDGKRPDGATLVPWCLGRALVWDATCVDTLAPSHVGSSARSVGAAAEQAQLLKHRKYSQLSAHYDFVALAVETLGPWSSDTKKFCKDLAKRLVLASGDLRAGAYFAQRLSIAIQRGNAASILGTLPHGGNLDGVFVL

SEQ ID NO: 5105 - protein, 965 aa, Erannis defoliaria
MDSSSNTQILTSSTASDVLLECEICADRKLYKGHRGLKIHCSRRHVPRSDLLTPSGGPKDLYRSTPGISKAGNSSLASRLAQLKRSVKIIKRVPRGARVSVARSLSECVAKVVSENSFSSWEDLLTFAYYTFHVTSDSNHRSLTSAVKLNTSRRFIPPHLNILNASQSSFSTKLIENKLSDGNVRGAAKLLFCSDSLATDSAETYSALCQKHPAQSTSIQFPAPPSLSSVKPLNIDEEATLQAIRSFPNGSAGGLDGITPQHLKDLTDPLIGEAGKDLLRNLTSLANFMLDGHVPGNILPILYGANLIALAKKDGGVRPIAIGSTLRRLASKLCCRTIQDNLSKKFHPRQLGFGVRGGCEAAVHAARTFLGSTDYDVFIKIDVKNAFNSLDRGVLLSEIQKEIPEIYNYMWQCYGAPTKLMFGEKEIASCVGCQQGDPLGPAIFSLGINSIISDLNSKFNVWYLDDGSLGGSASEVLEDLRTIIQRFDSIGLSLNFDKCEIFFPDHISDSTRASLYQNFNLVCPKISIQTKTSLTLLGAPVFLEAIPPLMTSKIEHFNNSSHRLFQIKPHMAIYILRLCLFTPKFMYLLRCSPLWYFHSITNLVDSTLKETVIKILNLQFDNRSWAQATLPISFGGLGIRRTSSVALPAFLASSHGSQTLIGMILNNPVADVRVACQTEALEAWCASCSGVSTPTEMKIQSKWDLPLTKITFTALLDQASDDADRARLLAVAEAESGHWLHALPSDNLATVLDPSCLRIAVGLRLGAKLCEPHRCHCGRDVDQSGRHGLSCVKSAGRLFRHWALNDLVRRALSTAAVPSTLEPSGMSRDDGKRPDGATLVPWCLGRALVWDATCVDTLAPSHVGSSARSVGAAAEQAQLLKHRKYSQLSAHYDFVALAVETLGPWSSDTKKFCKDLAKRLVLASGDLRAGAYFAQRLSIAIQRGNAASILGTLPHGGDLDGVFVL

SEQ ID NO: 5106 - protein, 965 aa, Erannis defoliaria
MDSSSNTQILTSSTASDVLLECEICADRKLYKGHRGLKIHCSRRHVPRSDLLTPSGGPKDLHRSTPGISTAGNSSLASRLTQLKRSVKIIKRVPRGARVSVARSLSECVAKVVSENSFSSWEDLLTFAYYTFHVTSDSNHRSLTSAVKLNTSRRFIPPHLNILNASQSSFSTKLIENKLSDGNVRGAAKLLFCSDSLATDSAETYSALCQKHPAQSTSIQFPAPPSLSSVKPLNIDEEATLQAIRSFPNGSAGGLDGITPQHLKDLTDPLIGEAGKDLLRNLTSLANFMLDGHVPGNILPILYGANLIALAKKDGGVRPIAIGSTLRRLASKLCCRTIQDNLSKKFHPRQLGFGVRGGCEAAVHAARTFLGSTDYDVFIKIDVKNAFNSLDRGVLLSEIQKEIPEIYNYMWQCYGAPTKLMFGEKEIASCVGCQQGDPLGPAIFSLGINSIISDLNSKFNVWYLDDGSLGGSASEVLEDLRTIIQRFDSIGLSLNFDKCEIFFPDHISDSTRASLYQNFNLVCPKISIQTKTSLTLLGAPVFLEAIPPLMTSKIEHFNNSSHRLFQIKPHMAIYILRLCLFTPKFMYLLRCSPLWYFHSITNLVDSTLKETVIKILNLQFDNRSWAQATLPISFGGLGIRRTSSVALPAFLASSHGSQTLIGMILNNPVADVRVACQTEALEAWCASCPGVSTPTEMKIQSKWDLPLTKITFTALLDQASDDADRARLLAVAEAESGHWLHALPSDNLATVLDPSCLRIAVGLRLGAKLCEPHRCHCGRDVDQSGRHGLSCVKSAGRLFRHWALNDLVRRALSTAAVPSTLEPSGMSRDDGKRPDGATLVPWCLGRALVWDATCVDTLAPSHVGSSARSVGAAAEQAQLLKHRKYSQLSAHYDFVALAVETLGPWSSDTKKFCKDLAKRLVLASGDLRAGAYFAQRLSIAIQRGNAASILGTLPHGGDLDGVFVL

SEQ ID NO: 5107 - protein, 965 aa, Erannis defoliaria
MDSSSNTQILTSSTASDVLLECEICADRKLYKGHRGLKIHCSRRHVPRSDLLTPSGGPKYLHRSTPGISTAGNSSLASRLAQLKRSVKIIKRVPRGARVSVARSLSECVAKVVSENSFSSWEDLLTFAYYTFHVTSDSKHRSLTSAVKLNTSRRFIPPHLNILNASQSSFSIKLIENKLSDGNVRGAAKLLFCSDSLATDSAETYSALCQKHPAQSTSIQFPAPPSLSSVKPLNIDEEATLQAIRSFPNGSAGGLDGITPQHLKDLTGPLIGEAGKDLLRNLTSLANFMLDGHVPGNILPILYGANLIALAKKDGGVRPIAIGSTLRRLASKLCCRTIQDNLSKKFHPRQLGFGVRGGCEAAVHAARTFMGSTDYDVFIKIDVKNAFNSLDRGVLLSEIQKEIPEIYNYMWQCYGAPTKLMFGEKEIASCVGCQQGDPLGPAIFSLGINSIISDLNSKFNVWYLDDGSLGGSASEVLEDLRTIIQRFDSIGLSLNFDKCEIFFPDHISDSARASLYQKFNSVCPKISIQTKTSLTLLGAPVFLEAIPPLMTSKIEHFNNSSHRLFQIKPHMAIYILRLCLFTPKFMYLLRCSPLWYFHSITNLVDSTLKETVIKILNLQFDNRSWAQATLPISFGGLGIRRTSSVALPAFLASSHGSQTLIGMILNNPVADVWVACQTEALEAWCASCPGVSTPTEMKIQSKWDLPLTKITFTALLDQASDDADRARLLAVAEAESGHWLHALPSDNLATVLDPSCLRIAVGLRLGAKLCEPHRCHCGRDVDQSGRHGLSCVKSAGRLFRHWALNDLVRRALSTAAVPSTLEPSGMSRDDGKRPDGATLVPWCLGRALVWDATCVDTLAPSHVGSSARSVGAAAEQAQLLKHRKYSQLSAHYDFVALAVETLGPWSSDTKKFCKDLAKRLVLASGDLRAGAYFAQRLSIAIQRGNAASILGTLPHGGDLDGVFVL

SEQ ID NO: 5108 - protein, 965 aa, Erannis defoliaria
MDSSSNTQILTSSTASDVLLECEICADRKLYKGHRGLKIHCSRRHVPRSDLLTPSGGPKDLHRSTPGISTAGNSSLASRLAQLKRSVKIIKRVPRGARVSVARSLSECVAKVVSENSFSSWEDLLTFAYYTFHVTSDSNHRSLTSAVKLNTSRRFIPPHLNILNAYQCSFSTKLIENKLSDGNVRGAAKLLFCSDSLATDSAETYSALCQKHPAQSTSIQFPAPPSLSSVKPLNIDEEATLQAIRSFPNGSAGGLDGITPQHLKDLTDPLIGEAGKDLLRNLTSLANFMLDGHVPGNILPILYGANLIALAKKDGGVRPIAIGSTLRRLASKLCCRTIQDNLSKKFHPRQLGFGVRGGCEAAVHAARTFLGSTDYDVFIKIDVKNAFNSLDRGVLLSEIQKEIPEIYNYMWQCYGAPTKLMFCEKEIASCVGCQQGDPLGPAIFSLGINSIISDLNSKFNVWYLDDGSLGGSASEVLEDLRTIIQRFDSIGLSLNFDKCEIFFPDHISDSTRASLYQNFNLVCPKISIQTKTSLTLLGAPVFLEAIPPLMTSKIEHFNNSSHRLFQIKPHMAIYILRLCLFTPKFMYLLRCSPLWYFHSITNLVDSTLKETVIKILNLQFDNRSWAQATLPISFGGLGIRRTSSVALPAFLASSYGSQTLIGMILNNPVADVRVACQTEALEAWCASCPGVSTPTEMKIQSKWDLPLTKITFTALLDQASDDADRARLLAVAEAESGHWLHALPSDNLATVLDPSCLRIAVGLRLGAKLCEPHRCHCGRDVDQSGRHGLSCVKSAGRLFRHWALNDLVRRALSTAAVPSTLEPSGMSRDDGKRPDGATLVPWCLGRALVWDATCVDTLAPSHVGSSARSVGAAAEQAQLLKHRKYSQLSAHYDFVALAVETLGPWSSDTKKFCKDLAKRLVLASGDLRAGAYFAQRLSIAIQRGNAASILGTLPHGGDLDGVFVL

SEQ ID NO: 5109 - protein, 965 aa, Erannis defoliaria
MDSSSNTQILTSSTASDVLLECEICADRKLYKGHRGLKIHCSRRHVPRSDLLTPSGGPKDLHRSTPGISTAGNSSLASRLAQLKRSVKIIKRVPRGARVSVARSLSECVAKVVSENSFSSWEDLLTFAYYTFHVTSDSKHRSLTSAVKLNTSRRFIPPHLNILNASQSSFSIKLIENKLSDGNVRGAAKLLFCSDSLATDSAETYSALCQKHPAQSTSIQFPAPPSLSSVKPLNIDEEATLQAIRSFPNGSAGGLDGITPQHLKDLTDPLIGEAGKDLLRNLTSLANFMLDGHVPGNILPILYGANLIALAKKDGGVRPIAIGSTLRRLASKLCCRTIQDNLSKKFHPRQLGFGVRGGCEAAVHAARTFLGSTDYDVFIKIDVKNAFNSLDRGVLLSEIQKEIPEIYNYMWQCYGAPTKLMFGEKEIASCVGCQQGDPLGPAIFSLGINSIISDLNSKFNVWYLDDGSLGGSASEVLEDLRTIIQRFDSIGLSLNFDKCEIFFPDHISDSARASLYQKINSVCPKISIQTKTSLTLLGAPVFLEAIPPLMTSKIEHFNNSSHRLFQIKPHMAIYILRLCLFTPKFMYLLRCSPLWYFHSITNLVDSTLKETVIKILNLQFDNRSWAQATLPISFGGLGIRRTSSVALPAFLASSHGSQTLIGMILNNPVADVRVACQTEALEAWCASCPGVSTPTEMKIQSKWDLPLTKITFTALLDQVSDDADRARLLAVAEAESGHWLHALPSDNLATVLDPSCLRIAVGLRLGAKLCEPHRCHCGRDVDQSGRHGLSCVKSAGRLFRHWALNDLVRRALSTAAVPSTLEPSGMSRDDGKRPDGATLVPWCLGRALVWDATCVNTLAPSHVGSSARSVGAAAEQAQLLKHRKYSQLSAHYDFVALAVETLGPWSSDTKKFCKDLAKRLVLASGDLRAGAYFAQRLSIAIQRGNAASILGTLPHGGDLDGVFVL

SEQ ID NO: 5110 - protein, 965 aa, Erannis defoliaria
MDSSSNTQILTSSTASDVLLECEICADRKLYKGHRGLKIHCSRRHVPRSDLLTPSGGPKDLHRSTPGISTAGNSSLASRLAQLKRSVKIIKRVPRGARVSVARSLSECVAKVVSENSFSSWEDLLTFAYYTFHVTSDSKHRSLTSAVKLNTSRRFIPPHLNILNASQSSFSIKLIENKLSDGNVRGAAKLLFCSDSLATDSAETYSALCQKHPAQSTSIQFPAPPSLSSVKPLNIDEEATLQAIRSFPNGSAGGLDGITPQHLKDLTDPLIGEAGKDLLRNLTSLANFMLDGHVPGNILPILYGANLIALAKKDGGVRPIAIGSTLRRLASKLCCRTIQDNLSKKFHPRQLGFGVRGGCEAAVHAARTFLGSTDYDVFIKIDVKNAFNSLDRGVLLSEIQKEIPEIYNYMWQCYGAPTKLMFGEKEIASCVGCQQGDPLGPAIFSLGINSIISDLNSKFNVWYLDDGSLGGSASEVLEDLRTIIQRFDSIGLSLNFDKCEIFFPDHISDSARASLYQKFNSVCPKISIQTKTSLTLLGAPVFLEAIPPLMTSKIEHFNNSSHRLFQIKPHMAIYILRLCLFTPKFMYLLRCSPLWYFHSITNLVDLTLKETVIKILNLQFDNRSWAQATLPISFGGLGIRRTSSVALPAFLASSHGSQTLIGMILNNPVADVRVACQTEALEAWCASCPGVSTPTEMKIQSKWDLPLTKITFTALLDQASDDADRARLLAVAEAESGHWLHALPSDNLATVLDPSCLRIAVGLRLGAKLCEPHRCHCGRDVDQSGRHGLSCVKSAGRLFRHWALNDLVRRALSTAAVPSTLEPSGMSRDDGKRPDGATLVPWCLGRALVWDATCVDTLAPSHVGSSARSVGAAAEQAQLLKHRKYSQLSAHYDFVALAVETLGPWSSDTKNFCKDLAKRLVLASGDLRAGAYFAQRLSIAIQRGNAASILGTLPHGGDLDGVFVL

SEQ ID NO: 5111 - protein, 965 aa, Erannis defoliaria
MDSSSNTQILTSSTASDVLLECEICADRKLYKGHRGLKIHCSRRHVPRSDLLTPSGGPKDLHRSTPGISTAGNSSLASRLAQLKRSVKIIKRVPRGARVSVARSLSECVAKVVSENSFSSWEDLLTFAYYTFHVTSDSNHRSLTSAVKLNTSRRFIPPHLNILNASQSSFSTKLIENKLSDGNVRGAAKLLFCSDSLATDSAETYSALCQKHPAQSTSIQFPAPPSLSSVKPLNIDEEATLQAIRSFPNGSAGGLDGITPQHLKDLTDPLIGEAGKDLLRNLTSLANFMLDGHVPGNILPILYGANLIALAKKDGGVRPIAIGSTLRRLASKLCCRTIQNNLSKKFHPRQLGFGARGGCEAAVHAARTFLGSTDYDVFIKIDVKNAFNSLDRGVLLSEIQKEIPEIYNYMWQCYGAPTKLMFGEKEIASCVGCQQGDPLGPAIFSLGINSIISDLNSKFNVWYLDDGSLGGSASEVLEDLRTIIQRFDSIGLTLNFDKCEIFFPDHISDSTRASLYQNFNLVCPKISIQTKTSLTLLGAPVFLEAIPPLMTSKIEHFNNSSHRLFQIKPHMAIYILRLCLFTPKFMYLLRCSPLWYFHSITNLVDSTLKETVIKILNLQFDNRSWAQATLPISFGGLGIRRTSSVALPAFLASSHGSQTLIGMILNNPVADVRVACQTEALEAWCAPCPGVSTPTEMKIQSKWDLPLTKITFTALLDQASDDADRARLLAVAEAESGHWLHALPSDNLATVLDPSCLRIAVGLRLGAKLCEPHRCHCGRDVDQSGRHGLSCVKSAGRLFCHWALNDLVRRALSTAAVPSTLEPSGMSRDDGKRPDGATLVPWCLGRALVWDATCVDTLAPSHVGSSARSVGAAAEQAQLLKHRKYSQLSAHYDFVALAVETLGPWSSDTKKFCKDLAKRLVLASGDLRAGAYFAQRLSIAIQRGKAASILGTLPHGGDLDGVFVL

SEQ ID NO: 5112 - protein, 961 aa, Agriopis aurantiaria
MNTQTITSSSVPDVLLECDICGDRKLYKGHRGLKIHCSRRHVPRSDLVVSAGGTPDLHMLTPATGIPGITSLAGRLAHLKRAAKIIKRIPRGARVSVARSLSECVAKVVAMNSLKSWEELLTFSYYTFHIAPDSNHRSLTSAIKFNTSRQSIPSHLNCPDSSKGKGSYSIKLIENKLSDGNVRGAAKLLFSDDSLATDSAETYLALCRKHPAVSPSTQLPTPPSSETPLHIDEETTLQAIRSFPNGSAGGLDGITPQHLKDLTDPLVGEAGRDFLRDLTALANFMLDGHVPTEIVPILYGANLVALAKKDGGVRPIAVGSTLRRLTSKLCCQKIQDRLSKKFQPCQLGFGVRAGCEAAVHAARTFLGSTDYEVFIKIDVKNAFNSLDRGVLLSEIQKEIPEIYNYMWQCYGAPSKLLFGEKEIASCVGCQQGDPLGPAIFSLGIHPIISDLNSKFNVWYLDDGSIGGSASEVLEDLQCIIQRFNSIGLTLNFDKCEIYFPDHIQNNTRASIYQKFFSLCPNILQQTKTSLTLLGAPIFLEAIPPLLTSKIENFINNSHRLFQIKPHMAIYILRLCLFTPKFTYLLRCCPLWYFHSITDLVDFTLKNTVTKILNIQFDNRSWAQATLPISFGGLGIRRTSSVALPAFLASSHGSQTLIGMILQSPIADVRVAGQTEALAAWCASCPGVNPPTDMGLQKLWDLPLTKLTYTALLDQAVDDIDRARLLAVSVAESGHWLRVLPSDNLGTVLDPSCLRIAVGLRLGEKLCEPHRCQCGRAVDQFGRHGLSCVRSAGRLYRHWAINDLVRRALSTASVPSTLEPNGMTRDDGKRPDGASLVPWCLGRALVWDATCVDTLAPSHVVSSARSVGAAAEQAQLNKHRKYSQLSAHYEFVALAVETLGPWSSDTKKFCKDISTRLVLASGDPRAGIYFSQKLSIAIQRGNSASVLGTLPHGGDLDGVFVL

SEQ ID NO: 5113 - protein, 965 aa, Erannis defoliaria
MDSSSNTQILTSSTASDVLLECEICADRKLYKGHRGLKIHCSRRHVPRSDLLTPSGGPKDLHRSTPGISTAGNSSLASRLAQLKRSVKIIKRVPRGARVSVARSLSECVAKVVSENSFSSWEDLLTFAYYTFHVTSDSNHRSLTSAVKLNTSRRFIPPHLNILNASQSSFSTKLIENKLSDGNVRGAAKLLFCSDSLATDSAETYSALCQKHPAQSTSIQFPAPPSLSSVKPLNIDEEATLQAIRSFPNGSAGGLDGITPQHLKDLTDPLIGEAGKDLLRNLTSLANFMLDGHVPGNILPILYGANLIALAKKDGGVRPIAIGSTLRRLASKLCCRTIQDNLSKKFHPRQLGFGVRGGCEAAVHAARTFLGSTDYDVFIKIDVKNAFNSLDRGVLLSEIQKEIPEIYNYMWQCYGAPTKLMFGEKEIASCVGCQQGDPLGPAIFSLGINSIISDLNSKFNVWYLDDGSLGGSASEVLEDLRTIIQRFDSIGLSLNFDKCEIFFPDHISDSTRASLYQNFNLVCPKISIQTKTSLTLLGAPVFLEAIPPLMTSKIEHFNNSSHRLFQIKPHMAIYILRLCLFTPKFMYLLRCSPLWYFHSITNLVDSTLKETVIKILNLQFDNRSWAQATLPISFGGLGIRRTSSVALPAFLASSHGSQTLIGMILNNPVADVRVACQTEALEAWCASCPGVSTPTEMKIQSKWDLPLTKITFTALLDQASDDADRARLLAVAEAESGHWLHALPSDNLATVLDPSCLRIAVGLRLGAKLCEPHRCHCGRDVDQSGRHGLSCVKSAGRLFRHWALNDLVRRALSTAAVPSTLEPSGMSRDDGKRPDGATLVPWCLGRALVWDATCVDTLAPSHVGSSARSVGAAAEQAQLLKHRKYSQLSAHYDFVALAVETLGPWSSDTKKFCKDLAKRLVLASGDLRAGAYFAQRLSIAIQRGNAASILGTLPHGGDLDGVFVL

SEQ ID NO: 5114 - protein, 965 aa, Erannis defoliaria
MDSSSNTQILTSSTASDVLLECEICADRKLYKGHRGLKIHCSRRHVPRSDLLTPSGGPKDLHRSTPGISTAGNSSLASRLAQLKRSVKIIKRVPRGARVSVARSLSECVAKVVSENSFSSWEDLLTFAYYTFHVTSDSNHRSLTSAVKLNTSRRFIPPHLNILNASQSSFSTKLIENKLSDGNVRGAAKLLFCSDSLATDSAETYSALCQKHPAQSNSIQFPAPPSLSSVKPLNIDEEATLQAIRSFPNGSAGGLDGITPQHLKDLTDPLIGEAGKDLLRNLTSLANFMLDGHVPGNILPILYGANLIALAKKDGGVRPIAIGSTLRRLASKLCCRTIQDNLSKKFHPRQLGFGVRGGCEAAVHAARTFLGSTDYDVFIKIDVKNAFNSLDRGVLLSEIQKEIPEIYNYMWQCYGAPTKLMFGEKEIASCVGCQQGDPLGPAIFSLGINSIISDLNSKFNVWYLDDGSLGGSASEVLEDLRTIIQRFDSIGLSLNFDKCEIFFPDHISDSTRASLYQNFNLVCPKISIQTKTSLTLLGAPVFLEAIPPLMTSKIEHFNNSSHRLFQIKPHMAIYILRLCLFTPKFMYLLRCSPLWYFHSITNLVDSTLKETVIKILNLQFDNRSWAQATLPISFGGLGIRRTSSVALPAFLASSHGSQTLIGMILNNPVADVRVACQTEALEAWCASCPGVSTPTEMKIQSKWDLPLTKITFTALLDQASDDADRARLLAVAEAESGHWLHALPSDNLATVLDPSCLRIAVGLRLRAKLCEPHRCHCGRDVDQSGRHGLSCVKSAGRLFRHWALNDLVRRALSTAAVPSTLEPSGMSRDDGKRPDGATLVPWCLGRALVWDATCVDTLAPSHVGSSARSVGAAAEQAQLLKHRKYSQLSAHYDFVALAVETLGPWSSDTKKFCKDLAKRLVLASGDLRAGAYFAQRLSIAIQRGNAASILGTLPHGGDLDGVFVL

SEQ ID NO: 5115 - protein, 965 aa, Erannis defoliaria
MDSSSNTQILTSSTASDVLLECEICADRKLYKGHRGLKIHCSRRHVPRSDLLTPSGGPKDLHRSTPGISTAGNSSLASRLAQLKRSVKIIKRVPRGARVSVARSLSECVAKVVSENSFSSWEDLLTFAYYTFHVTSDSKHRSLTSAVKLNTSRRFIPPHLNILNASQSSFSIKLIENKLSDGNVRGAAKLLFCSDSLATDSAETYSALCQKHPAQSTSIQFPAPPSLSSVKPLNIDEEATLQAIRSFPNGSAGGLDGITPQHLNDLTDPLIGEAGKDLLRNLTSLANFMLDGHVPGNILPILYGANLIALAKKDGGVRPIAIGSTLRRLASKLCCRTIQDNLSKKFHPRQLGFGVRGGCEAAVHAARTFLGSTDYDVFIKIDVKNAFNSLDRGVLLSEIQKEIPEIYNYMWQCYGAPTKLMFGEKEIASCVGCQQGDPLGPAIFSLGINSIISDLNSKFNVWYLDDGSLGGSASEVLEDLRTIIQRFDSIGLSLNFDKCEIFFPDHISDSARASLYQKFNSVCPKISIQTKTSLTLLGAPVFLEAIPPLMTSKIEHFNNSSHRLFQIKPHMAIYILRLCLFTPKFMYLLRCSPLWYFHSITNLVDSILKETVIKILNLQFDNRSWAQATLPISFGGLGIRRTSSVALPAFLASSHGSQTLIGMILNNPVADVRVACQTEALEAWCASCPGVSTPTEMKIQSKWDLPLTKITFTALLDQASDDADRARLLAVAEAESGHWLHALPSDNLATVLDPSCLRIAVGLRLGAKLCEPHRCHCGRDVDQSGRHGLSCVKSAGRLFRHWALNDLVRRALSTAAVPSTLEPSGMSRDDGKRPDGATLVPWCLGRALVWDATCVDTLAPSHVGSSARSVGAAAEQAQLLKHRKYSQLSAHYDFVALAVETLGPWSSDTKKFCKDLAKRLVLASGDLRAGAYFAQRLSIAIQRGNAASILGTLPHGGDLDGVFVL

SEQ ID NO: 5116 - protein, 965 aa, Erannis defoliaria
MDSSSNTQILTSSTASDVLLECEICADRKLYKGHRGLKIHCSRRHVPRSDLLTPSGGPKDLHRSTPGISTAGNSSLASRLAQLKRSVKIIKRVPRGARVSVARSLSECVAKVVSENSFSSWEDLLTFAYYTFHVTSDSNHRSLTSTVKLNTSRRFIPPHLNILNASQSSFSTKLIENKLSDGNVRGAAKLLFCSDSLATDSAETYSALCQKHPAQSTSIQFPAPPSLSSVKPLNIDEEATLQAIRSFPNGSAGGLDGITPQHLKDLTDPLIGEAGKDLLRNLTSLANFMLDGHVPGNILPILYGANLIALAKKDGGVRPIAIGSTLRRLASKLCCRTIQDNLSKKFHPRQLGFGVRGGCEAAVHAARTFLGSTDYDVFIKIDVKNAFNSLDRGVLLSEIQKEIPEIYNYMWQCYGAPTKLMFGEKEIASCVGCQQGDPLGPAIFSLGINSIISDLNSKFNVWYLDDGSLGGSASEVLEDLRTIIQRFDSIGLSLNFDKCEIFFPDHISDSTRASLYQNFNLVCPKISIQTKTSLTLLGAPVFLEAIPPLMTSKIEHFNNSSHRLFQIKPHMAIYILRLCLFTPKFMYLLRCSPLWYFHSITNLVDSTLKETVIKILNLQFDNRSWAQATLPISFGGLGIRRTSSVALPAFLASSHGSQTLIGMILNNPVADVRVACQTEALEAWCASCPGVSTPTEMKIQSKWDLPLTKITFTALLDQASDDADRARLLAVAEAESGHWLHALPSDNLATVLDPSCLRIAVGLRLGAKLCEPHRCHCGRDVDQSGRHGLSCVKSAGRLFRHWALNDLVRRALSTAAVPSTLEPSGMSRDDGKRPDGATLVPWCLGRALVWDATCVDTLAPSHVGSSARSVGAAAEQAQLLKHRKYSQLSAHYDFVALAVETLGPWSSDTKKFCKDLAKRLVLASGDLRAGAYFAQRLSIAIQRGNAASILGTLPHGGDLDGVFVL

SEQ ID NO: 5117 - protein, 1202 aa, Hylaea fasciaria
MITRSKAGTKAQPPPPAPAPSSPSSISSSGSEYGTPPDTSPSSGESGPPSPPSPPRPVRRGRPPLPARLGPVGQSAPRSAPATGSQAQRMRWTPTMNENCMRAYYGATEGGTNLTAYRVRMLSLFQALVPTVAVSAQRLSDQVRAIHRCKLMEQSVLDRLRLEALPTRATSDSARGLPDAMSAPGPVTTPALVAPRVEPVADEEDGATSVSTQDNEQLRRALDDAIQQYRSTPDSRPRLPRMPTHRHNLALMGALNALLAPYLRTSEDLTDTHSILYCGAIAACRVARVKFPNAVQAPRTAGCTPAWQIRIERRINTSRTLIAKLICFSRGNHRPRVMRFVNQAFAGTGIRPRDYPTCVTERIDFLKQKVYAWANRIRRYRERVDRFQQNRLFQSDQRKVYRTWEVTGQRVCDGRLPDATAMINFWRNIWSVPVEHTEGEWMNIVERACEPIEAMEAISISPVDVSCAMRTAQNWKSPGPDGLHNFWIKWIRCSHSCLAMQFQEALEVGSLPSFMTTGCTSLLYKSGGTTDPKIITCLPTIYKLLTSILRTKINAHIVANNILASAQNGCRIGSRGTKELLLIDMAICQQVRRNRGALSTAWIDYKKAYDSVPHSWLERILELYKIDATLRSFLGTCMRQWTTVLCQPGGGGVSDPQDFIRIERGIFQGDSLSPLWFCLALNPLSTLLRDSGLGCRLRREGENISHLLYMDDLKLFTPKRPDLMKLLKTTEVFSNSISMEFGIDKCAVMHVQRGKVVNSSNLQLSETMSLRSLSEAETYKYLGMSESLGIVDRDIKQSVKERFFCRLTKVLKSLLSGGNKARAFNGWVMPLLIYSFGILRWTQTELDALDRKVRQQLTLHRMLHPRSSVMRLYIPRKWGGRGFLNAKNLHNREVCSLREYFLSSECGMHRDVVAVDRALTPLSLANENWRKPSVLTTDDRKDVWKGKELHGRFYRALTGSDVDLLASVNWLRFGDLFGETEGFVCAIADEVIKTNNYRKYIMKDGTVDICRACRRPGESLRHIISGCSHLANGEYLHRHNQVARIIHQQLALRYGLVESEVPYYKYAPAPVLENRRALLYWDRSVITDRTIVANKPDIVLVDRSQRRAVLVDITIPHDENLVKAEKDKLSKYLDLAHEVTAMWDVDSTIIVPIVVTANGLIAKSLDQHLKRLSLDGWIKGRMQKAVLLDTARIVRRFLSLQP

SEQ ID NO: 5118 - protein, 1196 aa, Spilarctia lutea
MITRARSRALLPPSDSSRSSALPSSEARTEAPTVAEASSSSSSDEFFSPPTSPTPVRRQGRCRPPDSLGPRGPLTSNRAPATGGNVHRMKWTHSINENVMRAYFRATELGTNLTAYRVRLVSLFQELEPAINVSAQRLSDQVRAIQRCHLLDDAALERIRSDIRNSLTVPSSSHVVDVVTNTTPQVPQNEDVSELVDSEIMSVSNQYNDRIRSTLEDAIREYRYVNFNNRPRLSRLPIHKRNLALVSALDSLLPDYFSNSEDLSDAHSILYCAAVAVCRVAGVKFAENTTTTRQENTVPAWQCRIERRIAEARTLIGKLISFRSGNMRPRVMRFVKRAFLGTTISPQEYMSCVTERIDFLKQKVYAWANRIRRYRKRVDRYNQNRMFQRNEKWVYRKWENLRPCLSDGQVPDENATNSFWHSIWSVPVTHTEGDWYRDVERSCESLLPMEPISINEEDVSCAVRSLPNWKAPGPDGLHNFWLKWFRSSHACLASQFQTALDSGSLPQFLTTGITHLLYKSGDAMDPKPITCLPTLYKLLTSILRLKITTHINHNSILSISQNGCRSGTRGTKELLIIDMTISQQVRRNRKSLATCWIDYKKAFDSVPHTWLLRVLELYKIDTTLCTFLKLCMGQWRTALRYPECRQSAMNDVLIKIERGIFQGDSLSPLWFCLALNPLSTLLEGSGLGYRFQKDDRGISHLLYMDDLKLLAPTKLQLTGLLKVTENFSNSIKMEFGVDKCAVMYVKKGEIVESEGIELSDATKLRSLSVTETYKYLGFSQSLGIPEPDMKQTLRERFFSRLKKVLKSLLSGGNKVRACNGWVMPVLMYSFGVLRWTQTELDAIDRRVRTLLTAFRMHHPRSSVMRLYIPRKLGGRGLLNIKTLHNREVYNLREYFLQTDVGVHRSVVTVDTGLTPLALAKENWRKPVVLSTNDRREVWKGKVLHGRFYRALNGPDIDFKASTSWLRYGDLFGETEGFVCAIMDEVIMTSNYRKYILKDGTVDICRACHRPEESIRHIVSGCSRLANGEYLHRHNQVARIVHQQLALKYNLVSSEVPYYRYVPDPVLENGRATLYWDRSINTDRTIVANKPDIVVMDRLERRAMIVDIAVPHDENLVKVEKEKQIKYLDLSHEIVDMWNVDSAIIVPIVVSAHGLIAKSLDQHLKRLTLGGWIKGLIQKAVLLDTARIVRGFLSLEP

SEQ ID NO: 5119 - protein, 1112 aa, Erannis defoliaria
MITRSKAIRNAAEQHSARPPSPPAPSSPSASSGEDVFITPRESSASSSDSDVSGPRTPAPPPPARRGRPPLPARLGPAGLPASRPALAAGGVVRRMRWSQTNNENCMRAYYRATEVGTNLTAYRVRMLSLFQALEPTVTVSAQRLSDQVRAIQRLNLLDQSLLDRLRLEAQSARSTPVSTRDSHVASSAPTLASMPTSVATLATPADPVVDEGDGTGMSVTTQVSEQLRRALEDAISQYRFALNSRPRLPRLPTHRRNLALMGALNALLAPYLRASEDLTDTHSILYCGAVAACRVARVKFPDSNRAPRTAGDVPAWQARIERRISTFRTLIAKLICFSRGNNRPRVMRFVTQAFAGTGIRPQQYMTSVTERIDYLKQKVYAWASRIRRYRERVDRYWQNRVFQSDQRKVYQNWEGAEQRVSDGHLPDANAMTNFWRGIWSVPVEHNEGDWMRVVERECESIEPMGSILIDPVDVSCAIRTAQNWKSPGPDGLHNFWIKWFRYSHDRLATQFQEALELGSLPSFMTTGVTFLLHKSGSTTEPKNYRPITCLPTIYKLLTSILSTKINTHIVANNVLAPAQNGCRVGSRGTKELLLIDMAISQQVRRNKEALSAAWIDYKKAYDSVPHSWLERILELYKIDTTLKSFLSACMRQWTTVLRQPGGGNDSSDPQDLIRIERGIFQGDSLSPSWFCLALNPLSTFLKDSGLGYRLRRGGEVISHLLYMDDLKLFAPKHQDLLELLKTTQVFSSAIRMEFGVDKCAVMRVQRGKVVNSPDLQLSEIMTLRSLSEAETYKYLGMSESLGISVVDIKKSVKERFFCRLTKVLNSLLSGGNKARAFNGWVMPLLIYSFGILRWTQTELDALDRRVRQLLTAHRMLHPRSSVIRLYIPRKWGGRGFLNAKNLHNREVCSLRDYFLNNECGMHRDVVTVDKGLTPLSLANENWRRPSVLSTEDRKDVWKSKELHGRFYRALSGPDVDLLASVNWLRFGDLFGETEGFACAIADEVIKTNNYRKYIMKDGTVDICRACHRPGESLRHIISGCSHLANGEYLHRHNQVARIIHQQLALQYGLVESEVPYYKYAPLQFSKMVVLCSTGTAPSSRTGLLSPISLIS

SEQ ID NO: 5120 - protein, 1125 aa, Pammene fasciana
MITRNQASAATTHARPPSSPALSCSSSTSSSGDKFETAPDTDGSSDDYGPPPRRPPARRGRPPLPARLGLAGHPAPPRAPAAGGIVRRMKWTPSMNENVMRAYYGATEGGTNLSAYRDRMLPLFQALEPTIDTTAQRLSDQVRVIQRLKRLDDVILDRLRLEALSVRAATTSARDPPATSPDPMPAPDLASGVPRVDPSADEVDIANQSVSSTANEQLRRTLEEAITQYRSTNITRPRIPRLPMNRRNLALMGALNDLLAPFLRTSKDLDDTHSIMYCGAIAACRVARVKFPDAERAPRTAGGVPAWQVRIERRINSFRTLIAKLISFRGGNNRPRVMLFVHQAFAGTGIEPRDYMANVIERIDFLKQKVYAWASRIRRYRERVDRFRQNRLFQSDQRKVYRRWEEADPRVSNVRLPDATAMADFWRSIWSAPVEYTEGEWMSVVERECESIEPMGAITISPDDVSCAIRTAQNWKSPGPDGLHNFWLKWFRCSHSRLATQFQQALELGSLPPSLTTGVTFLLYKSGSTTEAKNYRPITCLPTLYKLLTSILRAKINAHMVANNILASAQNGCRVGSRGTKELLLIDMTICQRARRNRGALSAAWIDYKKAYDSVPHSWLERILELYKVDAALRSFLGTCMRQWTTVLRQPGGGDDPPGPQDFIRIERGIFQGDSLSPLWFCLALNPLSTLLKDSGLGCRLRREGEVISHLLYMDDLKLFAPNNRDLLELLKTTEVFSSSIQMEFGVDKCAVMHIQRGKVVNSTNLQLSETMTFRSISESETYKYLGMSQSLGIEDTGIKRALRERFFGRLIKVLNSLLSGGNKVRAFNAWVMPLLTYSFGILRWTQTELDALDRRVRLMLTTHRMLHPRSSVMRLYIPRKCGGRGFLNAKNLHNHEVYNLRNYFLNNECGIHRDVVAVDKGLTPLSLANENWRKPVVLSTEDRKAVWKSKELHGRFYGALTGPDVDLLASVNWLRFGDLFGETEGFACAIADEVIMTNNYRGYILKDGTVDICRACRRPGESLRHIISGCSHLANGEYLHRHNLVARIIHQQLALLDGLVAHEVPYYKYIPAPVLENDRATLYWDRSIITDRTIVANKPDIVVIDRPQRRAMLVDITVPCDVCG

SEQ ID NO: 5121 - protein, 928 aa, Erannis defoliaria
MCAACRVARVRFPDTNRAPRTVGDVPAWQVRIERRISTFRTFIAKLICFSRGNKRPRVMRFVTQAFSGTGLRPQQYMASVTERIDYLKQKVYAWANRIRRYRERVDRYWQNRLFQSDQRKVYRNWEGAAQRVNDGHLPDANAMTNFWRSIWSVPVEHTEGDWMRVVERECEAIEPMGPILIDPVDVSCAIRTAQNWKSPGPDGLHNFWIKWFRCSHDRLATQFQEALELGSLPSFMTTGITFLLHKSGSTTEPKNYRPITCLPTIYKLLTSILSTKINAHIIANNVLAPAQNGCSRVGSRGTKELLLIDMAISQQVRRSKGALSAAWIDYKKAYDSVPHSWLERILELYQIDTTLKSFLGACMRQWTTVLRHPGGGNDSSDPQDLIRIERGIFQGDSLSPSWFCLALNPLSTLLKDSGLGYRLRRGSEVISHLLYMDDLKLFAPKHQDLLELLKTTQVFSSAIRMEFGVDKCAVMRVQRGKVVNSPDLQLSEIMTLRSLSEAETYKYLGMSESLGISVVDIKKSVKERFFCRLTKVLNSLLSGGNKARAFNGWVMPLLIYSFGILRWTQTELDALDRRVRQLLTAHRMLHPRSSVMRLYIPRKWGGRGFLNAKNLHNREVCSLRDYFLNNECGMHRDVVTVDKGLTPLSLANENWRRPSVLSTDDRKEVWKSKELHGRFYRALTGSDVDLLASVNWLRFGDLFGETEGFACAIADEVIKTNNYRKYIMKDGTVDICRACHRPGESLRHIISGCSHLANGEYLHRHNQVARIIHQQLALQYGLVESEVPYYKYAPAPVLENGRVLLYWDRSIITDRTIVANKPDIVMVDRSQRQAVLVDVTIPHDENLVKAEKDKLSKYLDLAFEITAMWDVDSTIIVPIVVSANGLIAKSLDQYLKRLSLGGWVKGQIQKAVVLDTARIVRRFLTLQP

SEQ ID NO: 5122 - protein, 950 aa, Erannis defoliaria
MLSLFQTLEPTATVSAQRISDQVRAIQRLNLLDQPLLDRLSLEVQSARPTPASTRDLDVASSAPTLASVPTSAATLATSADPVLDEGDCTGMSVSTQVSEQLRRALEDAIGQYRFALNSRPRLPRLPTHRRNLALMGALNALLAPYLRASEDLTDTHSILYCGAIAACRVARVKFPDTNRAPRPAGDVPAWQLRIERRISTFRTLIAKLICFSRGNNRPRVMRFVTQAFAGTGIRPQQYMASVTERIDYLKQKVYAWANRIRRYRERVDRYWQNRLFQSDQRKVYRNWEGTEQRVSDGQLPDASAMTNFWRGIWSVPVEHTEGDWMRVVERGCESIEPMGSILIDPVDVSCAIRTAQNWKSPGPDGLHNFWIKWFRCSHDRLATQFQEALELGSLPSFMTTGVTFLLHKSGSTTEPKNYRPITCLPTIYKLLTSILSTKINAHIVANNVLAPAQNGCRVGSRGTKELLLIDMAISQQVRRNKGALSAAWIDYKKAYDSVPHSWLERILELYQIDTTVKSFLGACMRQWTTVLRQPGGGNGSSDSQDLIRIERGIFQGDSLSPSWFCLALNPLSTLLKDSGLGYRLRRGGEIISHLLYMDDLKLFAPKHQDLLELLKTTQVFSSAIRMEFGVDKCAVMRVQRGKVVNSPDLQLSEIMTLRSLSEAETYKYLGMSESLGISVVDIKKSVKERFFCRLTKVLNSLLSGGNKARAFNGWVMPLLIYSFGILRWTQTELDALDRRVRQLLTAHRMLHPRSSVMRLYIPRKWAGRGFLNAKNLHNREVCSLRDYFLNNECGMHRDVVTVDKGLTPLSLANENWRRPSVISTDDRKEVWKSKELHGRFYRALTGPDVDLLASVNWFRFGDLFGETEGFACAIADEVIKTNNYRKYIMKDGTVDICRACHRPGESLRHIISGCSHLANGEYLHRHNQVARIIHQQLALQYGLVESEVP

SEQ ID NO: 5123 - protein, 1213 aa, Erannis defoliaria
MITRSKKRNAAVQHARPTPPPVPSSSPSSSSPSEEEFHTCGTSSSSEDVSGPRTPTPPIPVRRGRPPLPARLGPAGQPASRPALAAGGVVRRMRWSQTNNENCMRAYYGATEGGTNLTAYRVRMLSLFQTLEPTVTVSAQRISDQVRAIQRLNLLDQPLLDRLRLEVQSARPTPASTRDLDVASSAPTLASVPTSAATLATSADPVLDEGDCTGMSVSTQVSEQLRRALEDAIGQYRFALNSRPRLPRLPTHRRNLALMGALNALLAPYLRASEDLTDTHSILYCGAIAACRVARVKFPDTNRAPRPAGDVPAWQLRIERRISTFRTLIAKLICFSRGNNRPRVMRFVTQAFAGTGIRPQQYMASVTERIDYLKQKVYAWANRIRRYRERVDRYWQNRLFQSDQRKVYRNWEGTEQRVSDGQLPDASAMTNFWRGIWSVPVEHTEGDWMRVVERECESIEPMGSILIDPVDVSCAIRTAQNWKSPGPDGLHNFWIKWFRCSHDRLATQFQEALELGSLPSFMTTGVTFLLHKSGSTTEPKNYRPITCLPTIYKLLTSILSTKINAHIVANNVLAPAQNGCRVGSRGTKELLLIDMAISQQVRRNRGALSAAWIDYKKAYDSVPHSWLERILELYQIDTTVKSFLGACMRQWTTVLRQPGGGNGSSDSQDLIRIERGIFQGDSLSPSWFCLALNPLSTLLKDSGLGYRLRRGGEIISHLLYMDDLKLFAPKHQDLLELLKTTQVFSSAIRMEFGVDKCAVMRVQRGKVVNSPDLQLSEIMTLRSLSEAETYKYLGMSESLGISVVDIKKSVKERFFCRLTKVLNSLLSGGNKARAFNGWVMPLLIYSFGILRWTQTELDALDRRVRQLLTAHRMLHPRSSVMRLYIPRKWAGRGFLNAKNLHNREVCSLRDYFLNNECGMHRDVVTVDKGLTPLSLANENWRRPSVISTDDRKEVWKSKELHGRFYRALTGPDVDLLASVNWLRFGDLFGETEGFACAIADEVIKTNNYRKYIMKDGTVDICRACHRPGESLRHIISGCSHLANGEYLHRHNQVARIIHQQLALQYGLVESEVPYYKYAPAPVLENGRALLYWDRSIITDRTIVANKPDIVMVDRSQRRAVLVDVTIPHDENLVKAEKDKLSKYLDLAFEITAMWDVDSTIIVPIVVSANGLIAKSLDQYLKRLSLDGWVKGQIQKAVVLDTARIVRRFLTLQP

SEQ ID NO: 5124 - protein, 1331 aa, Biston betularia
MWTRSRTAAASGSHDAQIPPPPAPSTPSASSGDEEFATPLATSASSSSSDVSGPRTPAPPPPARRGRPPLPARLEPAGQSASRSALAVGGVVRRMRWSQTNNENCMRAYYGATEGGINLSAYRVRMLPLFQALEPTVTVSAQRLSDQVRAIQRLQLLDQSVLDRLRLEALPARPTPVSTRDLPVASSAPTLVSVPTSMATLATPIDPVVDVGECASMGVCSQVSEHLRRTLEDAICQYRFAPDSRPRLPRLPTHRRNLALMGALNALLAPYLRASEDLTDTHSILYCGAIAACRVARVKFPDTNRAPRPAGGVPAWQLRIERRIGTFRTLIAKLICFSRGNNRPRVMRFVTQAFAGTGIRPQHYLASVTERIDYLKQKVYAWANRIRRYRERADRYWQNRVFQSDQRKVYRDWEGTGQRVSDRQLPDTSVMTEFWRGIWSLPVEHTEGDWMRVVERECESIESMGSVLIDPVDVSCAIRTAQNWKSPGPDGLHNFWIKWIRCSHDRLATQFQEALELGSLPCLMTTGVTFLLHKTGSTTEAKNYRPITCLPTIYKLLTSILRTKINAHVVANNVLAPAQNGCRVGSRGTKELLLIDMTISQQVRRNKGALSTAWIDYKKAYDSVPHSWLERVLELYKIDTTLKSFLGACMRQWTTVLRQPGSGDGSSEPQDLIRIERGIFQGDSLSPLWFCLALNPLSTLLKESGLGHRLRRGGEVISHLLYMDDLKLFAPKRPDLMELLKTTQVFSNAIKMEFGVDKCAVMHVQRGEVVNCPDLQLSETMTFRSLSEAETYKYLGMSESLGIAVVDIKRSVKERFFCRLTKVLNSLLSGGNKVRAFNGWVMPLLIYSFGILRWTQTELDALDRRVRQQLTTHRMLHPRSSVMRLYIPRKLGGRGFLSAKNLHNREVCSLRDYFRDNECGMHRDVVAVDKGLTPLSLANENWRKPSVLSTEDRKEVWKSKQLHGRFYRVLTGPDVDMLASVNWLRFGDLFGETEGFACAIADEVIKTNNYRKYIMKDGTVDICRACHRPGESLRHIISGCSHLANGEYLHRHNQVARIIHQQLALQYGLVESEVPYYKYAPAPVLENGRALLYWDRSIITDRTIVANKPDIVVVDRAQRRAVLVDITIPHDENLVKAEKDKLSKYLDLAHEITAMWDVDSTIIVPIVVTVNGLIAKSLDQHLKRLSLDGWVKGQLQKAVILDTARIVRRFFFFFFFFFFLSRENTLCIPPALGRARWLCGTLRPNDGLPTKNPGVFPLGALCRGCGHAFALYRGLDSACPHGHHLGAQAPLPRRRCVGTPDTSSSTSETTTEKNVRRPHVCTPVVSMRRVR

SEQ ID NO: 5125 - protein, 1109 aa, Peribatodes rhomboidaria
MRAYYGATEGGTNLTAYRVTMLSLFQVLEPTVTVSAQRLSDQVRAIHRCKLLDQSVLDRLCLEAIRARPTPASTRDRPVASSAPTWASVPASAATLATLADTDVDGDRTSVSVSSQVSEHLRRTLEDAISQYRYAPDSRPRLPRLPTHRRNMALMGALNVLLAPYLRASENLTDTHSILYCGAIAACRVARVKFPDTSRAPRPAGGVPAWQVRIERRISTFRTLIAKLLCFSRGNSRPRVMRFVTQAFAGTDIRPQYYLANVTERIDYLKQKVYAWANRIRRYRERVDRYWQNRLFQSDQRKVYRGWEGTEQCAIDGHRPDASAMIDFWRGIWSVPVEHTEGEWMRIVERECESIESMESILIDSVDVSCAIRTAQNWKSPGPDGLHNFWIKWIRCSHDRLAIQFQEALELCSLPSFMTTGVTFLLHKSGSTTDPKNYRPITCLPTIYKLLTSILRNKINTHIVANNVLAPAQNGCRVGSRGTKELLLIDMAISQQVRRSKGALSVAWIDYKKAYDSVPHSWLERILELYKIDITLKSFLSACMRQWTTVLRQPGGGEVSADPQDLIRIERGIFQGDSLSPLWFCLALNPLSTLLKDLGLGHRLRRGGEVISHLLYMDDLKLFAPKRQDLMELLKITEVFSSAIKMEFGVDKCAVMHVQRGKVVNSPNLQLSETMTLRSLSEVETYKYLGMSESLGISVVDIKKSIKERFFCRLTKVLNSLLSGGNRMRAFNGWVMPLLIYSFGILRWTQTELDALDRRVRQLLTTHRMLHPRSSVMRLYIPRKWGGRGMLNAKNLHNREVYRLRSFFRNNDCGMHCDVVAVDKGLTPLSLANENWRQPSVLSTEDRKNVWKGKELHGRFYRALTGPDVDLLASVNWLRFGDLFGETEGFACAIADEVIKTNNYRKYILKDGTVDICRACHRPGESLRHIISGCSHLANGEYLHRHNQVARIIHQQLALQYGLVESEVPYYKYAPASVLENGRALLYWDRSIITDRTIVANKPDIVLVDRSQRRAVLVDITIPHDENLVKAEKDKLSKYLDLAHEVTAMWDVDSTIIVPIVVTVNGLIAKSLDQHLKRLSLDGWIKGQIQKAVILDTCRIVRRFLTLQP

SEQ ID NO: 5126 - protein, 958 aa, Peribatodes rhomboidaria
MALMGALNVLLAPYLRASENLTDTHSILYCGAIAACRVARVKFPDTSRAPRPAGGVPAWQVRIERRISTFRTLIAKLLCFSRGNTRPRVMRFVTQAFAGTDIRPQYYLANVTERIDYLKQKVYAWANRIRRYKERVDRYWQNRLFQSDQRKVYRGWEGTEQCVIDGHRPDARTMIDFWRGIWSVPVEHTEGEWMRIVERECESIESMESILIDSVDVSCAIRTAQNWKSPGPDGLHNFWIKWIRCSHDRLAIQFQEALELGSLPSFMTTGVTFLLHKSGSTTDPKNYRPITCLPTIYKLLTSILRNKINMHIVANNVLAPAQNGCRVGSRGTKELLLIDMAISQQVRRNRGALSVAWIDYKKAYDSVPHSWLERILELYKIDITLKSFLSACMRQWTTVLCQPGGGEVSADPQDLIRIERGIFQGDSLSPLWFCLALNPLSTLLKDLGLGHRLRRGGEVISHLLYMDDLKLFAPKRQDLMELLKTTEVFSSAIKMEFGVDKCAVMHVQRGKVANSPNFQLSETMTLRSLSEVETYKYLGMSESLGISVVDIKKSIKERFFCRLTKVLNSLLSGGNKVRAFNGWVMPLLIYSFGILRWTQTELDALDRRVRQLLTTHRILHPRSSVMRLYIPRKWGGRGMLNAKNLHNREVYRLRSFFRNNDCGMHCDVVAVDKGLTPLSLANENWRQPSVLSTEDRKSVWKGKELHGRFYRALTGPDVDLLASVNWLRFGDLFGETEGFACAIADEVIKTNNYRKYILKDGTVDICRACHRPGESLRHIISGCSHLANGEYLHRHNQVARIIHQELALQYGLVESEVPYYKYAPASVLENGRALLYWDRSIITDRTIVANKPDIVLVDRSQRRAVLVDITIPHDENLVKAEKDKLSKYLDLAHEVTAMWDVDSTIIVPIVVTVNGLIAKSLDQHLKRLSLDGWIKGQIQKAVILDTCRIVRRFLTLQP

SEQ ID NO: 5127 - protein, 1209 aa, Pammene fasciana
MITRSRTKAASTNARPPSSPASSVSSPSSSGDEFATAPDTSESSDECGPPPPPPRPPARRGRPPLPARLGLAGHPVPPRAPAAGGIVRRMRWTPAMNENVMRAYYGATEGGTNLSAYRDRILPLFQALEPTIDTTAQRLSDQVRAIQRLKRLDDATLDRLRLEALSAHADSTSVRDPPATSPDPMPVPDLASGAPRIDPSADEEYIASQSMSSTANEQLRRTLEEAITQYRSTNIPRPRLPRLPMNRRNLALMGALNDLLDPILRTSKDLDDTHSIMYCGAIAACRVARVKFPDAERAPRTAGGVPVWQVRIERRINSFRTLIAKLICFRGGNNRPRVMRFVHQAFAGTGIEPRDYMANVTERIDFLKQKVYAWASRIRRYRERVDRFRQNRLFQSDQRKVYRRWEEADPRVSDVRLPDATAMTDFWRSIWSAPVEHTEGEWMSVVERECESIEPMGAITISPDDVSCAIRTAQNWKSPGPDGLHNFWLKWFRCSHSRLATQFQQALELGSLPPSLTTGVTFLLYKSGSTTEAKNYRPITCLPTLYKLLTSILRAKINAHIVANNILASSQNGCRVGSRGTKELLLIDMTICQRVRRNRGALSAAWIDYKKAYDSVPHSWLERILELYKVDAALRSFLGACMRQWTTVLRQPGGGDDPPDPHDFIRIERGIFQGDSLSPLWFCLALNPLSTLLKDSGLGCRLRREGEVISHLLYMDDLKLFAPNNRDLMELLKTTEVFSSSIKMEFGVDKCAVMHVQRGKVVNSTNLQLSETMTFRSISESETYKYLGMSQSLGIEDAGIKQALKERFFGRLTKVLNSLLSGGNRVRAFNAWVMPLLTYSFGILRWTQTELDALDRRVRLLLTTHRMLHPRSSVMRLYIPRKCGGRGFLNAKNLHNREVYNLRNYFLNNECGMHRDVVAVDKSLTPLSLANENWRKPVVLSTEDRKAVWKSKERHGRFYGALTGPDVDLLASVNWLRFGDLFGETEGFACAIADEVIMTNNYRRYILKDGTVDICRACRRPGESLRHIIPGCSHLANGEYLHRHNLVARIIHQQLALLYGLVDHEVPYYKYTPAPVLENGRATLYWDRSIITDRTIVANKPDIVIIDRSQRRAMLVDITVPCDVNLVKAEKDKSSKYLDLAHEVTAMWEVDSAIIVPIVVSANGLIAKSLDQHLERLSLRGCGWIKGQIQKAVILDTARIVRRFLSLRP

SEQ ID NO: 5128 - protein, 1208 aa, Ennomos quercinarius
MITRSKAKTAGNECARLPPLPVPSSPSSSSDDEYATPPDTTASSDEDGPSSPPPPPPPARRGRPPLPARLGPAGQPAPRPAPATGGIVRRMRWTQTMNENCMRAYYGATEGGSSLTAYRDRMLSLFQDLEPAVAVSAQRLSAQVRAIQRCKMLDEPALDRLRLEALSIRATSPSPRVLPAALPDPGPIMDPLPVTPRGDPAIDGEESVSDSVSTQANEQLRSALEDAILRYRSTPTSRPRLPRLPTNRRNLVLMGALNTLLAPYLRTSEDLVDTHSILYCGAIAACRVARVKFPDTDRAPRPADGAPAWQVRIEKRITTFRTLIAKLVCFSRGNHRPRVMRFVTQAFAGTGIRPQEYMACVTERIDFLKQKVYAWASRIRRYRERVDRYQQNRLFQSDQRKVYRNWEGTGQRVVDGQLPDANAMNEFWRSIWSVPVDHTEGDWMRVVERVCEPIESMGSITIDPEDISCAIRTAQNWKSPGPDGLHNFWIKWIRCSYPCLAIQFQEALEAGSLPSFMTTGVTFLLHKSGSTTEAKNYRPITCLPTLYKLLTSILRTKINSHIVANNILAPAQNGCRVGSRGTKELLLIDTAICQQVRRNRGALSTAWIDYKKAYDSVPHSWLERILELYKIDATLRSFLSACMRQWTTVLRQPGGGESVSDAQDFIRIERGIFQGDSLSPLWFCLALNPLSTLLGDSGLGYRLRRGGEIISHLLYMDDLKLFAPQRPQLIELLKITENFSNSINMEFGVDKCAVMHVHRGKVVNSTNLQLSETMTLRSLSESETYKYLGMSESLGISVGDVKRTVKERFFCRLTKVLNSLLSGGNRTRAFNGWVMSLLMYSFGILRWTQTELDALDRKVRQLLTSHRMLHPRSSVMRLYIPRKWGGRGFLNAKTLHNREVCSLRDYFLNNECGMHRDVVAVDKGLTPLSLANENWRKPVVLSTEDRRDVWKGKELHGRFYRALTGPDVDLHASVNWLRFGDLFGETEGFLCAIADEVIKTNNYRKYIMKDGTVDICRACRRPGESLRHIISGCSHLANGEYLHRHNLVARIIHQQLALQYGLVESEVPYYKYTPEPVLENGRALLYWDRSIITDRTIVANKPDIVLVDRSQRRAVLVDITIPHDENLVKAEKDKLSKYLDLAHEVTAMWNVDSTSIVPIVVSANGLIAKSLDQHLERLSLDGWIKGQIQKAVLLDTARIVRRFLTLQP

SEQ ID NO: 5129 - protein, 1209 aa, Cydia splendana
MITRSRAKAVTTSARPPPPPASSTSSSTSSSGDEFATAPDTDGSSDESGPPPPPPPRPPARRGRPPLPARLGPAGHPAPPTAPATGGIVRRMRWTRDMNENVMRAYYGATEGGTQLSAYRSRILPLFQTLEPTITVSEQRLSDQVRVIQRLKRLDDATLDRLRQEALSARADSTLVRGLPATSPDPVPVPDLAPEAPRVDFCTDEGDFASQNVSTTANEQLRRTLEEAITQYRATTNSRPRLPRLPMNRRNLALMGALNALLEPYLRTSKDLDDTHSIMYCGAIAACRVARVKFPDAERAPRTAGGVPAWQARIERRISSFRTLIAKLICFRGGNNRPRVMRFVNQAFAGTDIRPRDYMANVTERIDFLKQKVYAWANRIRRYRERVDRFQQNRLFQSDQRKVYRRWEEANLRTPDTQPPDATAMTNFWRSIWSVPVGHTEGSWMSVVERECESIEPMGAVTISTDDVSCAIRTAQNWKSPGPDGLHNFWLKWFRCSHSRLAAQFQQALELGSLPPSLTTGVTFLLYKSGSTTEAKNYRPITCLPTLYKLLTSILRAKINAHIVANNILASAQNGCRVGSRGTKELLLIDMTICQQIRRNRGALSAAWIDYKKAYDSVPHSWLGRVLELYKVDAALRAFLSACMRQWTTVLRQPGGRDDHPGPQEFIRIERGIFQGDSLSPLWFCLALNPLSTLLKDLGLGCRLRREGEVISHLLYMDDLKLFAPNSQDLLELLKTTEVFSSAIHMEFGVDKCAVMHVQRGRVVNSTNLQLSETMSFRSISESETYKYLGMSQSLGIEDEGIRRSVKERFFSRLTKVLNSLLSGGNKVRAFNAWVMPLLTYSFGILRWTQTELDALDRRVRSLLTTHRMLHPRSSVMRLYIPRKCGGRGFLNAKDLHNREVYNLRNYFLNNECGMHRDVVAVDRNLTPLSLANENWRKPVVLSTADRRAAWESKVLHGRFYKALTGPDVDLLASVNWLRFGDLFGETEGFACAIADEVMMTNNYRKYILKDGTVDICRACRRPGESLRHIISGCSHLANGEYLHRHNLVARIIHQQLALLYGLVDREVPYYKYLPAPVLENGHATLYWDRSIITDRTIVANKPDIVIIDRSQRRAVLVDITIPHDENLVKAEKDKSSKYLDLAHEITAMWDVDSTIIVPIVVSVNGLIAKSLDQHLERLSLGGWIKGQMQKAVILDTARIVRRFLSLQP

SEQ ID NO: 5130 - protein, 1208 aa, Cydia splendana
MITRSRTKAVTTSARPPPPPASSTSSSTSSSGDEFATAPDTDGSSDESGPPPPPPRPPARRGRPPLPARLGPAGHPAPPTAPATGGIVRRMRWTRDMNENVMRAYYGATEGGTQLSAYRSRILPLFQTLEPTITVSEQRLSDQVRVIQRLKRLDDATLDRLRQEALSARADSTSVRDLPATSPDPVPVPDLAPEAPRVDFCTDEGDFASQNVSTTANEQLRRTLEEAITQYRVTTNSRPRLPRLPMNRRNLALMGALNALLEPYLRTSKDLDDTHSIMYCGAIAACRVARVKFPDAERAPRTVGGVPAWQVRIERRISSFRTLIAKLICFRGGNNRPRVMRFVNQAFAGTDIGPRDYMANVTERIDFLKQKVYAWANRIRRYRERVDRFQQNRLFQSDQRKVYRRWEEANLRTPDTQPPDATATTDFWRSIWSVPAGHTEGSWMSVVEHECESIEPMGAVIISPDDVSCAIRTAQNWKSPGPDGLHNFWLKWFRCSHSRLAAQFQQALELGSLPPSLTTGVTFLLYKSGSTTEAKNYRPITCLPTLYKLLTSILRAKINAHIVANNILVSAQNGFRVGSRGTKELLLIDMTICQQIRRNRGALSAAWIDYKKAYDSVPHSWLGRVLELYKVDAALRAFLSTCMRQWTTVLRQPGGGDDRPGPQDFIRIERGIFQGDSLSPLWFCLALNPLSTLLKDLGLGCRLQREGEVISHLLYMDDLKLFAPNSQDLLELLKTTEVFSNAINMEFGIDKCAVMHVQRGRVVNSTNLQLSETMSFRSISESETYKYLGMSQSLGIEDEGIRRSVKERFFSRLTKVLNSLLSGGNKVRAINAWVMPLLTYSFGILRWTQTELDALDRRVRSLFTTHRMLHPRSSVMRLYIPRKCGGRGFLNAKDLHNREVYNLRNYFLNNECGMHRDVVAVDRNLTPLSLANENWRKPVVLSTADRKAAWESKVLHGRFYKALTGPDVDLLASVNWLRFGDLFGETEGFACAIADEVMMTNNYRKYILKDGTVDICRACRRPGESLRHIISGCSHLANGEYLHRHNLVARIIHQQLALLYGLVDREVPYYKYLPAPVLENGRATLYWDRSIITDRTIVANKPDIVIIDRSQRRAVLVDITIPHDENLVKAEKDKSSKYLDLAHEITAMWDVDSTIIVPIVVSVNGLIAKSLDQHLERLSLGGWIKGQMQKAVILDTARIIRRFLSLQP

SEQ ID NO: 5131 - protein, 1209 aa, Cydia splendana
MQTRSKTRAQLASPRNARPPPPSASSVSSQSSSGDEFATAPDTSESSDECGPPPPPSRPPARRGRPPLSARLGPAGHPAPPTAPAAGGVVRRMRWSQTNNENVMRAYYGATEGGTNLCAYRVRMLPLFQALEPTIDVTAQRLSDQVRVIQRQKRLDDSTLDRLRLEALSARAASTSARDPPATSPDPVPAPDQAPGAPRVDLSADEEEFAQSVGSTANEQLRRTLDEAITRYRSTPDTRPRLPRLPMNKHNLALMGALNALLEPYLRTSKDLDDTHAIMYCGAIAACRVARVKFPDSERAPRTAGGAPAWQIRIERRISSFRTLIAKLICFRGGNNRPRVMRFVNQAFVGTDIRPRDYMANVTERIDFLKQKVYAWANRIRRYRERVDRFQQNRLFQSDQRKMYRRWEETNLRASDSRPPDATVMNDFWRSIWSVPVGHTEGSWMSVVERECESIEPMGAVTISPDDVSCAIRTAQNWKSPGPDGLHNFWLKWFRGSHSYLAAQFQQALELGSLPPSLTTGVTFLLYKSGSTTEAKNYRPITCLPTLYKLLTSILRAKINAHIVANNILASAQNGCRVGSRGTKELLLIDMTICQQIRRTKGALSAAWIDYKKAYDSVPHSWLGRVLELYKVDAALRAFLSACMGQWTTVLRQPGGGDDRPGPQDFIRIERGIFQGDSLSPLWFCLALNPLSTLLKDLGLGCRLRREGEVISHLLYMDDLKLFAPNTQGLLELLKTTEVFSSAINMEFGVDKCAVMHVQQGKVVNSTNLQLSETMSFRSISESETYKYLGMSQSLGIEDEGIRRSVKERFFSRLTKVLNSLLSGGNKVRAFNAWVMPLLTYSFGILRWTQTELDALDRRVRSLLTTHRMLHPRSSVMRLYIPRKCGGRGFLNAKDLHNREVYNLRNYFLNNECGMHRDVVAVDRNLTPLSLANENWRKPVVLSTADRKAAWESKALHGRFYKALTGPDVDLLASVNWLRFGDLFGETEGFACAIADEVMMTNNYRKYILKDGTVDICRACRRPGESLRHIISGCSHLANGEYLHRHNLVARIIHQQLALLYGLVDREVPYYKYLPAPVLENGRATLYWDRSIITDRTIVANKPDIVLIDRSQRRAVLADVTIPHDENLVKAEKDKSSKYLDLAHEITAMWDVDSTIIVPIVVSANGLIAKSLDHHLERLSLGGWIKGQMQKAVILDTARIVRRFLTLRP

SEQ ID NO: 5132 - protein, 869 aa, Cydia splendana
MRFVNQAFVGTDIRPRDYMANVTERIDFLKQKVYAWANRIRRYRERVDRFQQNRLFQSDQRKMYRKWEETNLRASDSQPPDATVMNDFWRSIWSVPVGHTEGSWMSVVERECESIEPMGAVTISPDDVSCAIRTAQNWKSPGPDGLHNFWLKWFRCSHSYLAAQFQQALELGSLPPSLTTGVTFLLYKSGSTTEAKNYRPITCLPTLYKLLTSILRAKINAHIVANNILASAQNGCRVGSRGTKELLLIDMTICQQIRRTKGALSAAWIDYKKAYDSVPHSWLGRVLELYKVDAALRAFLSACMGQWTTVLRQPGGGDDRPGPQDFIRIERGIFQGDSLSPLWFCLALNPLSTLLKDLGLGCRLRREGEVISHLLYMDDLKLFASNTQGLLELLKTTEVFSSAINMEFGVDKCAVMHVQRGKVVNSTNLQLSETMSFRSISESETYKYLGMSQSLGIEDEGIRQSVKERFFSRLTKVLNSLLSGGNKVRAFNAWVMPLLTYSFGILRWTQTELDALDRRVRSLLTTHRMLHPRSSVMRLYIPRKCGGRGFLNAKDLHNREVYNLRNYFLNNECGMHRDVVAVDRNLTPLSLANENWRKPVVLSTADRKAAWESKALHGRFYKALTGPDVDLLASVNWLRFGDLFGETEGFACAIADEVMMTNNYRKYILKDGTVDICRACRRPGESLRHIISGCSHLANGEYLHRHNLVARIIHQQLALLYGLVDREVPYYKYLPAPVLENGRATLYWVRSIITDRTIVANKPDIVLIDRSQRRVVLADVTIPHDENLVKAEKDKSSKYLDLAHEITAMWDVDSTIIVPIVVSANGLIAKSLDQHLERLSLGGWIKGQMQKAVILDTARIVRRFLTLRP

SEQ ID NO: 5133 - protein, 1209 aa, Cydia splendana
MQTRSKTRAQLASPRNARPPPPSASSVSSQSSSGDEFATAPDTSESSDECGPPPPPSRPPARRGRPPLSARLGPAGHPAPPTAPAAGGVVRRMRWSQTINENVMRAYYGATEGGTNLCAYRVRMLPLFQALEPTIDVTAQRLSDQVRVIQRQKRLDDSTLDRLRLEALSARAASTSARDPPATSPDPVPAPDQAPGAPRVDLSADEEEFAQSVGSTANEQLRRTLDEAITRYRSTPDTRPRLPRLPMNRHNLALMGALNALLEPYLRTSKDLDDTHAIMYCGAIAACRVARVKFPDSERAPRTAGGAPAWQIRIERRISSFRTLIAKLICFRGGNNRPRVMRFVNQAFVGTDIRPRDYMANVTERIDFLKQKVYAWANRIRRYRERVDRFQQNRLFQSDQRKMYRRWEETNLRASDSRPPDATVMNDFWRSIWSVPVGHTEGSWMSVVERECESIEPMGAVTISPDDVSCAIRTAQNWKSPGPDGLHNFWLKWFRCSHSYLAAQFQQALELGSLPPSLTTGVTFLLYKSGSTTEAKNYRPITCLPTLYKLLTSILRAKINAHIVANNILASAQNGCRVGSRGTKELLLIDMTICQQIRRTKGALSAAWIDYKKAYDSVPHSWLGRVLELYKVDAALRAFLSACMGQWTTVLRQPGGGDDRPGPQDFIRIERGIFQGDSLSPLWFCLALNPLSTLLKDLGLGCRLRREGEVISHLLYMDDLKLFAPNTQGLLELLKTTEVFSSAINMEFGVDKCAVMHVQRGKVVNSTNLQLSETMSFRSISESETYKYLGMSQSLGIEDEGIRRSVKERFFSRLTKVLNSLLSGGNKVRAFNAWVMPLLTYSFGILRWTQTELDALDRRVRSLLTTHRMLHPRSSVMRLYIPRKCGGRGFLNAKDLHNREVYNLRNYFLNNECGMHRDVVAVDRNLTPLSLANENWRKPVVLSTADRKAAWESKALHGRFYKALTGPDVDLLASVNWLRFGDLFGETEGFACAIADEVMMTNNYRKYILKDGTVDICRACRRPGESLRHIISGCSHLANGEYLHRHNLVARIIHQQLALLYGLVDREVPYYKYLPAPVLENGRATLYWDRSIITDRTIVANKPDIVLIDRSQRRAVLADVTIPHDENLVKAEKDKSSKYLDLAHEITAMWDVDSTIIVPIVVSANGLIAKSLDHHLERLSLGGWIKGQMQKAVILDTARIVRRFLTLRP

SEQ ID NO: 5134 - protein, 1210 aa, Cydia splendana
MQRMITRSQRRAAESTNNARPPPPPAPSSSSSTSSSGDEFATAPDTDGSSDEGGPPPRPPARRGRPPLPARLGPAGHPAPPTAPAAGGIVRRMRWTRDMNENVMRAYYGATEGGTQLSAYRSRILPLFQALEPTITVSEQRLSDQVRVIQRLKRLDDATLDRLRQEALSARADSTSVRDLPATSPDPVPAPDLAPAAPRVDFCTDEGDFASQNVSTTANEQLRRTLEEAITQYRATTNSRPRLPRLPMNRRNLALMGALNALLDPHLRTSKDLDDTHSIMYCGAIAACRVARVKFPDAERAPRTAGGVPAWQVRIERRISSFRTLIAKLICFREGNNRPRVMRFVNQAFAGTDIRPRDYMANVTERIDFLKQKVYAWANRIRRYRERVDRFQQNRLFQSDQRKVYRKWEETNLRTPDTQPPDVTAMTDFWRSIWSVPVGHTEGGWMSVVERECESIEPMGAVTISPDDVSCAIRTAQNWKSPGPDGLHNFWLKWFRCSHSRLAAQFQQALELGSLPPSLTTGVTFLLYKSGSTTEAKNYRPITCLPTLYKLLTSILRAKINAHIIANNILASAQNGCRVGSRGTKELLLIDMTICQQIRRNKGALSAAWIDYKKAYDSVPHSWLGRVLELYKVDAALRAFLSACMRQWTTVLRQPGGGDDRPGPQDFIRIKRGIFQGDSLSPLWFCLALNPLSTLLKDLGLGCRLRREGVVISHLLYMDDLKLFAPNSQDLLELLKTTDVFSSAIHMEFGVDKCAVMHVQRGKVVNSTNLQLSETMSFRSISESETYKYLGMSQSLGIEDEGIRRSVKERFFSRLTKVLNSLLSGGNKVRAFNAWVMPLLTYSFGILRWTQTELDALDRRVRSLLTTHRMLHPRSSVMRLYIPRKCGGRGFLNAKDLHNREVYNLRNYFLNNECGMHRDVVAVDRNLTPLSLANENWRKPVVLSTADRKAAWESKVLHGRFYKALTGPDVDLLASVNWLRFGDLFGETEGFACAIADEVMMTNNYRKYILKDGTVDICRACRRPGESLRHIISGCSHLANGEYLHRHNLVARIIHQQLALLYGLVDREVPYYKYLPAPVLENGHATLYWDRSIITDRTIVANKPDIVIIDRSQRRAVLVDITIPHDENLVKAEKDKSSKYLDLAHEITAMWDVDSTIIVPIVVSVNGLIAKSLDQHLERLSLGGWIKGQMQKAVILDTARIVRRFLSLQP

SEQ ID NO: 5135 - protein, 1209 aa, Cydia splendana
MQTRSKTRAQLASPRNARPPPPSASSVSSQSSSGDEFATAPDTSESSDECGPPPPPSRPPARRGRPPLSARLGPAGHPAPPTAPAAGGVVRRMRWSQTINENVMRAYYGATEGGTNLCAYRVRMLPLFQALEPTIDVTAQRLSDQVRVIQRQKRLDDSTLDRLRLEALSARAASTSARDPPATSPDPVPAPDQAPGAPRVDLSADEEEFAQSVGSTANEQLRRTLDEAITRYRSTPDTRPRLPRLPMNRHNLALMGALNASLEPYLRTSKDLDDTHAIMYCGAIAACRVARVKFPDSERAPRTAGGAPAWQIRIERRISSFRTLIAKLICFRGGNNRPRVMRFVNQAFVGTDIRPRDYMANVTERIDFLKQKVYAWANRIRRYRERVDRFQQNRLFQSDQRKMYRKWEETNLRASDSRPPDATVMNDFWRSIWSVPVGHTEGSWMSVVERECESIEPMGAVTISPDDVSCAIRTAQNWKSPGPDGLHNFWLKWFRCSHSYLAAQFQQALELGSLPPPLTTGVTFLLYKSGSTTEAKNYRPITCLPTLYKLLTSILRAKINAHIVANNILASAQNGCRVGSRGTKELLLIDMTICQQIRRTKGALSAAWIDYKKAYDSVPHSWLGRVLELYKVDAALRAFLSACMGQWTTVLRQPGGGDDRPGPQDFIRIERGIFQGDSLSPLWFCLALNPLSTLLKDLGLGCRLRREGEVISHLLYMDDLKLFAPNTQGLLELLKTTEVFSSAINMEFGVDKCAVMHVQRGKVVNSTNLQLSETMSFRSISESETYKYLGMSQSLGIEDEGIRRSVKERFFSRLTKVLNSLLSGGNKVRAFNAWVMPLLTYSFGILRWTQTELDALDRRVRSLLTTHRMLHPRSSVMRLYIPRKCGGRGFLNAKDLHNREVYNLRNYFLNNECGMHRDVVAVDRNLTPLSLANENWRKPVVLSTADRKAAWESKALHGRFYKALTGPDVDLLASVNWLRFGDLFGETEGFACAIADEVMMTNNYRKYILKDGTVDICRACRRPGESLRHIISGCSHLANGEYLHRHNLVARIIHQQLALLYGLVDREVPYYKYLPAPVLENGRATLYWDRSIITDRTIVANKPDIVLIDRSQRRAVLADVTIPHDENLVKAEKDKSSKYLDLAHEITAMWDVDSTIIVPIVVSANGLIAKSLDQHLERLSLGGWIKGQMQKAVILDTARIVRRFLTLRP

SEQ ID NO: 5136 - protein, 1211 aa, Agriopis aurantiaria
MITRSKTKTAALRSAHPRPLATPSTSASSSSEDGDYLTSRDTSASSDGSGPSTPPPPLRPARRGRPALPARLGHVELPAPLSAPATGGVRRMRWTPVINENCMRAYYRATEGGTNLSAYRVRMLPLFQALEPTVTVSAQRLSDQVRAIQRCNLLDQSVLDQLRLEEVRTRPTPPSTRNPPVASSAPTLASRPASVVTLATLADPVVDEGDLASGVSDQVREQLRGALEDAISQYRFTPVSRPRLPRLPTHRRNLALMGALNALLAPYLRASKDLVDTHSILYCGAIAACRVARVKFPDTNRAPRTVGRVPAWQVRIERRISTFRTLIAKLICFRRGNNRPRVMRFVTQAFAGTDIRPQHYLANVTERIDYLKQKVYAWANRIRRYRERVDRYWQNRLFQSDQRKVYRGWEETEQRVSDGQLPDASAMINFWRGIWSVPVEHTEGDWMRVVERECESIEPMGSILIDSVDVSCAIRTAQNWKSPGPDGLHNFWIKWIRCSHDRLATQFQEALELGSLPSFMTTGVTFLLHKSGSTTEAKNYRPITCLPTIYKLLTSILRNKINAHIVANNVLAHAQNGCRVGSRGTKELLLIDTAISQQVRRNRGALSAAWIDYKKAYDSVPHSWLERVLELYKIDTTLKSFLGACMRQWTTVLRQPGSGDGASGPQDLLRIERGIFQGDSFSPLWFCLALNPLSTLLRDSGLGYRLRRDGQVISHLLYMDDLKLFTPKRQDLMELLKITEVFSSAIKMEFGVDKCAVMHVQRGKVVNSPNLQLSETMTLRSLSEVETYKYLGMSESLGISVEDIKKSVKERFFCRLTKVLNSFLSGGNKVRAFNGWVMPLLIYSFGILRWTQTELDALDRRVRQLLTSHRMLHPRSSVMRLYIPRKWGGRGFLNAKNLHNREVCSLRDFFRNSESGMHRDVVAVDRGLTPLSLANENWRKPSVLSIEDRRDVWKGKELHGRFYRALTGPDVDLLSSVNWLRFGDLFGETEGFACAIADEVIKTNNYRKYIMKDGTVDICRACHRPGESLRHIISGCSHLANGEYLHRHNQVARIIHQQLALRYGLVESEVPYYKYAPAPVLENGRALLYWDRSIITDRTIVANKPDIVLVDRSQRRAVLVDITIPHDENLVKAEKDKLSKYLDLAHEVTAMWDVDSTIIVPIVVSVNGLIAKSLDQHLKRLSLDGWVKGQMQKAVILDTARIVRRFLTLQP

SEQ ID NO: 5137 - protein, 1213 aa, Erannis defoliaria
MITRSKKRNAAVQHARPTPPPVPSSSPSSSSPSEEEFHTCGTSSSSEDVSGPRTLTPPIPVRRGRPPLPARLGPAGQPALRPALAAGGVVRRMRWSQTNNENCMRAYYGATEGGTNLTAYRVRMLSLFQTLEPTVTVSAQRISDQVRAIQRLNLLDQPSLDRLRLEVQSARPTPASTRDLDVASSAPTLASVPTSAATLATSADPVLDEGDCTGMSVSTQVSEQLRRALEDAIGQYRFALNSRPRLPRLPTHRRNLALMGALNALLAPYLRASEDLTDTHSILYCGAIAACRVARVKFPDTNRAPRPAGDVPAWQLRIERRISTFRTLIAKLICFSRGNNRPRVMRFVTQAFAGTGIRPQQYMASVTERIDYLKQKVYAWANRIRRYRERVDRYWQNRLFQSDQRKVYRNWEGTEQRVSDGQLPDASAMTNFWRGIWSVPVEHTEGDWMRVVERECESIEPMGSILIDPVDVSCAIRTAQNWKSPGPDGLHNFWIKWFRCSHDRLATQFQEALELGSLPSFMTTGVTFLLHKSGSTTEPKNYRPITCLPTIYKLLTSILSTKINAHIVANNVLAPAQNGCRVGSRGTKELLLIDMAISQQVRRNKGALSAAWIDYKKAYDSVPHSWLERILELYQIDTTLKSFLGACMRQWTTVLRQPGGGNGSSDSQDLIRIERGIFQGDSLSPSWFCLALNPLSTLLKDSGLGYRLRRGGEVISHLLYMDDLKLFAPKHQDLLELLKTTQVFSSAIRMEFGVDKCAVMRVQRGKVVNSPDLQLSEIMTLRSLSEAETYKYLGMSESLGISVVDIKKSVKERFFCRLTKVLNSLLSGGNKARAFNGWVMPLLIYSFGILRWTQTELDALDRRVRQLLTAHRMLHPRSSVMRLYIPRKWAGRGFLNAKNLHNREVCSLRDYFLNNECGMHRDVVTVDKGLTPLSLANENWRRPSVISTDDRKEVWKSKELHGRFYRALTGPDVDLLASANWLRFGDLFGETEGFACAIADEVIKTNNYRKYIMKDGTVDICRACHRPGESLRHIISGCSHLANGQYLHRHNQVARIIHQQLALQYGLVESEVPYYKYAPAPVLENGRALLYWDRSIITDRTIVANKPDIVMVDRSQRRAVLVDVTIPHDENLVKAEKDKLSKYLDLAFEITAMWDVDSTIIVPIVVSANGLIAKSLDQYLKRLSLDGWVKGQIQRAVVLDTARIVRRFLTLQP

SEQ ID NO: 5138 - protein, 1215 aa, Erannis defoliaria
MITRSQSRRNTAERNARPPSPPAPSSPSASSGDDVFLTPRESSVSSSNSDVSGPRTPAPPPPARRGRPPLPARLGPAGLPASRPALAAGGVVRRMRWSQTNNENCMRAYYGATEGGTNLSAYRVRMLPLFQALEPTVTVSAQRLSDQVRAIQRHNLLDQSLLDRLRLEAQSARPTPASTRDLDVASSAPTLALVPTSAATLVTSADPVVDEGDCTGMSVSTQVSEQLRRALEDAIGQYRFTPNSRPRLPRLPTHRRNLALMGALNALLAPYLRASEDLTDTHSILYCGAIAACRVARVKFPDTNRAPRPAGDVPAWQLRIERRISTFRTLIAKLICFSRGNNRPRVMRFVTQAFAGTGIRPQQYMANVTERIDYLKQKVYAWANRIRRYRERVDRYWQNRLFQSDQRKVYRNWEGNEQRVSDGQLPDASAMTNFWRGIWSVPVEHTEGDWMRVVERECESIEPMGSILIDPVDVSCAIRTAQNWKSPGPDGLHNFWIKWFRCSHDRLATQFQEALELGSLPSFMTTGVTFLLHKSGSTTEPKNYRPITCLPTIYKLLTSILSTKINAHIVANNVLAPAQNGCRVGSRGTKELLLIDMAISQQVRRNKGALSAAWIDYKKAYDSVPHSWLERILELYQIDATLKSFLGACMRQWTTVLRQPGGGNGSSDSQDLIRIERGIFQGDSLSPSWFCLALNPLSTLLKDSGLGYRLRRGGEVISHLLYMDDLKLFAPKHQDLLELLKTTQVFSSAISMEFGVDKCAVMRVQRGKVVNSPDLQLSEIMTLRSLSEAETYKYLGMSESLGISVVDIKKSVKERFFCRLTKVLNSLLSGGNKARAFNGWVMPLLIYSFGILRWTQTELDALDRRVRQLLTAHRMLHPRSSVMRLYIPRKWGGRGFLNAKNLHNREVCSLRDYFLNNECGMHRDVVTVDKGLTPLSLANENWRTPSVLSTDDRKEVWKSKELHGRFYRVLSGPDVDLLASVNWLRFGDLFGETEGFACAIADEVIKTNNYRKYIMKDGTVDICRACHRPGESLRHIISGCSHLANGEYLHRHNQVARIIHQQLALQYGLVESEVPYYKYAPAPVLENGRALLYWDRSIITDRTIVANKPDIVMVDRSQRRAVLVDVTIPHDENLVKAEKDKLSKYLDLAFEITAMWDVDSTIIVPIVVSANGLIAKSLDQYLKRLSLDGWVKGQIQKAVVLDTARIVRRFLTLQP

SEQ ID NO: 5139 - protein, 1218 aa, Biston betularia
MWTRSRTAAASGLHDAHIPSPPAPSTPSASSGDEEFATPLATSASSSSSDVSGPRTPAPPPPARRGRPPLPARLGPAGQSASRSALAAGGVVRRMRWSQTNNENCMRAYYGATEGGINLSAYRARMLPLFQALEPTVAVSTQRLSDQVRAIQRLQLLDQSVLDRLRLEALPARPTPVSTRDSPVASSAPTLVSVPTSMVTLATPTDPVVDVGECTSMGVCSQVSEHLRRTLEDAICQYRFAPDSRPRLPRLPTHRRNLALMGALNALLAPYLRASEDLTDTHSILYCGAIAACRVARVKFPDTNRAPRPAGGVPAWQLRIERRISTFRTLIAKLICFSRGNNRPRVMRFVTQAFAGTGIRPQHYLASVTERIDYLKQKVYAWANRIRRYRERADRYWQNRVFQSDQRKVYRDWEGTGQRVSDRQLPDTSVMTEFWRGIWSLPVEHTEGDWMRVVERECESIESMGSVLIDPVDVSCAIRTAQNWKSPGPDGLHNFWIKWIRCSHDRLATQFPATQALELGSLPCLMTTGVTFLLHKTGSTTEAKNYRPITCLPTIYKLLTSILRTKINAHVVANNVLAPAQNGCRVGSRGTKELLLIDMTISQQVRWNKGALSTAWIDYKKAYDSVPHSWLERVLELYKIDTTLKSFLGACMKQWTTVLRQPGSGDGSSEPQDLIRIQRGIFQGDSLSPLWFCLALNPLSTLLKESGLGHRLRRGGEVISHLLYMDDLKLFAPKRPDLMELLKTTQVFSNAIKMEFGVDKCAVMHVQRGEVVNCPDLQLSETMTFRSLSEAETYKYLGMSESLGIAVVDIKRSVKERFFCRLTKVLNSLLSGGNKVRAFNGWVMPLLIYSFGILRWTQTELDALDRRVRQQLTTHRMLHPRSSVMRLYIPRKLGGRGFLSAKNLHNREVCSLRDYFRDNECGMHRDVVAVDKGLTPLSLANENWRKPSVLSTEDRKEVWKSKQLHGRFYRVLTGPDVDMLASVNWLRFGDLFGETEGFACAIADEVIKTNNYRKYIMKDGTVDICRACHRPGESLRHIISGCSHLANGEYLHRHNQVARIIHQQLALQYGLVESEVPYYKYAPAPVLENGRALLYWDRSIITDRTIVANKPDIVVVDRAQRRAVLVDITIPHDENLVKAEKDKLSKYLDLAHEITAMWDVDSTIIVPIVVTVNGLIAKSLDQHLKRLSLDGWVKGQQVPHSAALTTGSLSPAPLPAAP

SEQ ID NO: 5140 - protein, 1192 aa, Biston betularia
MWTRSRTAAASGLHDAHIPSPPAPSTPSASSGDEEFATPLATSASSSSSDVSGPRTPAPPPPARRGRPPLPARLGPSGQSASRSALAAGGVVRRMRWSQTNNENCMRAYYGATEGGINLSAYRVRMLPLFQALEPTVAVSTQRLSDQVRAIQRLQLLDQSVLDRLRLEALPARPTPVSTRDSPFASSAPTLVSVPTSMATLATPTDPVVDVGECTSMAVCSQVSEHLRRTLEDAICQYRFAPDSRPRLPRLPTHRRNLALMGALNALLAPYLRASEDLTDTHSILYCGAIAACRVARVKFPDTNRAPRPAGGVPAWQLRIERRISTFRTLIAKLICFSRGNNRPRVMRFVTQAFAGTDIRPQHYLASVTERIDYLKQKVYAWANRIRRYRERADRYWQNRVFQSDQRKVYRDWEGTGQRVSDRQLPDTSVMTEFWRGIWSLPVEHTEGDWMRVVERECESIESMGSVLIDPVDVSCAIRTAQNWKSPGPDGLHNFWIKWIRCSHDRLATQFQEALELGSLPCFMTTGVTFLLHKTGSTTEAKNYRPITCLPTIYKLLTSILRTKINAHVVANNVLAPAQNGCRVGSRGTKELLLIDMTISQQVRRNKGALSTAWIDYKKAYDSVPHSWLERVLELYKIDTTLKSFLGACMRQWTTVLRQPGSGDGSSEPQDLIRIERGIFQGDSLSPLWFCLALNPLSTLLKESGLGHRLRRGGEVISHLLYMDDLKLFAPKRPDLMELLKTTQVFSNAIKMEFGVDKCAVMHVQRGEVVNCPDLQLSETMTFRSLSEAETYKYLGMSESLGIAVVDIKRSVKERFFCRLTKVLNSFLSGGNKVRAFNGWVMPLLIYSFGILRWTQTELDALDRRVRQQLTTHRMLHPRSSVMRLYIPRKLGGRGFLSAKNLHNREVCSLRDYFRDNECGMHRDVVAVDKGLTPLSLANENWRKPSVLSTEDRKEVWKSKQLHGRFYRVLTGPDVDMLASVNWLRFGDLFGETEGFACAIADEVIKTNNYRKYIMKDGTVDICRACHRPGESLRHIISGCSHLANGEYLHRHNQVARIIHQQLALQYGLVESEVPYYKYAPAPVLENGRALLYWDRSIITDRTIVANKPDIVVVDRAQRRAVLVDITIPHDENLVKAEKDKLSKYLDLAHEITAMWDVDSTIIVPIVVTVNGLIAKSLDQHLKRLSLDGWVK

SEQ ID NO: 5141 - protein, 1215 aa, Biston betularia
MWTRSRTAAASGLHDAHIPSPPAPSTPSASSGDEEFATPLATSASSSSSDVSGPRTPAPPPPARRGRPPLPARLGPAGQSASRSALAAGGVVRRMRWSQTNNENCMRAYYGATEGGINLSAYRARMLPLFQALEPTVAVSTQRLSDQVRAIQRLQLLDQSVLDRLRLEALPARPTPVSTRDSPVASSAPTLVSVPTSMVTLATPTDPVIDAGECTSMGVCSQVSEHLRRTLEDAICQYRFAPDSRPRLPRLPTHRRNLALMGALNALLAPYLRASEDLTDTHSILYCGAIAACRVARVKFPDTNRAPRPAGGVPAWQMRIERRISTFRTLIAKLICFSRGNNRPRVMRFVTQAFAGTGIRPQHYLASVTERIDYLKQKVYAWANRIRRYRERADRYWQNRVFQSDQRKVYRDWEGTGQRVSDRQLPDTSVMTEFWRGIWSLPVEHTEGDWMRVVERECESIESMGSVLIDPVDVSCAIRTAQNWKSPGPDGLHNFWIKWIRCSHDRLATQFQEALELGSLPCFMTTGVTFLLHKTGSTTEAKNYRPITCLPTIYKLLTSILRTKINAHVVANNVLAPAQNGCRVGSRGTKELLLIDMTISQQVRRNKGALSTAWIDYKKAYDSVPHSWLERVLELYKIDTTLKSFLGACMRQWTTVLRQPGSGDGSSEPQDLIRIERGIFQGDSLSPLWFCLALNPLSTLLKESGLGHRLRRGGEVISHLLYMDDLKLFAPKRPDLMELLKTTQVFSNAIKMEFGVDKCAVMHVQRGEVVNCPDLQLSETMTFRSLSEAETYKYLGMSESLGIAVVDIKRSVKERFFCRLTKVLNSLLSGGNKVRAFNGWVMPLLIYSFGILRWTQTELDALDRRVRQQLTTHRMLHPRSSVMRLYIPRKLGGRGFLSAKNLHNREVCSLRDYFRDNECGMHRDVVAVDKGLTPLSLANENWRKPSVLSTEDRKEIWKSKQLHGRFYWVLTGPDVDMLASVNWLRFGDLFGETEGFACAIADEVIKTNNYRKYIMKDGTVDICRACHRPGESLRHIISGCSHLANGEYLHRHNQVARIIHQQLALQYGLVESEVPYYKYAPAPVLENGRALLYWDRSIITDRTIVANKPDIVVVDRAQRRAVLVDITIPHDENLVKAEKDKLSKYLDLAHEITAMWDVDSTIIVPIVVSVNGLIAKSLDQHLKRLSLDGWVKGQLQKAVILDTARIVRRFLTLQP

SEQ ID NO: 5142 - protein, 1215 aa, Biston betularia
MWTRSRTAAASGLHDAHIPSPPAPSTPSASSGDEEFATPLATSASSSSSDVSGPRTPAPPPPARRGRPPLPARLGPAGQSASRSALAAGGVVRRMRWSQTNNENCMRAYYGATEGGINLSAYRVRMLPLFQALEPTVAVSTQRLSDQVRAIQRLQLLDQSVLDRLRLEALPARPTPVSTRDSPVASSAPTLVSVPTSMATLATPTDPVVDVGECTSMGVCSQVSEHLRRTLEDAICQYRFAPDSRPRLPRLPTHRRNLALMGALNALLAPYLRASEDLTDTHSILYCGAIAACRVARVKFPDTNRAPRPAGGVPAWQLRIERRISTFRTLIAKLICFSRGNNRPRVMRFVTQAFAGTGIRPQHYLASVTERIDYLKQKVYAWANRIRRYRERADRYWQNRVFQSDQRKVYRDWEGTGQRVSDRQLPDTSVMTEFWRGIWSLPVEHTEGDWMRVVERECESIESMGSVLIDPVDVSCAIRTAQNWKSPGPDGLHNFWIKWIRCSHDRLATQFQEALELGSLPCFMTTGVTFLLHKTGSTTEAKNYRPITCLPTIYKLLTSILRTKINAHVVANNVLAPAQNGCRVGSRGTKELLLIDMTISQQVRRNKGALSTAWIDYKKAYDSVPHSWLERVLELYKIDTTLKSFLGACMRQWTTVLRQPGSGDGSSEPQDLIRIERGIFQGDSLSPLWFCLALNPLSTLLKESGLGHRLRRGGEVISHLLYMDDLKLFAPKRPDLMELLKTTQVFSNAIKMEFGVDKCAVMHVQRGEVVNCPDLQLSETMTFRSLSEAETYKYLGMSESLGIAVVDIKRSVKERFFCRLTKVLNSFLSGGNKVRAFNGWVMPLLIYSFGILRWTQTELDALDRRVRQQLTTHRMLHPRSSVMRLYIPRKLGGRGFLSTKNLHNREVCSLRDYFRDNECGMHRDVVAVDKGLTPLSLANENWRKPSVLSTEDRKEVWKSKQLHGRFYRVLTGPDVDMLASVNWLRFGDLFGETEGFACAIADEVIKTNNYRKYIMKDGTVDICRACHRPGESLRHIISGCSHLANGEYLHRHNQVARIIHQQLALQYGLVESEVPYYKYAPAPVLENGRALLYWDRSIITDRTIVANKPDIVVVDRAQRRAVLVDITIPHDENLVKAEKDKLSKYLDLAHEITAMWDVDSTIIVPIVVTVNGLIAKSLDQHLKRLSLDGWVKGQLQKAVILDTARIVRRFLTLQP

SEQ ID NO: 5143 - protein, 1215 aa, Biston betularia
MWTRSRTAAASGLHDAHIPSPPAPSTPSASSGDEEFATPLATSASSSSSDVSGPRTPAPPPPARRGRPPLPARLGPAGQSASRSALAAGGVVRRMRWSQTNNENCMRAYYGATEGGINLSAYRVRMLPLFQALEPTVAVSTQRLSDQVRAIQRLQLLDQSVLDRLRLEALPARPTPVSTRDSPVASSAPTLVSVPTSMATLATPTDPVVDVGECTSMGVCSQVSEHLRRTLEDAICQYRFAPDSRPRLPRLPTHRRNLALMGALNALLAPYLRASEDLTDTHSILYCGAIAACRVARVKFPDTNRAPRPAGGVPAWQLRIERRISTFRTLIAKLICCSRGNNRPRVMRFVTQAFAGTGIRPQHYLASVTERIDYLKQKVYAWANRIRRYRERADRYWQNRVFQSDQRKVYRDWEGTGQRVSDRQLPDTSVMTEFWRGIWSLPVEHTEGDWMRVVERECESIESMGSVLIDPVDVSCAIRTAQNWKSPGPDGLHNFWIKWIRCSHDRLATQFQEALELGSLPCFMTTGVTFLLHKTGSTTEAKNYRPITCLPTIYKLLTSILRTKINAHVVANNVLAPAQNGCRVGSRGTKELLLIDMTISQQVRRNKGALSTAWIDYKKAYDSVPHSWLERVLELYKIDTTLKSFLGACMRQWTTVLRQPGSGDGSSEPQDLIRIERGIFQGDSLSPLWFCLALNPLSTLLKESGLGHRLRRGGEVISHLLYMDDLKLFAPKRPDLMELLKTTQVFSNAIKMEFGVDKCAVMHVQRGEVVNCPDLQLSETMTFRSLSEAETYKYLGMSESLGIAVVDIKRSVKERFFCRLTKVLNSFLSGGNKVRAFNGWVMPLLIYSFGILRWTQTELDALDRRVRQQLTTHRMLHPRSSVMRLYIPRKLGGRGFLSTKNLHNREVCSLRDYFRDNECGMHRDVVAVDKGLTPLSLANENWRKPSVLSTEDRKEIWKSKQLHGRFYRVLTGPDVDMLASVNWLRFGDLFGETEGFACAIADEVIKTNNYRKYIMKDGTVDICRACHRPGESLRHIISGCSHLANGEYLHRHNQVARIIHQQLALQYGLVESEVPYYKYAPAPVLENGRALLYWDRSIITDRTIVANKPDIVVVDRAQRRAVLVDITIPHDENLVKAEKDKLSKYLDLAHEITAMWDVDSTIIVPIVVTVNGLIAKSLDQHLKRLSLDGWVKGQLQKAVILDTARIVRRFLTLQP

SEQ ID NO: 5144 - protein, 1208 aa, Apotomis turbidana
MITRSQRKKAETSHARPPPSPAPSSSTPSSSGDEFATAPDTSESSDDERGPPPPPPRPPARRGRPPLPARLGPTGQSAPSTAPATGGVVRRMRWSQAMNENVMRAYYGATEGGTNLSAYRDRMLPLFLSFDPTITVSAQRLSDQVRFIQRRKLLDDATLDRLRLEVLAARTSSTPARNPPATSPVSAPAPYLVPEVPRTDRDADEEDCASSVSTQANEQLRRALEEAIRCYRSAPDSRPRLPRLPMHKRNLALMGALDALLDPYLRASEDLADTHSIMYCGAIAACRVARVRFPDTDRAPRTAGGVPAWQVRIERRISSFRTLIAKLICFRGGNNRPRVMRYVTQAFAGTGIRPCDYMACVTERIDYLKQKVYAWANRIRRYRERVDRFQQNRLFQSDQRKVYRKWEGTDQCVTDGQLPDPTAMINFWRSIWSVPVEHTEGEWMNVVRRECEPIENMGAVTISPDDVSCAVRTTQNWKSPGPDGLHNFWIKWFRSSHERLATQFQDALELGSLPSFMTTGATFLLYKSGSTTEAKNYRPITCLPTLYKLLTSILRTKINTHIVANNVLAFSQNGCRVGSRGTKELLLIDTTICQQVRRNRGSLSATWIDYKKAYDSVPHSWLERILELYKIDTALRSLLSSCMRQWTTVLRQPGVGDGPPGPQDLIRIERGIFQGDSLSPLWFCLALNPLSTLLKDSGLGSRLRRGGEVISHLLYMDDLKLYAPKRQDLVELLEVTETFSSAIKMEFGVDKCAVMHVQRGKVVNSANLQLSETMSLRSISEVETYKYLGMSQSLGIADGDIRQALKERFFCRLTKVLNSLLSGGNKARAFNAWVMPLLTYSFGILRWTQTELDALDTRVRQLLTTHRMRHPRSSVMRMYIPRKCGGRGFLNAKDLHNREVCSLREYFLNNECGIHRDVVAVDKGLTSLSLANENWRRPKVLSTDDRKAVWKSKELHGRFCKALTGPDVDLLASVNWLRFGDLFGETEGFVCAIADEVMTTNNYRRYILKDGTVDICRACRRPGESLRHIISGCSHLANGEYLHRHNQVARIIHQQLALRYGLVGSEVPYYKYAPMPVLENGRATLYWDRSIITDRTIVANKPDIVLVDRSKRQAVLVDITIPHDENLVKAEKDKLSKYLDLAHEVTAIWDVDSTIIVPIVVSANGLIAKSLDKHLKRLSLDGWIKGQIQKAVLLDTARIVRRFLSLQP

SEQ ID NO: 5145 - protein, 1136 aa, Notocelia uddmanniana
MIIIIIITTAPAAGGVVRRMRWTQEMNENCMRAYFGATEGETNLSAYRVRMLPLFQALEPTITVSAQRLSDQVRVIQRNKRLDDLTLDRLRLEALSARAAPTSARDLPATSPAPVPAPNTAPRAPRVDSSADGDCADQSVSTQAHEQLRRALDEAITRYRSTPNSRPRLPRLPVNRRNLAPMGALNDLLDPYLRASDDLIDTHSIMYCGAIAACRVARVKFPDADRATRTAGGVPAWQVRIERRINTFRTLIAKLICFRGGNNRPRVMRSVNQAFAGTGVRPRDYMACVTERIDFLKQKVYAWASRIRRYRERVDRYQQNRLFQSDQRKVYRKWEGTDHRVCDGQRPDATAMVNFWRSIWSVPVEHTEGAWIGVVDRDCESIEPMGSVTISPEDVSCAIRTAPNWKSPGPDGLHNFWLKWFRCSHERLATQFQQALELGSLPPPLTTGVTSLLYKSGSTTEAKNYRPITCLPTLYKLLTSILRAKINTHIVTNNILAPAQNGCRVGSRGTKELLLIDMTICQRVRRNRGTLSASWIDYKKAYDSVPHSWLRRILELYKVDAALRSFLSACMGQWTTVLRQPGGGDGPSGPQDSIRIERGIFQGDSLSPLWFCLALNPLNTLLQDSGLGCQLRRGGEVISHLLYMDDLKLFAPNRQDLLELLKTTEVFSSAIKMEFGVDKCAVMHVQRGKVVNSTNLQLSETMSLRSLSEAETYKYLGMSQALGIEGEGIKQAVKERFFCRLTKVLNSFLSGGNKARAFNAWVMPLLTYSVGILRWTQTELDALDRRVRVLLTAHRMLHPRSSVMRLYIPRKCGGRGFLNAKDLHNREVCSLRDYFLNSECGMHRDVVAVDASFTPLSMANENWRRFKVLSAEDRKAEWKSKELHGRFYRALTGPDVDLLASVNWLRFGDLFGETEGFVCAIADEVIMTNNYRKYILKDGTVDICRACRRPGESLRHIISGCGHLANGEYLHRHNLVARIIHQQLALSYGLVDFEVPYYKYLPAAVLENGRATLYWDRSIITDRTIVANKPDIVLIDRSKRQAMLVDITIPHDENLVKAEKDKVSKYLDLAHEVTAMWDVDSTIIVPIVVSANGLIAKSLDQHLKRLSLDGWVKGQIQKAVLLDTARIVRRFLSLSP

SEQ ID NO: 5146 - protein, 955 aa, Notocelia uddmanniana
MGALNDLLDPYLRASDDLIDTHSIMYCGAIAACRVARVKFPDADRATRTAGGVPAWQVRIERRINTFRTLIAKLICFRGGNNRPRVMRFVNQAFAGTGVRPRDYMACVTERIDFLKQKVYAWASRIRRYRERVDRYQQSRLFQSDQRKVYRKWEGTDHRVCDGQRPDATAMVNFWRSIWSVPVEHTEGAWIGVVERDCESIEPMGSVTISPEDVSCAIRTAPNWKSPGPDGLHNFWLKWFRCSHERLATQFQQALELGSLPPPLTTGVTSLLYKSGSTTEAKNYRPITSLPTLYKLLTSILRAKINTHIVTNNILAPAQNGCRVGSRGTKELLLIDMTICQRVRRNRGTLSASWIDYNKAYDSVPHSWLRRILELYKVDAALRSFLSACMGQWTTVLRQPGGGDGPSGPQDSIRIERGIFQGDSLSPLWFCLALNPLSTLLQDSGLGCQLRRGGEVISHLLYMDDLKLFAPNRQDLLELLKTTEVFSSAIKMEFGVDKCAVMHVQRGKVVNSTNLQLSETMSLRSLSEAETYKYLGMSQALGIEGEGIKQAVKERFFCRLTKVLNSFLSGGNKARAFNAWVMPLLTYSFGILRWTQTELDALDRRVRVLLTAHRMLHPRSSVMRLYIPRKCGGRGFLNAKDLHNREVCSLRDYFLNSECGMHRDVVAVDASFTPLSMANENWRRFKVLSAEDRKAEWKSKELHGRFYRALTGPDVDLLASVNWLRFGDLFGETEGFVCAIADEVIMTNNYRKYILKDGTVDICRACRRPGESLRHIISGCSHLANGEYLHRHNLVARIIHQQLALSYGLVDFEVPYYKYLPAPVLENGRATLYWDRSIITDRTIVANKPDIVLIDRSKRQAVLVDITIPHDENLVKAEKDKVSKYLDLAHEVTAMWDVDSTIIVPIVVSANGLIAKSLDQHLKRLSLDGWVKGQIQKAVLLDTARIVRRFLSLSP

SEQ ID NO: 5147 - protein, 1106 aa, Notocelia uddmanniana
MRAYYGATDGGTNLSAYRVRMLTLFRALEPAISVSAQRLSDQVRVIQRLKRLDDATLDRLRLEALSARAASVSARDPLATLPAPMPAPDTATGAPRVDLSTDGDCANQSVSTQADGQLRRALEEAITRYRSTTSSRPRLPRLPVNRRNLALMGALNDLLVPYLRASEDLIDTHSIMYCGAIAACRVARVKFPDADRAPRTAGSVPTWQVRIERRIDTYRTLIAKLICFRGGNSRPRVMRFVNQAFAGTGVRPRDYMTCVTERIDFLKQKVYAWASRIRRYRERVDRYQLNRLFQSDQRKVYRKWEGTDHRVSDGQRPDATAMVNFWRSIWSVPVEHNEGAWIDVVKRECESIEPMGSVTVSPEDVSCAIRTAPNWKSPGPDGLHNFWLKWFRCSHARLAAQFQQALELGSLPSPLTTGVTSLLYKSGSTTEAKNYRPITCLPTLYKLLTSILRAKINTHIVANNILAPAQNGCRVGSRGTKELLLIDMTICQRVRRNRGTLSAAWIDYKKAYDSVPHSWLRRILELYKVDAVLRSFLVACMGQWTTVLRQPEGGEGPSGPQDSIRIERGIFQGDSLSPLWFCRALNPLSTLLKDSGLGCQLRREGEVISHLLYMDDLKLFAPNKHDLLELLKTTEVFSSAIKMEFGVDKCAVMHVQRGKVVNSTNLHISETIALRSLSEAETYKYLGMSQSLGIEGGDIKRAVRERFFCRLTKVLNSFLSGGNKVRAFNAWVMPLLTYSFGILRWTQTELDFLDRRVRVLLTAHRMLHPRSSVMRLYIPRKLGGRGFLNAKDLHNREVCSLRDYFLNSECGMHRDVVAADASFTPLSMANENWRRFKVLSTDDRRAVWKSKELHGRFYKALTGPDVDLLASVNWLRFGDLFGETEGFVCAIADEVIMTNNYRKYILKDGTVDICRACRRPGESLRHIISGCSHLANGEYLHRHNLVARIIHQQLALLYGLVDFEVPYYKYTPAPVLENGRATLYWDRSVITDRTIVANKPDIVLTDRLKRQAVLVDITIPHDENLVKAEKDKVSKYLDLAHEVTAMWDVDSTIIVPIVVSVNGLIAKSLDQHLKRLSLDGWVKGQIQKAVLLDTARIVRRFLSLSP

SEQ ID NO: 5148 - protein, 1208 aa, Crocallis elinguaria
MITRSRTKKAGTASARKTPPPASSSPSSSSGVEYGTPLDTSASSDEDGPPSPPPPPPPARRGRPPLPARLGPAGHSVPRTAPATGGIVRRMRWTSDMNENCMRAYYGATEGGTNMSAYRDRMLPLFQTLEPSVAVSTQRLSDQVRAIQRLKLLDESALDRLRLEALPIRATSASARDLSVAPPVPAPLPAPSSVATRIDPVVDEYDCANISVSTQVNEQFRRALEDAILEYQYTPDSRPRLPRLPTNRRNLALMGALNVLLAPYLRASENLFDTHSIMYCGAIAVCRVARVKFPDADRAPRPAGSAPAWQVRIERRINTFRTLIAKLICFSRGNNRPRVMRFVNQAFAGTGIRPQNYMAGVTERIDFLKQKIYAWVNRIRRYRERVDRYHQNRLFESDQRKVYRNWEGTDQRVSDGQLPDTNAMINFWRGIWSVPVEHTEGDWMRTVEQSCESIETMGSVTIDPIDVSCAIRTAQNWKSPGPDGLHNFWIKWIRCSHECLAVQFQEALELGSLPRFLTTGVTSLLHKSGSTTEAKNYRPITCLPTLYKLLTSILRAKINSHVVANNILAPAQNGCRVGSRGTKELLLIDTAICQQVRRNKGALSTAWIDYKKAYDSVPHSWLERILELYKIDTTLRTFLSTCMRQWTTVLRQPGSGNSPSGPENFIKIERGIFQGDSLSPLWFGLALNPLSTFLRDSRLGCKLRREGEIISHLLYMDDLKLLAPKSPDLMKLLKITEIFSSAIKMEFGVDKCAVMHVQRGKVVNSDNLQLSETMTLRSLSEAETYRYLGMSQSLGITVGDIKQSVKERFFCRLTKVLNSLLSGGNKARAFNGWVMPLLIYSFGILKWTQTELDSLDRRVRQLLTYHRMLHPRSSVMRLYIPRKWGGRGFLNAKTLHNREVCSLREYFLNNECGMHRDVVAVDRNLTPLSLANENWHKPVVMTTEDRKEVWKGKELHGRFYRALTGSDVNLLASVNWLRFGDLFGETEGFVCAIMDEVIKTNNYRKYIMKDGTVDICRACRRPGESLRHIISGCSHLANGEYLHRHNLVARIIHQQIALQYGLVESEVPYYKYAPVPVLENGCALLYWDRSIITDRTIVANKPDIVLVDRSQRRAVLVDITVPHDENLVKAEKDKLSKYLDLAHEVTAMWNVDSTIIVPIVVSANGLVAKSLDQHLKRLSLDGWIKGRMQKAVLLDTARIVRRFLTLQP

SEQ ID NO: 5149 - protein, 1208 aa, Crocallis elinguaria
MITRSRTKKAGTASARKTPPPASSSPSSSSGVEYGTPLDTSASSDEDGPPSPPPPPPPARRGRPPLPARLGPAGHSVPRAAPATGGIVRRMRWTSDMNENCMRAYYGATEGGTNMSAYRDRMLPLFQTLEPSVAVSTQRLSDQVRAIQRLKLLDESVLDRLRLEALPIRATSASARDLSVAPPVPAPLPAPSSVATPIDPVVDEDDCANISVSTQVNEQLRRALEDAILEYQYTPDSRPRLPRLPTNRRNLALMGALNVLLAPYLRASENLFDTHSIMYCGAIAVCRVARVKFPDADRAPRPAGSAPAWQVRIERRINTFRTLIAKLICFSRGNNRPRVMRFVNQAFAGTGIRPQNYMAGVTERIDFLKQKIYAWVNRIRRYRERVDRYHQNRLFESDQRKVYRNWEGTDQRVSDGQLPDTNAMINFWRGIWSVPVEHTEGDWMRTVEQSCESIETMGSVTIDPIDVSCAIRTAQNWKSPGPDGLHNFWIKWIRCSHECLAVQFQEALELGSLPRFLTTGVTSLLHKSGSTTEAKNYRPITCLPTLYKLLTSILRAKINSHVVANNILAPAQNGCRVGSRGTKELLLIDTAICQQVRRNKGALSTAWIDYKKAYDSVPHSWLERILELYKIDTTLRTFLSTCMRQWTTVLRQPGSGNSPSGPENFIKIERGIFQGDSLSPLWFCLALNPLSTLLRDSRLGCKLRREGEIISHLLYMDDLKLLAPKSPDLMKLLKITEIFSSAIKMEFGVDKCAVMHVQRGKVVNSDNLQLSETMTLRSLSEAETYRYLGMSQSLGITVGDIKQSVKERFFCRLTKVLNSLLSGGNKARAFNGWVMPLLIYSFGILKWTQTELDSLDRRVRQLLTYHRMLHPRSSVMRLYIPRKWGGRGFLNAKTLHNREVCSLREYFLNNECGMHRDVVAVDRNLTPLSLANENWHKPVVMTTEDRKEVWKGKELHGRFYRALTGSDVDLLASVNWLRFGDLFGETEGFVCAIMDEVIKTNNYRKYIMKDGTVDICRACRRPGESLRHIISGCSHLANGEYLHRHNLVARIIHQQIAFQYGLVESEVPYYKYAPAPVLENGRALLYWDRSIITDRTIVANKPDIVLVDRSQRRAVLVDITVPHDENLVKAEKDKLSKYLDLAHEVTAMWNVDSTIIVPIVVSANGLVAKSLDQHLKRLSLDGWIKGRMQKAVLLDTARIVRRFLTLQP

SEQ ID NO: 5150 - protein, 965 aa, Pammene fasciana
MNRRNLALMGALNDLLDPILRTSKDLDDTHSIMYCGAIAACRVARVKFPDAERAPRTAGGVPVWQVRIERRINSFRTLIAKLICFRGGNNRPRVMRFVHQAFAGTGIEPRDYMANVTERIDFLKQKVYAWASRIRRYRERVDRFRQNRLFQSDQRKVYRRWEEADPRVSDVRLPDATAMTDFWRSIWSAPVEHTEGEWMSVVERECESIEPMGAITISPDDVSCAIRTAQNWKSPGPDGLHNFWLKWFRCSHSRLATQFQQALELGSLPPSLTTGVTFLLYKSGSTTEAKNYRPITCLPTLYKLLTSILRAKINAHIVANNILASSQNGCRVGSRGTKELLLIDMTICQRVRRNRGALSAAWIDYKKAYDSVPHSWLERILELYKVDAALRSFLGACMRQWTTVLRQPGGGDDPPDPHDFIRIERGIFQGDSLSPLWFCLALNPLSTLLKDSGLGCRLRREGEVISHLLYMDDLKLFAPNNRDLMELLKTTEVFSSSIKMEFGVDKCAVMHVQRGKVVNSTNLQLSETMTFRSISESETYKYLGMSQSLGIEDAGIKQALKERFFGRLTKVLNSLLSGGNKVRAFNAWVMPLLTYSFGILRWTQTELDALDRRVRLLLTTHRMLHPRSSVMRLYIPRKCGGRGFLNAKNLHNREVYNLRNYFLNNECGMHRDVVAVDKSLTPLSLANENWRKPVVLSTEDRKAVWKSKELHGRFYGALTGPDVDLLASVNWLRFGDLFGETEGFACAIADEVIMTNNYRRYILKDGTVDICRACRRPGESLRHIISGCSHLANGEYLHRHNLVARIIHQQLALLYGLVDHEVPYYKYTPAPVLENGRATLYWDRSIITDRTIVANKPDIVIIDRSQRRAMLVDITVPCDVNLVKAEKDKSSKYLDLAHEVTAMWEVDSAIIVPIVVSANGLIAKSLDQHLERLSLRGCGWIKGQIQKAVILDTARIVRRFLSLRP

SEQ ID NO: 5151 - protein, 1211 aa, Pammene fasciana
MITRSQARAATTHARPPSSPASSCSSSTSSSGDKFETAPDTDGSSDDYGPPPPPPRRPPARRGRPPLPARLGLAGHPAPPRAPAAGGIVRRMRWTPSMNENVMRAYYGATEGGTNLSAYRDRMLPLFQALEPTIDTTAQRLSDQVRVIQRLKRLDDVILDRLRLEALSVRAATTSARDPPATSPDPMPAPDLASGVPRVDPSADEVDIANQSVSSTANEQLRRTLEEAITQYRSINITRPRIPRLPMNRRNLALMGALNDLLAPFLRTSKDLDDTHSIMYCGAIAACRVARVKFPDAERAPRTAGGVPAWQVRIERRINSFRTLIAKLICFRGSNNRPRVMRFVHQAFAGTGIEPRDYMANVIERIDFLKQKVYAWASRIRRYRERVDRFRQNRLFQSDQRKVYRRWEKADPRVSDERLPDATAMADFWRSIWSAPVEHTEGEWMSVVERECESIEPMGAITISPDDVSCAIRTAQNWKSPGPDGLHNFWLKWFRCSHSRLATQFQQALELGSLPPSLTTGVTFLLYKSGSTTEAKNYRPITCLPTLYKLLTSILRAKINAHMVANNILASAQNGCRVGSRGTKELLLIDMTICQRARRNRGALSAAWIDYKKAYDSVPHSWLERILELYKVDAALRSFLGACMRQWTTVLRQPGGGDDPPGPQDFIRIERGIFQGDSLSPLWFCLALNPLSTLLKDSGLGCRLRRESEVISHLLYMDDLKLFAPNNRDLLELLKTTEVFSTSIKMEFGVDKCAVMHVQRGKVVNSTNLQLSETMTFRSISESETYKYLGMSQSLGIEDTGIKRALRERFFGRLTKVPNSLLSGGNKVRAFNAWVMPLLTYSFGILRWTQTELDALDRRVRLMLTTHRMLHPRSSVMRLYIPRKCGGRGFLNAKNLHNREVYNLRNYFLNNECGMHRDVVAIDKGLTPLSLANENWRKPVVLSTEDRKAVWKSKELHGRFYGALTGPDVDLLASVNWLRFGDLFGETEGFACAIADEVIMTNNYRRYILKDGTVDICRACRRPGESLRHIISGCSHLANGEYLHRHNLVARIIHQQLALLYGLVAHEVPYYKYIPAPVLENDRATLYWDRSIITNRTIVANKPDIVVIDRPQRRAMLVDITVPCDVNLVKAEKDKSSKYLDLAHEVTAMWEVDSAIIVPIVVSANGLIAKSLDQHLERLSLRGCGWIKGQIQKAVILDTARIVRRFLTLRP

SEQ ID NO: 5152 - protein, 1208 aa, Ennomos quercinarius
MITRSKAKTAGNECARLPPLPVPSSPSSSSDDEYATPPDTTASSDEDGPSSPPPPPPPARRGRPPLPARLGPAGQPAPRPAPATGGIVRRMRWTQTMNENCMRAYYGATEGGSSLTAYRDRMLSLFQDLEPAVAVSAQRLSAQVRAIQRCKMLDEPALDRLRLEALSIRATSPSPRVLPAALPDPGPIMDPLPVTPRGDPAIDGEESVSDSVSTQANEQLRSALEDAILRYRSTPTSRPRLPRLPTNRRNLVLMGALNTLLAPYLRTSEDLVDTHSILYCGAIAACRVARVKFPDTDRAPQPADGAPAWQVRIEKRITTFRTLIAKLVCFSRGNHRPRVMRFVTQAFAGTGIRPQEYMACVTERIDFLKQKVYAWASRIRRYRERVDRYQQNRLFQSDQRKVYRNWEGTGQRVVDGQLPDANAMNEFWRSIWSVPVDHTEGDWMRVVERVCEPIESMGSITIDPEDISCAIRTAQNWKSPGPDGLHNFWIKWIRCSYPCLAIQFQEALEAGSLPSFMTTGVTFLLHKSGSTTEAKNYRPITCLPTLYKLLTSILRTKINSHIVANNILAPAQNGCRVGSRGTKELLLIDTAICQQVRRNRGALSTAWIDYKKAYDSVPHSWLERILELYKIDATLRSFLSACMRQWTTVLRQPGGGESVSDAQDFIRIERGIFQGDSLSPLWFCLALNPLSTLLGDSGLGYRLRRGGEIISHLLYMDDLKLFAPQRPQLIELLKITENFSNSINMEFGVDKCAVMHVHRGKVVNSTNLQLSETMTLRSLSESETYKYLGMSESLGISVGDVKRTVKERFFCRLTKVLNSLLSGGNRTRAFNGWVMSLLMYSFGILRWTQTELDALDRKVRQLLTSHRMLHPRSSVMRLYIPRKWGGRGFLNAKTLHNREVCSLRDYFLNNECGMHRDVVAVDKGLTPLSLANENWRKPVVLSTEDRRDVWKGKELHGRFYRALTGPDVDLHASVNWLRFGDLFGETEGFLCAIADEVIKTNNYRKYIMKDGTVDICRACRRPGESLRHIISGCSHLANGEYLHRHNLVARIIHQQLALQYGLVESEVPYYKYTPEPVLENGRALLYWDRSIITDRTIVANKPDIVLVDRSQRRAVLVDITIPHDENLVKAEKDKLSKYLDLAHEVTAMWNVDSTSIVPIVVSANGLIAKSLDQHLERLSLDGWIKGQIQKAVLLDTARIVRRFLTLQP

SEQ ID NO: 5153 - protein, 955 aa, Ennomos quercinarius
MGALNTLLAPYLRTSEDLVDTHSILYCGAIAACRVARVKFPDTDRAPRPADGAPAWQVRIEKRITTFRTLIAKLVCFSRGNHRPRVMRFVTQAFAGTGIRPQDYMACVTERIDFLKQKVYAWASRIRRYRERVDRYQQNRLFQSDQRKVYRNWEGTGQRVVDGQLPDANAMSEFWRSIWSVPVEHTEGDWMRVVERVCEPIESMGSITIDPEDISCAIRTAQNWKSPGPDGLHNFWIKWIRCSYPCLAIQFQEALEAGSLPRFMTTGVTFLLHKSGSTTEAKNYRPITCLPTLYKLLTSILRTKINSHIVANNILAPAQNGCRVGSRGTKELLLIDTAICQQVRRNRGALSTAWIDYKKAYDSVPHSWLERVLELYKIDATLRSFLSTCMRQWITVLRQPGGGESVSDPQDFIRIERGIFQGDSLSPLWFCLALNPLSTLLGDSGLGYRLRRGGEIISHLLYMDDLKLFAPQRPQLIELLKITENFSNSIKMEFGVDKCAVMHVHRGKVVNSTNLQLSETMTLRSLSESETYRYLGMSESLGISVGDVKQSVKERFFCRLTKVLNSLLSGGNKTRAFNGWVMPLLMYSFGILRWTQTELDALDRKVRQLLTSHRMLHPRSSVMRLYIPRKWGGRGFLNAKTLHNREVCSLREYFLNNEYGMHRDVVAVDKGLTPLSLANENWRKPVVLSTEDRRDVWKGKELHGRFYRALTGPDVDLHASVNWLRFGDLFGETEGFVCAIADEVIKTNNYRKYIMKDGTVDICRACRRPGESLRHIISGCSHLANGEYLHRHNLVARIIHQQLALQYGLVESEVPYYKYTPGPVLENGRALLYWDRSIITDRTIVANKPDIVLVDRSQRRAVLVDITIPHDENLVKAEKDKLSKYLDLAHEVTAMWNVDSTSIVPIVVSANGLIAKSLDQHLERLSLDGWIKGQIQKAVLLDTARIVRRFLTLQP

SEQ ID NO: 5154 - protein, 1213 aa, Cydia splendana
MKTMITRSQRRAAESTNNARPPPPPAPSSSSSTSSSGDEFATPPDTDGFSDEGGPPPPPPRPPARRGRPPLPARLGPAGHPAPPTAPATGGIVRRMRWTRTMNENVMRAYYGATEGGTQLSAYRSRILPLFQALEPTITVSEQRLSDQVRVIQRLKRLDDATLDRLRQEALSARADSTSVRDLPATSPDPVPAPDLAPAAPRVDFCTDEGDFASQNVSTTANEQLRRTLEEAITQYRATTNSRPRLPRLPMNRRNLALMGALNALLEPYLRTSKDLDDTHSIMYCGAIAACRVARVKFPDAERAPRIVGGVPAWQARIERRISSFRTLIAKLICFRGGNNRPRVMRFVNQAFAGTDIRPRDYMANVTERIDFLKQKVYAWANRIRRYRERVDRFQQNRLFQSDQRKVYRKWEETNLRTPDTQPPDATAMTEFWRSIWSVPVGHTEGSWMSVVERECESIEPMGAVTISPDDVSCAIRTAQNWKSPGPDGLHNFWLKWFRCSHSRLAAQFQQALELGSLPPSLTTGVTSLLYKSGSTTEAKNYRPITCLPTLYKLLTSILRAKINAHIVANNILASAQNGCRVGSRGTKELLLIDMTICQQIRRNKGALSAAWIDYKKAYDSVPHSWLGRVLELYKVDAALRAFLSTCMGQWTTVLRQPGGGDDRLGPQDFIRIERGIFQGDSLSPLWFCLALNPLSTLLKDLGLGCRLQREGEVISHLLYMDDLKLFAPNSQDLLELLKTTEVFSSAINMEFGVDKCAVMHVQRGRVVNSRNLQLSETMSFRSISESETYKYLGMSQSLGIEDEGIRRSVKERFFSRLTKVLNSLLSGGNKVRAFNAWVMPLLTYSFGILRWTQTELDALDRRVRSLLTTHHMLHPRSSVMRLYIPRKCGGRGFLNAKDLHNREVYNLRNYFLNNECGMHRDVVAVDRNLTPLSLANENWRKPVVLSTADRKAAWESKVLHGRFYKALTGPDVDLLASVNWLRFGDLFGETEGFACAIADEVMMTNNYRKYILKDGTVDICRACRRPGESLRHIISGCSDLANGEYLHRHNLVARIIHQQLALLYGLVDREVPYYKYLPAPVLENGRATLYWDRSIITDRTIVANKPDIVIIDRSRRRAVLVDITIPHDENLVKAETDKSSKYLDLAHEITTMWDVDSTIIVPIVVSVNGLIAKSLDQHLERLLLGGWIKGQMQKAVILDTARIVRRFLSLRP

SEQ ID NO: 5155 - protein, 1213 aa, Cydia splendana
MKTMITRSQRRAAESTNNARPPPPPAPSSSSSTSSSGDEFATPPDTDGFSDEGGPPPPPPRPPARRGRPPLPARLGPAGHPAPPTAPATGGIVRRMRWTRTMNENVMRAYYGATEGGTQLSAYRSRILPLFQALEPTITVSEQRLSDQVRVIQRLKRLDDATLDRLRQEALSARADSTSVRDLPATSPDPVPAPDLAPAAPRVDFCTDEGDFASQNVSTTANEQLRRTLEEAITQYRATTNSRPRLPRLPMNRRNLALMGALNALLEPYLRTSKDLDDTHSIMYCGAIAACRVARVKFPDAERAPRIVGGVPAWQARIERRISSFRTLIAKLICFRGGNNRPRVMRFVNQAFAGTDIRPRDYMANVTERIDFLKQKVYAWANRIRRYRERVDRFQQNRLFQSDQRKVYRKWEETNLRTPDTQPPDATAMTEFWRSIWSVPVGHTEGSWMSVVERECDSIEPMGAVTISPDDVSCAIRTAQNWKSPGPDGLHNFWLKWFRCSHSRLAAQFQQALELGSLPPSLTTGVTFLLYKSGSTTEAKNYRPITCLPTLYKLLTSILRAKINAHIVANNILASAQNGRRVGSRGTKELLLIDMTICQQIRRNKGALSAAWIDYKKAYDSVPHSWLGRVLELYKVDAALRAFLSTCMGQWTTVLRQPGGGDDRLGPQDFIRIERGIFQGDSLSPLWFCLALNPLSTLLKDLGLGCRLQREGEVISHLLYMDDLKLFAPNSQDLLELLKTTEVFSSAINMEFGVDKCAVMHVQRGRVVNSRNLQLSETMSFRSISESETYKYLGMSQSLGIEDEGIRRSVKERFFSRLTKVLNSLLSGGNKVRAFNAWVMPLLTYSFGILRWTQTELDALDRRVRSLLTTHRMLHPRSSVMRLYIPRKCGGRGFLNAKDLHNREVYNLRNYFLNNECGMHRDVVAVDRNLTPLSLANENWRKPVVLSTADRKAAWESKVLHGRFYKALTGPDVDLLASVNWLRFGDLFGETEGFACAIADEVMMTNNYRKYILKDGTVDICRACRRPGESLRHIISGCSHLANGEYLHRHNLVARIIHQQLALLYGLVDREVPYYKYLPAPVLENGRATLYWDRSIITDRTIVANKPDIVIIDRSQRRAVLVDITIPHDENLVKAEKDKSSKYLDLAHEITAMWDVDSTIIVPIVVSVNGLIAKSLDQHLERLLLGGWIKGQMQKAVILDTARIVRRFLSLQP

SEQ ID NO: 5156 - protein, 1212 aa, Agriopis aurantiaria
MITRSRTKQADTKSARLPSPPASSSSPSTSSGEDEYHTTREASGSSSDTSGPGTPPPPPPARRGRPPLPARLGLVGHSATRPAPATGGVVRRMRWSTIMNEDCMRAYYRATEGGTNLSAYCARMLPLFQALQPTITVSAQRLSDQVRAIHRCKLLDDSVLDRLRQEELRARPIPVSTRDPPVASSAPTLASVPASVVTLAALADPVVDEGDLASGVSDQVREQLRGALEDAISQYRFTPDSRPRLPRLSTHRRNLALMGALNALLAPYLRASEDLVDTHSILYCGAIAACRVARVKFPDTNRAPRTAGGVPAWQVRIERRISTFRTLIAKLVCFRRGNNRPRVMRFVTQAFAGTDIRPQHYLANVTERIDYLKQKVYAWANRIRRYRERVDRYWQNRLFQSDQRKVYRGWEETDQRVSDGQLPDASAMINFWRGIWSMPVEHTEGDWMRVVERECESIEPMGSILIDSLDVSCAIRTAQNWKSPGPDGLHNFWIKWIRCSHDRLATQFQEALELGSLPSFMTTGVTFLLHKSGSTTEAKNYRPITCLPTIYKLLTSILRNKINAHIVANNVLAHAQNGCRVGSRGTKELLLIDTAISQQVRRNKGALSAAWIDYKKAYDSVPHSWLERVLELYKIDTTLKSFLGACMRQWTTVLRQPGGGDGAFGPQDLLRIERGIFQGDSFSPLWFCLALNPLSTLLRDSGLGYRLRRDGQVISHLLYMDDLKLFTPKRQDLVELLKITEVFSSAIRMEFGVDKCAVMHVQRGKVVNSPNLQLSEVMTLRSLSEAETYKYLGMSESLGISVENIKKSVKERFFCRLTKVLNSLLSGGNKVRAFNGWVMPLLIYSFGILRWTQTELDALDRRVRQLLTSHRMLHPRSSVMRLYIPRKWGGRGFLNAKNLHNREVCSLRDFFRNSESGMHRDVVAVDRGLTVLSLANENWRKPSVLSIEDRRDVWKGKELHGRFYRALTGPDVDLLASVNWLRFGDLFGETEGFACAIADEVIKTNNYRKYIMKDGTVDICRACHRPGESLRHIISGCSHLANGEYLHRHNLVARIIHQQLALRYSLVESEVPYYKYAPAPVLENGRALLYWNRSIITDRTIVANKPDIVLVDRSQRRAVLVDITIPHDENLVKAEKDKLSKYLDLAHEVTAMWDVDSTIIVPIVVSVNGLIAKSLDQHLKRLSLDGWVKGQMQKAVILDTARIVRRFLTLQP

SEQ ID NO: 5157 - protein, 1214 aa, Agriopis aurantiaria
MITRSKTSAAARLTNAQPPPPPASSSSPSSSSGEDEYHTTREASGSSSDTSGPGTPPPPPPARRGRPPLPARLGLVGHSATRPAPATGGVVRRMRWSPTMNENCMRAYYRATEGGTNLSAYCARMLPLFQDLEPTVTVSAQRLSDQVRAIHRCKLLDDSVLDRLRLEELHARPTPALMRDPPVASSAPTLASLPASVATLAAPADPVVDEGDLTSNSVSDQVREQLRGALEDAISQYRFAPDSRPRLPRLPTHRRNLALMGALNALLAPYLRASEDLVDTHSILYCGAIAACRVARVKFPDTNRAPRTAGGVPAWQVRIERRISTFRTLIAKLICFSRGNNRPRVMRFVTQAFAGTEIRPQHYLANVMERIDYLKQKVYAWVSRIRRYRERVNRYWQNRLFQSDQRKVYRGWEETDQRVSDGQLPDANAMINFWRGIWSVPVEHTEGDWMRVVERECESIEPMGSILIDTVDVSCAIRTAQNWKSPGPDGLNNFWIKWIRCSHDRLATQFQEALELGSLPSFMTTGVTFLLHKSGSTTEAKNYRPITCLPTIYKLLTSILRNKINAHIVANNVLAHAQNGCRVGSRGTKELLLIDTAISQQVRRNKGALSAAWIDYKKAYDSVPHSWLERVLELYKIDTTLKSFLGACMRQWTTVLRQPGGGDGTSGPQDLIRIERGIFQGDSFSPLWFCLALNPLSTLLRDSGLGYRLRRDGQVISHLLYMDDLKLFTPKRQDLVELLKITEVFSSAIKMEFGVDKCAVMHVQRGKVVNSPNLQLSEVMTLRSLSEAETYKYLGMSESLGISVENIKKSVKERFFCRLTKVLNSLLSGGNKVRAFNGWVMPLLIYSFGILRWTQTELDALDRRVRQLLTSHRMLHPRSSVMRLYIPRKWGGRGFLNAKNLHNREVCSLRDFFRNSESGMHRDVVAVDRGLTPLSLANENWRKPSVLSIEDRRDVWKGKELHGRFYRALTGPDVDLLSSVNWLRFGDLFGETEGFACAIADEVIKTNNYRKYIMKDGTVDICRACHRPGESLRHIISGCSHLANGEYLHRHNQVARIIHQQLALRYGLVESEVPYYKYAPAPVLENGRALLYWDRSIITDRTIVANKPDIVLVDRSQRRAVLVDITIPHDENLVKAEKDKLSKYLDLAHEVTAMWDVDSTIIVPIVVSVNGLIAKSLDQHLKRLSLDGWVKGQMQKAVILDTARIVRRFLTLQP

SEQ ID NO: 5158 - protein, 1212 aa, Agriopis aurantiaria
MITRSRTKQADTKSARLPSPPASSSSPSTSSGEDEYHTTREASGSSSDTSGPGTPPPPPPARRGRPPLPARLGLVGHSATRPAPATGGVVRRMRWSTIMNEDCMRAYYRATEGGTNLSAYCARMLPLFQALQPTITVSAQRLSDQVRAIHRCKLLDDSVLDRLRQEELRARPIPVSTRDPPVASSAPTLASVPASVVTLAALADPVVDEGDLASGVSDQVREQLRGALEDAISQYRFTPDSRPRLPRLSTHRRNLALMGALNALLAPYLRASEDLVDTHSILYCGAIAACRVARVKFPDTNRAPRTAGGVPAWQVRIERRISTFRTLIAKLVCFRRGNNRPRVMRFVTQAFAGTDIRPQHYLANVTERIDYLKQKVYAWANRIRRYRERVDRYWQNRLFQSDQRKVYRGWEETDQRVSDGQLPDASAMINFWRGIWSMPVEHTEGDWMRVVERECESIEPMGSILIDSLDVSCAIRTAQNWKSPGPDGLHNFWIKWIRCSHDRLATQFQEALELGSLPSFMTTGVTFLLHKSGSTTEAKNYRPITCLPTIYKLLTSILRNKINAHIVANNVLAHAQNGCRVGSRGTKELLLIDTAISQQVRRNKGALSAAWIDYKKAYDSVPHSWLERVLELYKIDTTLKSFLGACMRQWTTVLRQPGGGDGAFGPQDLLRIERGIFQGDSFSPLWFCLALNPLSTLLRDSGLGYRLRRDGQVISHLLYMDDLKLFTPKRQDLVELLKITEVFSSAIRMEFGVDKCAVMHVQRGKVVNSPNLQLSEVMTLRSLSDAETYKYLGMSESLGISVENIKKSVKERFFCRLTKVLNSLLSGGNKVRAFNGWVMPLLIYSFGILRWTQTELDALDRRVRQLLTSHRMLHPRSSVMRLYIPRKWGGRGFLNAKNLHNREVCSLRDFFRNSESGMHRDVVAVDRGLTVLSLANENWRKPSVLSIEDRRDVWKGKELHGRFYRALTGPDVDLLASVNWLRFGDLFGETEGFACAIADEVIKTNNYRKYIMKDGTVDICRACHRPGESLRHIISGCSHLANGEYLHRHNLVARIIHQQLALRYSLVESEVPYYKYAPAPVLENGRALLYWDRSIITDRTIVANKPDIVLVDRSQRRAVLVDITIPHDENLVKAEKDKLSKYLDLAHEVTAMWDVDSTIIVPIVVSVNGLIAKSLDQHLKRLSLDGWVKGQMQKAVILDTARIVRRFLTLQP

SEQ ID NO: 5159 - protein, 931 aa, Hedya salicella
MYCGAIAACRVARVKFPDADRAPRTAGGVPAWQVRIERRISTFRTLIAKLICFRGGNNRPRVMRYVAQAFAGTDVSSCDYMACVTDRIDFLKQKVYAWASRIRRYRERVDRFQQNRLFQSDQRKAYRKWEGTDQRVTDGRLPDPTAMSNFWRSIWSVPVEHTEGEWMNVVERECEPIEAMGAVTISPDDVSCAARTTQNWKSPGPDGLHNFWVKWFRCPHERLATQFQQALELGSLPSFLTTGVTFLLYKSGSTTEAKNYRPITCLPTLYKLLTSILRAKINTHIVANNVKAFSQNGCRVGSRGTKELLLIDTTICQQVRRSRGSLSAAWIDYKKAYDSVPHSWLERILELYKVDTALGSFLGACVRQWTTVLCQPGGRDARPAPQDFIRIKRGIFQGDSLSPLWFCLALNPLSTLLKDSGLGCRLRRGGEIISHLMYMDDLKLFAPKQPELVELLKVTDTFSSAIKMEFGVDKCAVMHVQRGKVVNSTNSELSETMSLRSLSETETYKYLGMSQALSIADGDIRQAVKERFFCRLTKVLNSLLSGGNKARAFNAWVMPLLTYSFGILRWTQTELDALDRRVRMLLTTHRMLHPRSSVMRLYIPRKCGGRGFLNAKDLHNREVCSLREYFLNNECGIHRDVVAVDKGLTSLSLANENWRRPTVFSTVDRKDVWKNKELHGRFYKALTGPDVDLLASVNWLRFGDLFGETEGFSCAIADEVIMTNNYRRYTLKDGTVDICRACRRPGKSLRHIMSGCSHLANGEYLHRHNQVARIIHQQLAVKYDLVGSEVPYYKYVPMPVLENGRATLYWDRSILTDTTIVANKPDIVLVDRSKRRAMLVDITIPHDENLVKAEKDKLSKYLDLAHEVTAMWDVDSTIIVPIVVSVNGLIAKSLDEHLKRLSLDGWIKGQIQKAVILDTARIVRRFLSVQP

SEQ ID NO: 5160 - protein, 1016 aa, Hedya salicella
MPGAPRVDPDSDEGHCVSIVSTQANEQLRRTLEETIERYRFAPDSRPRLPRLPANKRNLALVGALNALLDPYLRASEDLADTHSIMYCGAIAACRVARVKFPDADRAPRTAGGVPAWQVRIERRISTFRTLIAKLICFRGGNNRPRVMRYVAQAFAGTDVSSCDYMACVTERIDFLKQKVYAWASRIRRYRERVDRFQQNRLFQSDQRKVYRKWEGTDQRVTDGRLPDPTAMSNFWRSIWSVPVEHTEGEWMNVVERECEPIEAMGAVTISPDDVSCAARTTQNWKSPGPDGLHNFWVKWFRCSHERLATQFQQALELGSLPSFLTTGVTFLLYKSGSTTEAKNYRPITCLPTLYKLLTSILRAKINTHIVANNVLAFSQNGCRVGSRGTKELLLIDTTICQQVRRSRGSLSAAWIDYKKAYDSVPHSWLERILELYKVDTALRSFLGACMRQWTTVLCQPGGRDARPAPQDFIRIKRGIFQGDSLSPLWFCLALNPLSTLLKDSGLGCRLRRGVEIISHLMYMDDLKLFAPKRPELVELLKVTDTFSSAIKMEFGVDKCAVMHVQRGKVVNSTNLELSETMSLRSLSETETYKYLGMSQALSIADGDIRQAVKERFFCRLTKVLNSLLSGGNKARAFNAWVMPLLTYSFGILRWTQTELDALDRRVRMLLTTHRMLHPRSSVMRLYIPRKCGGRGFLNAKDLHNREVCSLREYFLNNECGIHRDVVAVDKGLTPLSLANENWRRPTVLSTVDRKDVWKSKELHGRFYKALTGPDVDLLASVNWLRFGDLFGETEGFSCAIADEVIMTNNYRRYILKDGTVDICRACRRPGESLRHIMSGCSYLANGEYLHRHNQVARIIHQQLAVKYDLVGSEVPYYKYVPMPVLENGRATLYWDRSILTDRTIVANKPDIVLVDRSKRRAMLVDITIPHDENLVKAEKDKLSKYLDLAHEVTAMWDVDSTIIVPIVVSVNGLIAKSLDEHLKRLSLDGWIKGQIQKAVILDTARIVRRFLSVQP

SEQ ID NO: 5161 - protein, 1215 aa, Erannis defoliaria
MITRSQSRRNTAERNARPSSPPAPSSPSASSGDNVFLTPRESSVSSSNSDVSGPRTPAPPPPARRGRPPLPARLGPAGLPASRPALAAGGVVRRMRWSQTNNENCMRAYYGATEGGTNLSAYRVRMLPLFQALEPTVTVSAQRLSDQVRAIQRLNLLDQSLLDRLRLEAQSARPTPASTRDLDVASSAPTLALVPTSAATLVTSADPVVDEGDCTGMSVSTQVSEQLRRALEDAIGQYRFTPNSRPRLPRLPTHRRNLALMGALNALLAPYLRASEDLTDTHSILYCGAIAACRVARVKFPDTNRAPRPAGDVPAWQLRIERRISTFRTLIAKLICFSRGNNRPRVMRFVTQAFTGTGIRPQQYMANVTERIDYLKQKVYAWANRIRRYRERVDRYWQNRLFQSDQRKVYRNWEGNEQRVSDGQLPDASAMTNFWRGIWSVPVEHTEGDWMRVVERECESIEPMGSILIDPVDVSCAIRTAQNWKSPGPDGLHNFWIKWFRCSHDRLATQFQEALELGSLPSFMTTGVTFLLHKSGSTTEPKNYRPITCLPTIYKLLTSILSTKINTHIVANNVLAPAQNGCRVGSRGTKELLLIDMAISQQVRRNKGALSAAWIDYKKAYDSVPHSWLERILELYQIDATLKSFLGACMRQWTTVLRQPGGGNGSSDSQDLIRIERGIFQGDSLSPSWFCLALNPLSTLLKDSGLGYRLRRGGEVISHLLYMDDLKLFAPKHQDLLELLKTTQVFSSAISMEFGVDKCAVMRVQRGKVVNSPDLQLSEIMTLRSLSEAETYKYLGMSESLGISVVDIKKSVKERFFCRLTKVLNSLLSGGNKARAFNGWVMPLLIYSFGILRWTQTELDALDRRVRQLLTAHRMLHPRSSVMRLYIPRKWGGRGFLNAKNLHNREVCSLRDYFLNNECGMHRDVVTVDKGLTPLSLANENWRTPSVLSTDDRKEVWKSKELHGRFYRVLSGPDVDLLASVNWLRFGDLFGETEGYACAIADEVIKTNNYRKYIMKDGTVDICRACHRPGESLRHIISGCSHLANGEYLHRHNQVARIIHQQLALQYGLVESEVPYYKYAPAPVLENGRALLYWDRSIITDRTIVANKPDIVMVDRSQRRAVLVDVTIPHDENLVKAEKDKLSKYLDLAFEITAMWDVDSTIIVPIVVSANGLIAKSLDQYLKRLSLDGWVKGQIQKAVVLDTARIVRRFLTLQP

SEQ ID NO: 5162 - protein, 1215 aa, Erannis defoliaria
MITRSKSTQAGNDNNARPPPPPAPSSPSASSGDDEFHTPRESSASSSGSDVSGPRTPAPRPPARRGRPPLPARLGPAGQPASRPALAAGGVVRRMRWSQINNENCMRAYYGATEGGINLSAYRVRMLPLFQALEPTVTVSTQRLSDQVRAIQRLNLLDQSLLDRLRLEAHSARPTPASTRDSHVASSAPTLASVPTSAATLATPADPVVDEGDCTSMIVSSQVSEQLRRTLEDAIGQYRFALNSRPRLPRLPTHRRNLALMGALNALLAPYLRASEDLTDTHSILYCGAIAACRVARVKFPDTNRAPRPAGDVPAWQLRIERRISTFRTLIAKLICFSRGNNRPRVMRFVTQAFAGTGIRPQQYMANVTERIDYLKQKVYAWANRIRRYRERVDRYWQNRLFQSDQRKVYRNWEGNEQRVSDGQLPDASAMTNFWRGIWSVPVEHTEGDWMRVVERECESIEPMGSILIDPVDVSCAIRTAQNWKSPGPDGLHNFWIKWFRCSHDRLATQFQEALELGSLPSFMTTGVTFLLHKSGSTTEPKNYRPITCLPTIYKLLTSILSTKINAHIVANNVLAPAQNGCRVGSRGTKELLLIDMAISQQVRRNKGALSAAWIDYKKAYDSVPHSWLERILELYQIDTTLKSFLGACMRQWTTVLRQPGGGNGSSDSQDLIRIERGIFQGDSLSPSWFCLALNPLSTLLKDSGLGYRLRRGGEVISHLLYMDDLKLFAPKHQDLLELLKTTQVFSSAISMEFGVDKCAVMRVQRGKVVNSPDLQLSEIMTLRSLSEAETYKYLGMSESLGISVVDIKKSVKERFFCRLTKVLNSLLSGGNKARAFNGWVMPLLIYSFGILRWTQTELDALDRRVRQLLTAHRMLHPRSSVMRLYIPRKWGGRGFLNAKNLHNREVCSLRDYFLNNECGMHRDVVTVDKGLTPLSLANENWRTPSVLSTDDRKEVWKSKELHGRFYRVLSGPDVDLLASVNWLRFGDLFGETEGFACAIADEVIKTNNYRKYIMKDGTVDICRACHRPGESLRHIISGCSHLANGEYLHRHNQVARIIHQQLALQYGLVESEVPYYKYAPAPVLENGRALLYWDRSIITDRTIVANKPDIVMVDRSQRRAVLVDVTIPHDENLVKAEKDKLSKYLDLAFEITAMWDVDSTIIVPIVVSANGLIAKSLDQYLKRLSLDGWVKGQIQKAVVLDTARIVRRFLTLQP

SEQ ID NO: 5163 - protein, 1215 aa, Biston betularia
MWTRSRTAAASGLHDAHIPSPPAPSTPSASSGDEEFATPLATSASSSSSDVSGPRTPAPPPPARRGRPPLPARLGPAGQSASRSALAAGGVVRRMRWSQTNNENCMRAYYGATEGGINLSAYRARMLPLFQALEPTVAVSTQRLSDQVRAIQRLQLLDQSVLDRLRLEALPARPTPVSTRDSPVASSAPTLVSVPTSMVTLATPTDPVVDAGECTSMGVCSQVSEHLRRTLEDAICQYRFALDSRPRLPRLPTHRRNLALMGALNALLAPYLRASEDLTDTHSILYCGAIAACRVARVKFPDTNRAPRPAGNVPAWQLRIERRISTFRTLIAKLICFSRGNNRPRVMRFVTQAFAGTGIRPQHYLASVTERIDYLKQKVYAWANRIRRYRERADRYWQNRVFQSDQRKVYRDWEGTGQRVSDRQLPDTSVMTEFWRGIWSLPVEHTEGDWMRVVERECESIESMGSVLIDPVDVSCAIRTAQNWKSPGPDGLHNFWIKWIRCSHDRFATQFQEALELGSLPCFMTTGVTFLLHKTGSTTEAKNYRPITCLPTIYKLLTSILRTKINAHVVANNVLAPAQNGCRVGSRGTKELLLIDMTISQQVRRNKGALSTAWIDYKKAYDSVPHSWLERVLELYKIDTTLKSFLGACMRQWTTVLRQPGSGDGSSEPQDLIRIERGIFQGDSLSPLWFCLALNPLSTLLKESELGHRLRRGGEVISHLLYMDDLKLFAPKRPDLMELLKTTQVFSNAIKMEFGVDKCAVMHVQRGEVVNCPDLQLSETMTFRSLSEAETYKYLGMSESLGIAVVDIKRSVKERFFCRLTKVLNSLLSGGNKVRAFNGWVMPLLIYSFGILRWTQTELDALDRRVRQQLTTHRMLHPRSSVMRLYIPRKLGGRGFLSAKNLHNREVCSLRDYFRDNECGMHRDVVAVDKGLTPLSLANENWRKPSVLSTEDRKEVWKSKQLHGRFYRVLTGPDVDMLASVNWLRFGDLFGETEGFACAIADEVIKTNNYRKYIMKDGTVDICRACHRPGESLRHIISGCSHLANGEYLHRHNQVARIIHQQLALQYGLVESEVPYYKYAPAPVLENGRALLYWGRSIITDRTIVANKPDIVVVDRAQRRAVLVDITIPHDENLVKAEKDKLSKYLDLAHEITAMWDVDSTIIVPIVVSVNGLIAKSLDQHLKRLSLDGWVKGQLQKAVILDTARIVRRFLTLQP

SEQ ID NO: 5164 - protein, 1215 aa, Biston betularia
MWTRSRTAAASGLHDAHIPSPPAPSTPSASSGDEEFATPLATSASSSSSDVSGPRTPAPPPPARRGRPPLPARLGPAGQSASRSALAAGGVVRRMRWSQTNNENCMRAYYGATEGGINLSAYRVRMLPLFQALEPTVAVSTQRLSDQVRAIQRLQLLDQSVLDRLRLEALPARPTPVSTRDSPVASSAPTLVSVPTSMATLATPIDPVVDVGECASMGVCSQVSEHLRRTLEDAISQYRFAPDSRPRLPRLPTHRRNLALMGALNALLAPYLRASEDLTDTHSILYCGAIAACRVARVKFPDTNRAPRPAGGVPAWQLRIERRISTFRTLIAKLICFSRGNNRPRVMRFVTQAFAGTGIRPQHYLASVTERIDYLKQKVYAWANRIRRYRERADRYWQNRVFQSDQRKVYRDWEGTGQRVSDRQLPDTSVMTEFWRGIWSLPVEHTEGDWMRVVERECESIESMGSVLIDPVDVSCAIRTAQNWKSPGPDGLHNFWIKWIRCSHDRLATQFQEALELGSLPCFMTTGVTFLLHKTGSTTEAKNYRPITCLPTIYKLLTSILRTKINAHVVANNVLAPAQNGCRVGSRGTKELLLIDMTISQQVRRNKGALSTAWIDYKKAYDSVPHSWLERVLELYKIDTTLKSFLGACMRQWTTVLRQPGSGDGSSEPQDLIRIERGIFQGDSLSPLWFCLALNPLSTLLKESGLGHRLRRGGEVISHLLYMDDLKLFAPKRPDLMELLKTTQVFSNAIKMEFGVDKCAVMHVQLGEVVNCPDLQLSETMTFRSLSEAETYKYLGMSESLGIAVVDIKRSVKERFFCRLTKVLNSFLSGGNKVRAFNGWVMPLLIYSFGILRWTQTELDALDRRVRQQLTTHRMLHPRSSVMRLYIPRKLGGRGFLSAKNLHNREVCSLRDYFRDNECGMHRDVVAVDKGLTPLSLANENWRKPSVLSTEDRKEVWKSKQLHGRFYRVLTGPDVDMLASVNWLRFGDLFGETEGFACAIADEVIKTNNYRKYIMKDGTVDICRACHRPGESLRHIISGCSHLANGEYLHRHNQVARIIHQRLALQYGLVESEVPYYKYAPAPVLENGRALLYWDRSIITDRTIVANKPDIVVVDRAQRRAVLVDITIPHDENLVKAEKDKLSKYLDLAHEITAMWDVDSTIIVPIVVTVNGLIAKSLDQHLERLSLDGWVKGQLQKAVILDTARIVRRFLTLQP

SEQ ID NO: 5165 - protein, 1215 aa, Biston betularia
MWTRSRTAAASGLHDAHIPSPPAPSTPSASSGDEEFATPLATSASSSSSDVSGPRTPAPPPPARRGRPPLPARLGPAGQSASRSALAAGGVVRRMRWSQTNNENCMRAYYGATEGGINLSAYRVRMLPLFQALEPTVAVSTQRLSDQVRAIQRLQLLDQSVLDRLRLEALPARPTPVSTRDSPVASSAPTLVSVPTSMATLATPTDPVVDVGECTSMGVCSQVSEHLRRTLEDAICQYRFAPDSRPRLPRLPTHRRNLALMGALNALLAPYLRASEDLTDTHSILYCGAIAACRVARVKFPDTNRAPRPAGGVPAWQLRIERRISTFRTLIAKLICFSRGNNRPRVMRFVTQAFAGTGIRPQHYLASVTERIDYLKQKVYAWANRIRRYRERADRYWQNRVFQSDQRKVYRDWEGTGQRVSDRQLPDTSVMTEFWRGIWSLPVEHTEGDWMRVVERECESIESMGSVLIDPVDVSCAIRTAQNWKSPGPDGLHNFWIKWIRCSHDRLATQFQEALELGSLPCFMTTGVTFLLHKTGSTTEAKNYRPITCLPTIYKLLTSILRTKINAHVVANNVLAPAQNGCRVGSRGTKELLLIDMTISQQVRRNKGALSTAWIDYKKAYDSVPHSWLERVLELYKIDTTLKSFLGACMRQWTAVLRRPGSGDGSSEPQDLIRIERGIFQGDSLSPLWFCLALNPLSTLLKESGLGHRLRRGGEVISHLLYMDDLKLFAPKRPDLMELLKTTQVFSNAIKMEFGVDKCAVMHVQRGEVVNCPDLQLSETMTFRSLSEAETYKYLGMSESLGIAVVDIKRSVKERFFCRLTKVLNSFLSGGNKVRAFNGWVMPLLIYSFGILRWTQTELDALDRRVRQQLTTHRMLHPRSSVMRLYIPRKLGGRGFLSTKNLHNREVCSLRDYFRDNECGMHRDVVAVDKGLTPLSLANENWRKPSVLSTEDRKEVWKSKQLHGRFYRVLTGPDVDMLASVNWLRFGDLFGETEGFACAIADEVIKTNNYRKYIMKDGTVDICRACHRPGESLRHIISGCSHLANGEYLHRHNQVARIIHQQLALQYGLVESEVPYYKYAPAPVLENGRALLYWDRSIITDRTIVANKPDIVVVDRAQRRAVLVDITIPHDENLVKAEKDKLSKYLDLAHEITAMWDVDSTIIVPIVVTVNGLIAKSLDQHLKRLSLDGWVKGQLQKAVILDTARIVRRFLTLQP

SEQ ID NO: 5166 - protein, 1215 aa, Biston betularia
MWTRSRTAAASGLHDAHIPSPPAPSTPSASSGDEEFATPLATSASSSSSDVSGPRTPAPPPPARRGRPPLPARLGPAGQSASRSALAAGGVVRRMRWSQTNNENCMRAYYGATEGGINLSAYRVRMLPLFQALEPTVAVSTQRLSDQVRAIQRLQLLDQSVLDRLRLEALPARPTPVSTRDSPVASSAPTLVSVPTSMATLATPTDPVVDVGECTSMGVCSQVSEHLRRTLEDAICQYRFAPNSRPRLPRLPTHRRNLALMGALNALLAPYLRASEDLTDTHSILYCGAIAACRVARVKFPDTNRAPRPAGGVPAWQLRIERRISTFRTLIAKLICFSRGNNRPRVMRFVTQAFAGTGIRPQHYLASVTERIDYLKQKVYAWANRIRRYRERADRYWQNRVFQSDQRKVYRDWEGTGQRVSDRQLPDTSVMTEFWRGIWSLPVEHTEGDWMRVVERECESIESMGSVLIDPVDVSCAIRTAQNWKSPGPDGLHNFWIKWIRCSHDRLATQFQEALELGSLPCFMTTGVTFLLHKTGSTTEAKNYRPITCLPTIYKLLTSILRTKINAHVVANNVLAPAQNGCRVGSRGTKELLLIDMTISQQVRRNKGALSTAWIDYKKAYDSVPHSWLEKVLELYKIDTTLKSFLGACMRQWTTVLRQPGSGDGSSEPQDLIRIERGIFQGDSLSPLWFCLALNPLSTLLKESGLGHRLRRGGEVISHLLYMDDLKLFAPKRPDLMELLKTTQVFSNAIKMEFGVDKCAVMHVQRGEVVNCPDLQLSETMTFRSLSEAETYKYLGMSESLGIAVVDIKRSVKERFFCRLTKVLNSFLSGGNKVRAFNGWVMPLLIYSFGILRWTQTELDALDRRVRQQLTTHRMLHPRSSVMRLYIPRKLGGRGFLSAKNLHNREVCSLRDYFRDNECGMHRDVVAVDKGLTPLSLANENWRKPSVLSTEDRKEVWKSKQLHGRFYRVLTGPDVDMLASVNWLRFGDLFGETEGFACAIADEVIKTNNYRKYIMKDGTVDICRACHRPGESLRHIISGCSHLANGEYLHRHNQVARIIHQQLALQYGLVESEVPYYKYAPAPVLENGRALLYWDRSIITDRTIVANKPDIVVVDRAQRRAVLVDITIPHDENLVKAEKDKLSKYLDLAHEITAMWDVDSTIIVPIVVTVNGLIAKSLDQHLKRLSLDGWVKGQLQKAVILDTARIVRRFLTLQP

SEQ ID NO: 5167 - protein, 1207 aa, Apotomis turbidana
MITRSRQKKAEQTNARPPPPPASSSSSPSSSGDEFATAADTSESSDERGPPPPPPQPPARRGRPQLPARLGPTGQPAPTTAPATGGVVRRMRWTRVMNENCMRAYYGATEGGINLSAYRDRMLPLFQVFDPTIAVSAQRLSDQVRFIQRRKLLDDATLDRLRLEVLAARAAFVPARDPPATSPVPAPAPNLVPGVPLTDPEADVEDYASSVSTQANEQLRRALEEAIGRYRSAPEPRPRLPRLPIHKRNLALMGALDALLDPYLRASEDLADTHSIMYCGAIAACRVARVRFPDTDRAPRTARGVPAWQVRIERRISSFRTLIAKLICFRGGNNRPRVMRYVTQAFAGTGTRPCDYMACVTERIDYLKQKVYAWASRIRRYRERVDRFQQNRLFQSDQRKVYRKWEGADQCVSDGQLPDPTAMINFWRSIWSVPVEHTEGEWMNVVRRECEPIEAMGAVTISPDDVRCAARTIQNWKSPGPDGLHNFWIKWFRSSHERLATQFQDALELGSLPSFMTTGVTFLLHKSGSTTEAKNYRPITCLPTLYKLLTSILRTKINTHIVANNVLAFSQNGCRVGSRGTKELLLIDTTICQQVRRNRGSLSAAWIDYKKAYDSVPHSWLERILELYKIDTTLRSLLGACMRQWTTVLRQPGGGDGPPGPQDLIRIERGIFQGDSLSPLWFCLALNPLSTLLKDSGLGCRLRRGGEVISHLLYMDDLKLYAPKRQDLVELLEVTEAFSSAIKMEFGVDKCAVMHVQRGKVVNSANLQLSETMSLRSISEVETYKYLGMSQSLGIADGDIRQALKERFFCRLTKVLNSLLSGGNKARAFNAWVMPLLTYSFGILRWTQTELDALDTRVRQLLTTHRMRHPRSSVMRMYIPRKCGGRGFLNAKDLHNREVCSLREYFLNNECGIHRDVVAVDKGLTPLSLANENWRRPKVLSTDDRRAVWKSKELHGRFYKALTGPDVDLLASVNWLRFGDLFGETEGFVCAIADEVMMTNNYRRYILKDGTVDICRACRRPGESLRHIISGCSHLANGEYLHRHNQVARIIHQQLALRYGLVGSEVPYYKYAPMPVLENGRATLYWDRSIITDRTIVANKPDIVLVDRSKRQAVLVDITIPHDENLVKAEKDKLSKYLDLAHEVTAMWDVDSTSIVPIVVSANGLIAKSLDKHLKRLSLDGWIKGQIQKAVLLDTARIVRRFLSLQP

SEQ ID NO: 5168 - protein, 955 aa, Notocelia uddmanniana
MSALNDLLDPYLRASDDLIDTHSIMYCGAIAACRVARVKFPDADRAPLTVGSIPAWQVRIERRVNTFRTLIAKLICFRGGNSRPRVMRFVNQAFAGSGVRPRDYLACVTERIDFLKQKVHAWASRIRHYRERVDRYQQNRLFQSDQRKVYRKWDGTDHHVCDGQRPDATAMVSFWRSIWSVPVEHTEGAWMGVVKRECESIEPMGSVTISPEDVSCAIRTAPNWKSPGPDGLHNFWLKWFRCSHACLAAQFQQALELGSLPRPLTTGVTSLLYKSGSTTEAKNYRPITCLPTLYKLLTSILRAKINTHIVANNILAPAQNGCRVGSRGTKELLLIDMTICQRVRRNKGTLSAAWIDYKKAYDSVPHSWLRRVLELYKVDAALRSFLAACMEQWTTVLRQSGGGEGLSGAQDFIRIERGIFQGDSLSPLWFCLALNPLSTLLKDSGLGCQLRRGGEVISHLLYMDDLKLFAPNRQDLLELLKTTEVFSSAIKMEFGVDKCAVMHVQRGKVVNSTNLQLSETMSLRSLSEAETYKYLGMSQSLGIEGEGIKQAVKERFFCRLTKVLNSFLSGGNKVRAFNAWVMPLLTYSFGILRWTQTELDALDRRVRVLLTAHRMLHPRSSVMRLYIPRKCGGRGFLNAKDLHNREVCSLRDYFLNSECGMHRDVVAVDASFTPLSMANENWRRFKVLSTEDRRAEWKSRELHGRFYKALTGPDVDLLASVNWLRFGDLFGETEGFVCAIADEVIMTNNYRKYILKDGTVDICRACRRPGESLRHIISGCGHLANGEYLHRHNLVARIIHQQLALSYGLVNFEVPYYKYLPAPVLENGRATLYWDRSIITDRTIVANKPNIVLIDRSKRQAVLVDITIPHDENLVKAEKDKVSKYLDLAHEVTAMWDVDSTIIVPIVVSANGLIAKSLDQHLKRLSLDGWVKGQIQKAVLLDTARIVRRFLSLSP

SEQ ID NO: 5169 - protein, 1015 aa, Notocelia uddmanniana
MVLINMVERSNMDLLRQCGWYYENWNVQNAHRMLKNTSIGTFLVRNSNHPNYEFSLSVQTERGPKSFRIWSSYSKTLYRFEGAREVPRNIVELVQYYVKSPCGMKWLQRHGIEFRMPLRVEPPKLLHLSKLVINRSIGHDNNNNNNSRPRVMRFVNQAFAGTGIRPRDYMTCVTERIDFLKQKVYAWASRIRRYRERLDRYQQNRLFQSDQRKVYRKWDGTDHRVSDGQRPDATAIVNFWRSIWSVPVEHNEGAWMGVVERECESIEPMGSVTISPADERCAIRTAPNWKSPGPDGLHNFWLKWFRCSHARLAAQFQQALELGSLPPPLTTGVTSLLYKSGSATEAKNYRPITCLPTLYKILTSILRAKINTHIVANNILAPAQNGCRVGSRGTKELLLIDMTICQRVRRNRGTLSTAWIDYKKAYDSVPHSWLRRILELYKVDAVLRSFLVACMGQWTTVLRQPGGGEGPSGPQDSIRIERGIFQGDSLSPLWFCLALNPLSTLLKDSGLGCQLRREGEVISHLLYMDDLKLFAPNKHDLLELLKTTEAFSSAIKMEFGVDKCAAMHVQRGKVVNSTNLQISETMDLRSLSEAETYKYLGMSQSLGIEGGDIKRAVKERFFCRLTKVLNSFLSGGNRVRAFNAWVMPLLTYSFGILRWTQTGLDFLDRRVRVLLTAHRMLHPRSSVMRLYIPRKFGGRGFLNAKDLHNREVCSLRDYFLNSECGMHRDVVAVDASFTPLSMANENWRRLKVLSTEDRRAVWKSKELHGRFYKALTGPDVDLLASVNWLRFGDLFAETEGFVCAIADEVIMTNNYRKYILKDGTVDICRACRRPGESLRHIISGCGHLANGEYLHRHNLVAKIIHQQLALLYGLVDFEVPYYKYTPAPVLENGRATLYWDRSVITDRTIIANKPDIVLTDRLKRQAVLVDITIPHDENLVKAEKDKVSKYLDLAHEVTAMWDVDSTIIVPIVVSAKSLDQHLKRLSLDGWVKGQMQKAVLLDTARIVRRFLSLSP

SEQ ID NO: 5170 - protein, 1206 aa, Notocelia uddmanniana
MITRTRSRAAQRARPPSPPAPSSSSPSSSGDEFATAPDTSESSCDERGPPSPPPRPPARRGRPPLPARLGPVGHSALPTAPAAGGVVRRMRWTQEMNENCMRAYFGATEGETNLSAYRVRMLPLFQALEPTITVTAQRLSDQVRVIQRLKRLDDATLDRLRLEALSARTASALARDPPATSPAPVPTPDMAPGVPRVDPSVDEDCANQTVSTQANEQLRRALEEAITRYRSTPNSRPRLPRLPVNRRNLALMGALNDLLDPYLRASEDLIDTHSILYCGAIAACRVARVKFPDADRAPRTAGGVPAWQVRIERRINTFRTLIAKLICFRGGNDRPRVMRFVNQAFAGTGVRPRDYVTCVTERIDFLKQKVYAWASRIRRYRERVDRYQQNRLFQSDQRKVYRKWEGTDHRVCDGQRPDATAMGNFWRSIWSVPVEHTEGAWIGVVERECESIEPMGSVTISPEDISCAIRTAPNWKSPGPDGLHNFWLKWFRCSHERLATQFQQALELGSLPHLLTTGVTSLLYKSGSTTEAKNYRPITCLPTLYKLLTSILRAKINTHIVANNILAPAQNGCRAGSRGTKELLLIDMTICQRVRRSRGALSAAWIDYKKAYDSVPHSWLRRILELYKVDAALRSFLSACMGQWTTVLRQPGGGDGSSGPQDSIRIERGIFQGDSLSPLWFCLALNPLSTLLKDSGLGCQLRRGGEVISHLLYMDDLKLFAPNRQDLLELLKTTEVFSSAIKMEFGVDKCAVMHVQRGKVVNSTNLQLSETMSLRSLSEAETYKYLGMSQSLGIEGEGIKQAMKERFFCRLTKVLNSFLSGGNKVRAFNAWVMPLLTYSFGILRWTQTELDALDRRVRVLLTAHRMLHPRSSVMRLYIPRKCGGRGFLNAKDLHNREVCSLRNYFLNSECGMHRDVVAVDASFTPLSMANENWRRFKVLSTEDRKAEWKSRELHGRFYKALTGPDVDLLASVNWLRFGDLFGETEGFVCAIADEVIMTNNYRRYILKDGTADICRACRRPGESLRHIISGCGHLANGEYLHRHNLVARIIHQQLALSYGLVNFEVPYYKYLPAPVLENGRATLYWDRSIITDRTIVANKPDIVLIDRSKRQAVLVDITIPHDENLVKAEKDKVSKYLDLAYEVTAMWDVDSTIIVPIVVSANGLIAKSLDQHLKRLSLDGWVKGQIQKAVLLDTARIVRRFLSLSP

SEQ ID NO: 5171 - protein, 955 aa, Notocelia uddmanniana
MGALNDLLVPYLGASEDLIDTHSIMYCGAIAACRVARVKFPDADRAPRTAGSVPTWQVRIERRVDTYRTLIAKLICFRGGNSRPRVMRFVNQAFAGTGIRPRDYMTCVTERIDFLKQKVYAWASRIRRYRERLDRYQQNRLFQSDQRKVYRKWDGTDHRVSDGQRPDATAMVNFWRSIWSVPVEHNEGAWMGVVERECESIEPMGSVTISPADVSCAIRTAPNWKSPGPDGLHNFWLKWFRCSHARLAAQFQQALELGSLPPPLTTGVTSLLYKSGSTTEAKNYRPITCLPTLYKLLTSILRAKINTHIVANNILAPAQNGCRVGSRGTKELLLIDMTICQRVRRNRGTLSTAWIDYKKAYDSVPHSWLRRILELYKVDAVLRSFLVACMGQWTTVLRQPGGGEGPSGPQDSIRIERGIFQGDSLSPLWFCLALNPLSTLLKDSGLGCQLRREGEVISHLLYMDDLKLFAPNKHDLLELLKTTEAFSSAIKMEFGVDKCAAMHVQRGKVVNSTNLQISETMDLKSLSEAETYKYLGMSQSLGIEGGDIKRAVKERFFCRLTKVLNSFLSGGNRVRAFNAWVMPLLTYSFGILRWTQTELDFLDRRVRVLLTAHRMLHPRSSVMRLYIPRKFGGRGFLNAKDLHNREVCSLRDYFLNSECGMHRDVVAVDASFTPLSMANENWRRLKVLSTEDRRAVWKSKELHGRFYKALTGPDVDLLASVNWLRFGDLFAETEGFVCAIADEVIMTNNYRRYILKDGTVDICRACRRPGESLRHIISGCGHLANGEYLHRHNLVAKIIHQQLALLYGLVDFEVPYYKYTPAPVLENGRATLYWDRSVITDRTIIANKPDIVLTDRLKRQAVLVDITIPHDENLVKAEKDKVSKYLDLAHEVTAMWDVDSTIIVPIVVSANGLIAKSLDQHLKRLSLDGWVKGQMQKAVLLDTARIVRRFLSLSP

SEQ ID NO: 5172 - protein, 1017 aa, Notocelia uddmanniana
MAPGVPRVDPSVDEDCANQTVSTQTNEQLRRALEEAITRYRSTPNSRPRLPRLPVNRRNLALMGALNDLLDPYLRTSEDLIDTHSILYCGAIAACRVARVKFPDADRAPRTAGGVPAWQVRIERRINTFRTLIAKLICFRGGNDRPRVMRFVNQAFAGTGVRPRDYVTCVTERIDFLKQKVYAWASRIRRYRERVDRYQQNRLFQSDQRKVYRKWEGTDHRVCDGQRPDATAMVNFWRSIWSVPVEHTEGAWIGVVERECESIEPMGSVTISPEDISCAIRTAPNWKSPGPDGLHNFWLKWFRCSHERLATQFQQALELGSLPHLLTTGVTSLLYKSGSTTEAKNYRPITCLPTLYKLLTSILRAKINTHIVANNILAPAQNGCRVGSRGTKELLLIDMTICQRVRRSRGALSAAWIDYKKAYDSVPHSWLRRILELYKVDAALRSFLSACMGQWTTVLRQPGGGDGSSGPQDSIRIQRGIFQGDSLSPLWFCLALNPLSTLLKDSGLGCQLRRGGEVISHLLYMDDLKLFAPNRQDLLELLKTTEVFSSAIKMEFGVDKCAVMHVQRGKVVNSTNLQLSETMSLRSLSEAETYKYLGMSQSLGIEGEGIKQAVKERFFCRLTKVLNSFLSGGNKVRAFNAWIMPLLTYSFGILRWTQTELDALDRRVRVLLTTHRMLHPRSSVMRLYIPRKCGGRGFLNAKDLHNREVCSLRDYFLNSECGMHRDVVAVDASFTPLSMANENWRRFKVLSTEDRKAEWKSRELHGRFYKALTGPDVDLLASVNWLRFGDLFGETEGFVCAIADEVIMTNNYRKYILKDGTVDICRACRRPGESLRHIISGCGHLANGEYLHRHNLVARIIHQQLALSYGLVNFEVPYYKYLPAPVLENGRATLYWDRSIITDRTIVANKPDIVLIDRSKRQAVLVDITIPHDENLVKAEKDKVSKYLDLAHEVTAMWDVDSTIIVPIVVSANGLIAKSLDQHLKRLSLDGWVKGQIQKAVLLDTARIVRRFLSLSP

SEQ ID NO: 5173 - protein, 1025 aa, Notocelia uddmanniana
MAPGVPRVDPSVDEDCANQTVSTQTNEQLRRALEEAITRYRSPPNSRPRLPRLPVNRRNLALMVNTGLGDRLGLNDLLDPYLRASEDLIDTHSILYCGAIAACRVARVKFPDADRAPRTAGGVPAWQVRIERRINTFRTLIAKLICFRGGNDRPRVMRFVNQAFAGTGVRPRDYVTCVTERIDFLKQKVYAWASRIRRYRERVDRYQQNRLFQSDQRKVYRKWEGTDHRVCDGQRPDATAMGNFWRSIWSVPVEHTEGAWIGVVERECESIEPMGSVTISPEDISCAIRTAPNWKSPGPDGLHSFWLKWFRCSHERLATQFQQALELGSLPHLLTTGVTSLLYKSGSTTEAKNYRPITCLPTLYKLLTSILRAKINTHIVANNILAPAQNGCRVGSRGTKELLLIDMTICQRVRRSRGALSAAWIDYKKAYDSVPHSWLRRILELYKVDAALRSFLSACMGQWTTVLRQPGGGDGSSGPQDSIRIERGIFQGDSLSPLWFCLALNPLSTLLKDSGLGCQLRRGGEVISHLLYMDDLKLFAPNRQDLLELLKTTEVFSSAIKMEFGVDKCAVMHVQRGKVVNSTNLQLSETMSLRSLSEAETYKYLSMSQSLGIEGEGIKQAVKERFFCRLTKVLNSFLSGGNKVRAFNAWVMPLLTYSFGILRWTQTELDALDRRVRVLLTAHRMLHPRSSVMRLYIPRKCGGRGFLNAKDLHNREVCSLRDYFLNSECGMHRDVVAVDASFTPLSMANENWRRFKVLSTEDRKAEWKSRELHGRFYKALTGPDVDLLASVNWLRFGDLFGETEGFVCAIADEVIMTNNYRKYILKDGTVDICRACRRPGESLRHIISGCGHLANGEYLHRHNLVARIIHQQLALSYGLVNFEVPYYKYLPAPVLENGRATLYWDRSIITDRTIVANKPDIVLIDRSKRQAVLVDITIPHDENLVKAEKDKVSKYLDLAHEVTTMWDVDSTIIVPIVVSANGLIAKSLDQHLKRLSLDGWVKGQIQKAVLLDTARIVRRFLSLSP

SEQ ID NO: 5174 - protein, 1210 aa, Boloria selene
MITRSQARKTAVHTSNARPTPPPVSSSSSPSSSGDEFATAPDTSESSDDERGTPPPPPRTPARRGRPPLPARLGPTGQTAPTMAPATGGVVRRMRWTQVMNENCMRAYYGATEGGINLSAYRDRMLPLFLAFDPTIAVSAQRLSDQVRFIQRRKLLDDATLDRLRLEVLAARAASAPALGPPATSPAPVPTPNLVPGVPLADHGAGEEECASGVNTQANEQLRRALEEAIGRYRFTPESRPRIPRLPMHKRNSALMGAMDALLDPYLRASEDLTDTHSIMYCGAIAVCRAARVRFPDTDRAPRTTGGVPAWQIRIERRINSFRTLIAKLICFRDGNSRPRVMRYVTQAFAGTGTRPCDYMACVTERIDYLKQKVCAWASRIRRYRVRVDRFQQNRLFQSDQRKVYRRWERTNQCVGDGRLPDPTAMTNFWRSIWSVPVEHTEGEWMNVVGRECESIETMGAVTISPDDVGCAARTTQNWKSPGPDGLHNFWIKWFRSSHERLAAQFQDALELGSLPSFMTTGVTFLLHKSGSTTEAKNYRPITCLPTLYKLLMSILRTKINTHIIANNVLAFSQNGCRVGSRGTKELLLIDTTICQQVRRNRGSLSAAWIDYKKAYDSVPHSWLERVLVLYKIDTTLRSLLGACMRRWTTVLYQPGGGDGLPGPQDLIRIKRGIFQGDSLSPLWFCLALNPLSTLLKDSGLGYRLRRGGEVISHLLYMDDLKLYASKRQDLVELLEVTETFSSAIKMEFGVDKCAIMHVQRGKVVNSANLQLSDIISLRSISEVETYKYLGMSQSLGIADGDIRQALRQRFFCRLTKVLNSLLSGGNKARAFNAWVMPLLTYSFGILRWTQTELDALDTRVRQLLTAHRMRHPRSSVMRLYIPCKCGGRGFLNAKDLHNREVCSLREYFLNNECGIHRDVVAVDKGLTSLSLANENWRRPKVLSTDDRRTVWKCKELHGRFYKALTGPDVDMLASVNWLRFGDLFGETEGFVCAIADEVMMTNNYRKYILRDGTVDICRACRRPGESLRHIISGCSHLANGEYLHRHNQVARIIHQQLALRYGLVGSEVPYYKYAPLPVLENGRATLYWDRSIITDRTIVANKPDIVLVDRSKRQAVLVDIAIPHDENLVKAEKDKLSKYLDLAHEVTAMWDVDSTIIVPLVVSANGLIAKSLDKHLKRLSLDGWIKSQMQKAVLLDTARIVRRFLSLQP

SEQ ID NO: 5175 - protein, 1208 aa, Crocallis elinguaria
MITRSRTKKAGTASARKTPPPVSSSPSSSSGVEYGTPLDTSASSDEDGPPSPPPPPPPARRGRPPLPARLGPAGHSVPRTAPATGGIVRRMRWTSDMNENCMRAYYGATEGGTNMSAYRDRMLPLFQTLEPSVAVSTQRLSDQVRAIQRLKLLDESALDRLRLEALPIRATSASARDLSVAPPVPAPLPAPSSVATRIDPVVDEDDCANISVSTQVNEQLRRALEDAILEYQYTPDSRPRLPRLPTNRRNLALMGALNVLLAPYLRASENLFDTHSIMYCGAIAVCRVARVKFPDADRAPRPAGSAPAWQVRIERRINTFRTLIAKLICFSRGNNRPRVMRFVNQAFAGTGIRPQNYMAGVTERIDFLKQKIYAWVNRIRRYRERVDRYHQNRLFESDQRKVYRNWEGTDQRVSDGQLPDTNAMINFWRGIWSVPVEHTEGDWMRTVEQSCESIETMGSVTIDPIDVSCAIRTAQNWKSPGPDGLHNFWIKWIRCSHECLAVQFQEALELGSLPRFLTTGVTSLLHKSGSTTEAKNYRPITCLPTLYKLLTSILRAKINSHVVANNILAPAQNGCRVGSRGTKELLLIDTAICQQVRRNKGALSTAWIDYKKAYDSVPHSWLERILELYKIDTTLRTFLSTCMRQWTTVLRQPGSGNSPSGPENFIKIERGIFQGDSLSPLWFCLALNPLSTLLRDSRLGCKLRREGEIISHLLYMDDLKLLAPKSPDLMKLLKITEIFSSAIKMEFGVDKCAVMHVQRGKVVNSDNLQLSETMTLRSLSEAETYRYLGMSQSLGITVGDIKQSVKERFFCRLTKVLNSLLSGGNKARAFNGWVMPLLIYSFGILKWTQTELDSLDRRVRQLLTYHRMLHPRSSVMRLYIPRKWGGRGFLNAKTLHNREVCSLREYFLNNECGMHRDVVAVDRNLTPLSLANENWHKPVVMTTEDRKEVWKGKELHGRFYRALTGSDVDLLASVNWLRFGDLFGETEGFVCAIMDEVIKTNNYRKYIMKDGTVDICRACRRPGESLRHIISGCSHLANGEYLHRHNLVARIIHQQIALQYGLVESEVPYYKYAPVPVLENGCALLYWDRSIITDRTIVANKPDIVLVDRSQRRAVLVDITVPHDENLVKAEKDKLSKYLDLAHEVTAMWNVDSTIIVPIVVSANGLVAKSLDQHLKRLSLDGWIKGRMQKAVLLDTARIVRRFLTLQP

SEQ ID NO: 5176 - protein, 1112 aa, Crocallis elinguaria
MNENCMRAYYGATEGGTNMSAYRDRMLPLFQTLEPSVAVSTQRLSDQVRAIQRLKLLDESVLDRLRLEALPIRATSASARDLSVAPPVPAPLPAPSSVATRIDPVVDEDDCANISVSTQVNEQLRRALEDAILEYQYTPDSRPRLPRLPTNRRNLALMGALNVLLAPYLRASENLFDTHSIMYCGAIAVCRVARVKFPDADRAPRPAGSAPAWQVRIERRINTFRTLIAKLICFSRGNNRPRVMRFVNQAFAGTGIRPQNYMAGVTERIDFLKQKIYAWVNRIRRYRERVDRYHQNRLFESDQRKVYRNWEGTDQRVSDGQLPDTNAMINFWRGIWSVPVEHTEGDWMRTVEQSCESIETMGSVTIDPIDVSCAIRTAQNWKSPGPDGLHNFWIKWIRCSHECLAVQFQEALELGSLPCFLTTGVTSLLHKSGSTTEAKNYRPITCLPTLYKLLTSILRAKINSHVVANNILAPAQNGCRVGSRGTKELLLIDTAICQQVRRNKGALSTAWIDYKKAYDSVPHSWLERILELYKIDTTLRTFLSTCMRQWTTVLRQPGSGNSPSGPENFIKIERGIFQGDSLSPLWFCLALNPLSTLLRDSRLGCKLRREGEIISHLLYMDDLKLLAPKSPDLMKLLKITEIFSSAIKMEFGVDKCAVMHVQRGKVVNSDNLQLSETMTLRSLSEAETYRYLGMSQSLGITVGDIKQSVKERFFCRLTKVLNSLLSGGNKARAFNGWVMPLLIYSFGILKWTQTELDSLDRRVRQLLTYHRMLHPRSSVMRLYIPRKWGGRGFLNAKTLHNREVCSLREYFLNNECGMHRDVVAVDRNLTPLSLANENWHKPVVMTTEDRKEVWKGKELHGRFYRALTGSDVDLLASVNWLRFGDLFGETEGFVCAIMDEVIKTNNYRKYIMKDGTVDICRACRRPGESLRHIISGCSHLANGEYLHRHNLVARIIHQQIALQYGLVESEVPYYKYAPAPVLENGRALLYWDRSIITDRTIVANKPDIVLVDRSQRRAVLVDITVPHDENLVKAEKDKLSKYLDLAHEVTAMWNVDSTIIVPIVVSANGLVAKSLDQHLKRLSLDGWIKGRMQKAVLLDTARIVRRFLTLQP

SEQ ID NO: 5177 - protein, 869 aa, Peribatodes rhomboidaria
MRFVTQAFAGTDIRPQYYLANVTERIDYLKQKVYAWANRIRRYRERVDRYWQNRLFQSDQRKVYRGWEGTEQCAIDGHRPDASAMIDFWRGIWSVPVEHTEGEWMRIVERECESIESMESILIDSVDVSCAVRTAQNWKSPGPDGLHNFWIKWIRCSHDRLAIQFQEALELCSLPSFMTTGVTFLLHKSGSTTDPKNYRPITCLPTIYKLLTSILRNKINTHIVANNVLAPAQNGCRVGSRGTKELLLIDMAISQQVRRSKGALSVAWIDYKKAYDSVPHSWLERILELYKIDITLKSFLSACMRQWTTVLRQPGGGEVSADPQDLIRIERGIFQGDSLSPLWFCLALNPLSTLLKDLGLGHRLRRGGEVISHLLYMDDLKLFAPKRQDLMELLKTTEVFSSAIKMEFGVDKCAVMHVQRGKVVNSPNLQLSETMTFRSLSEVETYKYLGMSESLGISVVDIKKSIKERFFCRLTKVLNSLLSGGNKMRAFNGWMMPLLIYSFGILRWTQTELDALDRRVRQLLTTHRMLHPRSSVMRLYIPRKWGGRGMLNAKNLHNREVYRLRSFFRNNDCGMHCDVVAVDKGLTPLSLANENWRQPSVLSTEDRKNVWKGKELHGRFYRALTGPDVDLLASVNWLRFGDLFGETEGFACAIADEVIKTNNYRKYILKDGTVDICRACHRPGESLRHIISGCSHLANGEYLHRHNQVARIIHQQLALQYGLVESEVPYYKYAPASVLENGRALLYWDRSIITDRTIVANKPDIVLVDRSQRQAVLVDITIPHDENLVKAEKDKLSKYLDLAHEVTAMWDVDSTIIVPIVVTVNGLIAKSLDQHLKRLSLDGWIKGQIQKAVILDTCRIVRRFLTLQP

SEQ ID NO: 5178 - protein, 1209 aa, Peribatodes rhomboidaria
MLTRLKKKQLAAEASTRPPPPPASSSGSPSSEEDEYATPLDTTDEEAAPTPAPPPPPARRGRPPLPARLGPAGRSAPPTAPASGGVVCRMRWTQVMNENCMRAYYGATEGGTNLTAYRVRMLSLFQVLEPTVTVSTQRLSDQVRAIHRCKLLDQSVLDRLCLEAIRARPIPASTRDRPVASSAPTLASVPASAVTLATMANTDVDGDRTSVNVSSQVSEHLRRALEDAISQYRYAPDSRPRLPRLPTHRRNMALMGALNVLLAPYLRASENLTDTHSILYCGAIAACRVARVKFPDTSRAPRPAGGVPAWQVRIERRISTFRTLIAKLLCFSRGNTRPRVMRFVTQAFAGTDIRPQYYLTNVTERIDYLKQKVYAWANRIRRYRERVDRYWQNRLFQSDQRKVYRGWEGTEQCVIDGHRPDASAMIDFWRGIWSVPVEHTEGEWMRIVERECESIESMESILIDSVDVSCAIRTAQNWKSPGPDGLHNFWIKWIRCSHDRLAIQFQEALELGSLPSFMTTGVTFLLHKSGSTTDPKNYRPITCLPTIYKLLTSILRNKINTHIVANNVLAPAQNGCRVGSRGTKELLLIDMAISQQVRRNKGALSVAWIDYKKAYDSVPHSWLERILELYKIDITLKSFLSACMRQWTTVLCQPGGGEVSADPRDLIRIERGIFQGDSLSPLWFCLALNPLSTLLKDLGLGHRLRRGGEVISHLLYMDDLKLFAPKRQDLMELLKTTEVFSSAIKMEFGVDKCAVMHVQRGKVVNSPNLQLSETMTLRSLSEVETYKYLGMSESLGISVADIKKSIKERFFCRLTKVLNSLLSGGNKVRAFNGWVMPLLIYSFGILRWTQTELDALDRRVRQLLTTHRMLHPRSSVMRLYIPRKWGGRGMLNAKNLHNREVYRLRSFFRNNDCGMHCDVVAVDKGLTPLSLANENWRQPPVLSTEDRKIVWKGKELHGRFYRALTGPDVDLLASVNWLRFGDLFGETEGFACAIADEVIKTNNYRKYILKDGTVDICRACHRPGESLRHIISGCSHLANGEYLHRHNQVARIIHQQLALQYGLVESEVPYYKYAPASVLENGRALLYWDRSIITDRTIVANKPDIVLVDRSQRRAVLVDITIPHDENLVKAEKDKLSKYLDLAHEVTAMWDVDSTIIVPIVVTVNGLIAKSLDQHLKRLSLDGWIKGQIQKAVILDTCRIVRRFLTLQP

SEQ ID NO: 5179 - protein, 933 aa, Peribatodes rhomboidaria
MALYCSAIAACRVARVKFPDTSRAPRPAGGVPAWQVRIERRISTFRTLIAKLLCFSRGNTRPRVMRFVTQAFAGTDIRPQYYLANVTERIDYLKQKVYAWANRIRRYRERVDRYWQNRLFQSDQRKVYRGWEGTEQCVTDGHRSDANAMIEFWRGIWSVPVEHTEGEWMRVVEGECETIESMESILIDSVDVSCAIRTAQNWKSPGPDGLHNFWIKWIRCSHDRLAIQFQEALELGCLPSFMTTGVTFLLHKSGSTTDPKNYRPITCLPTIYKLLTSILRNKINTHIVANNILAPAQNGCRVGSRGTKELLLIDMAISQQVRRNKGALSVAWVDYKKAYDSVPHSWLERILELYKIDITLKSFLSACMRQWTTVLRQPGGGEVSADPQDLIRIERGIFQGDSLSPLWFCLALNPLSTLLKDLGLGHRLRRGGEVISHLLYMDDLKLFAPKRQDLMELLKTTEVFSSAIKMEFGVDKCAVMHVQRGKVVNSPNLQLSETMTLRSLSEVETYKYLGMSESLGISVVDIKKSIKERFFCRLTKVLNSLLSGGNKMRAFNGWVMPLLIYSFGILRWTQTELDALDRRVRQLLTTHRMLHPRSSVMRLYIPRKWGGRGMLNAKNLHNREVYRLWSIFRNNDCGMHCDVVAVDKGLTPLSLANENWRQPSVLSTEDRKNVWKGKELHGRFYRALTGPDVDLLASVNWLRFGDLFGETEGFACAIADEVIKTNNYRKYILKDGTVDICRACHRPGESLRHIISGCSHLANGEYLHRHNQVARIIHQQLALQYGLVESEVPYYKYAPASVLENGRALLYWDRSIITDRTIVANKPDIVLVDRSQRRAVLVDITIPHDENLVKAEKDKLSKYLDLAHEVTAMWDVDSTIIVPIVVTVNGLIAKSLDQHLKRLSLDGWIKGHIQKAVILDTCRIVRRFLTLQP

SEQ ID NO: 5180 - protein, 871 aa, Pammene fasciana
MRFVHQAFAGMDIEPRDYMANVTERIDFLKQKVYAWASRIRRYKERVDRFRQNRLFQSDQRKVYRRWEEADPRVSDVRLPDATAMTDFWRSIWSAPVEHTEGEWMSVVERECEIIEPMGAITISPDDVSCAIRTAQTWKSPGPDGLHNFWLKWFRCSHSRLATQFQQALELGSLPPSLTTGVTFLLYKSGSTTEAKNYRPITCLPTLYKLLTSILRAKINAHMVANNILASAQNGCRVGSRGTKELLLIDMTICQRVRRNRGALSAAWIDYKKAYDSVPHSWLERILELYKIDAALRSFLGACMRQWTTVLRQPGGGDDPPGPQDFIRIERGIFQGDSLSPLWFCLALNPLSTLLKDSGLGCRLRRESEVISHLLYMDDLKLFAPNNRDLLELLKTTEVFSSSIKMEFGVDKCAVMHVQRGKVVNSTNLQLSETMTFRSISESETYKYLGMSQSLGIEDAGIKQALRERFFGRLTKVLNSLLSGGNKVRAFNAWVMPLLTYSFGILRWTQTELDALDRRVRQLLTTHRMLHPRSSVMRLYIPRKCGGRGFLNAKNLHNREVYNLRNYFLNNECGMHRDVVAIDKGLTPLSLANENWRKPVVLSTEDRKAVWKSKELHGRFYGALTGPDVDLLASVNWLRFGDLFGETEGFACAIADEVIMTNNYRRYILKDGTVDICRACRRPGESLRHIISGCSHLANGEYLHRHNLVARIIHQQLALLYGLVDHEVPYYKYTPAPVLENSRATLYWDRSIITDRTIVANKPDIVVIDRPQRRAMLVDITVPCDVNLVKAEKDKSSKYLDLAHEVTAMWEVDSAIIVPIVVSANGLIAKSLDQHLERLSLRGCGWIKGQIQKAVILDTARIVRRFLSLRP

SEQ ID NO: 5181 - protein, 1209 aa, Pammene fasciana
MITRSRTKAASTNARPPSSPASSVSSPSSSGDEFATAPDTSESSDECGPPPPPPRPPARRGRPPLPARLGLAGHPVPPRAPAAGGIVRRMRWTPAMNENVMRAYYGATEGGTNLSAYRDRILPLFQALEPTIDTTAQRLSDQVRAIQRLKRLDDATLDRLRLEALSAHADSTSVRDPPATSPDPMPVPDLASGAPRIDPSADEEYIASQSMSSTANEQLRRTLEEAITQYRSTNIPRPRLPRLPMNRRNLALMGALNDLLDPILRTSKDLDDTHSIMYCGAIAACRVARVKFPDAERAPRTAGGVPVWQVRIERRINSFRTLIAKLICFRGGNNRPRVMRFVHQAFAGTGIEPRDYMANVTERIDFLKQKVYAWASRIRRYRERVDRFRQNRLFQSDQRKVYRRWEEADPRVSDVRLPDATAMTDFWRSIWSAPVEHTEGEWMSVVERECESIEPMGAITISPDDVSCAIRTAQNWKSPGPDGLHNFWLKWFRCSHSWLATQFQQALELGSLPPSLTTGVTFLLYKSGSTTEAKNYRPITCLPTLYKLLTSILRAKINAHIVANNILASSQNGCRVGSRGTKELLLIDMTICQRVRRNRGALSAAWIDYKKAYDSVPHSWLERILELYKVDAALRSFLGACMRQWTTVLRQPGGGDDPPDPHDFIRIERGIFQGDSLSPLWFCLALNPLSTLLKDSGLGCRLRREGEVISHLLYMDDLKLFAPNNRDLMELLKTTEVFSSSIKMEFGVDKCAVMHVQRGKVVNSTNLQLSETMTFRSISESETYKYLGMSQSLGIEDAGIKQALKERFFGRLTKVLNSLLSGGNKVRAFNAWVMPLLTYSFGILRWTQTELDALDRRVRLLLTTHRMLHPRSSVMRLYIPRKCGGRGFLNAKNLHNREVYNLRNYFLNNECGMHRDVVAVDKSLTPLSLANENWRKPVVLSTEDRKAVWKSKELHGRFYGALTGPDVDLLASVNWLRFGDLFGETEGFACAIADEVIMTNNYRRYILKDGTVDICRACRRPGESLRHIISGCSHLANGEYLHRHNLVARIIHQQLALLYGLVDHEVPYYKYTPAPVLENGRATLYWDRSIITDRTIVANKPDIVIIDRSQRRAMLVDITVPCDVNLVKAEKDKSSKYLDLAHEVTAMWEVDSAIIVPIVVSANGLIAKSLDQHLERLSLRGCGWIKGQIQKAVILDTARIVRRFLSLRP

SEQ ID NO: 5182 - protein, 1209 aa, Pammene fasciana
MITRSRTKAASTNARPPSSPASSVSSPSSSGDEFATAPDTSESSDERGPPPPPPRPPARRGRPPLPARLGLAGHPVPPRAPAAGGIVRRMRWTPAMNENVMRAYYGATEGGTNLSAYRDRILPLFQALEPTIDTTAQRLSDQVRAIQRLKRLDDATLDRLRLEALSAHADSTSVRDPPATSPDPMPVPDLASGAPRIDPSADEEYIASQSMSSTANEQLRRTLEEAITQYRSTNIPRPRLPRLPMNRRNLALMGALNDLLDPILRTSKDLDDTHSIMYCGAIAACRVARVKFPDAERAPRTAGGVPVWQVRIERRINSFRTLIAKLICFRGGNNRPRVMRFVHQAFAGTGIEPRDYMANVTERIDFLKQKVYAWASRIRRYRERVDRFRQNRLFQSDQRKVYRRWEEADPRVSDVRLPDATAMTDFWRSIWSAPVEHTEGEWMSVVERECESIEPMGAITISPDDVSCAIRTAQNWKSPGPDGLHNFWLKWFRCSHSRLATQFQQALELGSLPPSLTTGVTFLLYKSGSTTEAKNYRPITCLPTLYKLLTSILRAKINAHIVANNILASSQNGCRVGSRGTKELLLIDMTICQRVRRNRGALSAAWIDYKKAYDSVPHSWLERILELYKVDAALRSFLGACMRQWTTVLRQPGGGDDPPDPHDFIRIERGIFQGDSLSPLWFCLALNPLSTLLKDSGLGCRLRREGEVISHLLYMDDLKLFAPNNRDLMELLKTTEVFSSSIKMEFGVDKSAVMHVQRGKVVNSTNLQLSETMTFRSISESETYKYLGMSQSLGIEDAGIKQALKERFFGRLTKVLNSLLSGGNKVRAFNAWVMPLLTYSFGILRWTQTELDALDRRVRLLLTTHRMLHPRSSVMRLYIPRKCGGRGFLNAKNLHNREVYNLRNYFLNNECGMHRDVVAVDKSLTPLSLANENWRKPVVLSTEDRRAVWKSKELHGRFYGALTGPDVDLLASVNWLRFGDLFGETEGFACAIADEVIMTNNYRRYILKDGTVDICRACRRPGESLRHIISGCSHLANGEYLHRHNLVARIIHQQLALLYGLVDHEVPYYKYTPAPVLENGRATLYWDRSIITDRTIVANKPDIVIIDRSQRRAMLVDITVPCDVNLVKAEKDKSSKYLDLAHEVTAMWEVDSAIIVPIVVSANGLIAKSLDQHLERLSLRGCGWIKGQIQKAVILDTARIVRRFLSLRP

SEQ ID NO: 5183 - protein, 1208 aa, Ennomos quercinarius
MITRSRTRKAETQSARLPPPPAPSSPSSSSGDEYGTPPDTTASSDEDGPPSPPPPPPPARRGRPPLPARLGPAGQPAPRAAPATGGIVRRMRWTQAMNENCMRAYYGATEGGSSLTAYRDRMLSLFQDLEPAVAVSAQRLSDQVRAIQRCKMLDEPTLDRLRLEALPIRATSPSPRVLPAALPDPGPIMGPLPVTPRGDPAIDGEESASDSVSTQANEQLRSALEDAILRYRSTPTSRPRLPRLPTNRRNLVLMGALNTLLAPYLRTSEDLVDTHSILYCGAIAACRVARVKFPDTDRAPRPADGAPAWQVRIEKRITTFRTLIAKLVCFSRGNHRPRVMRFVTQAFAGSGIRPQDYMACVTERIDFLKQKVYAWASRIRRYIERVDRYQQNRLFQSDQRKVYRNWEGTGQRVVDGQLPGANAMNEFWRSIWSVPVEHTEGDWMRVVERVCEPIESMGSITIDPEDISCAIRTAQNWKSPGPDGLHNFWIKWIRCSYPCLAIQFQEALEAGSLPSFMTTGVTFLLHKSGSTTEAKNYRPITCLPTLYKLLTSILRTKINSHIVANNILAPAQNGCRVGSRGTKELLLIDTAICQQVRRNRGALSTAWIDYKKAYDSVPHSWLERILELYKIDATLRSFLSACMRQWTTVLRQPGGGESVSDPQDFIKIERGIFQGDSLSPLWFCLALNPLSTLLGDSGLGYRLRRGGEIISHLLYMDDLKLFAPQRPQLIELLKITENFSNSINMEFGVDKCAVMHVHGGKVVNSTNLQLSETMTLRSLSESETYRYLGMSESLGISVGDVKRTVKERFFCRLTKVLNSLLSGGNKTRAFNGWVMPLLMYSFGILRWTQTELDALDRKVRQLLTSHRMLHPRSSVMRLYIPRNWGGRGFLNAKTLHNREVCSLRDYFLNNECRMHRDVVAVDKGLTPLSLANENWRKPVVLSTEDRRDVWKGKELHGRFYRALTGPDVDLHASVNWLRFGDLFGETEGFVCAIADEVIKTNNYRKYIMKDGTVDICRACHRPGESLRHIISGCSHLANGEYLHRHNLVARIIHQQLALQYGLVESEVPYYKYTPGPVLENGRALLYWDRSIITDRTIVANKPDIVLVDRSQRRAVLVDITIPHDENLVKAEKDKLSKYLDLAHEVTAMWSVDSTSIVPIVVSANGLIAKSLDQHLERLSLDGWIKGQIQKAVLLDTARIVRRFLTLQP

SEQ ID NO: 5184 - protein, 1208 aa, Cydia splendana
MITRSRTKAVTTSARPPPPPASSTSSSTSSSGDEFATAPDTDGSSDESGPPPPPPRPPARRGRPPLPARLGPAGHPAPPTAPATGGIVRRMRWTRDMNENVMRAYYGATEGGTQLSAYRSRILPLFQTLEPTITVSEQRLSDQVRVIQRLKRLDDATLDRLRQEALSARADSTSVRDLPATSPDPVPVPDLAPEAPRVDFCTDEGDFASQNVSTTANEQLRRTLEEAITQYRVTTNSRPRLPRLPMNRRNLALMGALNALLEPYLRTSKDLDDTHSIMYCGAIAACRVARVKFPDAERAPRTVGGVPAWQVRIERRISSFRTLIAKLICFRGGNNRPRVMRFVNQAFAGTDIGPRDYMANVTERIDFLKQKVYAWANRIRRYRERVDRFQQNRLFQSDQRKVYRRWEEANLRTPDTQPPDATATTDFWRSIWSVPAGHTEGSWMSVVEHECESIEPMGAVIISPDDVSCAIRTAQNWKSPGPDGLHNFWLKWFRCSHSRLAAQFQQALELGSLPPSLTTGVTFLLYKSGSTTEAKNYRPITCLPTLYKLLTSILRAKINAHIVANNILASAQNGCRVGSRGTKELLLIDMTICQQIRRNRGALSAAWIDYEKAYDSVPHSWLGRVLELYKVDAALRAFLSTCMRQWPTVLRQPGGGDDRPGPQDFIRIERGIFQGDSLSPLWFCLALNPLSTLLKDLGLGCRLQREGEVISHLLYMDDLKLFAPNSQDLLELLKTTEVFSNAINMEFGIDKCAVMHVQRGRVVNSTNLQLSETMSFRSISESETYKYLGMSQSLGIEDEGIRRSVKERFFSRLTKVLNSLLSGGNKVRAFNAWVMPLLTYSFGILRWTQTELDALDRRVRSLFTTHRMLHPRSSVMRLYIPRKCGGRGFLNAKDLHNREVYNLRNYFLNNECGMHRDVVAVDRNLTPLSLANENWRKPVVLSTADRKAAWESKVLHGRFYKALTGPDVDLLASVNWLRFGDLFGETEGFACAIADEVMMTNNYRKYILKDGTVDICRACRRPGESLRHIISGCSHLANGEYLHRHNLVARIIHQQLALLYGLVDREVPYYKYLPAPVLENGRATLYWDRSIITDRTIVANKPDIVIIDRSQRRAVLVDITIPHDENLVKAEKDKSSKYLDLAHEITAMWDVDSTIIVPIVVSVNGLIAKSLDQHLERLSLGGWIKGQMQKAVILDTARIVRRFLSLQP

SEQ ID NO: 5185 - protein, 1118 aa, Cydia splendana
MRWTRNMNENVMRAYYGATEGGTQLSAYRSRILPLFQALEPTINVSEQRLSDQVRVIQRLKRLDDATLDRLRQEALSARADSTSVRDLPATSPDPVPAPDLAPGAPRVDFYTDEGEFASQNVNTTANEQLRRTLEEAITQYRVTTNSRPRLPRLPMNRRNLALMGALNALLEPHLRTSKDLDDTHSIMYCGAIAACRVARVKFPDTERAPRTVGGVPAWQARIERRIGSFRTLIAKLICFRGGNNRPRVMRFVNQAFAGTDIRPRDYMANVTERIDFLKQKVYAWANRIRRYRERVDRFQQNRLFQSDQRKVYRKWEEANLRAPDTQPPDATAMTDFWRSIWSVPVGHTEGGWMSVVERECESIELMGAVTISPDDVSCAIRTAQNWKSPGPDGLHNFWLKWFRCSHSRLAVQFQQALELGSLPPSLTTGVTFLLYKSGSTTEAKNYRPITCLPTLYKLLTSILRAKINAHIVANNILASTQNGCRVGSRGTKELLLIDMTICQQIRRNKRSLSAAWIDYKKAYDSVPHSWLGRVLELYKVDAALRAFLSACMRQWTTVLRQPGGGGDRSGPQDFIRIERGIFQGDSLSPLWFCLALNPLSTLLKDLGLGCRLRREGEVISHLLYMDDLKLFAPNSQDLLELLKTTEVFSSAIHMEFGVDKCAVMHVQRGRVVNSTNLQLSETMSFRSISESETYKYLGMSQSLGIEDEGIRRSVKERFFSRLTKVLNSLLSGGNKVRAFNAWVMPLLTYSFGILRWTQTELDALDRRVRSLLTAHRMLHPRSSVMRLYIPRKCGGRGFLNAKDLHNHEVYNLRNYFLNNECGMHRDVVAVDRNLTPLSLANENWRKPVVLSTADRKAAWESKVLHGRFYKALTGPDVDLLASVNWLRFGDLFGETEGFACAIADEVMMTNNYRKYILKDGTVDICRACRRPGESLRHIISGCSHLANGEYLHRHNLVARIIHQQLALLYDLVDREVPYYKYLPAPVLENGRATLYWDRSIITDRTIVANKPDIVIIDRSQRRAVLVDITIPHDENLVKAEKDKSSKYLDLAHEITAMWDVDSTIIVPIVVSVNGLIAKSLDQHLERLSLGGWIKGQMQKAVILDTARIVRRFLSLQP

SEQ ID NO: 5186 - protein, 1208 aa, Cydia splendana
MITRSRTKAATTSARPPPPPASSTSSSTSSSGDEFATAPDTDGSSEESGPPPPPPRPPARRGRPPLPARLGPAGHPTPPTAPATGGIVRRMRWTRDMNENVMRAYYGATEGGTQLSAYRSRILPLFQALEPTITVSEQRLSDQVRVIQRLKRLDDATLDRLRQEALSARADPTSVRDLPATSPDPVPAPDLAPGAPRVDFSTDEGNFASQNVSTTANEQLRRTLEEAITQYRATTTSRPRLPRLPMNRRNLALMGALNALLEPYLRTSKDLYDTHSIMYCGAIAACRVARIKFPDAERAPRTAGGVPAWQARIERRISSFRTLIAKLICFRGGNNRPRVMRFVNQAFAGTDIRPRDYMANVTERIDFLKQKVYAWANRIRRYRERVDRFQQNRLFQSDQRKVYRRWEETNLRTPDTQPPDATAMTNFWRSIWSVPVGHTEGSWMSVVERECESIEPMGAVTISPDDVSCAIRTAQNWKSPGPDGLHNFWLKWFRCSHSRLAAQFQQALELGSLPPSLTTGVTFLLYKSGSTTEAKNYRPITCLPTLYKLLTSILRAKINAHIVANNILASAQNGCRVGSRGTKELLLIDMTICQQIRRTKGALSAAWIDYKKAYDSVPHSWLGRVLELYKVDAALRAFLSACMGQWTTVLRQPGGGDDQPGPQDFIRIERGIFQGDSLSPLWFCLALNTLSTLLKDLGLGCRLRREGEVISHLLYMDDLKLFAPNTQGLLELLKTTEVFSSAINMEFGVDKCAVMHVQRGRVVNSTNLQLSETMSFRSISESETYKYLGMSQSLGIEDEGIRRSVKERFFSRLTKVLNSLLSGGNKVRAFNAWVMPLLTYSFGILRWTQTELDALDRRVRSLLTTHRMLHPRSSVMRLYIPRKCGGRGFLNAKDLHNREVYNLRNYFLNNECGMHRDVVAVDRNLTPLSLANENWRKPVVLSTADRKAAWENKVLHGRFYKALTGPDVDLLASVNWLRFGDLFGETEGFACAIADEVMMTNNYRKYILKDGTVDICRACRRPGESLRHIISGCSHLANGEYLHRHNLVARIIHQQLALLYGLVDREVPYYKYLPAPVLENGRATLYWDRSIITDRTIVANKPDIVLIDRSQRRAVLADVTIPHDENLVKAEKDKSSKYLDLAHEITAMWDVDSTIIIPIVVSANGLIAKSLDQHLERLSLGGWIKGQMQKAVILDTARIVRRFLSLQP

SEQ ID NO: 5187 - protein, 1215 aa, Hedya salicella
MQRYFTRSQNTRKISTAATPTHARPTPPPASSCSPSASSDDFATAPDTSESSDDECGPPPPPPRPPARRGRPPLPARLGPAGHSAPPTAPATSGIVRRMRWSQANNENVMRAYYGATEGGTHLSAYRDRMLLLFQTFEPAIAASAQRLSDQVRAIQRRKLLNDATLDRLRLEVLAARAASTSSRNPPATSPVPAPALDLMPGAPRVDPDSDEGHCVSIVSTQANEQLRRTLEETIERYRFAPDSRPRLPRLPANKRNLALVGALNALLDPYLRASEDLADTHSIMYCGAIAACRVARVKFPDADRAPRTAGGVPAWQVRIERRISTFRTLIAKLICFRGGNNRPRVMRYVAQAFAGTDVSSCDYMACVTERIDFLKQKVYAWASRIRRYRERVDRFQQNRLFQSDQRKVYRKWEGTDQRVTDGRLPDPTAMSNFWRSIWSVPVEHTEGEWMNVVERECEPIEAMGAVTISPDDVSCAARTTQNWKSPGPDGLHNFWVKWFRCSHERLPTQFQQALELGSLPSFLTTGVTFLLYKSGSTTEAKNYRPITCLPTLYKLLTSILRAKINTHIVANNVLAFSQNGCRVGSRGTKELLLIDTTICQQVRRSRGSLSAAWIDYKKAYDSVPHSWLERILELYKVDTALRSFLGACMRQWTTVLCQPGGRDARPAPQDFIRIKRGIFQGDSLSPLWFCLALNPLSTLLKDSGLGCRLRRGGEIISHLMYMDDLKLFAPKRPELVELLKVTDTFSSAIKMEFGVDKCAVMHVQRGKVVNSTNLELSETMSLRSLSETETYKYLGMSQALSIADGDIRQAVKERFFRRLTKVLNSLLSGGNKARAFNAWVMPLLTYSFGILRWTQTELDALDRRVRMLLTTHRMLHPRSSVMRLYIPRKCGGRGFLNAKDLHNREVCSLREYFLNNECGIHRDVVAVDKGLTPLSLANENWRRPTVLSTVDRKDVWKSKELHGRFYKALTGPDVDLLASVNWLRFGDLFGETEGFSCAIADEVIMTNNYRRYILKDGTVDICRACRRPGESLRHIMSGCSYLANGEYLHRHNQVARIIHQQLAVKYDLVGSEVPYYKYVPMPVLENGRATLYWDRSILTDRTIVANKPDIVLVDRSKRRAMLVDITIPHDENLVKAEKDKLSKYLDLAHEVTAMWDVDSTIIVPIVVSVNGLIAKSLDEHLKRLSLDGWIKGQIQKAVILDTARIVRRFLSVQP

SEQ ID NO: 5188 - protein, 1022 aa, Erannis defoliaria
MPTSAATLATPADPVVDEGDCTSMSVSSQVSEQLRRALEDAICQYRFALNSRPRLPRLPTHRRNLALMGALNALLAPYLRASKDLTDTHSILYCGAIAACRVARVRFPDTNRAPRTVGDVPAWQVRIERRISTFRTLIAKLICFSRGNNRPRVMRFVTQAFSGTGLRPQQYMASVTERIDYLKQKVYAWANRIRRYRERVDRYWQNRLFQSDQRKVYRNWEGAAQRVNDGHLPDANAMTNFWRSIWSVPVEHTEGDWMRVVERECEAIEPMGPILIDPVDVSCAIRTAQNWKSPGPDGLHNIWIKWFRCSHNRLATQFQEALELGSLPSFMTTGVTFLLHKSGSTTEPKNYRPITCLPTIYKLLTSILSTKINAHIIANNVLAPAQNGCRVGSRGTKELLLIDMAISQQVRRSKGALSAAWIDYKKAYDSVPHSWLERILELYQIDTTLKSFLGACMRQWTTVLRQPGGGNDSSDPQDLIRIERGIIQGDSLSPSWFCLALNPLSTLLKDSGLGYRLRRGSEVISHLLYMDDLKLFAPKHQDLLELLKTTQVFSSAIRMEFGVDKCAVMRVQRGKVVNSPDLQLSEIMTLRSLSEAETYKYLGMSESLGISVVDIKKSVKERFFCRLTKVLNSLLSGGNKARAFNGWVMPILIYSFGILRWTQTELDALDRRVRQLLTAHRMLHPRSSVMRLYIPRKWGGRGFLNAKNLHNREVCSLRDYFLNNEFGMHRDVVTVDKGLTPLSLANENWRRPSVLSTDDRKEVWKSKELHGRFYRALTGSDVDLLASVNWLRFGDLFGETEGFACAIADEVIKTNNYRKYIMKDGKVDICRARHRPRKSLRHIISGCSHLANGEYLHRHNQVARIIHQQLALQYGLVESEVPYYKYSPAPVLENGRVLLYWDRSIITDRTIVANKPDIVMVDRSQRQAVLVDVTIPHDENLVKAEKDKLSKYLDLAFEITAMWDVDSTIIVPIVVSANGLIAKSLDQYLKRLSLGGWVKGQIQKAVVLDTARIVRRFLTLQP

SEQ ID NO: 5189 - protein, 1218 aa, Erannis defoliaria
MITRSKNKAKTSTAETTNARPPPLPAPSSPSASSGDDVFLTPRESSVSSSDSDVSGPRTPAPPPPARRGRPPLPARLGPAGQPASRPALAAGGVVRRMRWSQTNNENCMRAYYGATEGGTNLTAYRVRMLSLFQALEPTVTVSAQRLSDQVRAIQRLNLLDQSLLDRLHLEAQSARPTPASTRDLDVASSAPTLTSVPTSAATLATSTDPVLDEGDCTGMSVSTQVSEQLRRALEDAIGQYRFTLNSRPRLPRLPTHRRNLALMGALNALLAPYLRASEDLTDTHSILYCGAIAACRVARVRFPDTNRAPRTAGDVPAWQVRIERRISTFRTLIAKLICFSRGNNRPRVMRFVTQAFAETGIRPQQYMASVTERIDYLKQKVYAWASRIRRYRERVDRYRQNRLFQSDQRKVYRNWEGNEQRVSDGHLPDASAMTNFWRSIWSVPVEHTEGDWMRVVERECEFIEPMGSILIDPVDVSCAIRTAQNWKSPGPDGLHNFWIKWFRCSHDRLATQFQEALELGSLPSFMTTGVTFLLHKSGSTTEPKNYRPITCLPTIYKLLTSILSTKINTHIVANNVLAPAQNGCRVGSRGTKELLLIDMAISQQVRRNKGALSAAWIDYKKAYDSVPHSWLERILELYKIDTTLKSFLSACMRQWTTVLRQPGGGNDSSDPQDLIRIERGIFQGDSLSPSWFCLALNPLSTLLKDSGLGYRLRRGGEVISHLLYMDDLKLFAPKHQDLLELLKTTQVFSSAIRMEFGVDKCAVMRVQRGKVVNSPDLQLSEIMTLRSLSEAETYKYLGMSESLGISVVDIKKSVKERFFCRLTKVLNSLLSGGNKARAFNGWVMPLLIYSFGILRWTQTELDALDRRVRQLLTAHRMLHPRSSVMRLYIPRKWGGRGFLNAKNLHNREVCSLRDYFLNNECGMHRDVVTVDKGLTPLSLANENWRRPSVLSTDDRKDVWKSKELHGRFYRALSGPDVDLLASVNWLRFGDLFGETEGFACAIADEVIKTNNYRKYIMKDGTVDICRACHRPGESLRHIISGCSHLANGEYLHRHNQVARIIHQQLALQYGLVESEVPYYKYTPAPVLENGRALLYWDRSIITDRTIVANKPDIVMVDRSQRRAVLVDVTIPHDENLLKAEKDKLSKYLDLAFEITAMWDVDSTIIVPIVVSANGLIAKSLDQYLKRLSLDGWVKGQIQKAVVLDTARIVRRFLTLQP

SEQ ID NO: 5190 - protein, 1215 aa, Erannis defoliaria
MITRSQSRRNTAERNARPPLPPAPSSPSASSGDDVFLTPRESSVSSSNSDVSGPRTPAPPPPARRGRPPLPARLGPAGLPASRPALAAGGVVRRMRWSQTNNENCMRAYYGATEGGTNLSAYRVRMLPLFQALEPTVTVSAQRLSDQVRAIQRLNLLDQSLLDRLRLEAQSARPTPASTRDLDVASSAPTLALVPTSAATLVTSADPVVDEGDCTGMSVSTQVSEQLRRALEDAIGQYRFTPNSRPRLPRLPTHRRNLGLMGALNALLAPYLRASEDLTDTHSILYCGAIAACRVARVKFPDTNRAPRPAGDVPAWQLRIERRISTFRTLIAKLICFSRGNNRPRVMRFVTQAFAGTGIRPQQYMANVTERIDYLKQKVYAWANRIRRYRERVDRYWQNRLFQSDQRKVYRNWEGNEQRVSDGQLPDASAMTNFWRGIWSVPVEHTEGDWMRVVERECESIEPMGSILIDPVDVSCAIRTAQNWKSPGPDGLHNFWIKWFRCSHDRLATQFQEALELGSLPSFMTTGVTFLLHKSGSTTEPKNYRPITCLPTIYKLLTSILSTKINAHIVANNVLAPAQNGCRVGSRGTKELLLIDMAISQQVRRNKGALSAAWIDYKKAYDSVPHSWLERILELYQIDTTLKSFLGACMRQWTTVLRQPGGGNGSSDSQDLIRIERGIFQGDSLSPSWFCLALNPLSTLLKDSGLGYRLQRGGEVISHLLFMDDLKLFAPKHQDLLELLKTTQVFSSAISMEFGVDKCAVMRVQRGKVVNSLDLQLSEIMTLRSLSEAETYKYLGMSESLGISVVDIKKSVKERFFCRLTKVLNSLLSGGNKARAFNGWVMPLLIYSFGILRWTQTELDALDRRVRQLLTAHRMLHPRSSVMRLYIPRKWGGRGFLNAKNLHNREVCSLRDYFLNNECGMHRDVVTVDKGLTPLSLANENWRTPSVLSTDDRKEVWKSKELHGRFYRVLSGPDVDLLASVNWLRFGDLFGETEGFACAIADEVIKTNNYRKYIMKDGTADICRACHRPGESLRHIISGCSHLANGEYLHRHNQVARIIHQQLALQYGLVESEVPYYKYAPAPVLENGRALLYWDRSIITDRTIVANKPDIVMVNRSQRRAVLVDVTIPHDENLVKAEKDKLSKYLDLAFEITAMWDVDSTIIVPIVVSANGLIAKSLDQYLKRLSLDGWVKGQIQKAVVLDTARIVRRSLTLQP

SEQ ID NO: 5191 - protein, 1216 aa, Erannis defoliaria
MITRSKAIRNAAEQHSARPPSPPAPSSPSASSGEDVFVTPRESSASSTDSDVSGPRTPAPPPPARRGRPPLPARLGPAGLPASRPALAAGGVVRRMRWSQTNNENCMRAYYRATEVGTNLTAYRVRMLSLFQALEPTVTVSAQRLSDQVRAIQRLNLLDQSLLDRLRLEAQSARSTPVSTRDSHVASSAPTLASMPTSVATLATPADPVVDEGDDTGMSVTTQVSEQLRRALEDAISQYRFALNSRPRLPRLPTHRRNLALMGALNALLAPYLRASEDLTDTHSILYCGAVAACRVARVKFPDSNRAPRTAGDVPAWQARIERRISTFRTLIAKLICFSRGNNRPRVMRFVTQAFAGTGIRPQQYMASVTERIDYLKQKVYAWASRIRRYRERVDRYWQNRVFQSDERKVYRNWEGAEQRVSDGHLPDANAMTNFWRGIWSVPVEHTEGDWMRVVERECESIEPMGSILIDPVDVSCAIRTAQNWKSPGPDGLHNFWIKWFRCSHDRLATQFQEALELGSLPSFMTTGVTFLLHKSGSTTEPKNYRPITCLPTIYKLLTSILSTKINTHIVANNVLAPAQNGCRVGSRGTKELLLIDMAISQQVRRNKGALSAAWIDYKKAYDSVPHSWLERILELYKIDTTLKSFLSACMRQWTTVLRQPGGGNDSFDPQNLIRIERGIFQGDSLSPSWFCLALNPLSTLLKDSGLGYRLRRGGEVISHLLYMDDLKLFAPKHQDLLELLKTTQVFSSAIRMEFGVDKCAVMRVQRGKVVNSPDLQLSEIMTLRSLSEVETYKYLGMSESLGISVVDIKKSVKERFFCRLAKVLNSLLSGGNKARAFNGWVMPLLIYSFGILRWTQTELDALDRRVRQLLTAHRMLHPRSSVMRLYIPRKWGGRGFLNAKNLHNREVCSLRDYFLNNECGMHRDVVTVDKGLTPLSLANENWRRPSVLSTDDRKDVWKSKELHGRFYRALSGPDVDLLASVNWLRFGDLFGETEGFACAIADEVIKTNNYRKYIMKDGTVDICRACHRPGESLRHIISGCSHLANGEYLHRHNQVARIIHQQLALQYGLVESEVPYYKYAPAPVLENGRALLYWDRSIITDRTIVANKPDIVMVDRSQRRAVLVDVTIPHDENLVKAEKDKLSKYLDLAFEITAMWDVDSTIIVPIVVSANGLIAKSLDQYLKRLSLDGWVKGQIQKAVVLDTARIVRRFLTLQP

SEQ ID NO: 5192 - protein, 1215 aa, Biston betularia
MWTRSRTAAASGLHDAHIPSPPAPSTPSASSGDEEFATPLATSASSSSSDVSGPRTPAPPPPARRGRPPLPARLGPAGQSASRSALAAGGVVRRMRWSQTNNENCMRAYYGATEGGINLSTYRARMLPLFQALEPTVAVSTQRLSDQVRAIQRLQLLDQSVLDRLRLEALPARPTPVSTRDSPVASSAPTLVSVPTSMVTLATRTDPVVDVGECTSMGVCSQVSEHLRRTLEDAICQYRFAPDSRPRLPRLPTHRRNLALMGALNALLAPYLRASEDLTDTHSILYCGAIAACRVARVKFPDTNRAPRPAGGVPAWQLRIERRISTFRTLIAKLICFSRGNNRPRVMRFVTQAFAGTGIRPQHYLASVTERIDYLKQKVYAWANRIRRYRERADRYWQNRVFQSDQRKVYRDWEGTGQRVSDRQLPDTSVMTEFWRDIWSLPVEHTEGDWMRVVERECESIESMGSVLIDPVDVSCAIRTAQNWKSPGPDGLHNFWIKWIRCSHDRLATQFQEALELGSLPCLMTTGVTFLLHKTGSTTEAKNYRPITCLPTIYKLLTSILRTKINAHVVANNVLAPAQNGCRVGSRGTKELLLIDMTISQQVRRNKGALSTAWIDYKKAYDSVPHSWLERVLELYKIDTTLKSFLGACMRQWTTVLRQPGSGDGSSEPQDLIRIERGIFQGDSLSPLWFCLALNPLSTLLKESGLGHRLRRGGEVISHLLYMDDLKLFAPKRPDLMELLKTTQVFSSAIKMEFGVDKCAVMHVQRGEVVNCPDLQLSETMTFRSLSEAETYKYLGMSESLGIAVVDIKRSVKERFFCRLTKVLNSLLSGGNKVRAFNGWVMPLLIYSFGILRWTQTELDALDRRVRQQLTTHRMLHPRSSVMRLYIPRKLGGRGFLSAKNLHNREVCSLRDYFRDNECGMHRDVVAVDKGLTPLSLANENWRKPSVLSTEDRKEVWKSKQLHGRFYRVLTGPDVDMLASVNWLRFGDLFGKTEGFACAIADEVIKTNNYRKYIMKDGTVDICRACHRPGESLRHIISGCSHLANGEYLHRHNQVARIIHQQLALQYGLVESEVPYYKYAPAPVLENGRALLYWDRSIITDRTIVANKPDIVVVDRAQRRAVLVDITIPHDENLVKAEKDKLSKYLDLAHEITAMWDVDSTIIVPIVVTVNGLIAKSLDQHLKRLSLDGWVKGQLQKAVILDTARIVRRFLTLQP

SEQ ID NO: 5193 - protein, 869 aa, Biston betularia
MRFVTQAFAGTGIRPQHYLASVTERIDYLKQKVYAWANRIRRYRERADRYWQNRVFQSDQRKVYRDWEGTGQRVSDRQLPDTSVMTEFWRGIWSLPVEHTEGDWMRVVERECESIESMGSVLIDPVDVSCAIRTAQNWKSPGPDGLHNFWIKWIRCSHDRLATQFQEALELGSLPCFMTTGVTFLLHKTGSTTEAKNYRPITCLPTIYKLLTSILRTKINAHVVANNVLAPAQNGCRVGSRGTKELLLIDMTISQQVRRNKGALSTAWIDYKKAYDSVPHSWLERVLELYKIDTTLKSFLGACMRQWTTVLRRPGSGDGSSEPQDLIRIERGIFQGDSLSPLWFCLALNPLSTLLKESGLGHRLRRGGEVISHLLYMDDLKLFAPKRPDLMELLKTTQVFSNAIKMEFGVDKCAVMHVQRGEVVNCPDLQLSETMTFRSLSEAETYKYLGMSESLGIAVVDIKRSVKERFFCRLTKVLNSFLSGGNKVRAFNGWVMPLLIYSFGILRWTQTELDALDRRVRQQLTTHRMLHPRSSVMRLYIPRKLGGRGFLSTKNLHNREVCSLRDYFRDNECGMHRDVVAVDKGLTPLSLANENWRKPSVLSTEDRKEVWKSKQLHGRFYRVLTGPDVDMLASVNWLRFGDLFGETEGFACAIADEVIKTNNYRKYIMKDGTVDICRACHRPGESLRHIISGCSHLANGEYLHRHNQVARIIHQQLALQYGLVESEVPYYKYAPAPVLENGRALLYWDRSIITDRTIVANKPDIVVVDRAQRRAVLVDITIPHDENLVKAEKDKLSKYLDLAHEITAMWDVDSTIIVPIVVTVNGLIAKSLDQHLKRLSLDGWVKGQLQKAVILDTARIVRRFLTLQP

SEQ ID NO: 5194 - protein, 1121 aa, Biston betularia
MRWSQTNNENCMRAYYGATEGGINLSAYRVRMLPLFQALEPTVAVSTQRLSDQVRAIQRLQLLDQSVLDRLRLEALPARPTPVSTRDSPVASSAPTLVSVPTSMATLATPTDPVVDVGECTSMGVCSQVSEHLRRTLEDAICQYRFAPDSRPRLPRLPTHRRNLALMGALNALLAPYLRASEDLTDTHSILYCGAIAACRVARVKFPDTNRAPRPAGGVPAWQLRIERRISTFRTLIAKLICFSRGNNRPRVMRFVTQAFAGTGIRPQHYLASVTERIDYLKQKVYAWANRIRRYRERADRYWQNRVFQSDQRKVYRDWEGTGQRVSDRQLPDTSVTTEFWRGIWSLPVEHTEGDWMRVVERECESIESMGSVLIDPVDVSCAIRTAQNWKSPGPDGLHNFWIKWIRCSHDRLATQFQEALELGSLPCFMTTGVTFLLHKTGSTTEAKNYRPITCLPTIYKLLTSILRTKINAHVVANNVLAPAQNGCRVGSRGTKELLLIDMTISQQVRRNKGALSTAWIDYKKAYDSVPHSWLERVLELYKIDTTLKSFLGACMRQWTTVLRRPGSGDGSSEPQDLIRIERGIFQGDSLSPLWFCLALNPLSTLLKESGLGHRLRRGGEVISHLLYMDDLKLFAPKRPDLMELLKTTQVFSNAIKMEFGVDKCAVMHVQRGEVVNCPDLQLSETMTFRSLSEAETYKYLGMSESLGIAVVDIKRSVKERFFCRLTKVLNSFLSGGNKVRAFNGWVMPLLIYSFGILRWTQTELDALDRRVRQQLTTHRMLHPRSSVMRLYIPRKLGGRGFLSTKNLHNREVCSLRDYFRDNECGMHRDVVAVDKGLTPLSLANENWRKPSVLSTEDRKEVWKSKQLHGRFYRVLTGPDVDMLASVNWLRFGDLFGETEGFACAIADEVIKTNNYRKYIMKDGTVDICRACHRPGESLRHIISGCSHLANGEYLHRHNQVARIIHQQLALQYGLVESEVPYYKYAPAPVLENGRALLYWDRSIITDRTIVANKPDIVVVDRAQRRAVLVDITIPHDENLVKAEKDKLSKYLDLAHEITAMWDVDSTIIVPIVVTVNGLIAKSLDQHLKRLSLDGWVKGQLQKAVILDTARIVRRFLTLQP

SEQ ID NO: 5195 - protein, 1215 aa, Biston betularia
MWTRSRTAAASGLHDAHIPSPPAPSTPSASSGDEEFATPLATSASSSSSDVSGPRTPAPPPPARRGRPPLPARLGPAGQSASRSALAAGGVVRRMRWSQTNNENCMRAYYGATEGGINLSAYRVRMLPLFQALEPTVAVSTQRLSDQVRAIQRLQLLDQSVLDRLRLEALPARPTPVSTRDSPVASSAPTLVSVPTSMATLATPTDPVVDVGECTSMGVCSQVSEHLRRTLEDAICQYRFAPDSRPRLPRLPTHRRNLALMGALNALLAPYLRASEDLNDTHSILYCGAIAACRVARVKFPDTNRAPRPAGGVPAWQLRIERRISTFRTLIAKLICFSRGNNRPRVMRFVTQAFAGTGIRPQHYLASVTERIDYLKQKVYAWANRIRRYRERADRYWQNRVFQSDQRKVYRDWEGTGQRVSDRQLPDTSVMTEFWRGIWSLPVEHTEGDWMRVVERECESIESMGSVLIDPVDVSCAIRTAQNWKSPGPDGLHNFWIKWIRCSHDRLATQFQEALELGSLPCFMTTGVTFLLHKTGSTTEAKNYRPITCLPTIYKLLTSILRTKINAHVVANNVLAPAQNGCRVGSRGTKELLLIDMTISQQVRRNKGALSTAWIDYKKAYDSVPHSWLERVLELYKIDTTLKSFLGACMRQWTTVLRQPGSGDGSSEPQDLIRIERGIFQGDSLSPLWFCLALNPLSTLLKESGLGHRLRRGGEVISHLLYMDDLKLFAPKRPDLMELLKTTQVFSNAIKMEFGVDKCAVMHVQRGEVVNCPDLQLSETMTFRSLSEAETYKYLGMSESLGIAVVDIKRSVKERFFCRLTKVLNSFLSGGNKVRAFNGWVMPLLIYSFGILRWTQTELDALDRRVRQQLTTHRMLHPRSSVMRLYIPRKLGGRGFLSTKNLHNREVCSLRDYFRDNECGMHRDVVAVDKGLTPLSLANENWRKPSVLSTEDRKEVWKSKQLHGRFYRVLTGPDVDMLASVNWLRFGDLFGETEGFACAIADEVIKTNNYRKYIMKDGTVDICRACHRPGESLRHIISGCSHLANGEYLHRHNQVARIIHQQLALQYGLVESEVPYYKYAPAPVLENGRALLYWDRSIITDRTIVANKPDIVVVDRAQRRAVLVDITIPHDENLVKAEKDKLSKYLDLAHEITAMWDVDSTIIVPIVVTVNGLIAKSLDQHLKRLSLDGWVKGQLQKAVILDTARIVRRFLTLQP

SEQ ID NO: 5196 - protein, 869 aa, Biston betularia
MRFVTQAFAGTDIRPQHYLASVTERIDYLKQKVYAWANRIRRYRERADRYWQNRVFQSDQRKVYRDWEGTGQRVSDRQLPDTSVMTEFWRGIWSLPVEHTEGDWMRVVERECESIESMGSVLIDPVDVSCAIRTAQNWKSPGPDGLHNFWIKWIRCSHDRLATQFQEALELGSLPCFMTTGVTFLLHKTGSTTEAKNYRPITCLPTIYKLLTSILRTKINAHVVANNVLAPAQNGCRVGSRGTKELLLIDMTISQQVRRNKGALSTAWIDYKKAYDSVPHSWLERVLELYKIDTTLKSFLGACMRQWTTVLRQPGSGDGSSEPQDLIRIERGIFQGDSLSPLWFCLALNPLSTLLKESGLGHRLRRGGEVISHLLYMDDLKLFAPKRPDLMELLKTTQVFSNAIKMEFGVDKCAVMHVQRGEVVNCPDLQLSETMTFRSLSEAETYKYLGMSESLGIAVVDIKRSVKERFFCRLTKVLNSFLSGGNKVRAFNGWVMPLLIYSFGILRWNQTELDALDRRVRQQLTTHRMLHPRSSVMRLYIPRKLGGRGFLSAKNLHNREVCSLRDYFRDNECGMHRDVVAVDKGLTPLSLANENWRKPSVLSTEDRKEVWKSKQLHGRFYRVLTGPDVDMLASVNWLRFGDLFGETEGFACAIADEVIKTNNYRKYIMKDGTVDICRACHRPGESLRHIISGCSHLANGEYLHRHNQVARIIHQQLALQYGLVESEVPYYKYAPAPVLENGRALLYWDRSIITDRTIVANKPDIVVVDRAQRRAVLVDITIPHDENLVKAEKDKLSKYLDLAHEITAMWDVDSTIIVPIVVTVNGLIAKSLDQHLKRLSLDGWVKGQLQKAVILDTARIVRRFLTLQP

SEQ ID NO: 5197 - protein, 1207 aa, Apotomis turbidana
MITRSRRKKAEQTNARPPPPPASSSSSPSSSGDEFATAADTSESSDECGPPPPPPQPPARRGRPPLPARLGPTGQPAPTTAPATGGVVRRMRWTRVMNENCMRAYYRATEGGINLSAYRDRMLPLFQAFDPTIAVSAQRLSDQVRFIQRRKLLDDATLDRLRLEVLATRAASVPARDPPATSPVPAPAPNLVPGVPLTDPEADGEDGASSVSTQANEQLRRALEEAIEQYRSTPESRPRLPRLPMHKHNLALMGALDALLDPYLRASEDLADTHSIMYCGAIAACRVARVRFPDTDRAPRTAGGVPAWQVRIERRISSFRTFIAKLICFRGGNNRPRVMRYVTQAFAGTGTRPCDYMACVTERIDYLKQKVCAWASRIRRYRERVDRFQQNRLFQSDQRKVYRKWEGTDQCVSDGQLPDPTAMINFWRSIWSVPVEHTEGEWMNVVRRECEPIEAMGAVTISPDDVRCAARTTQNWKSPGPDGLHNFWIKWFRFSHERLATQFQDALELGSLPSFMTTGVTFLLHKSGSTTEAKNYRPITCLPTLYKLLTSILRTKINTHIVANNVLAFSQNGCRVGSRGTKELLLIDTTICQQVRRNKGSLSTAWIDYKKAYDSVPHSWLERILELYKIDTALRSLLGACMRQWTTVLRQPGGGDGPPGPRDLIRIERGIFQGDSLSPLWFCLALNPLSILLKDSGLGCRLRRGGEVISHLLYMDDLKLYAPKRQDLVELLEVTETFSSAIKMEFGVDKCAVMHVQRGKVVNSANLQLSETMTLRSISEVETYKYLGMSQSLGIADGDIRQALKERFFCRLTKVLNSLLSGGNKARAFNAWVMPLLTYSFGILRWTQTALDALDTRVSQLLTTHRMRHPRSSVMRMYIPRKCGGRGFLNAKDLHNREVCSLREYFLNNECGIHRDVVAVDKGLTSLSLANENWRRPKVLSIDDRRAVWKSKELHGRFYKALTGPDVDLLASVNWLRFGDLFGETEGFVCAIADEVMMTNNYRRYILKDGTVDICRACRRPGESLRHIISGCSHLANGEYLHRHNQVARIIHQQLALQYGLVGSEVPYYKYAPMPVLENGRATLYWDRSIITDRTIVANKPDIVLVDRSKRQAVLVDITIPHDENLVKAEKDKLSKYLDLAHEVTAMWDVDSTIIVPIVVSANGLIAKSLDKHLKRLSLDGWIKGQIQKAVLLDTARIVRRFLSLQP

SEQ ID NO: 5198 - protein, 978 aa, Notocelia uddmanniana
MSNWALEEAITRYRSTPNSRPRLPRLPVNRRNLALMGALNDLLDPYLRASEDLIDTHSILYCGAIAACRVARVKFPDADRAPRTAGGVPAWQVRIERRINTFRTLIAKLICFRGGNDRPRVMRFVNQAFAGTGVRPRDYVTCVTERIDFLKQKVYAWASRIRRYRERVDRYQQNRLFQSDQRKVYRKWEGTDHRVCDGQRPDATAMGNFWRSIWSVPVEHTEGAWIGVVERECESIEPMGSVTISPEDISCAIRTAPNWKSPGPDGLHNFWLKWFRCSHERLATQFQQALELGSLPHLLTTGVTSLLYKSGSTTEAKNYRPITCLPTLYKLLTSILRAKINTHIVANNILAPAQNGCRVGSRGTKELLLIDMTICQRVRRSRGAFSAAWIDYKKAYDSVPHSWLRRILELYKVDAALRSFLSACMGQWTTVLRQPGGGDGSSGPQDSIRIERGIFQGDSLSPLWFCLALNPLSTLLKDSGLGCQLRRGDEVISHLLYMDDLKLFAPNRQDLLELLKTTEVFSSAIKMEFGVDKCAVMHVQRGKVVNSTNLQLSETMSLRSLSEAETYKYLGMSQSLGIEGEGIKQAVKERFFCRLTKVLNSFLSGGNKVRAFNAWVMPLLTYSFGILRWTQTELDALDRRVRILLTAHRMLHPRSSVMRLYIPRKCGGRGFLNAKDLHNREVCSLRDYFLNSECGMHHDVVAVDASFTPLSMENENWRRFKVLSTEDRKAEWKSRELHGRFYKALTGPDVDLLASVNWLRFGDLFGETEGFVCAIADEVIMTNNYRKYILKDGTVDICRACRRPGESLRHIISGCGHLANGEYLHRHNLVARIIHQQLALSYGLVNFEVPYYKYLPAPVLENGRATLYWDRSIITDRTIVANKPDIVLIDRSKRQAVLVDITIPHDENLVKAEKDKVSKYLDLAHEVTAMWDVDSTIIVPIVVSANGLIAKSLDQIQIQKAVLLDTARIVRRFLSLSP

SEQ ID NO: 5199 - protein, 1206 aa, Notocelia uddmanniana
MITRTRSRAAQRARPPSPPAPSSSSPSSSGDEFATAPDTSESSCDERGPPSPPPRPPARRGRPPLPARLGPVGHSALPTAPAAGGVVRRMRWTQEMNENCMRAYFGATEGETNLSAYRVRMLPLFQALEPTITVTAQRLSDQVRVIQRLKRLDDATLDRLRLEALSARTASALARDPPATSPAPVPTPDMAPGVPRVDPSVDEDCANQTVSTQTNEQLRRALEEAITRYRSTPNSRPRLPRLPVNRRNLALMGALNDLLDPYLRASEDLIDTHSILYCGAIAACRVARVKFPDADRAPRTAGGVPAWQVRIERRINTFRTLIAKLICFRGGNDRPRVMRFVNQAFAGTGVRPRDYVTCVTERIDFLKQKVYAWASRIRRYRERVDRYQQNRLFQSDQRKVYRKWEGTDHRVCDGQRPDATAMGNFWRSIWSVPVEHTEGAWIGVVERECESIEPMGSVTISPEDISCAIRTAPNWKSPGPDGLHNFWLKWFRCSYERLATQFQQALELGSLPHLLTTGVTSLLYKSGSTTEAKNYRPITCLPTLYKLLTSILRAKINTHIVANNILAPAQNGCRVGSRGTKELLLIDMTICQRVRRSRGALSAAWIDYKKAYDSVPHSWLRRILELYKVDAALRSFLSACMGQWTTVLRQPGGGDGSSGPQDSIRIERGIFQGDSLSPLWFCLALNPLSTLLKDSGLGCQLRRGGEVISHLLYMDDLKLFAPNRQDLLELLKTTEVFSSAIKMEFGVDKCAVMHVQRGKVVNSTNLQLSETMSLRSLSEAETYKYLAMSQSLGIEGEGIKQAVKERFFCRLTKVLNSFLSGGNKVRAFNAWVMPLLTYSFGILRWTQTELDALDRRVRVLLTTHRMLHPRSSVMRLYIPRKCGGRGFLNAKDLHNREVCSLRDYFLNSECGMHRDVVAVDASFTPLSMANENWRRFKVLSTEDRKAEWKSRELHGRFYKALTGPDVDLLASVNWLRFGDLFGETEGFVCAIADEVIMTNNYRKYILKDGTVDICRACRRPGESLRHIISGCGHLANGEYLHRHNLVARIIHQQLALSYGLVNFEVPYYKYLPAPVLENGRATLYWDRSIITDRTIVANKPDIVLIDRSKRQAVLVDITIPHDENLVKAEKDKVSKYLDLAHEVTAMWDVDSTIIVPIVVSANGLIAKSLDQHLKRLSLDGWVKGQIQKAVLLDTARIVRRFLSLSP

SEQ ID NO: 5200 - protein, 1206 aa, Notocelia uddmanniana
MITRTRSRAAQRARPPSPPAPSSSSPSSSGDEFATAPDTSESSCDERGPPSPPPRPPARRGRPPLPARLGPVGHSALPTAPAAGGVVRRMRWTQEMNENCMRAYFGATEGETNLSAYRVRMLPLFQALEPTITVTAQRLSDQVRVIQRLKRLDDATLDRLRLEALSARTASALARDPPATSPAPVPTPDMAPGVPRVDPSVDKDCANQTVSTQTNEQLRRALEEAITRYRSTPNSRPRLPRLPVNRRNLALMGALNDLLDPYLRASEDLIDTHSILYCGAIAACRVARVKFPDADRAPRTAGGVPAWQVRIERRINTFRTLIAKLICFRGGNDRPRVMRFVNQAFAGTGVRPRDYVTCVTERIDFLKQKVYAWASRIRRYRERVDRYQQNRLFQSDQRKVYRKWEGTDHRVCDGQRPDATAMGNFWRSIWSVPVEHTEGAWIGVVERECESIEPMGSVTISPEDISCAIRTAPNWKSPGPDGLHNFWLKWFRCSHERLATQFQQALELGSLPHLLTTGVTSLLYKSGSTTEAKNYRPITCLPTLYKLLTSILRAKINTHIVANNILAPAQNGCRVGSRGTKELLLIDMTICQRVRRSRGALSAAWIDYKKAYDSVPHSWLRRILELYKVDAALRSFLSACMGQWTTVLRQPGGGDGSSGPQDSIRIERGIFQGDSLSPLWFCLALNPLSTLLKDSGLGCQLRRGGEVISHLLYMDDLKLFAPNRQDLLELLKTTEVFSSAIKMEFGVDKCAVMHVQRGKVVNSTNLQLSETMSLRSLSEAETYKYLGMSQSLGIEGEGIKQAVKERFFCRLTKVLNSFLSGGNRVRAFNAWVMPLLTYSFGILRWTQTELDAMDRRVRVLLTAHRMLHPRSSVMRLYIPRKCGGRGFLNAKDLHNREVCSLRDYFLNSECGMHRDVVAVDASFTPLSMANENWRRFKVLSTEDRKEAWKSRELHGRFYKALTGPDVDLLASVNWLRFGDLFGETEGFVCAIADEVIMTNNYRKYILKDGTVDICRACRRPGESLRHIISGCGHLANGEYLHRHNLVARIIHQQLALSYSLVNFEVPYYKYLPAPVLENGRATLYWDRSIITDRTIVANKPDIVLIDRSKRQAVLVDITIPHDENLVKAEKDKVSKYLDLAHEVTAMWDVDSTIIVPIVVSANGLIAKSLDQHLKRLSLDGWVKGQIQKAVLLDTARIVRRFLSLSP

SEQ ID NO: 5201 - protein, 869 aa, Notocelia uddmanniana
MRFVNQAFAGTGVRPRDYMTCVTERIDFLKQKVYAWASRIRRYRERVDRYQLNRLFQSDQRKVYRKWEGTDHRVSDGQRPDATAMVNFWRSIWSVPVEHNEGAWIDVVKRECESIEPMGSVTVSPEDVSCAIRTAPNWKSPGPDGLHNFWLKWFRCSHARLAAQFQQALELGSLPSPLTTGVTSLLYKSGSTTEAKNYRPITCLPTLYKLLTSILRAKINTHIVANNILAPAQNGCRVGSRGTKELLLIDMTICQRVRRNRGTLSAAWIDYKKAYDSVPHSWLRRILELYKVDAVLRSFLVACMGQWTTVLRQPEGGEGPSGPQDSIRIERGIFQGDSLSPLWFCLALNPLSTLLKDSGLGCQLRREGEVISHLLYMDDLKLFAPNKHDLLELLKTTEVFSSAIKMEFGVDKCAVMHVQQGKVVNSTNLHISETTALRSLSEAETYKYLGMSQSLGIEGEDIKRAVRERFFCRLTKVLNSFLSGGNKVRAFNAWVMPLLTYSFGILRWTQTELDFLDRRVRVLLTAHRMLHPRSSVMRLYIPRKLGGRGFLNAKDLHNREVCSLRDYFLNSECGMHRDVVAADASFTPLSMANENWRRFKVLSTDDRRAVWKSKELHGRFYKALTGPDVDLLASVNWLRFGDLFGETEGFVCAIADEVIMTNNYRKYILKDGTVDICRACRRPGESLRHIISGCSHLANGEYLHRHNLVARIIHQQLALLYGLVDFEVPYYKYTPAPVLENGRATLYWDRSVITDRTIVANKPDIVLTDRLKRQAVLVDITIPHDENLVKAEKDKVSKYLDLAHEVTAMWDVDSTIIVPIVVSVNGLIAKSLDQHLKRLSLDGWVKGQIQKAVLLDTARIVRRFLSLSP

SEQ ID NO: 5202 - protein, 1212 aa, Notocelia uddmanniana
MITRSQTRRVQASQQSARPSPSPASSSSASASSEEEFATAPDTSSSSSDECGPPPPPPPPRPPARRGRPPLPARLGPAGHPVPHTAPATGGVVRRMQWSPSMNENCMRAYYGATDGGTNLSAYRVRMLPLFQALEPAISVSAQRLSDQVRVIQRLQRLDDATLDRLRLEALSARAASVSARNPPATLPAPVPAPDTAPGASRVDPSADEDCANQSVSTQAHEELRRALEEAITQYRSTPNSRPRLPRLPVNRRNLALMGALNDLLVPYLGASEDLIDTHSIMYCGAIAACRVARVKFPDADRAPRPAGSVPTWQVRIERRVDTYRTLIAKLICFRGGNSRPRVMRFVNQAFAGTGVRPRDYMDCVTERIDFLKQKVYAWASRIRRYRERLDRYQQNRLFQSDQRKVYRKWDGTDHRVSDGQRPDAAAMVNFWRSIWSVPVEHTEGPWIGAVERECESIEPMGSVTISPEDVSCAIRTAPNWKSPGPDGLHNFWLKWFRCSHARLAAQFQQALELGSLPPPLTTGVTSLLYKSGSTTEAKNYRPITCLPTLYKLLTSILRAKINAHIVANNILAPAQNGCRVGSRGTKELLLIDMTICQQVRRNRGALSAAWIDYRKAYDSVPHSWLGRILELYKVDAALRSFLCACMRQWTTVLRQPGGGDGPSVPQDSIRIERGIFQGDSLSPLWFCLALNPLSTLLKDSGLGCQLRRGGEVISHLLYMDDLKLFAPNTHNLLELLKTTEVFSSAIKMEFGVDKCAVMHVQRGKIVNSTNLQLSETTSLRSLSEADTYKYLGMSQSLGIEGGGIKRVLRERFFCRLTKVLNSFLSGGNKVRAFNAWVMPLLTYSFGILRWTQTELDLLDRRVRVLLTTNRMLHPRSSVMRLYIPRKLGGRGFLNAKDLHNREVCSLRDYFLNSECGMHRDVVAVDTLLTPLSMANENWRRLKVLSTEDRRAVWKSKELHGRFYKALTGPDVDLLASVNWLRFGDLFGETEGFVCAIADEVIMTNNYRKYILKDGTVDICRACRRPGESLRHIISGCSHLANGEYLHRHNLVARIIHQQLALLYGLVGFEVPYYKYTPAPVLENGRATLYWDRSVITGRTIVANKPDIVLTDRLKRQAILVDITIPHDENLVKAEKDKSSKYLDLAHEVTAMWDVDSTIIVPIDVSANGLIAKSLDQHLKRLSLDGWVKGQIQKAVLLDTARIVRRFLSLSP

SEQ ID NO: 5203 - protein, 1207 aa, Crocallis elinguaria
MITRSRNKAGTASARQSPPPASSSPSSSSGDEYGTPLDTSASSDEDGPPSPPPPPPPARRGRPPLPTRLGPAGHSVPRAAPATGGIVRRMRWTSVMNENCMRAYYGATEGGTNMSAYRDRMLPLFQTLEPSVAVSTQRLSDQVRAIQRLKLLDESVLDRLRLEALPIRATSASTRDLSVAPPVPAPLPAPSSVATRIDPVIDEDDCANISVSTQVNEQLRRALEDAILDYQYTPDSRPRLPRLPTNRRNLALMGALNVLLAPYLRASENLFDTHSIMYCGAIAVCRVARVKFPDADRAPRTAGSAPAWQVRIERRINTFRTLIAKLVCFSRGNNRPRVMRFVNQAFAGTGIRPQNYMAGVTERIDFLKQKIYAWVNRIRRYRERVDRYHQNRLFESDQRKVYRNWEGTDQRVSDGQLPDTNAMINFWRGIWSVPVEHTEGDWMRTVEQSCESIETMGSVTIDPIDVSCAIRTAQNWKSPGPDGLHNFWIKWIRCSHECLAVQFQEALELGSLPRFLTTGVTSLLHKSGSTTEAKNYRPITCLPTLYKLLTSILRVKINSHVVANNILAPAQNGCRVGSRGTKELLLIDTAICQRVRRNKGALSAAWIDYKKAYDSVPHSWLERILELYKIDATLRSFLSMCMRQWTTVLRQPGSGNSPSGPENFIKIERGIFQGDSLSPLWFCLALNPLSTLLRDSRLGCQLRREGEIISHLLYMDDLKLFAPKRPDLMELLKITEIFSSAIKMEFGVDKCAVMHVQRGKVVNSDNLQLSETMTLRSLSEAETYKYLGMSQSLGIAVGDIKQSVKERFFCRLTKVLNSLLSGGNKARAFNGWVMPLLIYSFGILKWTQTELDSLDRRVRQLLTYHRMLHPRSSVMRLYIPRKWGGRGFLNAKTLHNREVCSLREYFLNNECGMHRDVVAVDRNLTPLSLANENWRKPVVMTTEDRKDVWKGKELHGRFYRALTGSDVDLLASVNWLRFGDLFGETEGFVCAIMDEVIKTNNYRKYIMKDGTVDICRACRRPGESLRHIISGCSHLANGEYLHRHNLVARIIHQQIALQYGLVESEVPYYKYAPAPVLENGRALLYWDRSIITDRTIVANKPDIVLVDRSQRRAVLVDITVPHDENLVKAEKDKLSKYLDLAHEVTAMWNVDSTIIVPIVVSANGLVAKSLDQHLKRLSLDGWIKGRMQKAVLLDTARIVRRFLTLQP

SEQ ID NO: 5204 - protein, 1207 aa, Crocallis elinguaria
MITRSRNKAGTASARQSPPPASSSPSSSSGDEYGTPLDTSASSDEDGPPSPPPPPPPARRGRPPLPARLGPAGHSVPRAAPATGGIVRRMRWTSDMNENCMRAYYGATEGGTNMSAYRDRMLPLFQTLEPSVAVSAQRLSDQVRAIQRLKLLDESVLDRLRLEALPIRATSASTRDLSVAPPVLAPLPAPSSVATRIDPVVDEDDCANISVSTQVNEQLRRALEDAILDYQYTPDSRARLPRLPTNRRNLALMGALNVLLAPYLRASKNLFDTHSIMYCGAIAVCCVARVKFPDADRAPRTTGSAPAWQVRIERRINTFRTLIAKLVCFSRGNNRPRVMRFVNQAFAGTGIRPQNYMAGVTERIDFLKQKIYAWVNRIRRYRERVDRYHQNRLFESDQRKVYRNWEGTDQRVSDGQLPDTNAMINFWRGIWSVPVEHTEGDWMRTVEQSCESIETMGSVTIDPIDVSCAIRTAQNWKSPGPDGMHNFWIKWIRCSHECLAVQFQEALELGSLPCFLTTGVTSLLHKSGSTTEAKNYRPITCLPTLYKLLTSILRVKINSHVVANNILAPAQNGCRVGSRGTKELLLIDTAICQRVRRNRGALSAAWIDYKKAYDSVPHSWLERILELYKIDATLRSFLGMCMRQWTTVLRQPGSGNSPSGPENFIKIERGIFQGDSLSPLWFCLALNPLSTLLRDSRLGCQLRREGEIISHLLYMDDLKLFAPKRPDLMELLKITEIFSSAIKMEFGVDKCAVMHVQRGKVVNSDNLQLSETMTLRSLSEAETYKYLGMSQSLGIAVGDIKQSVKERFFCRLTKVLNSLLSGGNKARAFNGWVMPLLIYSFGILKWTQTELDSLDRRVRQLLTYHRMLHPRSSVMRLYIPRKWGGRGFLNAKTLHNREVCSLREYFLNNECGMHRDVVAVDRNLTPLSMANENWRKPVVMTTEDRKDVWKGKELHGRFYRALTGSDVDLLASVNWLRFGDLFGETEGFVCAIMDEVIKTNNYRKYIMKDGTVDICRACRRPGESLRHIISGCSHLANGEYLHRHNLVARIIHQQIALQYGLVESEVPYYKYAPAPVLENGRALLYWDRSIITDRTIVANKPDIVLVDRSQRRAVLVDITVPHDENLVKAEKDKLSKYLDLAHEVTAMWNVDSTIIVPIVVSANGLVAKSLDQHLKRLSLDGWIKGRMQKAVLLDTARIVRRFLTLQP

SEQ ID NO: 5205 - protein, 1011 aa, Peribatodes rhomboidaria
MANTDVDGDRTSVNVSSQVSEQLRRTLEDAISQYRYAPDSRPRLPRLPTHRRNMALMGALNVLLAPYLRASENLTDTHSILYCGAIAACRVARVKFPDTSRAPRPAGGVPAWQVRIERRISTFRTLIAKLLCFSRGNTRPRVMRFVTQAFAGTDIRPQYYLANVTERIDYLKQKVYAWANRIRRYKERVDRYWQNRLFQSDQRKVYRGWEGTEQCVIDGHRPDARTMIDFWRGIWSVPVEHTEGEWMRIVERECESIESMESILIDSVDVSCAIRTAQNWKSPGPDGLHNFWIKWIRCSHDRLAIQFQEALELGSLPSFMTTGVTFLLHKSDSTTDPKNYRPITCLPTIYKLLTSILRNKINTHIVANNVLAPAQNGCRVGSRGTKELLLIDMAISQQVRRNKGALSVAWIDYKKAYDSVPHSWLERILELYKIDITLKSFLSACMRQWTTVLCQPGGGEVSADPQDLIRIERGIFQGDSLSPLWFCLALNPLSTLLKDLGLGHRLRRGGEVISHLLYMDDLKLFAPKRQDLMELLKTTEVFSSAIKMEFGVDKCAVMHVQRGKVVNSPNLQLSETMTLRSLSEVETYKYLGMSESLGISVVDIKKSIKERFFCRLTKVLNSLLSGGNKVRAFNGWVMPLLIYSFGILRWTQTELDALDRRVRQLLTTHRMLHPRSSVMRLYIPRKWGGRGMLNAKNLHHREVYRLRSFFRNNDCGMHCDVVAVDKGLTPLSLANENWRQPSVLSTEDRKNVWKGKELHGRFYRALTGPDVDLLASANWLRFGDLFGETEGFACAIADEVIKTNNYRKYILKDGTVDICRACHRPGESLRHIISGCSHLANGEYLHRHNQVARIIHQQLALQYGLVESEVPYYKYAPASVLENGRALLYWDRSIITDRTIVANKPDIVLVDRSQRRAVLVDITIPHDENLVKAEKDKLRKYLDLAHEVTAMWDVDSTIIVPIVVTVNGLIAKSLDQHLKRLSLDGWIKGQIQKAVILDTCRIVRRFLTLQP

SEQ ID NO: 5206 - protein, 1209 aa, Pammene fasciana
MITRSRTKAASTNARPPSSPASSVSSPSSSGDEFATAPDTSESSDECGPPPPPPRPPARRGRPPLPARLGLAGHPVPPRAPAAGGIVRRMRWTPAMNENVMRAYYGATEGGTNLSAYRDRILPLFQALEPTIDTTAQRLSDQVRAIQRLKRLDDATLDRLRLEALSAHADSTSVRDPPATSPDPMPVPDLASGAPRIDPSADEEYIASQSMSSTANEQLRRTLEEAITQYRSTNIPRPRLPRLPMNRRNLALMGALNDLLDPILRTSKDLDDTHSIMYCGAIAACRVARVKFPDAERAPRTAGGVPVWQVRIERRINSFRTLIAKLICFRGGNNRPRVMRFVHQAFAGTGIEPRDYMANVTERIDFLKQKVYAWASRIRRYRERVDRFRQNRLFQSDQRKIYRRWEEADPRVSDVRLPDATAMTDFWRSIWSAPVEHTEGEWMSVVERECESIEPMGAITINPDDVSCAIRTAQNWKSPGPDGLHNFWLKWFRCSHSRLATQFQQALELGSLPPSLTTGVTFLLYKSGSTTEAKNYRPITCLPTLYKLLTSILRAKINAHIVANNILASSQNGCRVGSRGTKELLLIDMTICQRVRRNRGALSAAWIDYKKAYDSVPHSWLERILELYKVDAALRSFLGACMRQWTTVLRQPGGGDDPPDPHDFIRIERGIFQGDSLSPLWFCLALNPLSTLLKDSGLGCRLRREGEVISHLLYMDDLKLFAPNNRDLMELLKTTEVFSSSIKMEFGVDKCAVMHVQRGKVVNSTNLQLSETMTFRSISESETYKYLGMSQSLGIEDAGIKQALKERFFGRLTKVLNSLLSGGNKVRAFNAWVMPLLTYSFGILRWTQTELDALDRRVRLLLTTHRMLHPRSSVMRLYIPRKCGGRGFLNAKNLHNREVYNLRNYFLNNECGMHRDVVAVDKSLTPLSLANENWRKPVVLSTEDRKAVWKSKELHGRFYGALTGPDVDLLASVNWLRFGDLFGETEGFACAIADEVIMTNNYRRYILKDGTVDICRACRRPGESLRHIISGCSHLANGEYLHRHNLVARIIHQQLALLYGLVDHEVPYYKYTPAPVLENGRATLYWDRSIITDRTIVANKPDIVIIDRSQRRAMLVDITVPCDVNLVKAEKDKSSKYLDLAHEVTAMWEVDSAIIVPIVVSANGLIAKSLDQHLERLSLRGCGWIKGQIQKAVILDTARIVRRFLSLRP

SEQ ID NO: 5207 - protein, 1210 aa, Pammene fasciana
MITRAQTKAAQQQRARPPPSPTPSSSSPSSSGDEYATAPDANISESSSDERGSSPSPPPPPARRGKRPLPARLGPAGQPAPPTAPAAGGPVRRMRWTPSINENVMRAYFGATVGGTQLSAYRSKMLPLFQALEPTITVSEQRLSDQVRVIQRLKRLDDATLDRLRLEALSAHAASASTRDPPATSPDLMPAPGRASGAPRVDPSVDEEFTCQSVSTSANEQLRRALEEAITQYRSTNNSRPRLPRLPMNRRNLAIIGALNDLLDPLVRTSKDLDDTHSIMYCGAIAACRVARVKFPDAERAPRTAGGVPAWQVRIERRINSFRTLIAKLICFRGGNDRPRVMRFVNQAFAGTGIEPRDYMANITERIDFLKQKVYAWANRIRRYRKRVERFQQNRLFQSDQRKVYRRWEETDPRVSDAQLPDATAMTDFWRSIWSVPVEHTEGEWMSVVERECETIEPMGATTISPDDVSCAIRTSQNWKSPGPDGLHNFWLKWFRCSHSRLATQFQQALDLGSLPPSLTTGVTFLLYKSGSTTEAKNYRPITCLPTLYKLLTSILRAKINAHIVANNILASAQNGCRVGSRGTKELLLIDMTICQRVRRNRGALSAAWIDYKKAYDSVPHSWLERILELYKVDATLRSFLGACMRQWTTVLRQPGGGDDPLGPQDSIRIKRGIFQGDSLSPLWFCLALNPLSTLLKDSGLGCQLRREGEAISHLLYMDDLKLFAPNNRDLMELLKTTEVFSSSIKMEFGVDKCAVMHVQRGKVVNSTNLQLSETMTFRSISESETYKYLGMSQSLGIEDAGIKQALRERFFGRLTKVLNSLLSGGNKVRAFNAWVMPLLTYSFGILRWTQTELDALDRRVRLLLTTHRMLHPRSSVMRLYIPRKCGGRGFLNAKNLHNREVYNLRNYFLNNECGMHRDVVAVDKGLTPLSLANENWRKPVVLSTEDRKMVWKSKELHGRFYKALMGPDVDLLASVNWLRFGDLFGETEGFACAIADEVIMTNNYRRYILKDGTVDICRACRRPGESLRHIISGCSHLANGEYLHRHNLVARIIHQQLALQYGLVNREVPYYMYLPAPVLENGRVTLYWDRSIITDRTIVANRPDIVLIDRSQRRAVLVDVAIPHDENLVKAEKDKSSKYLDLAHEITAMWDVDSTIIVPVIVSANGLIAKSLDQHLERLSLGGWIKGQIQKAVVMDTARIVRRFLSLRP

SEQ ID NO: 5208 - protein, 1210 aa, Pammene fasciana
MITRSKARAATTHARPPSPLASSSSPSTSSSSDDFETAPDTDESSDESGPPPPPPQPPARRGRPPLPARLGPTGHPVPPRAPAAGGIVRRMRWTCSMNENVMRAYYGATEGGTNLCAYRARILPLFQALEPTIDTTTQRLSDQVRVIQRLKPLDDATLDRLRLEALSARATSTSARDPPATSPDPMPAPDLASGAPRIDPSADEEYIASQSVSSTANEQLRRTLEEAITQYRSTNIPRPRLPRLPMNRRNLALMGALNDLLDPILRTSKDLDDTHSIMYCGAIAACRVARIKFPDAERAPRTAGGVPAWQVRIERRINSFRTLIAKLICFRGGNNRPRVMRFVYQAFAGTDIEPRDYMANITERIDFLRQKVYAWASRIRRYRERVDRFRQNRLFQSDQRKVYRRWEEADPRVSDVRLPDATAMTDFWRSIWSAPVEHTEGEWMNVVERECESIEPMGAITISPDDVCCAIRTSQNWKSPGPDGLHNFWLKWFRCSHSRLATQFQHALELGSLPPSLTTGVTFLLYKSGSTTEAKNYRPITCLPTLYKLLTSILRAKINAHMVANNILASAQNGCRVGSRGTKELLLIDMTICQRVRRNRGALSAAWIDYKKAYDSVPHSWLERILELYKVDAALRSFLGACMRQWTTVLRQPGGGDDPPGPQDFIRIERGIFQGDSLSPLWFCLALNPLSTLLKDSGLGCRLRREGEVISHLLYMDDLKLFAPNNRDLLELLKTTEVFSSSIKMEFGVDKCAVMHVERGKVVNSTNLQLSETMTFRSISESETYKYLGMSQSLGIEDVGIKQTLKERFFGRLTKVLNSLLSGGNKVRAFNAWVMPLLTYSFGILRWTQTELDALDRRVRLLLTTHRMLHPRSSVMRLYIPRKCGGRGFLNAKNLHNREVYNLRNYFLNNECGMHRDVVTVDKNLTPLSLANENWRKPVVLSTEDRKAVWKSKELHGRFYGALTGPDVDLLASVNWLRFGDLFGETEGFACAIADEVIMTNNYRRYILKDGTVDICRACRRPGESLRHIISGCSHLANGEYLHRHNLVARIIHQQLALLYGLVAHEVPYYKYTPAPVLENGRATLYWDRSIITDRTIVANKPDIVVIDRPQRRAMLVDITVPCDVNLVKAEKDKSSKYLDLAHEVTAMWEVDSAIIVPIVVSANGLIAKSLDQHLERLSLRGCGWIKGQIQKAVILDTARIVRRFLSLRP

SEQ ID NO: 5209 - protein, 1205 aa, Bembecia ichneumoniformis
MKLRKRKHEAEQSAHPPPLPVSSSPCSSAEEFLTADNKSTSSDDDGPTPLSPPRRPARRGRPPLPASLGPARPSASRPAPATGGVVRRMRWTHTMNENCMRAYYGATEGATNLTAYRARMLSLFQALEPAVTVTAQRLSDQVRAIQRCQLLEQSVLDRLRLDSLPARTTSAATQDLRAALPLPESTNIPTSAALLTDPVDQEICASTNVSTETKEQLRRALEEAISRYHTKPNDRPRLPRLPTHNQNIALMGALNTLLAPYIKASRDLTDTHSILYCGAIAACRVARVKFLNFDRAARDAEGVPAWQMRIERRISKFRTLIAKLISFSRGNTRPRVMRFVAQAFVGTNIKSKDYLTWATERIDYFKQKVYALANRVRRYKERVQRYRQNRLFQSDQRKVYRDWERTNQSVNVGHPPDPEVMLNFWHDIWSVSDEHTEGDWISIVEQACEPITAMEAITISPTDLSCAIRSTQNWKSPGPDGLHNFWIKMFQCSHECLAVQFQKALELGTLPTFLTTGTTFLLHKSGSTAEAKNYRPITCLPTIYKLLTSILRTKINSHILKNNILDTAQNGCKIGSRGTKELLLIDMTICQHVRRSSGALSVAWIDYKKAYDSVPHSWLRRILELYKIDTTLRSFLAMCMGQWITVLRQPGYRGSDAGLRDTIKIERGIFQGDSLSPLWFSLALNPLSTLLRNLKLGYRLRRGGEVISHLLYMDDLKLFAPKPKDLLELLKITQCFSNAIRMDFGVDKCAVMHVQKGKVVNSPNLQLSDEVSFKSLSEVETYKYLGMSQSLGISDKDIKQTVKTRFFGRLTKVLNSFLSGGNKVRAFNGWVMPLLTYSFGILRWTQTELDGLDRGVRRLLTAHRMLHPRSSIMRLYIPRKLGGRGFLNAKNLHNREVYSLREYFLNHGSGVHRDVVAIDKNFTPLSLANGNWRRLVVLSTEDRESVWKGKELHGRFYKALTGPDVDSLMSVNWLRFGDLFGETEGFVCAIADEVIKTNNYRKYILKDGTVDICRACHRPGETLRHIISGCAHLSNGEYLHRHNQVARIIHQRLAIRYGLIESEVPYYKYVPAPVLENGHATLYWDRSIITDRTIVANKPDIVVIDRSQRRTMLVDIAVPHDENLVKAEKEKLTKYIDLAHEVTAMWDVDSTIIVPIVVSANGLIAKSLDQHLKRLSLDGWIKGQIQKAVLLDTARIVRRFLTLQP

SEQ ID NO: 5210 - protein, 1208 aa, Ennomos quercinarius
MITRSRTRKAETQSARLPPPPAPSSPSSSSGDEYGTPPDTTASSDEDGPPSPSPPPPPARRGRPPLPARLGPAGQPAPRAAPATGGIVRRMRWTQAMNENCMRAYYGATEGGSSLTAYRDRMLSLFQDLEPAVAVSAQRLSDQVRAIQRCKMLDEPTLDRLRLEALPIRATSPSPRVLPAALPDPGPIMGPLPVTPRGDPAIDGEESASDSVSTQANEQLRSALEDAILRYRSTPTSRPRLPRLPTNRRNLVLMGALNTLLAPYLRTSEDLVDTHSILYCGAIAACRVARVKFPDTDRAPRPADGAPAWQVRIEKRITTFRTLIAKLVCFSRGNHRPRVMRFVTQAFAGTGIRPQDYMACVTERIDFLKQKVYAWASRIRRYRERVDRYQQNRLFQSDQRKVYRNWEGTGQRVVDGQLPDANATNEFWRSIWSVPVEHTEGDWMRVVERVCEPIESMGSITIDPEDISCAIRTAQNWKSPGPDGLHNFWIKWIRCSYPCLAIQFQEALEAGSLPSFMTTGVTFLLHKSGSTTEAKNYRPITCLPTLYKLLTSILRTKINSHIVANNILAPAQNGCRVGSRGTKELLLIDTAICQQVRRNRGALSTAWIDYKKAYDSVPHSWLERILELYKIDATLRSFLSACMRQWTTVLRQPGGGESVSDPQDFIRIERGIFQGDSLSPLWFCLALNPLSTLLGDSGLGYRLRRGGEIISHLLYMDDLKLFAPQRPQLIELLKITENFSNSINMEFGVDKCAVMHVHRGKVVNSTNLQLSETMTLRSLSESETYRYLGMSESLGISVGDVKRTVKERFFCRLTKVLNSLLSGGNKTRAFNGWVMPLLMYSFGILRWTQTELDALDRKVRQLLTSHRMLHPRSSVMRLYIPRKWGGRGFLNAKTLHNREVCSLRDYFLNNECGMHRDVVAVDKGLTPLSLANENWRKPVVLSTEDRRDVWKGKELHGRFYRALTGPDVDLHASVNWLRFGDLFGETEGFVCAIADEVIKTNNYRKYIMKDGTVDICRACRRPGESLRHIISGCSHLANGEYLHRHNLVARIIHQQLALQYGLVESEVPYYKYTPGPVLENGRALLYWDRSIITDRTIVANKPDIVLVDRSQRRAVLVDITIPHDENLVKAEKDKLSKYLDLAHEVTAMWNVDSTSIVPIVVSANGLIAKSLDQHLERLSLDGWIKGQIQKAVLLDTARIVRRFLTLQP

SEQ ID NO: 5211 - protein, 869 aa, Ennomos quercinarius
MRFVTQAFAGTGIRPQDYMACVTERIDFLKQKVYAWASRIRRYRERVDRYQQNRLFQSDQRKVYRNWEGTGQRVVDGQLPDANATNEFWRSIWSVPVEHTEGDWMRVVERVCEPIESMGSITIDPEDISCAIRTAQNWKSPGPDGLHNFWIKWIRCSYPCLAIQFQEALEAGSLPSFMTTGVTFLLHKSGSTTEAKNYRPITCLPTLYKLLTSILRTKINSHIVANNILAPAQNGCRVGSRGTKELLLIDTAICQQVRRNRGALSTAWIDYKKAYDSVPHSWLERILELYKIDATLRSFLSACMRQWTTVLRQPGGGESVSDPQDFIRIERGIFQGDSLSPLWFCLALNPLSTLLGDSGLGYRLRRGGEIISHLLYMDDLKLFAPQRPQLIELLKITENFSNSINMEFGVDKCAVMHVHRGKVVNSTNLQLSETMTLRSLSESETYRYLGMSESLGISVGDVKRTVKERFFCRLTKVLNSLLSGGNKTRAFNGWVMPLLMYSFGILRWTQTELDALDRKVRQLLTSHRMLHPRSSVMRLYIPRKWGGRGFLNAKTLHNREVCSLRDYFLNNECGMHRDVVAVDKGLTPLSLANENWRKPVVLSTEDRRDVWKGKELHGRFYRALTGPDVDLHASVNWLRFGDLFGETEGFVCAIADEVIKTNNYRKYIMKDGTVDICRACRRPGESLRHIISGCSHLANGEYLHRHNLVARIIHQQLALQYGLVESEVPYYKYTPGPVLENGRALLYWDRSIITDRTIVANKPDIVLVDRSQRRAVLVDITIPHDENLVKAEKDKLSKYLDLAHEVTAMWNVDSTSIVPIVVSANGLIAKSLDQHLEKLSLDGWIKGQIQKAVLLDTARIVRRFLTLQP

SEQ ID NO: 5212 - protein, 1208 aa, Cydia splendana
MITRSRAKAVTTSARLPPPPASSTSSSTLSSGDEFATAPDTDGSSDESGPPPPPPRPPVRRGRPPLPARLGPAGHPAPPTAPATGGIVRRMRWTRDMNENVMRAYYGATEGGTQLSAYRSRILPLFQTLEPTITVSEQRLSDQVRVIQRLKRLDDATLDRLRQEALSARADSISVRDLPATSPDPVPAPDLAPGAPRVDFCTDEGDFVSQNVSTTANEQLRRTLEEVITQYRATTNSRPRLPRLPMNRRNLALMGALNALLEPHLRTSKDLDDTHSILYCGAIAACRVARVKFPDAERAPRTVGGVPAWQARIERRISSFRTLIAKLICFRGGNNRPRVMRFVNQAFAGTDIRPRDYMANVTERIDFLKQKVYAWANRIRRYRERVDRFQQNRLFQSDQRKVYRKWEETNLRTPDTQPPDATAMTDFWRSIWSMPVGHTEGGWMSVVERECEFIEPMGAVTISPDDISCAIRTAQNWKSPGPDGLHNFWLKWFRCSHSRLAAQFQQALELGSLPPSLTTGVTYLLYKSGSTTEAKNYRPITCLPTLYKLLTSILRAKINAHIVANNILASAQNGCRVGSRGTKELLLIDMTICQQIRRNKGALSAAWIDYKKAYDSVPHSWLGRVLELYKVDAALRAFLSACMRQWTTVLRQPGGGDDPPDPQDFIRIERGIFQGDSLSPLWFCLALNPLSTLLKDLGLGCRLRREGEIISHLLYMDDLKLFAPNSQDLSELLKTTEGFSSAINMEFGVDKCAVMHVQRGRVVNSTNLQLSETMSFRSISESETYKYLGMSQSLGIEDEGIRRSVKERFFSRLTKVLNSLLSGGNKVRAFNAWVMPLLTYSFGILRWTQTELDALDRRVRSLLTTHRMLHPRSSVMRLYIPRKCGGRGFLNAKDLHNREVYNLRNYFLNNECGMHRDVVAVDRNLTPLSLANENWRKPVVLSTADRKAAWESKVLHGRFYKALTGPDVDLLASVNWLRFGDLFGETEGFACAIADEVMMTNNYRKYILKDGTVDICRACRRPGESLRHIISGCSHLANGEYLHRHNLVARIIHQQLALLYGLVDREVPYYKYLPAPVLENGRATLYWDRSIITDRTIVANKPDIVIIDRSQRRAVLVDITIPHDENLVKAEKDKSSKYLDLAHEITAMWDVDSTIIVPIVVSVNGLIAKSLDQHLERLSLGGWIKGQMQKAVILDTARIVRRFLSLQP

SEQ ID NO: 5213 - protein, 1209 aa, Cydia splendana
MQTRSKTRAQLASPRNARPPPPSASSVSSQSSSGDEFATAPDTSESSDECGPPPPPSRPPARRGRPPLSARLGPAGHPAPPTAPAAGGVVRRMRWSQTINENVMRAYYGATEGGTNLCAYRVRMLPLFQALEPTIDVTAQRLSDQVRVIQRQKRLDDSTLDRLRLEALSARAASTSARDPPATSPDPVPAPDQAPGAPRVDLSADEEEFAQSVGSTANEQLRRTLDEAITRYRSTPDTRPRLPRLPMNRHNLALMGALNALLEPYLRTSKDLDDTHAIMYCGAIAACRVARVKFPDSERAPRTAGGAPAWQIRIERRISSFRTLIAKLICFRGGNNRPRVMRFVNQAFVGTDIRPRDYMANVTERIDFLKQKVYAWANRIRRYRERVDRFQQNRLFQSDQRKMYRKWEETNLRASDSRPPDATVMNDFWRSIWSVPVGHTEGSWMSVVERECESIEPMGAVTISPDDVSCAIRTAQNWKSPGPDGLHNFWLKWFRCSHSYLAAQFQQALELGSLPPSLTTGVTFLLYKSGSTTEAKNYRPITCLPTLYKLLTSILRAKINAHIVANNILASAQNGCRVGSRGTKELLLIDMTICQQIRRTKGALSAAWIDYKKAYDSVPHSWLGRVLELYKVDAALRAFLSACMGQWTTVLRQPGGGDDRPGPQDFIRIERGIFQGDSLSPLWFCLALNPLSTLLKDLGLGCRLRREGEVISHLLYMDDLKLFAPNTQGLLELLKTTEVFSSAINMEFGVDKCAVMHVQRGKVVNSTNLQLSETMSFRSISESETYKYLGMSQSLGIEDEGIRRSVKERFFSRLTKVLNSLLSGGNKVRAFNAWVMPLLTYSFGILRWTQTELDALDRRVRSLLTTHRMLHPRSSVMRLYIPRKCGGRGFLNAKDLHNREVYNLRNYFLNNECGMHRDVVAVDRNLTPLSLANENWRKPVVLSTADRKAAWESKALHGRFYKALTGPDVDLLASVNWLRFGDLFGETEGFACAIADEVMMTNNYRKYILKDGTVDICRACRRPGESLRHIISGCSHLANGEYLHRHNLVARIIHQQLALLYGLVDREVPYYKYLPAPVLENGRATLYWDRSIITDRTIVANKPDIVLIDRSQRRAVLADVTIPHDENLVKAEKDKSSKYLDLAHEITAMWDVDSTIIVPIVVSANGLIAKSLDQHLERLSLGGWIKGQMQKAVILDTARIVRRFLTLRP

SEQ ID NO: 5214 - protein, 1185 aa, Cydia splendana
MSSSTSSSGDEFATAPDTDGSSDESGPPPPPPRPPARRGRPPLPARLGPAGHPAPPTAPAAGGIVRRMRWTRDMNENVMRAYYGATEGGTQLSAYRSRILPLFQALEPTITVSEQRLSDQVRVIQRLKRLDDATLDRLRQEALSARADLTSVRDLPATSPDPVPAPDLAPGAPRVDFCTDEGDFASQNVSTTANEQLRRTLEEAITQYRATTNSRPRLPRLPMNRRNLALMGALNALLEPYLRTSKDLDDTHSIMYCGAIAACRVARIKFPDAERAPRTVGGVPAWQARIERRISSFRTLIAKLICFRGGNNRPRVMRFVNQAFAGTDIRPCDYMANVTERIDFLKQKVYAWANRIRRYRERVDRFQQNRLFQSDQRKVYRRWEEANLRAPDTQPPDATAMTDFWRSIWSVPVGHTEGGWMSVVERECESIEPMGAVTISPDDVSCAIRTAQNWKSPGPDGLHNFWLKWFRCSHSCLAAQFQQALELGSLPPSLTTGVTFLLYKSGSTTEAKNYRPITCLPTLYKLLTSILRAKINAHIVANNILASAQNGCRVGSRGTKELLLIDMTICQQIRRNKGALSAAWIDYKKAYDSVPHSWLGRVLELYKVDAALRAFLSACMRQWTTVLRQPGGRDDRPGPQDFIRIERGIFQGDSLSPLWFCLALNPLSTLLKDLGLGCRLRREGEVISHLLYMDDLKLFAPNSQDLLGLLKTTEVFSSAIHMEFGVDKCAVMHVQRGRVVNSTNLQLSETMSFRSISESETYKYLGMSQSLGIEDEGIRRSVKERFFSRLTKVLNSLLSGGNKVRAFNAWVMPLLTYSFGILRWTQTELDALDRRVRSLLTAHRMLHPRSSVMRLYIPRKCGGRGFLNAKDLHNHEVYNLRNYFLNNECGMHRDVVAVDRNLTPLSLANENWRKPVVLSTADRRAAWESKVLHGRFYKALTGPDVDLLASVNWLRFGDLFGETEGFACAIADEVMMTNNYRKYILKDGTVDICRACRRPGESLRHIISGCSHLANGEYLHRHNLVARIIHQQLALLYDLVDREVPYYKYLPAPVLENGRATLYWDRSIITDRTIVANKPDIVIIDRSQRRAVLVDITIPHDENLVKAEKDKSSKYLDLAHEITAMWDVDSTIIVPIVVSVNGLIAKSLDQHLERLSLGGWIKGQMQKAVILDTARIVRRFLSLQP

SEQ ID NO: 5215 - protein, 1118 aa, Cydia splendana
MRWTRNMNENVMRAYYGATEGGTQLSAYRSRILPLFQALEPTITVSEQRLSDQVRVIQRLKRLDDATLDRLRQEALSARADSTSVRDLPATSPDPVPAPDLAPGAPRVDFCTDEGDFASQNVSTTANEQLRRTLEEAITQYRATTNSRPRLPRLPMNRRNLALMGALNALLEPHLRTSKDLDDTHSIMYCGAIAACRVARVKFPDAERASRTVGGVPAWQARIERRISSFRTLIAKLICFRGGNNRPRVMRFVNQAFAGTDIRPRDYMANVTERIDFLKQKVYAWANRIRRYRERVDRFQQNRLFQGDQRKVYRKWEETNLRTPDTQPPDVTAMTDFWRSIWSVPVGHTEGGWMSVVERECESIEPMGAVTISPDDVSCAIRTAQNWKSPGPDGLHNFWLKWFRCSHSCLAAQFQQALELGSLPPSLTTGVTFLLYKSGSTTEAKNYRPITCLPTLYKLLTSILRAKINAHIVANNILASAQNGCRVGSRGTKELLLIDMTICQQIRRNKGALSAAWIDYKKAYDSVPHSWLGRVLELYKVDAALRAFLSACMRQWTTVLRQPGGRDDRPGPQDFIRIERGIFQGDSLSPLWFCLALNPLSTLLKDLGLGCRLRREGEVISHLLYMDDLKLFAPNSQDLLELLKTTEVFSSAIHMEFGVDKCAVMHVQRGRVVNSTNLQLSETMSFRSISESETYKYLGMSQSLGIEDEGIRRSVKERFFSRLTKVLNSLLSGGNKVRAFNAWVMPLLTYSFGILRWTQTELDALDRRVRSLLTAHRMLHPRSSVMRLYIPRKCGGRGFLNAKDLHNHEVYNLRNYFLNNECGMHRDVVAVDRNLTPLSLANENWRKPVVLSTADRKAAWESKVLHGRFYKALTGPDVDLLASVNWLRFGDLFGETEGFACAIADEVMMTNNYRKYILKDGTVDICRACRRPGESLRHIISGCSHLANGEYLHRHNLVARIIHQQLALLYDLVDREVPYYKYLPAPVLENGRATLYWDRSIITDRTIVANKPDIVIIDRSQRRAVLVDITIPHDENLVKAEKDKSSKYLDLAHEITAMWDVDSTIIVPIVVSVNGLIAKSLDQHLERLSLGGWIKGQMQKAVILDTARIVRRFLSLQP

SEQ ID NO: 5216 - protein, 1118 aa, Cydia splendana
MRWTRNMNENVMRAYYGATEGGTQLSAYRSRILPLFQALEPTINVSEQRLSDQVRVIQRLKRLDDATLDRLRQEALSARADSTSVRDLPATSPDPVPAPDLAPGAPRVDFYTDEGDFASQNVNTTANEQLRRTLEEAITQYRVTTNSRPRLPRLPMNRRNLALMGALNALLEPHLRTSKDLDDTHSIMYCGAIAACRVARVKFPDTERAPRTVGGVPAWQARIERRIGSFRTLIAKLICFRGGNNRPRVMRFVNQAFAGTDIRPRDYMANVTERIDFLKQKVYAWANRIRRYRERVDRFQQNRLFQSDQRKVYRKWEEANLRAPDTQPPDATAMTDFWRSIWSVPVGHTEGGWMSVVERECESIEPMGAVTISPDDVSCAIRTAQNWKSPGPDGLHNFWLKWFRCSHSRLAVQFQQALELGSLPPSLTTGVTFLLYKSGSTTEAKNYRPITCLPTLYKLLTSILRAKINAHIVANNILASAQNGCRVGSRGTKELLLIDMTICQQIRRNKRALSAAWIDYKKAYDSVPHSWLGRVLELYKVDAALRAFLSACMRQWTTVLRQPGGGGDRSGPQDFIRIERGIFQGDSLSPLWFCLALNPLSTLLKDLGLGCRLRREGEVISHLLYMDDLKLFAPNSQDLLELLKTTEVFSSAIHMEFGVDKCAVMHVQRGRVVNSTNLQLSETMSFRSISESETYKYLGMSQSLGIEDEGIRRSVKERFFSRLTKVLNSLLSGGNKVRAFNAWVMPLLTYSFGILRWTQTELDALDRRVRSLLTAHRMLHPRSSVMRLYIPRKCGGRGFLNAKDLHNHEVYNLRNYFLNNECGMHRDVVAVDRNLTPLSLANENWRKPVVLSTADRKAAWESKVLHGRFYKALTGPDVDLLASVNWLRFGDLFGETEGFACAIADEVMMTNNYRKYILKDGTVDICRACRRPGESLRHIISGCSHLANGEYLHRHNLVARIIHQQLALLYDLVDREVPYYKYLPAPVLENGRATLYWDRSIITDRTIVANKPDIVIIDRSQRRAVLVDITIPHDENLVKAEKDKSSKYLDLAHEITAMWDVDSTIIVPIVVSVNGLIAKSLDQHLERLSLGGWIKGQMQKAVILDTARIVRRFLSLQP

SEQ ID NO: 5217 - protein, 1171 aa, Cydia splendana
MPDTDGSSDESGPPPPPPRPPARRGRPPLPARLGPAGHPAPPTAPATGGIVRRMRWTRDMNENVMRAYYGATEGGTQLSAYRSRILPLFQTLEPTITVSEQRLSDQVRVIQRLKRLDDATLDRLRQEALSARADSISARDLPATSPDPVPAPDLAPGAPRVDFCTDEGDLVSQNVSTTANEQLRRTLEEVITQYRATTNSRPRLPRLPMNRRNLALMGALNALLEPHLRTSKDLDDTHSILYCGAIAACRVARVKFPDAERAPRTVGGVPAWQARIERRISSFRTLIAKLICFRGGNNRPRVMRFVNQAFAGTDIRPRDYMANVTERIYFLKQKVYAWANRIRRYRERVERFQQNRLFQSDQRKVYRKWEETNLRTPDTQPPDATAMTDFWRSIWSMPVGHTEGSWMSVIERECESIEPMGAVTISPDDVSCAIRTAQNWKSPGPDGLHNFWLKWFRCSHSCLAAQFQQALELGSLPPSLTTGVTFLLYKSGSTTEAKNYRPITCLPTLYKLLTSILRAKINAHIVANNILASAQNGCRVGSRGTKELLLIDMTICQQIRRTKGALSAAWIDYKKAYDSVPHSWLGRVLELYKVDAALRAFLSACMGQWTTVLRQPGGGDDQPGPQDFIRIERGIFQGDSLSPLWFCLALNPLSTLLKDLGLGCRLRREGEVISHLLYMDDLKLFAPNTQGLLELLKTTEVFSSAINMEFGVDKCAVMHVQRGRVVNSTNLLLSETMSFRSISESETYKYLGMSQSLGIEDEGIRRSVKERFFSRLTKVLNSLLSGGNKVRAFNASVMPLLTYSFGILRWTQTELDALDRRVRSLLTTHRMLHPRSSVMRLYIPRKCGGRGFLNAKDLHNREVYNLRNYFLNNECGMHRDVVAVDRNLTPLSLANENWRKPVVLSTADRKAAWENKVLHGRFYKALTGPDVDLLASVNWLRFGDLFGETEGFACAIADEVMMTNNYRKYILKDGTVDICRACRRPGESLRHIISGCSHLANGEYLHRHNLVARIIHQQLALLYDLVDREVPYYKYLPAPVLENGRATLYWDRSIITDRTIVANKPDIVLIDRSQRRAVLADVTIPHDENLVKAEKDKSSKYLDLAHEITAMWDVDSTIIVPIVVSANGLIAKSLDQHLERLSLGGWIKGQMQKAVILDTARIVRRFLSLQP

SEQ ID NO: 5218 - protein, 1211 aa, Agriopis aurantiaria
MITRAKTRAAESNARLPPPPASSSSPSTSSGEDEYHTTREASGSSSDTSGPGTPPPPPPARRGRPPLPARLGPVGHSATRPAPATGGVVRRMRWSTIMNEDCMRAYYRATEGGTNLSAYCARMLPLFQALQPTITVSAQRLSDQVRAIQRCNMLDQSVLDRLRLEEVRTRPTPASTRNPPVASSAPTLASVPASVGTLAALADTAVDEEDLASGVSDQVKEQLRGALEDAISQYRFTSDSRPRLPRLPTHRRNLALMGALNALLAPYLRASEDLVDTHSILYCGAIAACRVARVKFPDTNRAPRTAGGVPAWQVRIERRINTFRTLIAKLICFRRGNNRPRVMRFVTQAFAGTDIRPQHYLANVTERIDYLKQKVYAWANRIRRYRERVDRYWQNRLFQSDQRKVYRGWEETDQRVSDGQRPDANAMINFWRGIWSVPVNHTEGDWMRVVERECESIEPMGSILIDPVDVSCAIRMAQNWKSPGPDGLHNFWIKWIRCSHDRLATQFQEALELGSLPSFMTTGVTFLLHKSGSTTEAKNYRPITCLPTIYKLLTSILRNKINAHIVANNVLAHAQNGCRVGSRGTKELLLIDTAISQQVRRNRGALSAAWIDYKKAYDSVPHSWLERVLELYKIDTTLKSFLCACMRQWTTVLRQPGGGDGTSGPQDLIRIERGIFQGDSFSPLWFCLALNPLSTLLRDSGLGYRLRRDGQVISHLLYMDDLKLFTPKRQDLVELLKITDVFSSAIRMEFGVDKCAVMHVQQGKVVNSPNLQLSEVMTLRSLSEAETYKYLSMSESLGISVENIKKSVKERFFCRLTKVLNSLLSGGNKVRAFNGWVMPLLIYSFGILRWTQTELDALDRRVRQLLTSHRMLHPRSSVMRLYIPRKWGGRGFLNAKNLHNREVCSLRDFFRNSESGMHRDVVAVDRGLTPLSLANENWRKPSVLSIEDRRDVWKGKELHGRFYRALTGPDVDLLSSVNWLRFGDLFGETEGFACAIADEVIKTNNYRKYIMKDGTVDICRACHRPGESLRHIISGCSHLANGEYLHRHNQVARIIHQQLALRYGLVESEVPYYKYAPAPVHENGRALLYWDRSIITDRTIVANKPDIVLVDRSQRRAVLVDITIPHDENLVKAEKDKLSKYLDLAHEVTAMWDVDSTIIVPIVVSVNGLIAKSLDQHLKRLSLDGWVKGQMQKAVILDTARIVRRFLTLQP

SEQ ID NO: 5219 - protein, 1212 aa, Agriopis aurantiaria
MITRSRTKQADTKSARLPSPPASSSSPSTSSGEDEYHTTREASGSSSDTSGPGTPPPPPPARRGRPPLPARLGLVGHSATRPAPATGGVVRRMRWSTIMNEDCMRAYYRATEGGTNLSAYCARMLPLFQALQPTITVSAQRLSDQVRAIHRCKLLDDSVLDRLRQEELRARPIPVSTRDLPVASSAPTLASVPASVVTLAASADPVVDEGDLASGVSDQVREQLRGALEDAISQYRFTPDSRPRLPRLSTHRRNLALMGALNALLAPYLRASEDLVDTHSILYCGAIAACRVARVKFPDTNRAPRTAGGVPAWQVRIERRISTFRTLIAKLVCFRRGNNRPRVMRFVTQAFAGTDIRPQQYLANVTERIDYLKQKVYAWANRIRRYRERVDRYWQNRLFQSDQRKVYRGWEETDQRVSDGQLPDASAMINFWRGIWSVPVEHTEGDWMRVVERECESIEPMESILIDSIDVSCAIRTAQNWKSPGPDGLHNFWIKWIRCSHDRLATQFQEALELGSLPSFMTTGVTFLLHKSGSTTEAKNYRPITCLPTIYKLLTSILRNKINAHIVANNVLAHAQNGCRVGSRGTKELLLIDTAMSQQVRRNKGALSAAWIDYKKAYDSVPHSWLERVLELYKIDTTLKSFLGACMRQWTTVLRQPGGGDGAFDPQDLLRIERGIFQGDSFSPLWFCLALNPLSTLLRDSGLGYRLRRDGQVISHLLYMDDLKLFTPKRQDLVELLKITEVFSSAIRMEFGVDKCAVMHVQRGKVVNSPNLQLSEVMTLRSLSEAETYKYLGMSESLGISVENIKKSVKERFFCRLTKVLNSLLSGGNKVRAFNGWVMPLLIYSFGILRWTQTELDALDRRVRQLLTSHRMLHPRSSVMRLYIPRKWGGRGFLNAKNLHNREVCSLRDFFRNSESGMHRDVVAVDRGLTALSLANENWRKPSVLSIEDRRDVWKGKELHGRFYRALTGPDVDLLASVNWLRFGDLFGETEGFACAIADEVIKTNNYRKYIMKDGTVDICRACHRPGESLRHIISGCSHLANGEYLHRHNLVARIIHQQLALRYSLVESEVPYYKYAPAPVLENGRALLYWDRSIITDRTIVANKPDIVLVDRSQRRAVLVDITIPHDENLVKAEKDKLSKYLDLAHEVTAMWDVDSTIIVPIVVSVNGLIAKSLDQHLKRLSLDGWVKGQMQKAVILDTARIVRRFLTLQP

SEQ ID NO: 5220 - protein, 1211 aa, Agriopis aurantiaria
MITRAKTRAAESNARLPPPPASSSSPSTSSGEDEYHTTREASGSSSDTSGPGTPPPPPPARRGRPPLPARLGPVGHSATRPAPATGGVVRRMRWSRIMNEDCMRAYYRATEGGTNLSAYCARMLPLFQALQPTITVSAQRLSDQVRAIQRCNMLDQSVLDRLRLEEVRTRPTPASTRSPPVASSAPTLASVPASVGTLAALADTAVDEEDLASGVSDQVKEQLRGALEDAISQYRFTSDSRPRLPRLPTHRRNLALMGALNALLAPYLRASEDLVDTHSILYCGAIAACRVARVKFPDTNRAPRTAGGVPAWQVRIERRINTFRTLIAKLICFRRGNNRPRVMRFVTQAFAGTDIRPQHYLANVTERIDYLKQKVYAWANRIRRYRERVDRYWQNRLFQSDQRKVYRGWEETDQRVSDGQRPDATAMINFWRGIWSVPVNHTEGDWMRVVERECESIEPMGSILIDPVDVSCAIRMAQNWKSPGPDGLHNFWIKWIRCSHDRLATQFQEALELGSLPSFMTTGVTFLLHKSGSTTEAKNYRPITCLPTIYKLLTSILRNKINAHIVANNVLAHAQNGCRVGSRGTKELLLIDTAISQQVRRNRGALSAAWIDYKKAYDSVPHLWLERVLELYKIDTTLKSFLCACMRQWTTVLRQPGGGDGTSGPQDLIRIERGIFQGDSFSPLWFCLALNPLSSLLRDSGLGYRLRRDGQVISHLLYMDDLKLFTPKRQDLVELLKITDVFSSAIRMEFGVDKCAVMHVQQGKVVNSPNLQLSEVMTLRSLSEAETYKYLGMSESLGISVENIKKSVKERFFCRLTKVLNSLLSGGNKVRAFNGWVMPLLIYSFGILRWTQTELDALDRRVRQLLTSHRMLHPRSSVMRLYIPRKWGGRGFLNAKNLHNREVCSLRDFFRNSESGMHRDVVAVDRGLTPLSLANENWRKPSVLSIEDRRDVWKGKELHGRFYRALTGPDVDLLSSVNWLRFGDLFGETEGFACAIADEVIKTNNYRKYIMKDGTVDICRACHRPGESLRHIISGCSHLANGEYLHRHNQVARIIHQQLALRYGLVESEVPYYKYAPAPVLENGRALLYWDRSIITDRTIVANKPDIVLVDRSQRRAVLVDITIPHDENLVKAEKDKLSKYLDLAHEVTAMWDVDSTIIVPIVVSVNGLIAKSLDQHLKRLSLDGWVKGQMQKAVILDTARIVRRFLTLQP

SEQ ID NO: 5221 - protein, 1208 aa, Ennomos fuscantarius
MILRSKTKTADNKCARLPPLPVSSSPSSSSGDEYATPPDTTASSDDDGLPSPPPPPPPARRGRPPLPARLGPVGQPAPRPAPATGGVVRRMRWTQTMNENCMRAYYGATEGGSSLTAYRDRMLSLFQGLEPSVSVSAQRLSDQVRAIHRCKLLDQSALDRLRLETLPIPATSPSPRVLSAALPDPGPIVGPPLVTPLGGPVIDGEESVSDSVSTQVNEQLRSALEDAILRYRSTPTSRPRLPRLPTNRRNLVLMGALNTLLGPYLRTSEDLVDTHSILYCGAIAVCRVARVKFPDTDRAPRPADGAPAWQVRIEKRITTFGTLIAKLVCFSRGNHRPRVMRFVTQAFAGTGIRPQDYMACVTERIDFLKQKVYAWASRICRYRERVDRYHMNRLFQSDQRKVYRDWEGTGQRVVDGQLPDANVMNEFWRSIWSVPVDHSEGDWIRVVKHVCEPIESMGSITIDPEDISCAIRTAQNWKSPGPDGLHNFWIKWIRCSYPCLAIQFQEALEAGSLPKFMTTGITFLLHKSGSTMEAKNYRPITCLPTLYRLLTSILRTKINSHITANNILASAQNGCRVGSRGTKELLLIDTAICQQVRRNRGALSTAWIDYKKAYDSVPHSWLKRVLELYKINATLRSFLSACMGQWTTVLRPPGGGDSVSDPQNFIRIERGIFQGDSLSPLWFCLALNPLSTLLGDSGLGYRLRRGGEIISHLLYMDDLKLFAPQRPQLMKLLKITENFSNSIKMEFGVDKCAVMHVHGGKVVNSTNLQLSETMTLRSLSESETYKYLGMSESLGISVGDVKQSVKERFFCRLTKVLNSLLSGGNRARAFNAWVMPLLMYSFGMLGWTQTELDALDRKVRQVLTSHRMLHPRSSVMRLYIPRKWGGRGFLNAKNLHNREMYSLREYFLSNECGMHRDVVAVDKGLTPLSLANENWRKPVVLSTDDRRDVWKGRGLHGRFYRALTGPDVDLHASVNWLRFGDLFGETEGFVCAIADEVIKTNNYRKYIMKDGTVDICRACRRPGESLRHIISGCSHLANGEYLHRHNLVARIIHQRLALQYGLVESEVPYYKYTPGPVLENGRALLYWDRSVIADRTIVANKPDIVLIDRSQRRAVLVDIAIPHGENLVKAEKDKLSKYLDLAHEVTAMWSVDSTSIVPIVVSANGLIAKSLDQHLERLSLDGWIKGQIQKAVLLDTARIVRRFLTLEP

SEQ ID NO: 5222 - protein, 1213 aa, Erannis defoliaria
MITRSKKRNAAVQHARPTPPPVPSSSPSSSSPSEEEFHTCGTSSSSEDVSGPRTLTPPIPVRRGRPPLPARLGPAGQPASRPALAAGGVVRRMRWSQTNNENCMRAYYGATEGGTNLTAYRVRMLSLFQTLEPTVTVSAQRISDQVRAIQRLNLLDQPLLDRLRLEVQSARPTPASTRDLDVVSSAPTLASVPTSAATLATSADPVLDEGDCTGMSVSTQVSEQLRRALEDAIGQYRFALNSRPRLPRLPTHRRNLALMGALNALLAPYLRASEDLTDTHSILYCGAIAACRVARVKFPDTNRAPRPAGDVPAWQLRIERRISTFRTLIAKLICFSRGNNRPRVMRFVTQAFAGTGIRPQQYMASVTERIDYLKQKVYAWANRIRRYRERVDRYWQNRLFQSDQRKVYRNWEGTEQRVSDGQLPDASAMTNFWRGIWSVPVEHTEGDWMRVVERECESIEPMGSILIDPVDVSCAIRTAQNWKSPGPDGLHNFWIKWFRCSHDRLATQFQEALELGSLPSFMTTGVTFLLHKSGSTTEPKNYRPITCLPTIYKLLTSILSTKINAHIVANNVLAPAQNGCRVGSRGTKELLLIDMAISQQVRRNKGALSAAWIDYKKAYDSVPHSWLERILELYQIDTTLKSFLGACMRQWTTVLRQPGGGNGSSDSQDLIRIERGIFQGDSLSPSWFCLALNPLSTLLKDSRLGYRLRRGGEVISHLLYMDDLKLFAPKHQDLLELLKTTQVFSSAIRMEFGVDKCAVMRVQRGKVVNSPDLQLSEIMTLRSLSEAETYKYLGMSESLGISVVDIKKSVKERFFCRLTKVLNSLLSGGNKARAFNGWVMPLLIYSFGILRWTQTELDALDRRVRQLLTAHRMLHPRSSVMRLYIPRKWAGRGFLNAKNLHNREVCSLRDYFLNNECGMHRDVVTVDKGLTPLSLANENWRRPSVISTDDRKEVWKSKELHGRFYRALTGPDVDLLASANWLRFGDLFGETEGFACAIADEVIKTNNYRKYIMKDGTVDICRACHRPGESLRHIISGCSHLANGEYLHRHNQVARIIHQQLALQYGLVESEVPYYKYAPAPVLENGRALLYWDRSIITDRTIVANKPDIVMVDRSQRRAVLVDVTIPHDENLVKAEKDKLSKYLDLAFEITAMWDVDSTIIVPIVVSANGLIAKSLDQYLKRLSLDGWVKGQIQRAVVLDTARIVRRFLTLQP

SEQ ID NO: 5223 - protein, 1218 aa, Erannis defoliaria
MITRSKNKAKTSTAETTNARPPPLPAPSSPSASSGDDVFLTPRESSVSSSDSDVSGPRTPAPPPPARRGRPPLPARLGPAGQPASRPALAAGGVVRRMRWSQTNNENCMRAYYGATEGGTNLTAYRVRMLSLFQALEPTVTVSAQRLSDQVRAIQRLNLLDQSLLDRLHLEAQSARPTPASTRDLDVASSAPTLTSVPTSAATLATSTDPVLDEGDCTGMSVSTQVSEQLRRALEDAIGQYRFTLNSRPRLPRLPTHRRNLALMGALNALLAPYLRASEDLTDTHSILYCGAIAACRVARVRFPDTNRAPRTAGDVPAWQVRIERRISTFRTLIAKLICFSRGNNRPRVMRFVTQAFAETGIRPQQYMASVTERIDYLKQKVYARASRIRRYRERVDRYRQNRLFQSDQRKVYRNWEGNEQRVSDGHLPDASAMTNFWRSIWSVPVEHTEGDWMRVVERECEFIEPMGSILIDPVDVSCAIRTAQNWKSPGPDGLHNFWIKWFRCSHDRLATQFQEALELGSLPSFMTPVVTFLLHKSGSTTEPKNYRPITCLPTIYKLLTSILSTKINTHIVANNVLAPAQNGCRVGSRGTKELLLIDMAISQQVRRNKGALSAAWIDYKKAYDSVPHSWLERILELYKIDTTLKSFLSACMRQWTTVLRQPGGGNDSSDPQDLIRIERGIFQGDSLSPSWFCLALNPLSTLLKDSGLGYRLRRGGEVISHLLYMDDLKLFAPKHQDLLELLKTTQVFSSAIRMEFGVDKCAVMRVQRGKVVNSPDLQLSEIMTLRSLSEAETYKYLGMSESLGISVVDIKKSVKERFFCRLTKVLNSLLSGGNKARAFNGWVMPLLIYSFGILRWTQTELDALDRRVRQLLTAHRMLHPRSSVMRLYIPRKGGGRGFLNAKNLHNREVCSLRDYFLNNECGMHRDVVTVDKGLTPLSLANENWRRPSVLSTDDRKDVWKSKELHGRFYRALSGPDVDLLASVNWLRFGDLFGETEGFACAIADEVIKTNNYRKYIMKDGTVDICRACHRPGESLRHIISGCSHLANGEYLHRHNQVARIIHQQLALQYGLVESEVPYYKYAPAPVLENGRALLYWDRSIITDRTIVANKPDIVMVDRSQRRAVLVDVTIPHDENLLKAEKDKLSKYLDLAFEITAMWDVDSTIIVPIVVSANGLIAKSLDQYLKRLSLDGWVKGQIQKAVVLDTARIVRRFLTLQP

SEQ ID NO: 5224 - protein, 1215 aa, Biston betularia
MWTRSRTAAASGLHDAHIPSPPAPSTPSASSGDEEFATPLATSASSSSSDVSGPRTPAPPPPARRGRPPLPARLGPAGQSASRSALAAGGVVRRMRWSQTNNENCMRAYYGATEGGINLSAYRVRMLPLFQALEPTVAVSTQRLSDQVRAIQRLQLLDQSVLDRLRLEALPARPTPVSTRDSPVASSAPTLVSVPTSMATLATPTDPVVDVGECTSMGVCSQVSEHLRRTLEDAICQYRFAPDSRPRLPRLPTHRRNLAVMGALNALLAPYLRASEDLTDTHSILYCGAIAACRVARVKFPDTNRAPRPAGGVPAWQLRIERRISTFRALIAKLICFSRGNNRPRVMRFVTQAFAGTGIRPQHYIASVTERIDYLKQKVYAWANRIRRYRERADRYWQNRVFQSDQRKVYRDWEGTGQRVSDRQLPDTSVMTEFWRGIWSLPVEHTEGDWMRVVERECESIESMGSVLIDPVDVSCAIRTAQNWKSPGPDGLHNFWIKWIRCSHDRLATQFQEALELGSLPCFMTTGVTFLLHKTGSPTEAKNYRPITCLPTIYKLLTSILRTKINAHVVANNVLAPAQNGCRVGSRGTKELLLIDMTISQQVRRNKGALSTAWIDYKKAYDSVPHSWLERVLELYKIDTTLKSFLGACMRQWTTVLRQPGSGDGSSEPQDLIRIERGIFQGDSLSPLWFCLALNPLSTLLKESGLGHRLRRGGEVISHLLYMDDLKLFAPKRPDLMELLKTTQVFSNAIKMEFGVDKCAVMHVQRGEVVNCPDLQLSETMTFRSLSEAETYKYLGMSESLGIAVVDIKRSVKERFFCRLTKVLNSFLSGGNKVRAFNGWVMPLLIYSFGILRWTQTELDALDRRVRQQLTTHRMLHPRSSVMRLYIPRKLGGRGFLSAKNLHNREVCSLRDYFRDNECGMHRDVVAVDKGLTPLSLANENWRKPSVLSTEDRKEVWKSKQLHGRFYRVLTGPDVDMLASVNWLRFGDLFGETEGFACAIADEVIKTNNYRKYIMKDGTVDICRACHRPGESLRHIISGCSHLANGEYLHRHNQVARIIHQQLALQYGLVESEVPYYKYAPAPVLENGRALLYWDRSIITDRTIVANKPDIVVVDRAQRRAVLVDITIPHDENLVKAEKDKLSKYLDLAHEITAMWDVDSTIIVPIVVTVNGLIAKSLDQHLERLSLDGWVKGQLQKAVILDTARIVRRFLTLQP

SEQ ID NO: 5225 - protein, 1215 aa, Biston betularia
MWTRSRTAAASGSHDAQIPPPPAPSTPSASSGDEEFATPLATSASSSSSDVSGPRTPAPPPPARRGRPPLPARLGPAGQSAPRSALAAGGVVRRMRWSHTNNENCMRAYYGATEGGINLSAYRVRMLPLFQALEPTVAVSTQRLSDQVRAIQRLQLLDQSVLDQLRLEALPARPTPVSTRDSPVASSAPTLVSVPTSMATLAIPTDPVVDVGECTSMGVCSQVSEHLRRTLEDAICQYRFAPNSRPRLPRLPTHRRNLALMGALNALLAPYLRASEDLTDTHSILYCGAIAACRVARVKFPDTNRAPRPAGGVPAWQLRIERRISTFRTLIAKLICFSRGNNRPRVMRFVTQAFAGTGIRPQHYLASVTERIDYLKQKVYAWANRIRRYRERADRYWQNRVFQSDQRKVYRDWEGTGQRVSDRQLPDTSVMTEFWRGIWSLPVEHTEGDWMRVVERECESIESMGSVLIDPVDVSCAIRTAQNWKSPGPDGLHNFWIKWIRCSHDRLATQFQEALELGSLPCFMTTGVTFLLHKTGSTTEAKNYRPITCLPTIYKLLTSILRTKINAHVVANNVLAPAQNGCRVGSRGTKELLLIDMTISQQVRRNKGALSTAWIDYKKAYDSVPHSWLERVLELYKIDTTLKSFLGACMRQWTTVLRQPGSGDGSSEPQDLIRIERGIFQGDSLSPLWFCLALNPLSTLLKESGLGHRLRRGGEVISHLLYMDDLKLFAPKRPDLMELLKTTQVFSNAIKMEFGVDKCAVMHVQRGEVVNSPDLQLSETMTFRSLSEAETYKYLGMSESLGIAVVDIKRSVKERFFCRLTKVLNSLLSGGNKVRAFNGWVMPLLIYSFGILRWTQTELDALDRKVRQQLTTHRMLHPRSSVMRLYIPRKLGGRGFLSAKNLHNREVCSLRDYFRDNECGMHRDVVAVDKGLTPLSLANENWRKPSVLSTEDRKEVWKSKQLHGRFYRVLTGPDVDMLASVNWLRFGDLFGETEGFACAIADEVIKTNNYRKYIMKDGTVDICRACHRPGESLRHIISGCSHLANGEYLHRHNQVARIIHQQLALQYGLVESEVPYYKYAPAPVLENGRALLYWDRSIITDRTIVANKPDIVVVDRAQRRAVLVDITIPHDENLVKAEKDKLSKYLDLAHEITAMWDVDSTIIVPIVVTVNGLIAKSLDQHLKRLSLDGWVKGQLQKAVILDTARIVRRFLTLQP

SEQ ID NO: 5226 - protein, 1018 aa, Biston betularia
MVTLATPTDPVVDAGECTSMGVCSQVSEHLRRTLEDAICQYRFAPDSRPRLPRLPTHRRNLALMGALNALLAPYLRASEDLTDTHSILYCGAIAACRVARVKFPDTNRAPRPAGNVPAWQLRIERRISTFRTLIAKLICFSRGNNRPRVMRFVTQAFAGTGIRPQHYLASVTERIDYLKQKVYAWANRIRRYRERADRYWQNRVFQSDQRKVYRDWEGTGQRVSDRQLPDTSVMTEFWRGIWSLPVEHTEGDWMRVVERECESIEFMGSVLIDPVDVSCAIRTAQNWKIPGPDGLHNFWIKWIRCSHDRLATQFQEALELGSLPCFMTTGVTFLLHKTGSTTEAKNYRPITCLPTIYKLLTSILRTKINAHVVANNVLAPAQNGCRVGSRGTKELLLIDMTISQQVRRNKGALSTAWIDYKKAYDSVPHSWLERVLELYKIDTTLKSFLGACMRQWTTVLRQPGSGDGSSEPQDLIRIERGIFQGDSLSPLWFCLALNPLSTLLKESGLGHRLRRGGEVISHLLYMDDLKLFAPKRPDLMELLKTTQVFSNAIKMEFGVDKCAVMHVQRGEVVNCPDLQLSETMTFRSLSEAETYKYLGMSESLGIAVVDIKRSVKERFFYRLTKVLNSLLSGGNKVRAFNGWVMPLLIYSFGILRWTQTELDALDRRVRQQLTTHRMLHPRSSVMRLYIPRKLGGRGFLSAKNLHNREVCSLRDYFRDNECGMHRDVVAVDKGLTPLSLANENWRKPSVLSTEDRKEVWKSKQLHGRFYRVLTGPDVDMLASVNWLRFGDLFGETEGFACAIADEVIKTNNYRKYIMKDGTVDICRACHRPGESLRHIISGCSHLANGEYLHRHNQVARIIHQQLALQYGLVESEVPYYKYAPAPVLENGRALLYWDRSIITDRTIVANKPDIVVVDRAQRRAVLVDITIPHDENLVKAEKDKLSKYLDLAHEITAMWDVDSTIIVPIVVSVNGLIAKSLDQHLKRLSLDGWVKGQLQKAVILDTARIVRRFLTLQP

SEQ ID NO: 5227 - protein, 955 aa, Biston betularia
MGALNALLAPYLRASEDLTDTHSILYCGAIAACRVARVKFPDTNRAPRPAGGVPAWQLRIERRISTFRTLIAKLICFSRGNNRPRVMRFVTQAFAGTGIRPQHYLASVTERIDYLKQKVYAWANRIRRYRERADRYWQNRVFQSDQRKVYRDWEGTGQRVSDRQLPDTSVMTEFWRGIWSLPVEHTEGDWMRVVERECESIESMGSVLIDPVDVSCAIRTAQNWKSPGPDGLHNFWIKWIRCSHDRLATQFQEALELGSLPCFMTTGVTFLLHKTGSTTEAKNYRPITCLPTIYKLLTSILRTKINAHVVANNVLAPAQNGCRVGSRGTKELLLIDMTISQQVRRNKGALSTAWIDYKRAYDSVPHSWLERVLELYKIDTTLKSFLGACMRQWTTVLRQPGSGDGSSEPQDLIRIERGIFQGDSLSPLWFCLALNPLSTLLKESGLGHRLRRGGEVISHLLYMDDLKLFAPKRPDLMELLKTTQVFSNAIKMEFGVDKCAVMHVQRGEVVNCPDLQLSETMTFRSLSEAETYKYLGMSESLGIAVVDIKRSVKERFFCRLTKVLNSFLSGGNKVRAFNGWVMPLLIYSFGILRWTQTELDALDRRVRQQLTTHRMLHPRSSVMRLYIPRKLGGRGFLSTKNLHNREVCSLRDYFRDNECGMHRDVVAVDKGLTPLSLANENWRKPSVLSTEDRKEVWKSKQLHGRFYRVLTGPDVDMLASVNWLRFGDLFGETEGFACAIADEVIKTNNYRKYIMKDGTVDICRACHRPGESLRHIISGCSHLANGEYLHRHNQVARIIHQQLALQYGLVESEVPYYKYAPAPVLENGRALLYWDRSIITDRTIVANKPDIVVVDRAQRRAVLVDITIPHDENLVKAEKDKLSKYLDLAHEITAMWDVDSTIIVPIVVTVNGLIAKSLDQHLKRLSLDGWVKGQLQKAVILDTARIVRRFLTLQP

SEQ ID NO: 5228 - protein, 1215 aa, Biston betularia
MWTRSRTAAASGLHDAHIPSPPAPSTPSASSGDEEFATPLATSASSSSSDVSGPRTPAPPPPARRGRPPLPARLGPAGQSASRSALAAGGVVRRMRWSQTNNENCMRAYYGATEGGINLSAYRVRMLPLFQALEPTVAVSTQRLSDQVRAIQRLQLLDQSVLDRLRLEALPARPTPVSTRDSPVASSAPTLVSVPTSMATLATPTDPVVDVGECTSMGVCSQVSEHLRRTLEDAICQYRFAPDSRPRLPRLPTHRRNLALMGALNALLAPYLRASEDLTDTHSILYCGAIAAGRVARVKFPDTNRAPRPAGGVPAWQLRIERRISTFRTLIAKLICFSRGNNRPRVMRFVTQAFAGTGIRPQHYLASVTERIDYLKQKVYAWANRIRRYRERADRYWQNRVFQSDQRKVYRDWEGTGQRVSDRQLPDTSVMTEFWRGIWSLPVEHTEGDWMRVVERECESIESMGSVLIDPVDVSCAIRTAQNWKSPGPDGLHNFWIKWIRCSHDRLATQFQEALELGSLPCFMTTGVTFLLHKTGSTTEAKNYRPITCLPTIYKLLTSILRTKINAHVVANNVLAPAQNGCRVGSRGTKELLLIDMTISQQVRRNKGALSTAWIDYKKAYDSVPHSWLERVLELYKIDTTLKSFLGACMRQWTTVLRQPGSGDGSSEPQDLIRIERGIFQGDSLSPLWFCLALNPLSTLLKESGLGHRLRRGGEVISHLLYMDDLKLFAPKRPDLMELLKTTQVFSNAIKMEFGVDKCAVMHVQRGEVVNCPDLQLSETMTFRSLSEAETYKYLGMSESLGIAVVDIKRSVKERFFCRLTKVLNSFLSGGNKVRAFNGWVMPLLIYSFGILRWTQTELDALDRRVRQQLTTHRMLHPRSSVMRLYIPRKLGGRGFLSTKNLHNREVCSLRDYFRDNECGMHRDVVAVDKGLTPLSLANENWRKPSVLSTEDRKEVWKSKQLHGRFYRVLTGPDVDMLASVNWLRFGDLFGETEGFACAIADEVIKTNNYRKYIMKDGTVDICRACHRPGESLRHIISGCSHLANGEYLHRHNQVARIIHQQLALQYGLVESEVPYYKYAPAPVLENGRALLYWDRSIITDRTIVANKPDIVVVDRAQRRAVLVDITIPHDENLVKAEKDKLSKYLDLAHEITAMWDVDSTIIVPIVVTVNGLIAKSLDQHLKRLSLDGWVKGQLQKAVILDTARIVRRFLTLQP

SEQ ID NO: 5229 - protein, 1117 aa, Apotomis turbidana
MRWTRVMNENCMRAYYGATEGGINLSAYRDRMLPLFQVFDPTIAVSAQRLSDQVRFIQRRKLLDDATLDRLRLEVLAARAASVPARDPPATSPVPAPAPNLVPGVPLTDPEADVEDYASSVSTQANEQLRRALEEAIGRYRSAPEPRPRLPRLPIHKRNLALMGALDALLDPYLRASEDLADTHSIMYCGAIAACRVARVRFPDTDRAPRTARGVPAWQVRIERRISSFRTLIAKLICFRGGNNRPRVMRYVTQAFAGTGTRPCDYMACVTERIDYLKQKVYAWASRIRRYRERVDRFQQNRLFQSDQRKVYRKWEGADQCVSDGQLPDPTAMINFWRSIWSVPVEHTEGEWMNVVRRECEPIEAMGAVTISPDDVRCAARTIQNWKSPGPDGLHNFWIKWFRSSHERLATQFQDALELGSLPSFMTTGVTFLLHKSGSTTEAKNYRPITCLPTLYKLLTSILRTKINTHIVANNVLAFSQNGCRVGSRGTKELLLIDTTICQQVRRNRGSLSTAWIDYKKAYDSVPHSWLERILELYKIDTALRSLLGACMRQWTTVLRQPGGGDGPPGPQDLIRIERGIFQGDSLSPLWFCLALNPLSTLLKDSGLGCRLRRGGEVISHLLYMDDLKLYAPKRQDLVELLEVTEAFSSAIKMEFGVDKCAVMHVQRGKVVNSANLQLSETMSLRSISEVETYKYLGMSQSLGIADGDIRQALKERFFCRLTKVLNSLLSGGNKARAFNAWVMPLLTYSFGILRWTQTELDALDTRVRQLLTTHRMRHPRSSVMRMYIPRKCGGRGFLNAKDLHNREVCSLREYFLNNECGIHRDVVAVDKGLTSLSLANENWRRPKVLSTDDRRAVWKSKELHGRFYKALTGPDVDLLASVNWLRFGDLFGETEGFVCAIADEVMMTNNYRRYILKDGTVDICRACRRPGESLRHIISGCSHLANGEYLHRHNQVARIIHQQLALRYGLVGSEVPYYKYAPMPVLENGRATLYWDRSIITDRTIVANKPDIVLVDRSKRQAVLVDITIPHDENLVKAEKDKLSKYLDLAHEVTAMWDVDSTSIVPIVVSANGLIAKSLDKHLKRLSLDGWIKGQIQKAVLLDTARIVRRFLSLQP

SEQ ID NO: 5230 - protein, 1117 aa, Notocelia uddmanniana
MQWSQSINENCMRAYYGATDGGTNLSAYRVRMLPLFRALEPAISVSAQRLSDQVSVIQRLKRLDDATLDRLRLEALSARAASVSARDPPATLPAPMPAPDTAAGAPRVDLSTDGDCANQSVSTQADGQLRRALEEAITRYRSTTSSRPRLPRLPVNRRNLALMGALNDLLVPYLRASEDLIDTHSIMYCGAIAACRVARVKFPDADRAPRTTGSVPTWQVRIERRIDTYRTLIAKLICFRGGNSRPRVMRFVNQAFAGTGVRSRDYISCVTERIDFLKQKVYAWASRIRRYRERVDRYQLNRLFQSDQRKVYRKWEGTNHRVSDRQRPDATAMVNFWRSIWSVPVEHTEGAWMDVVKRECESIEPMESVTVSPEDVSCAIRKAPNWKSPGPDGLHNFWLKWFRCSHARLAAQFQQALEIGSLPSPLTTGVTSLLYKSGSITEAKNYRPITCLPTLYKVLTSILRAKINTHIIANNILAPAQNVCRVGSRGTKELLLIDMTICQRVRRNRGTLSAAWIDYKKAYDSVPHSWLRRILELYKVDAVLRSFLVACMGQWTTVLRQPGGGEGPSGPQDSIRIERGIFQGNSLSPLWFCLALNPLSTLLKDSGLGCQLRREGEVISHLLYMDDLKLFAPNKHDLLELLKISEVFSSAIKMEFGVDKSAVMHVQRGKVVNSTNLHISETIALRSLSEAETYKYLGMSQSLGIEGGDIKRAVRERFFCRLTKVLNSFLSGGNKVRAFNAWVMPLLTYSFGILRWTQTELDFLDRRVRVLLTAHRMLHPRSSVMRLYIPRKLGGRGFLNAKDLHNREVCSLRDYFLNSECGMHRDVVAADASFTPLSMANENWRRFKVLSTDDRRAVWKSKELHGRFYKALTGPDVDLLASVNWLRFGDLFGETEGFVCAIADEVIMTNNYRKYILKDGTVDICRACRRPGESLRHIISGCSHLANGEYLHRHNLVARIIHQQLALLYGLVDFEVPYYKYTPAPVLENGRATLYWNRSVITDRTIVANKPDIVLTDRLKRQAVLVDITIPHDENLVKAEKDKVSKYLDLAHEVTAMWDVDSTIIVPIVVSVNGLIAKSLGQHLKRLSLDGWVKGQIQKALLLDTARIVRRFLSLSP
